United States Patent Application Publication US 2004/0123343 A1 - sequence listing, part 53

SEQ ID NO: 197472 - protein, 154 aa, Oryza sativa
  Clone ID: PAT_MRT4530_93226C.1.pep
PDFASADQTVTKSSQANTEKLHRRIVFDLVNEITAQKMNIHCSASQSAKSLQLRKYNGWRLFKDLCTEVDRLQSESSAIKCSEEDGDERMLLVEDPLNGIEDWSFDSESPSTVLEIERLIYKDLIDEVIWDEATGKMQGGQWNLKRQLSFSSTS

SEQ ID NO: 197473 - protein, 86 aa, Oryza sativa
  unsure (1)..(86): unsure at all Xaa locations
  Clone ID: PAT_MRT4530_93227C.1.pep
DPKPWPWYSTPFIHNPMPLLQQQCSQQPTSMILSSHCDTSXQMIQTIQQVIVLNSXHHQMMKMPIQIPYMATWPLSNFQLSSCACC

SEQ ID NO: 197474 - protein, 170 aa, Oryza sativa
  unsure (1)..(170): unsure at all Xaa locations
  Clone ID: PAT_MRT4530_93228C.1.pep
MASINRPIVFXTVCLFLLCNGSLAQQLLGQSTSQWQSSRRGSPRECRFDRLQAFEPIRSVRSQAGTTEFFDVSNEQFQCTXGVSVVRRVIEPRGLLLPHYXTNGASLVYIIQGRGITGPTXPGCPESXYQQQFQQSGQAQLTESQSPSQKLKDEHQKIHRFRQGDVIALP

SEQ ID NO: 197475 - protein, 137 aa, Oryza sativa
  unsure (1)..(137): unsure at all Xaa locations
  Clone ID: PAT_MRT4530_93229C.1.pep
SPRKCRFDRLQAFEPIRSVRSQAGTTEFFDVSNEQFQCTGVAVVRRVIEPRGLLLPHYHXNGASLVYIIQGRGITGPTFPGCPESYQQQFQQSGQAQLTESQSQSQKFKDEHQKIHRFRKEDVIAWPAXVAHWCYND

SEQ ID NO: 197476 - protein, 57 aa, Oryza sativa
  Clone ID: PAT_MRT4530_9322C.1.pep
RIETSKEKIKVTSFFLLVYISNFPLVFNDMKEVETRRNDQGKNFVATHNRIRGTPKF

SEQ ID NO: 197477 - protein, 65 aa, Oryza sativa
  Clone ID: PAT_MRT4530_93230C.1.pep
MERFCKNIPVPRRSRISKTLDRRSRGMAMQYRNCPIAPKRGTVAVPAPKHTTVLISDFDIVLHCS

SEQ ID NO: 197478 - protein, 191 aa, Oryza sativa
  Clone ID: PAT_MRT4530_93231C.1.pep
MASINRPIVFFTVCLFLLCNGSLAQQLLGQSTSQWQSSRRGSPRECRFDRLQAFEPIRSVRPQAGTTELFCVSNEQFLCTGVSVVRRVIEPIGLLLPHYTNGASLVYIIQGRGITGPTFPGCPESYQQQFQQSGQAQLTESQSQSQKFKDEHQKIHRFRQGDVIALPAGVPHWCYNDGEVPAAAIYVPASP

SEQ ID NO: 197479 - protein, 266 aa, Oryza sativa
  Clone ID: PAT_MRT4530_93232C.1.pep
MAAAAADPLVAGATVSSDSDSDSDDLHLLLPNLLPSAATAASDAQLHHFHLPALPSPITVRTLPSLGLTFQLWPSASTLLRVLPASPLLLSRAPTPESPLGILELGSGTGAAGLALAAALPAHAVLSDLPAALPNLRHNASLNAPLLDARGGSVSVVPLPWGDAAAMEAVAAPPPASRFDLVVASDVVYYEALVDPLIETMRFFVKGEVVFVMAHMRRWKRTDKKFFAKARKLFDVEVVHEDPPLEGWRHGPVVYLFTEKKRRDKK

SEQ ID NO: 197480 - protein, 142 aa, Oryza sativa
  unsure (1)..(142): unsure at all Xaa locations
  Clone ID: PAT_MRT4530_93233C.1.pep
RPIVFFTVCLFLLCNGSLAQQLLGQSTSQWQSSRRGSPRECRFDRLQAFEPIRSVRSQAGTTEFFDVSNEQFQCTGVSVVRRVIEPRGLLLPHYTXNGASLVYXIPGRGIXQGPLXPGCPESYQQQFXQQXGQAHLTEVKAK

SEQ ID NO: 197481 - protein, 88 aa, Oryza sativa
  unsure (1)..(88): unsure at all Xaa locations
  Clone ID: PAT_MRT4530_93234C.1.pep
FLHRPPLICGRERSFVRRGLXXPAXARSLVKTXTGKTITLEVESSDTIDNVKAKIXDKEGIPXDQQRLIFAGKQLEDXXTLADYXIQK

SEQ ID NO: 197482 - protein, 168 aa, Oryza sativa
  unsure (1)..(168): unsure at all Xaa locations
  Clone ID: PAT_MRT4530_93235C.1.pep
QSTSQWQSSRSGSPRGCRFDRLQAFEPIQSVRSQAGTTEFFDVSNELFECTGVSVVRRVIXEPRGLLLPHYTNGASVVYIIQWRGITRPTFPGCPETYQHQFQQSWQAQLTQSQSQSHKSKDEHRKIHRFTQGDVIALPAGVAHWCYNDGEVPVDAIFVTDINNGANE

SEQ ID NO: 197483 - protein, 404 aa, Oryza sativa
  Clone ID: PAT_MRT4530_93236C.1.pep
HEGGPEEHRCAVRRGEAMAPLSVSAILAPSPPPAQAAARASPRRAPASAAPVAAAISTALLALTPAAHAAAFSKEDVAGSVTKVVDTVDQVIGVGGKVAEQSAGVLKALGEAAKPALPALKSAGEQALKLASPVVSGASKQATEALQGAGVDPAPVLSAAKTVADAAQQGTKVIDAAKPIASATVETIGSLGSADYVVVAGAAFLAYLLLPPAWSLLSFTLRGYKGDLTAAQALDMVTSQDYVLIDVRTEKDKAKTGVPQLPSNAKNKLISIPLEELPSKTKSMVRNAKQAEAEIAALKISYLKRIGKGSNVIIMDSYCDSSKIVAKTLNSVGFKNCWVMAGGFSGRKGWAQSRLGTDSYNLSVVEVVTPSRVIPAAADRLVTASSSASRTTTSRKLLPGSVDG

SEQ ID NO: 197484 - protein, 141 aa, Oryza sativa
  Clone ID: PAT_MRT4530_93237C.1.pep
MASINRPIVFFTVCLFLLCNGSLAQQLLGQSTSQWQSSRRGSPRECRFDRLQAFEPIRSVRSQAGTTEFFDVSNEQFQCTGVSVVRRVIEPRGLLLPHYTNGASLVYIIQRRGITRPTFPGCTEFYQQQLQQLCQAQLTES

SEQ ID NO: 197485 - protein, 171 aa, Oryza sativa
  Clone ID: PAT_MRT4530_93238C.1.pep
LAAGEEPGRGGRGGSGGRHGGERRHGIGLVGGEHGGPTLLDRAVHVAAEAREEGPRGVEVGRGDGEVGGGGGGGGDGNGRGREGERVEGGGGDQDGKGSAASAVLAAAAGTEGPPNSTPPSVAPPPVARALLLPRRPPAAPSPTADASPFAGHRRPPPLPQFNVRPTWVPR

SEQ ID NO: 197486 - protein, 147 aa, Oryza sativa
  Clone ID: PAT_MRT4530_93239C.1.pep
MASINRPKVFFKVCLFLLGKGSLAQQLLGQSTSQGQSSRRGSPKKCRFNRLQEFEPIRRGRSQVGTTEFFNVSKEKFQCTGVSVVRRVIEPKDLLLHHYTKGASLEYIIQGRGITGPIFPGCPESYQQQFQQSGQAQLTESQSQSQK

SEQ ID NO: 197487 - protein, 660 aa, Oryza sativa
  unsure (1)..(660): unsure at all Xaa locations
  Clone ID: PAT_MRT4530_9323C.1.pep
MSRALYRGASGIGGKPVAGYDAADEARYDPKEPSENGIGGAGGRGRKRHLAVAAVKIGVLVLAAAALVGSVAWAGSLYAGRGAAAAAAAAAASRGYRRLQEQLVTDLLDIGELAGGGVRAREAEVCVPEYENYVPCYYNVSDAVDVADLGGGVVISYERQCSREGKIACLVAPPRSYRIPVRWPSGKGFIWKDNVRISGQEFSSGSLFKRMMVEEDQISFPSDAHMADGVEDYAHQIAEMIGLRNEFNFNEAGVRTVLDIECGFGTLGAHLFQRDLLTMCIANYEASGSQVQITLERGIPAMIGSFASKQLPYPYLSFDMVHCAKCNIEWDKNDGGFLVEVDRLLRPSGYFVWTSSLNTHRALRDKENQKKWRTIRDFADSLCWEMLSQQDETIVWKKTNKLDCYSSRKSGPVLCTHDPESPYYQPLNPCIAGTRSQRWISIEHRTTWPSQSRLNSTELDIHGVHSEDFAENTANWDSMVRNYWSLLSPLIFSDHPKRPGDEDPQPPFNMLRNVLDMNAHFGGFNAALLKAGKSVWVMNVVPTNAPNYLPLIFDRGFIGVQHDWXKHFQLIQEHMIWSMLMAFYHLRSTKSIDVLLLIYSWKLIASYVQXGWVIIRDTAPLIEAARSVVTQLRWDARILDLDIASDEKLLVCQKPFIRKQ

SEQ ID NO: 197488 - protein, 132 aa, Oryza sativa
  unsure (1)..(132): unsure at all Xaa locations
  Clone ID: PAT_MRT4530_93240C.1.pep
SLNNLASLNRPIVFFTVCLFLXLCDGSLAQQLLGQSTSQWQSSRRGSPRGCRFDRLQAFEPIRSVRSQAGTTEFFDVSNELFQCTGVSXVVRRIIEPRGLLLPHYTXNGASXXYIISKGRGITGADFSKACP

SEQ ID NO: 197489 - protein, 726 aa, Oryza sativa
  unsure (1)..(726): unsure at all Xaa locations
  Clone ID: PAT_MRT4530_93241C.1.pep
TSFQFQPNFKFWRELNTSLEVFCASRYDAPPSWAFPNPRLRAAYAALQAWKQTAIFSDPSNFTASWVGANVCAYNGVYCAPSPGYGGGGGGGLVVAGIDLNHADIAGYLPASLPLGLPDLALIHLNSNRFCGVVPDTFRRLRLLHELDLSNNRFVGAFPEVVLALPSLRYLDLRFNDFEGSIPPALFDRPLDAIFLNSNRLRNPIPANLGNSPASVVVLAHNNLGGCIPPSIGKMADTLNEIVLIADELTGCVPTQVGLLRKVTVFDVSDNHLQGPIPASVAGMAAVEQLDVARNLFEGAVPAGVCGLASLKNFTYTDNFITSRPGCGVATADGVWNCIXGAPGQRPPSQCAAAAAHPFDCSKAQCQAASYTPTPGGSPGRGGQGPPAPVSSPPRRRGPYPQPPSSSPTPSYPSPSSSYPAPPGSNTPSYPSPPSSATTPSSHSPPGGSSSTTPSYPSPNGGKPSTPSHPSPPGSTTPSYPSPPSSSTTPSYHSPPQGHTTPSHPSPPSSSTAPPSHSPPQSTPTHPSYPSPPVTYTPPPPTSADRPDVRFAPPPGSYGPIPSTPPSSGSPPSPSSGYQPPSGQPGASPPTQHVPGAGTPTTTPPSHSHPSTPPSPSGPSFHPPPTPHNCSPPSHGSSTGGGHGGGHPPSTSTPPGGKLPFPPVYGVSYASPPPPVKPSDPSSLRISVSVSSSVELVRGCKAFSLAGFTPCSSSSFEMKHFSSEGW

SEQ ID NO: 197490 - protein, 142 aa, Oryza sativa
  unsure (1)..(142): unsure at all Xaa locations
  Clone ID: PAT_MRT4530_93242C.1.pep
RSSSYISWGPRGVFTACSGGSRDGSLAQQLLGQSTSQWQSSRPGSPRGCRFDRLQAFEPGAAGRSQAGTTEFFAVSNELFQCTGVSVVRRVIEPRGLLLPRYTNGASLVYIIQGRGVTGPTFPGCPGTYQRQVQXSGQAQLT

SEQ ID NO: 197491 - protein, 141 aa, Oryza sativa
  Clone ID: PAT_MRT4530_93243C.1.pep
MPAGLILEPARKTINRAFAWKLSHSLSSSGAQRRPSPDTGDSPTSTPPGADATWEHGCRCNKGCSAWAPSSLAPPAKWRLGEGLGAKRCKGPRGMTWHPEAPTPPGRSSGSRAAGAGPGPGPISPTVAPGTISDIGLLRSV

SEQ ID NO: 197492 - protein, 157 aa, Oryza sativa
  unsure (1)..(157): unsure at all Xaa locations
  Clone ID: PAT_MRT4530_93244C.1.pep
MASINRPIEGFTVCLFLLCNDSLAQQLLSQSTSQWQSSSSWQSNENSRFDXLQAFEPILSERSQAGTTEFFDVSNEQFQCTGVSVARRVIEPRGLILPHYTNGACLVYIIQGRGVTGPTFPGCPEFYQLQIQQSGQAQLTESQSQSQQFKDEHQKIH

SEQ ID NO: 197493 - protein, 67 aa, Oryza sativa
  Clone ID: PAT_MRT4530_93245C.1.pep
KGKRNFPQKLIHIFKQHFSQHMLIVEHTSNHLNLLIHHYYFYQTYVPKSKHILTTKNTNILPVSFTQ

SEQ ID NO: 197494 - protein, 195 aa, Oryza sativa
  unsure (1)..(195): unsure at all Xaa locations
  Clone ID: PAT_MRT4530_93246C.1.pep
FFFFFFLYMMGVLISYILEQREYTRESXPQLKASSILLTEIIKILPYCIPVVLHHIAGIHTHWSLLIQHAKNNLFAIFTPTQHLAAPLLQQAPYHHQHXPPWWCARREAACTQPXHCPQGKRNTSXSSMALGAHSMPXSSRSKLXNTKILARPTLXHDXAMPLPXRTLTPPXRPAAQASDRXPHATTPPCPRRPA

SEQ ID NO: 197495 - protein, 61 aa, Oryza sativa
  Clone ID: PAT_MRT4530_93247C.1.pep
MPKEARTEPGAVQPKLVHNTTGGPGLLREAGLTAAIGPIRPTVWGQFDWRYVADKTGRVQF

SEQ ID NO: 197496 - protein, 99 aa, Oryza sativa
  Clone ID: PAT_MRT4530_93248C.1.pep
MEKRQSLLVIPTKRGGSWWNHYGPILPTDLCYTGFKQVKFTSLQISDDVVTKVIIMHIFSLMLIIRTKSSSSTSSSPMDWELGHGFGELVGDDWWLDWE

SEQ ID NO: 197497 - protein, 121 aa, Oryza sativa
  Clone ID: PAT_MRT4530_93249C.1.pep
MGGPIRPNLFGAKGNRHQGTGGAKSRPARPRAGGGIGPPAAPVGNVERRRAARQREKGGGGGLTKRRGNRRKRPREEGAGRLPGEKTRAAYPAVSNEGEGAAGVRGSAANAVEPVAWLGGG

SEQ ID NO: 197498 - protein, 128 aa, Oryza sativa
  Clone ID: PAT_MRT4530_9324C.1.pep
MAAAAGDGEDAKATRQPEQQPEAAAAEAGVAAYGGGVIAKLEEQWRKTKEHAETYPYVWGSYILVYGGLAAYLTWRWCKLRRTEDRVRGLQARLRQLAAAEESQAASTPPPPPQQPPLSGPGKPTSGP

SEQ ID NO: 197499 - protein, 257 aa, Oryza sativa
  Clone ID: PAT_MRT4530_93250C.1.pep
MAEIGTVREGLYAGGQAGEKLTSKTTSIIASIIISFARVIVIFIPKVTIILIVINDILIMGDTGGDHHRLLLTPALLPPPLRCRPSRRRKTHGYKDGAGPSNSLEVAGSVLMTPARSRQRRRRGREQRRRRGQIHGGLCQIWSRRRWRKGRMRWQAARAQERWRWGGGYCNGRSQSLPELAPLGRSRGHEVALKAPSRHGGHGLKRAATSITVGDMQGSFLGAGVGLWSQSWFVGVTKLGNDDMLHSLSRGVVVGCE

SEQ ID NO: 197500 - protein, 108 aa, Oryza sativa
  Clone ID: PAT_MRT4530_93251C.1.pep
RTRGLGCNEGLAIAMGCNMSEVCIASDCLEVIRSISKKPRCQYLAVLNDIEARRKHFAKVEFRHENQACNFDAHNLAKFASTLQEGCYLWFSNPPCNMNRNVNVDSNK

SEQ ID NO: 197501 - protein, 1004 aa, Oryza sativa
  Clone ID: PAT_MRT4530_93252C.1.pep
MAEAKGKPTSTKKGRKAAASAVAVGDDIDSLKSDVASFASSLGFLGAAAASSGFDDSDFRKSGPIIPPKTSKSAQTTDAPPNPKPTTTTTKKPHPLDIHGTNATTKSVSGAVTTNYPLMKATALSGQWYADAGELEASVLGARKQVLPSVGLQEMQRISEGKRQLAEKLMAQYTVEYDMVKRGSGDLKLLEISAKSGTSADKVSAFTCLIEDNPIANMRALDSLLGMVTSKVGKRYAFTGFDALKELFLKRVLPDRKLKSLIQHPLDILPETKDGYSLLLFWYWEDCLKQRYEKFVIALEDALKDMLPNLKDKAMKTVFILLKEKAEQERRLLTALVNKLGDPERRAASSAAYLLTSLLSAHPNMKMVVIDEVDSFLFRPHVGLRAKYQAVNFLSQIFLTSKGDGPKIAKRLVDVYIALFKVLMSCSRATEGVKHSKYGKKTNENGKKEKGNDFNSHVKHEDPCAGSDLEMDSRILSALLTGVNRALPYVASSEVDDIVEVQTPILFRLVHSVNFNVGVQALMLLYQISTKNQIASDRFYRALYAKLLSPASVTSSKPELFLGLLVKAMKNDVMLKRVAAFAKRLLQVALQRPPQYACGCLFILSEVLKAKPPLWAIVLQNESVDDGIEHFEDIVENTDCPAITSRTTDKCNDILATLEKCNSDAEDACDTIECVSPISSGEKDGKGTSAEGLTLQASYNPRHREPSYCNADHASWWELTALALHVHPSVSTMARTLLSGNNIVYSGDPLTDLSLPAFLDKFMEKKPKGNRIAEGKWHGGSQIAPAKKLDQSHHLIGEELLELVEKEVPPEDVVFHRFYMNKTGPIKPKAKKKTAVLDEDTGELFADDVDDASDESDDEMQELGIGSIEDGEYDYDNLDATTFEEEGDLLRYDSDVELHDISDDISSGADSDTEALEGANHSDGNDSDGEEPVQGQKRKHGAKSGASPFAKLEDYEHLMDGEAEKPTFKKGRKHRVTRDSKEKRKGLSSKEKSGSRKKRSKRSE

SEQ ID NO: 197502 - protein, 254 aa, Oryza sativa
  Clone ID: PAT_MRT4530_93253C.1.pep
MAEIGTVREGLYAGGQAGEKLTSKTTSIIASIIISFARVIVIFIPKVTIILIVINDILIIRRKTHGYKDGAGPSNSLEVAGASGGGLGAGVATVPDFVSLARSGPHSVWPPSRGQRRQPKVEARKVDGRRRGREQRRRRGQIHGGLCQIWSRRRWRKGRMRWQAARAQERWRWGGGYCNGRSQSLPELAPLGRSRGHEVALKAPSRHGAPPPMASSDVVAERSMGRMEAVPCRGEWLDGVQSDVVTLPELWAMA

SEQ ID NO: 197503 - protein, 75 aa, Oryza sativa
  unsure (1)..(75): unsure at all Xaa locations
  Clone ID: PAT_MRT4530_93254C.1.pep
MAASALHQTTSFLGTVPXRDELVRRVGXSGGRITMXRTVKSAPQSIWYGPDRXKYXXPFXEQTASYLTGEFXGDY

SEQ ID NO: 197504 - protein, 1193 aa, Oryza sativa
  Clone ID: PAT_MRT4530_93255C.1.pep
MEPGVSIESGSAIRVAVLPVGGPISPARLRDYAALVARHARVDLASLRPYYSEHQKSPFAHQPWGGGCLRLKFVLGGCVPSPWEDFQSSRKVLAVVGICHLPSSPDLGRVAADFVDAARSYPSALASRCFAFCPTDAQLVQKKRDNIIMFPPSDQQSLELHMLTMIQDLSASLLMEFEKWVLRAESTGTILKTPLDSQSSLGSEEVIKAKKRRLGRAQKIIGDYCLLAGSPADANAHYATAIELARLTGDVFWHAGALEGSVCALVVDRMAESDPVLEDEVKFRYYTIIQLYRRATLQDNAQRVSPVSFELEAALKLARYLCRRQCAKEVSDLLMGAADGAKALIDASDRLILYIEIARLFGTLGYKRKAAFFSRQVAQLYLQQDNAYAAMSAMQVLTTTTTAYHVQSRKTSKMDHGLLKLYWLSLFDSGNTDPGKLHPQSVVSLFESQWSTLQMVVLREILMSSIRAADPLSSWSAAARLLRLHSFPLHPSQREIVKRNPNKKEWWTGGGPSGPFIYTPFTKGGTSGTSKQEVNWIVGEPVQVMVELANPCSFDLIVESIYLSVHSGNFDAFPVSVNLPPNTSKLVLLSGIPTQVGQVSIPGCIVHCFGVITEHLFKEVDCLLLGAAQGLVLSDPFRCCGSSKFKSVNFPSISVVPPLPLLVANVVGGDGSILLYEGEIRDVLITLTNAGTVPVEEANVALSGKNQDSVISIAHSTWKSALPIKPGGEVTFAVTLRAWHLSPTDLEADGSRSPANSRRIAREGSNPFLDIHYAGPSGNSESNDVSLPPGRRLVVPLNICVVQGMRLVRARLLSMELPARFTDAHLRSVSSKDNLSNGSDAIRNDISLLKIDPYKGSWDLRLLELELFNPTDVVFDVDVSVHLDGTSVEQKILPEDKTASSACHKTRIDRDYSARVLIPLEHFKLPVLDTSFFVKENGSDEPLGSRAATLAEKNAKAELNASINNLISKIKVKWHSGRNSSGELNIKDAIQTALQASIMDILLPDPLTFSFRHAKDGTTAKTDSSKEPGDGSSRSADESVLRCKDPIFANEMTHMEVQIRNNTKETIRMNLSISCKDVAGENCFDENSATVLWAGVLSDIYLEVQPLQEPGNRLEEQELQGKPSPVSELLKCAGFYALRKLQKVVIEIERNEARLEKIANVARAALTRMNNGETLSQEEMKSYLEEIIRLASI

SEQ ID NO: 197505 - protein, 261 aa, Oryza sativa
  unsure (1)..(261): unsure at all Xaa locations
  Clone ID: PAT_MRT4530_93256C.1.pep
MEVEKKEIKAGLISAEVVNSSATGPDADLVPAWQLSRPPCRRGKNLSANRFGAVLPNLSANRFGAEMPTLRLTYRRKNKKTTDLTAYHQTHIDRWNQFEANRMPDKAMHNRQEFDAYLAWLTRNYRLALRLSWTLANIADDPTGVEEQNKYDTSTRRGSTARELIRTVNDAGVALGMPPGSQQESSVLRNALQDAGPMMPSNHLDGLSGGEVEEXAQEGEQEGEEEEEEEQVEFGPSQLQDAPQSLQGPSRPQRKRAYVSD

SEQ ID NO: 197506 - protein, 49 aa, Oryza sativa
  Clone ID: PAT_MRT4530_93257C.1.pep
SSMVRCGRVGQGLDQIGKAGAPKPYAPTSPPPPSRPPPSLWTNSPGHRR

SEQ ID NO: 197507 - protein, 76 aa, Oryza sativa
  Clone ID: PAT_MRT4530_93258C.1.pep
KQDGFRDQSFRENRKMAIAKRLSMVALCKWIVALFRSQKRNPSQSRYTFGLSGNNVGLLVLLDKYPRIQKTLTRRK

SEQ ID NO: 197508 - protein, 493 aa, Oryza sativa
  unsure (1)..(493): unsure at all Xaa locations
  Clone ID: PAT_MRT4530_93259C.1.pep
MAMEKSPPPAPHFLFVVSGIQGHINPARRLAARLMASAPAARVTFSTAVSAHRLMFPSLPSPAGEDVDDTGVAYVPHSDGYDDGYKPGVHARDDYMARTRAAGTESLSAIVAALAARGRPVTCIVYTFLVVWAPAVARALGIPSAIYWIQPAAAFAVYYHYFHGHGEALASCANDPARGAVVRLPGMPVPQVRXLPSAVSIVSPEHKHYLLLAMLRDLFEDLDELKPRVLVNTFDALEPDALRAVPDLEVVAVGPVVPDGEASLSSSSTDMFRRDDASACVDWLDTKPARSVVYVSFGTLLSMSKRQEEEMRRGLEATGRPYLWVARQGAVDGGATLDSAPTPAADAGGGGGEGDAQGMVVEWCDQMKVLSHPAVGCFVTHCGWNSALESITRGVPMVAVPQWTDQPTVAWLVEARMGAGVRARLDGEGVVERGELQRCVELAMAGGGDGGVRARAERWRERAAEAVAAGGSSERNLRAFASGAVTQAVCSSR

SEQ ID NO: 197509 - protein, 60 aa, Oryza sativa
  Clone ID: PAT_MRT4530_9325C.1.pep
LYYSQKSHFSHRRRPPPSPAPPPRTPPSPSPPPPPPSPPPPPSPAPPPLSPPGRPQVSPP

SEQ ID NO: 197510 - protein, 81 aa, Oryza sativa
  unsure (1)..(81): unsure at all Xaa locations
  Clone ID: PAT_MRT4530_93260C.1.pep
FRPLYVSTGSAVSSPRGALEMAAAAAAMGMGLSSLRVXWFTPRLSSPAGSLTCGGGGGGGSWPEPASVPLVWLPSGAGNVH

SEQ ID NO: 197511 - protein, 1092 aa, Oryza sativa
  Clone ID: PAT_MRT4530_93261C.1.pep
MPPEMDEMPLSDDVLREILLRVPPLPTQLIRAGAVCRRWRRIAAEPGFLRRYRAHHGEPPLLGFFVNPRGREPLFRATLDAPDRVPPERFSIRLHDDTELGGNWYYHGCRHGRLLLLNWKSGLGCRQILIWDPVSGDLIHLSPPPQLDALKGVFFQATVICAATTAAGDHVHGDNCKSNPFKVVLVGTDRSTAFAFVYSSETGDWGDHAAETPVGNCISLGCRCIQIGDFLYWMLFGYDNNILEFNLVNHSLSVVYVPTHIHEDHDGLYPITLQEGTELGLIVMSRSCMQIWQWMIDFDGLPGWLPLEPIYLDNLLHLSAGECVNPTKVLGFSQDYNELFVASSTRIFMGPRDGQVLAAARGRLWGVVGQHGTAAQGPAWCGFGRTVAEDPVPRGQIWSPHARLKPARAAEGRHGPVRGCVAWRCLGGWWRRPSRRARPAQQPGDGLGLAQRNLRGYGGGPLGGRGQKAMVAVVAFEVEMAVVGLEAGRKGSNGSAKGAGSESKHKEYIERAQWIEENISNIKPFTEEDIKRITSDYNTNLGNGGFGKVYKGVLDDNHFVAVKKYIKMDSEEMFAQEVRVHSQINHKNVVRLIGYCIEKNAPMMVMEYVPNRDLDYHLHDKNSLDSLDIRLDIAIECADALGYLHSMCSPVLHGDVKPSNILLDDNFNAKITDFGISRLLSTDKTHTVKCIGSIGYVDPLYCREGRLTSKSDVYSFGIVLQELITKKKAASLAQALAEGKGVTELLDPKICNESNMKVLVEIGKLLQECLTEDIHRRPDMCDLAGHLRMLRKFCLRQPAPLENFGWHLFPETQNEDKEQSQQGTNNVSSSLMAFPKMAGIFNRNILVVEYVNCYEKENSGRIMFDNEITAEENMATLEAIGILAMNRFITDSDHAGNREDEDDERQHGPSETTPEEMLTALGRAGQWASPRCCGPFRANSAVPSGGHSLRLSLEACKNQRFFASGPLVRLRKLFFQPLTGGARLSAAVVGRRRHHRVRKVVAIPVHRFATAEDRRSSVAAVNPISAVASSSSPALSVASPLLLWSPSRRSPASVRRPSRRAAAAGGDVIADVIVPVSREPVVDRSISAVRFG

SEQ ID NO: 197512 - protein, 238 aa, Oryza sativa
  unsure (1)..(238): unsure at all Xaa locations
  Clone ID: PAT_MRT4530_93262C.1.pep
MTSLKYDLPLLDRDTRFSLLQVKMQAVLTQQDLDDTLCRFDKMTQDWSDDEKKRDRDHKAMPYIIFIYMEKTTAGLCLKLEHICMTSNXDESVKDHLSTFKKIVADFEPTEVKYDEEDLGLILLCLLPSSYTNFRDTILYSRDNLTLKEVYDALHVKEXMKKMVPCEGSNSXVEGLNVQGKQQEKTKNKSRDKXSSRSYCGRSKSRGRYNSCKXCKRDGHDISQCWKLRNKAKRKTQG

SEQ ID NO: 197513 - protein, 872 aa, Oryza sativa
  Clone ID: PAT_MRT4530_93263C.1.pep
MKLRGVSAFRKGAAHQRPEDTNGAGGGARVAPPPPLIDEEALGDFFVEVYAGPRVSTDMSCSDMSLDEMDATVRKMEFVVFDRCGADESDEKGKNDLDVCGDGGDDDGEARPEERFGAFRDSTSECSDASTSGEFVEELPWIRYQGYEDDSLDGEFSDEHGIRDEEITRAVVSEFQEDQEEEGTSGRLGDGCEDEAAQQQEENDEQNISDFACESEIASEHEGVDFRVEACEEQERVSEDNILDAAHQTEVCREQEMQEEKNFAAVCKLGIPEQELAETADNIPDECCKEETSMEQDEGGDGTNMESESISEVAEHPNVEDEENTQDDGGSEMEISEEIISGFGCEEDFSEEVTSKYVSEGEISDSGAIVSLHVEMQKQPVETHAFEQDDSSTADNAFHQDDSTADRAFDQDDIRADGYDDSQKELDIGMREFRVASEEVGIQEANSDDPVDCTEDANMELGVFLCDGKMLLKVLVSLKKAAKKILPHKQQKMLLKNLIPLKKPLLMITLHHSLLVPKWNWGLAQSGIAEETCQDDNAGYFSDDDSQKATVITTCQLQVDYEENVIAQEADDNSTGVRDDAQNEPEQTCELATSEECHFTQKTIQNHGALEESVVIASASEDAHEESDPTQDGHEEDYSVGINSGAQKEGELDTSESGGASEGTTVHQEDDGHVNTTDLNGSAQKEITVSILDDSEELCSSEENNQSSNMLIPEFSDNFSAEEPQNQDSVAKESSLDDICNAFSGMHLKGDAYLDPTESMTCPGNRLIIARRRRTPEEEEYLRGFNPRAPNFLPLELDPESEKVDLKHQMMDERKNAEEWMIDYALRRAVNNLGPARKKKVELLVQAFETVLPHDEEEKKGITPTRPVQACN

SEQ ID NO: 197514 - protein, 136 aa, Oryza sativa
  unsure (1)..(136): unsure at all Xaa locations
  Clone ID: PAT_MRT4530_93264C.1.pep
PPWFSYFFFFFFFFLIAISPFYIHVKKPRQKTNSSIPQILSPLSTENPHRTPKKQCQCPFNERPQQKELIHFTQFPKSTKKNPPQQTPHXGQRPNGGSTGPGGSLLLRVKLRVPPGGHLPPLVLGPTLLDLAPLLA

SEQ ID NO: 197515 - protein, 559 aa, Oryza sativa
  unsure (1)..(559): unsure at all Xaa locations
  Clone ID: PAT_MRT4530_93265C.1.pep
MVRSKEVHKKPKDPLMTPPPSSAKKRGFRDDGRGGGGGSRPRNREGAATSLTPASVPNYMRGTGSSDAKVGRGAASSASPRRRPVRVVARGKVLFPKVSAAAAAAASAGLGRATCSSTMKEAKFPDALDLAPGATDAEGPAATRVCPYTYCSLNGHAHSPAGRVDFRVEACEEQERVSEDNILDAAHQTEVCREQEMQEEKNFAAVCKLGIPEQELAETADNIPDECCKEETSMEQDEGGDGTNMESESISEVAEHPNVEDEENTQDDDANMELGVFLCDLQDASEGSGIAQESSQEGNSACFNDGAQMVPDITTQTTEDASEESDTAQETTLDDNSTPLAAGAQMELGIGTSELIEGSSDVTEQSGIAEETCQDDNAGYFSDDDSQKATVITTCQLQVDYEENVIAQEADDNSTGVRDDAQNEPEQTCELATSEEXDAYLDPTESMTCPGNRLIIARRRRTPEEEEYLRGFNPRAPNFLPLELDPESEKVDLKHQMMDERKNAEEWMIDYALRRAVNNLGPARKKKVELLVQAFETVLPHDEEEKKGITPTRPVQACN

SEQ ID NO: 197516 - protein, 66 aa, Oryza sativa
  Clone ID: PAT_MRT4530_93266C.1.pep
TKRTDTLIAHTIGHPSYTGDTYHDIYTRLAWNLSKRQRPNYLTKMVHDTIVTYAHYPELEHELCMN

SEQ ID NO: 197517 - protein, 177 aa, Oryza sativa
  unsure (1)..(177): unsure at all Xaa locations
  Clone ID: PAT_MRT4530_93267C.1.pep
MASINRPIVFFTVCLFLLCNGSLAQQLLGQSTSQWQSSRRGSPRECRFDRLQAFEPIRSVRSQAGTTEFFDVSNEQFQCTGVSVVRRVIEPRGLLLPHYTNGASLVYIIQGRGITGPTFPGLPXEPTQQQFQQSGQAQLTGKXAKVKKFKDEHQKNHXRLRQGEVICIAWLVVAHLV

SEQ ID NO: 197518 - protein, 191 aa, Oryza sativa
  unsure (1)..(191): unsure at all Xaa locations
  Clone ID: PAT_MRT4530_93268C.1.pep
MASINRPIVFFTVCLFLLCNGSLAQQLLGQXTSQWQSSRRGSPRECRFDRLQAFXPIRSVRSQAGTTEFFDVSNEQFQCTGVSVVRRXVLNLDGLLLPHYTNGASLVYIIQGXRGITGPTFPGCPXSYQQQFQQSGQAQLTESQSQSQKFKDEHQKIHRFRQGDVIALPAGVAHWCYNDGDVPVXVAIYVT

SEQ ID NO: 197519 - protein, 177 aa, Oryza sativa
  unsure (1)..(177): unsure at all Xaa locations
  Clone ID: PAT_MRT4530_93269C.1.pep
MASINRPIGFFTVCLFLLCDGSLAQQLLXMSTSQXQRSRRGSPRGCRFDRLQAFEPIRSVRSQAGTTEFFDVSNELFQCTGVSAVRRVIEPRGLLLPHYTNGASLAYIVQGRGITGSTFPGCPETYQQQFLQSRLAQLIESHSQRHKFKDEHLXIHRVQXGDVIALPAGVTHWSYHD

SEQ ID NO: 197520 - protein, 219 aa, Oryza sativa
  Clone ID: PAT_MRT4530_9326C.1.pep
MAVPGTTEQLTIFYSGSMVKFDNVPREKSSFDYDLAIQHWGRGDSLCVQAEEVIFFAAKKSPDAGHQHVPQQQQPAYPNKKKRIFCYQAPERDADGLFIHENKADACSQRQHRSPEDGYATIKETNPCSRQIQIVPRADVSLLVKNASLVSFLESRKQRLASAAYTRREKSPDEKDIFPTAFPRNKTPLGNTERHSAFTNLKNINGNHDEEALDTELKI

SEQ ID NO: 197521 - protein, 44 aa, Oryza sativa
  Clone ID: PAT_MRT4530_93270C.1.pep
ESIQPLPPDKKCSHIQVVKQLLLVSSPFFSWELILPAPFTVKDP

SEQ ID NO: 197522 - protein, 185 aa, Oryza sativa
  unsure (1)..(185): unsure at all Xaa locations
  Clone ID: PAT_MRT4530_93271C.1.pep
IALIVFFTVCLFLLCNGSLAQQLLGQSTSQWQSSRRGSPRECRFDRLQAFEPIRSVRSQAGTTECFDVSNEQFQCTGVSVVRXRVIVXPRGLLLPHYTNGASLVYIIQGKGITGPTFPGCPXESYQQQXFNNQAKPQLTESQSPSQKFKDEPQKIHRFKQEMYGMPCGVPXWCYNMVNANCAHIW

SEQ ID NO: 197523 - protein, 91 aa, Oryza sativa
  Clone ID: PAT_MRT4530_93272C.1.pep
MAEEPFETAGYVRCYGSTSCAMTSRSGRDDWDVLGLPLGTHLLGLSHDTITKLKTQIIFGMDKRQRSTTIGSGSSVAARGGKAVVGVAASG

SEQ ID NO: 197524 - protein, 151 aa, Oryza sativa
  unsure (1)..(151): unsure at all Xaa locations
  Clone ID: PAT_MRT4530_93273C.1.pep
MASINRPXFLTVCLFLLCDGSLAQQLLGQSTSQWQSSRRGSPRGCRFDRLQAFEPIRSVRSQAGTTEFFDVSNESFQCTGVSVVRRVIEPKGLLLPHYTNGASLVYIIQGRGITGPDFPSAVLRPTSSMFQHSGHAFFAETHQPKPSRSRH

SEQ ID NO: 197525 - protein, 154 aa, Oryza sativa
  Clone ID: PAT_MRT4530_93274C.1.pep
MASINRPIVFFTVCLFLLCDGSLAQQLLGQSTSQWQSSRRGSPRGCRFDRLQAFEPIRSVRSQAGTTEFFDVSNELVQCTGVSVVRRVIEPRGLLLPHYTNGASLVYIIQGRGITGPTFPGCSETYQQQVQQSGQAQLTESQSQSHKFKGEHQK

SEQ ID NO: 197526 - protein, 114 aa, Oryza sativa
  Clone ID: PAT_MRT4530_93275C.1.pep
MSTMKFCRECNNILYPKEEKDRRLLLFACRNCEHQEVSESKCVYRNEVAHAAGERTQVLQDVASDPTLPRTKTVRCAACGHGEAVFFQATARGEEGMTLFFVCCNLTCAHRWRE

SEQ ID NO: 197527 - protein, 154 aa, Oryza sativa
  unsure (1)..(154): unsure at all Xaa locations
  Clone ID: PAT_MRT4530_93276C.1.pep
MASIYRPIVFFTDCXILLCNGSLAQQLLGQSTRQXQSSRXASPRDCRFDRLQASEPIRSVRSEAVTTEFFDASNEQLQCTGVSVVRRVIEPRGLLLPHYTNGASLGYIIQGRGITGPTFPGCPEYYQQQFQQSGQAQLTESQSQSQKFKDDHQK

SEQ ID NO: 197528 - protein, 508 aa, Oryza sativa
  Clone ID: PAT_MRT4530_93277C.1.pep
MASSVALVLMKASLPRRQRMDRPRRSPAAVQLVAGVDAADDMFGSLAGCPPRPLEYPVVPDLDDYDVDDAPVAGRPAPASDKTLAVHAGEKLGSGAAAAETDSIATPIVGGTTHWFRDSADLIAFREGRRRSFEYGRYGNPTVKVLEEKISALERAEATLVTSSGMNAIVATLLALVPPGGHVVATADCYSEARAFIRDKLSNMGITVCKVVNTINGSFIKASAWHCLQSDSNNGVRSMDLQSTFVDLDDDMEALESVLDEGEVTMFYADSMTNPHLKVVDVTRVAELCHRRGALVCIDSTLASPINQKPLALGADVVLHSATKYIAGHHDVIAGCVSGSEALVSRIRTWHHDLGGAISPNAAYMIIRGLKTLALRVQAQNRTALRMAQLLEKHPKIERVYYPGLESSPWHGVATRQMAGAGGVVGLEVASDMRGAMRFVDALELPLIATSLGGCESLVQQPAIMSYWGKCDEEKAKNGIKDNFVRFSFGIEKFEDLRDDILQALGKI

SEQ ID NO: 197529 - protein, 155 aa, Oryza sativa
  Clone ID: PAT_MRT4530_93278C.1.pep
MASINRPIVIFTACLFLLCNGSLAQQLLGQNTSQWQSSRRGKPRECRFDRLHAFEPIRSVRSQAGTTELFDVSNEQFQCTAVSVARRVIEPRGLLLPHYTNGASLVYIIQGRGITGPTFPGCPESYQQQFQQSGQAQLTESQSQSQKLKDEHQKI

SEQ ID NO: 197530 - protein, 486 aa, Oryza sativa
  Clone ID: PAT_MRT4530_93279C.1.pep
MAKSSSLVTKVSAQRRRRVHRPRRSPTKPERSAAAVALSHEKILLAGVDAAADMFGSLAGCPSSPEYPVVPDMDDRYVDGAVDDAPAAAAGRRASDETLAVHAGEKLGSGAAETDSIATPIVSGTTHWFRDSADLIAFREGRRRSFEYGRYGNPTVKVLEEKISALERAEATLVTSSGMNAIVATLLALVPPGGHVVATADCYSEARAFIRDKLSNMGITSTFVDLDDDMEALECVLDESEVTMFYADSMTNPHLKVVDVTRVAELCHRRGALVCIDSTLASPINQKPLALGADVVLHSATKYIAGHHDVIAGCVSGSEALISRIRAWHHDLGGAISPNAAYMIIRGLKTIALRVEAQNRTALRMARLLEKHPKIERVYYPGLESSLWHGVATRQMAGAGGVVSFDVASDLRGVMRFVDALELPLIATSLGGCESLVQQPAVMSYWGKSEEEKAKNGIKDNFVRFSFGIEKFEDLRDDILQALEKI

SEQ ID NO: 197531 - protein, 383 aa, Oryza sativa
  Clone ID: PAT_MRT4530_9327C.1.pep
MIKGILPLEAYMILFPMRFFVIQQLGKVLGQHTCYQTEGLKELAEQRRAPDEEFEEYLSQLIGDNYTGDRNEMALLPEGITELLHHKMLPLPLIKCKNVVILAATNVDELETEWGCLLDTQESGLVMAKSFVSKHLCTSLLDVKIAPVVAKLCIDFSDVYIGCYRISRSGPLVVSFIGKCSRIWNHTIAILQIFKICHYQPFMKKFGPNYPSFLLFLPLLSSTAQRTGGGGAAAAASGASGCSGGASGAAAERRQQRAEQSAATASGASGGGGASGGGEVARAAAAKRPAAAASGASCGGGGGAAATASSSGGASGGGGAASGSDSNSGGDGARVEAAGKELEDERRGREVEDEGIFVQYMQNTYLSGTTKITTNSNGIIPNT

SEQ ID NO: 197532 - protein, 472 aa, Oryza sativa
  Clone ID: PAT_MRT4530_93280C.1.pep
MAKSSSLVTKVLVQRRRRVHRSRRSPTKPERAAAADTFGSLAGCPSSPEYPVVPDLDDCVVDTAVDDAPVVAAEAAGRRASDETLAVHAGEKLGSGAAETDSIATPIVSGTTHWFRDSADLIAFREGWRRSFEYGRYGNPTVKVLEEKISALERAEATLVTSSGMNAIVATLLALVPPGGHVVVTADCYSEARAFIHDKLSKMGITSTFVDLDDDMEALESVLDEDEVTMFYADSMTNPHLKVVDVARVAELCHRRGALVCIDSTLASPINQKPLALGADVVLHSATKYIAGHHDVIAGCVSGSEALISRIRAWHHDLGGAISPNAAYMIIRGLKTLALRVEAQNRTALRMARLLEKHPKIERVYYPGLESSPWHGVATRQMAGAGGVVSFEVASDMRGVMRFVDALELPLIATSLGGCESLVQQPAVMSYWGKSEEEKAKNGIKDNFVRFSFGIEKFEDLRDDILQALEKI

SEQ ID NO: 197533 - protein, 118 aa, Oryza sativa
  unsure (1)..(118): unsure at all Xaa locations
  Clone ID: PAT_MRT4530_93281C.1.pep
SVVRRVIEPRGLLLPHYTNVAFLAYIIQGRGITGPTFPDCPESYQQQFHQLGQAXLTERQSQSQKFKDEHQXIHRFKQGDVIALPAGVPHWCYNDAQVPDGAIYVTDLNSVANQLDPR

SEQ ID NO: 197534 - protein, 186 aa, Oryza sativa
  unsure (1)..(186): unsure at all Xaa locations
  Clone ID: PAT_MRT4530_93282C.1.pep
MASINRPIVFFTVCLFLLCNGSLRPAAITATTHYVNGTSSRXRGSPRECRFDXRLQAFDXPFGRVRSQAGTTXFFDVSNXQFQCTGRICCPSTLLNLHGLLLPHYTXGASLRIYSSTGRGITRANFPTAVLTSYQQQFPQSGXAQLTESQSQSQKFKDEHQKIHRFRHGDVLALPAGVAHWCYHDW

SEQ ID NO: 197535 - protein, 90 aa, Oryza sativa
  Clone ID: PAT_MRT4530_93283C.1.pep
NLEVVSPHGGIHQVGAPLSLSGGGTPEVKFHAYPRNLGFRVEKAKKAWACQLFALFLYPKSIQVPPGWNPLKEPFSGLLKVPPPGFEKIL

SEQ ID NO: 197536 - protein, 67 aa, Oryza sativa
  Clone ID: PAT_MRT4530_93284C.1.pep
MSHSERRRKQEKEEKGHSENAANPSERRRIAIRARRDHRHSWISRHLQTKSIRTCIHANIAIEFAAV

SEQ ID NO: 197537 - protein, 128 aa, Oryza sativa
  Clone ID: PAT_MRT4530_93285C.1.pep
VFPNLELFLNQPNIEHFSYCQASLIAVKPVKGDTVLFFSLHIDGVPDPLSLHGSCPVIEGEKWSAPKWIRIRSYEHPPVSKVTEGCSDNSARCAKWAEAGECEKNPVYMVGAEGLPGNCRKSCGVCDS

SEQ ID NO: 197538 - protein, 202 aa, Oryza sativa
  Clone ID: PAT_MRT4530_93286C.1.pep
MREQKSTMSGGGDAAAICAQIAAVFSGDPAARPVLVAELAAAAARGGRVFVHGVGREGLMMRALCMRLAHLGLPAHCVGDVTAPPASPGDLLLASAGPGAFSTVDAICGVARGAGAHVVLLTAKPEGDFPRRQADVVAHLPAQTMADDEEATTESSPAKAKLPMGSLYEGAMFVLFEMVVLELARVLGQSPAQMRARHTNLE

SEQ ID NO: 197539 - protein, 49 aa, Oryza sativa
  Clone ID: PAT_MRT4530_93288C.1.pep
VYKIELRLTFVGFQTGGGLCKAISSKGNQTLLVHYICKANLLSYRHVIY

SEQ ID NO: 197540 - protein, 378 aa, Oryza sativa
  Clone ID: PAT_MRT4530_93289C.1.pep
FASAATWQLIMERILAQSEVAPLTSGRLSHSSGPLTGGGSITDSPPVSPEIDDAKYCRAASTPKPQMYRGGNKTVGRWLKDRKEKKKEETRAHNAQVHAAVSVAAVAAAVAAVAAATAAASGSGKDDRAARTDMAMASAATLVAAQCVEAAESMGAEREHLEAVIGSAVNVRTPGDIVTVTAAAATALRGAATLKARALKEVWNIAAVIPVEKGTMGGGHHHKQNMQKQHRKLESNGSSISDDLSLEEENNFLGICSQELLARGTELLKRTRKGALHWKVVSVYINRMGLVMLKMKSRHVAGTITKKKKSVVIDVCKDVAAWPGRHLLEDGEHRRYFGLRTAEHRVIEFECTSQREYEMWTKGVARLLIIASERKRAP

SEQ ID NO: 197541 - protein, 83 aa, Oryza sativa
  Clone ID: PAT_MRT4530_9328C.1.pep
ASLHTHLMAIHIYVFIQFMVPSIIIPLSFVMIWHHVVKKSSLFPFSKRALCISHFHFLLQIFSFPMPAGVSVRTPLYHGEALI

SEQ ID NO: 197542 - protein, 193 aa, Oryza sativa
  unsure (1)..(193): unsure at all Xaa locations
  Clone ID: PAT_MRT4530_93290C.1.pep
KKGCHRWLSSSIRRSPPQPAASSSSRRHRSRQSSPPLLLRPLASPQAALSSSLRVARRRGSRAAASPPPSPLPQKRRXAASSSSLRVAGRGESRAAASPPPSPHPHTHRRCCRRRRXVPSSSSRVAGRGRSRAAPSHPETSRRQIRAPGASRRGIHRRRHRRLASRLLAEAARRGCPRRRRLGGHPRLSAGGE

SEQ ID NO: 197543 - protein, 74 aa, Oryza sativa
  Clone ID: PAT_MRT4530_93291C.1.pep
MSEAKVEPAHHIPRLRRWVPELHHPTSSFASRLLYINQPLAGTKRLVAAAPPPRDLLVSICACSRASAGVGVQA

SEQ ID NO: 197544 - protein, 61 aa, Oryza sativa
  Clone ID: PAT_MRT4530_93292C.1.pep
HLTTLANPGGNPKIGQRVKKPKRRTTNSRKNKGHFCRYKGFRTLHMSATAESAMLGVAEPD

SEQ ID NO: 197545 - protein, 58 aa, Oryza sativa
  unsure (1)..(58): unsure at all Xaa locations
  Clone ID: PAT_MRT4530_93293C.1.pep
LLEIFRAGTIAGYKPAANIFXEINEXERRAADYRFVASCSTDSKTQCVYDRWDQVLIV

SEQ ID NO: 197546 - protein, 166 aa, Oryza sativa
  unsure (1)..(166): unsure at all Xaa locations
  Clone ID: PAT_MRT4530_93294C.1.pep
TTRFFNVLKPAASLAVRMVMTTAYDVKRPPPQGDPFGIEHGGGIANLQTXANAIAAIKAAGFELLESEDLADNSDRAPWYWPLGGNAWQYASTFGDILSTFTMTPAGRAIAHTVLGVVESIGLVPPGTKKTADSLSTTAAALVAGGKEGLFTPMFLMVARKPVAKE

SEQ ID NO: 197547 - protein, 94 aa, Oryza sativa
  Clone ID: PAT_MRT4530_93295C.1.pep
AGDVVRRLDLQAKDMIAAAQDPTTQGRHLRAEQAASEHQDLRFTHCCQVHPKLLHCLASDKYYPFPSSAPAASTINPFLTSTEHQNGNIGCIPL

SEQ ID NO: 197548 - protein, 115 aa, Oryza sativa
  unsure (1)..(115): unsure at all Xaa locations
  Clone ID: PAT_MRT4530_93296C.1.pep
FFFFFFWQALXTWHIAGTQAPTATNTHQLLNTTAHSGQHTNSQPAVQSVQPTPSSQSNATTLIQSIPAPFGIAAPLHPVPITLNARAPSXIIVRCSSQCCILPVHPSHPWPGLAV

SEQ ID NO: 197549 - protein, 144 aa, Oryza sativa
  Clone ID: PAT_MRT4530_93297C.1.pep
TRDHRKSCHCGKLTTESCTPFSQWVRALFAPTKRSMAGTARHPYALQHPEPVAHFALSTGAFSDPPVRLYSAKKIHQQLEVARTEFIQANVVARRQALMLPKVLHYYAKDAALELRHVVELVCQSISEAQQREIQLCLRRRIDH

SEQ ID NO: 197550 - protein, 43 aa, Oryza sativa
  Clone ID: PAT_MRT4530_93298C.1.pep
GFGDVEPHSVLPPFRVLYDRNPDCHGQFHGKKKKDGGRTGGML

SEQ ID NO: 197551 - protein, 136 aa, Oryza sativa
  Clone ID: PAT_MRT4530_93299C.1.pep
MSASLSLYLFPLFSHPLPSPPRARCSLPPLRVFGLGLRGGHLAGAKGRRCNPCPCAPSPMLFDLMVLHGRASGWRASPAAAPSSTVVPPTYSCSSIINGTLPPSPEPCAGAATVRSTRSHVEGLVVEGPIINLFLQ

SEQ ID NO: 197552 - protein, 41 aa, Oryza sativa
  Clone ID: PAT_MRT4530_9329C.1.pep
LFSIEDMLRPIWKQHSRGQNWDYNIYAHCNNTSRNNNVREL

SEQ ID NO: 197553 - protein, 31 aa, Oryza sativa
  Clone ID: PAT_MRT4530_932C.1.pep
CSSFGPCTARANQFTDRESQFTTKPLTLELL

SEQ ID NO: 197554 - protein, 66 aa, Oryza sativa
  Clone ID: PAT_MRT4530_93300C.1.pep
SLKVANRLHFGHQYVLSNTTLITNIQCKILNRTRSMCYTRKVLFDAKSTCMIFMYQIYIFKKMLTP

SEQ ID NO: 197555 - protein, 84 aa, Oryza sativa
  unsure (1)..(84): unsure at all Xaa locations
  Clone ID: PAT_MRT4530_93301C.1.pep
AALAWLYKHLCEXDACRRTSADANLAGCVWLLXVWMWIRLPVGHPTWRQHPAWPFEDDDRCPMVAFLXEVVPLPIVSTIKISYF

SEQ ID NO: 197556 - protein, 117 aa, Oryza sativa
  Clone ID: PAT_MRT4530_93302C.1.pep
PPSSPIEFGVKNRDAQLALLSPVQRSPLSSAAARTAQGEAELAEDYTCVIARGPNPKMTHIFDDLVVESSAAGGDACRLFMQHRDEKAFCSSQCRYHEVHFDKRIDEASDVSFKLKN

SEQ ID NO: 197557 - protein, 143 aa, Oryza sativa
  Clone ID: PAT_MRT4530_93303C.1.pep
MAKCSKIRYIVWLRQTLRRWRSRAAARAAAEAVPAGHVAVCVGGASRRFVVRAAHLNHPVFRELLRQAEEEYGFPSGAYCGPIALPCDEGLFEHVLRHLSSPSSAARFVTLEDIQSGALSCCCAAAGDALPLLRGIATDKAVW

SEQ ID NO: 197558 - protein, 102 aa, Oryza sativa
  Clone ID: PAT_MRT4530_93304C.1.pep
EARHHRPRSYRRPHPPTTPQFRRRPLSPPDLGGTRPATARSRQDEVHRRRIRAGQGPCRRPLVIVVGVAPAAPTCVVVVVGVNPSLSSSGSPPRRGQPERWG

SEQ ID NO: 197559 - protein, 369 aa, Oryza sativa
  unsure (1)..(369): unsure at all Xaa locations
  Clone ID: PAT_MRT4530_93305C.1.pep
GVVVRRDKGRRHPAARHNRXRRGARSAATATRSDDHKWWRRVTSRHRRWPTKGRKGEREGSAHRAARRQTSGRRQGTAAAGLLGKTARRSSGDGRRSGRGGRAQPXLRKIIEGLGRRISPVTEGGGARADFRRRGPVAEDLPVLAKPREATAWVGVDQSGIVTRLEVAMATKRGGQFYNKWYQSLREIHGRGAREVLHAATTTRGVQGQTWTQGRRPDVVLGLMAAKAIGDPIGGSDTSGGWPGLSGKEDYCVSGFGCTVDRAHGCGSRNERPRSILSTTDGQDPSAHDRCTRHGDDDVGDDVITGDDRTAQARRSGGDDRVDDDGGAPTILGENGGRDWDGDDLANPAMASPSDDQSDGGARLDERRR

SEQ ID NO: 197560 - protein, 91 aa, Oryza sativa
  Clone ID: PAT_MRT4530_93306C.1.pep
SGHPKISSVLFSFSEFLDSIYMDHMAPSLISVPHACTTRCITFASTWRMRSRIGHFNFIYVSMVKIKSYFYQLHLYRLTTIKWSVQLSLFV

SEQ ID NO: 197561 - protein, 117 aa, Oryza sativa
  Clone ID: PAT_MRT4530_93307C.1.pep
NEFFLSESGQHCSSLITLGELTALPHATLTGDRSVFTAILAVDPIIAVIDLAAAIVEKTEEVTRRRGAEGSGAARMRGADEAARPRSAARKEREAAPRVAMSRGEFVGGGGGGTARP

SEQ ID NO: 197562 - protein, 48 aa, Oryza sativa
  unsure (1)..(48): unsure at all Xaa locations
  Clone ID: PAT_MRT4530_93308C.1.pep
KKKKNKKKKKKKKKRGLKKKXKKKKKKKGLKKKKFKGSLLKKTKRGRN

SEQ ID NO: 197563 - protein, 148 aa, Oryza sativa
  unsure (1)..(148): unsure at all Xaa locations
  Clone ID: PAT_MRT4530_93309C.1.pep
MASINRPIVFFTVCLFLLCNGSLAQQLLGQSTSQWQSSRRGSPRECRFDRLQAFEPIRSVRSQAGTTEFFDVSNEQFQCTGVSVVRRVIXPRGLLLPHYTNGASLVYIIQXGRGITGPNFPRAVLRSYQQQFXQQSSKAQIDQSSTKV

SEQ ID NO: 197564 - protein, 69 aa, Oryza sativa
  unsure (1)..(69): unsure at all Xaa locations
  Clone ID: PAT_MRT4530_93310C.1.pep
FAXELAXADLPIPTIALXTTXPLHXHXGRHVGXGXGXXXGXXXGGEGGXVWWWXXGRKARGGGPALSLA

SEQ ID NO: 197565 - protein, 148 aa, Oryza sativa
  unsure (1)..(148): unsure at all Xaa locations
  Clone ID: PAT_MRT4530_93311C.1.pep
MASINRPIAFFTVCLFLLSNGSLAQQLLGQSTSQWQSSRRGSPRECRFDRLQAFEPIRSVRSXAGTTEFFDVSNEQFQCTGVSACRRVIEPRGLLXLPHYTNGASLVYIIQGRGIPGPTFPGXPESYQQQSPQSSPAQIDRRTSHSQK

SEQ ID NO: 197566 - protein, 151 aa, Oryza sativa
  unsure (1)..(151): unsure at all Xaa locations
  Clone ID: PAT_MRT4530_93312C.1.pep
MASINRPIVFFTVCLFLLCNGSLAQQLLGQSTSQWQSSRRGRSKNXRFDRLQAFEPIXSVRSQAGTTKFFDVSNEQFXCTGVSVVRRVIEPRGLLLPHYTNGASLVYIITGKGITGXXIPGCPESTNNSXQQSGQAXLTESKAKSRIKDDI

SEQ ID NO: 197567 - protein, 137 aa, Oryza sativa
  unsure (1)..(137): unsure at all Xaa locations
  Clone ID: PAT_MRT4530_93313C.1.pep
SSINRPIVFLTVSLVLLCNGSLAQQLXGQSTSQWQSSRSGSPRECRFDGWQAFEPIRRERTQAGTTEFSDDSNEQLQXTGVSSARRVIEPRGLLLPHYTNAASLVYIIQGRGIPAPTFPGCTESYQQQLQQSGQAQL

SEQ ID NO: 197568 - protein, 382 aa, Oryza sativa
  Clone ID: PAT_MRT4530_93314C.1.pep
MEVNGHHKPRREYNGRECNGVQSVNNFGDIDPWTAWAYKPRTVSLLLMGTCFLIWASGALDPERSFSVDRVSSVKRGVFAMIAVFLAYSFLQAPSTVLIRPHPAIWRLVHGMAVVYLVALTFLLFQTRDDARQFMKYLHPDLGVELPERSYGTDCRIYVPDHPKSRFNNVYEILFDEFVIAHILGWWGKAIMIRNQPLLWVLSIGFELMELTFRHMLPNFNECWWDSIVLDILICNWFGIWAGMKTVRYFDGRTYEWVGLSRQPNIISKVKRTLGQFTPAQWDKDEWYPLLGPWRFIQFCLWIPPRNPLIVYRLVLWWLIAIPTIREYNTYLQDRKPVKKVGSFCWLSLAICILELLLCIKFGHDAFRHQDQMTLASASVIV

SEQ ID NO: 197569 - protein, 86 aa, Oryza sativa
  Clone ID: PAT_MRT4530_93315C.1.pep
SEATPSAAQPGDPPSPASCCSDEPPPFSGQAPKLSWRTIVATALAHRRSSPFTLSGSMSTSGPPPSPDKRRSNRALRDGGFGWPSP

SEQ ID NO: 197570 - protein, 106 aa, Oryza sativa
  Clone ID: PAT_MRT4530_93316C.1.pep
RKQFLGQSTSKWQSFRRGSPRKCRFDRLQAFEPIRSVRSKVGTTEFFDVFNEQFKCTGVFVVRRVIEPRGLLLPHYTNGASLVYIIQGRGITGPTFPGCPESYQHQ

SEQ ID NO: 197571 - protein, 83 aa, Oryza sativa
  unsure (1)..(83): unsure at all Xaa locations
  Clone ID: PAT_MRT4530_93317C.1.pep
MASINRPIVFFTVCLFLLCNGSLAQQLLGQSTSQXQSSRRGSPKECRFDRLQAFKPIRSVRSQAGTAEFFDVSNEHVECTGGS

SEQ ID NO: 197572 - protein, 165 aa, Oryza sativa
  unsure (1)..(165): unsure at all Xaa locations
  Clone ID: PAT_MRT4530_93318C.1.pep
MASINRPIVFFTSLACSSXCNGSLAQQLLGQSTSQWQSSRRGSPRXCRFDRLTAFEPIRSVXRSQAGTTEFFDVSSXAFXCTGVSVVRRVIDPRGLLLPXHNGASLVYXIQGRGXTGPTFPRACSEFLPNKGFHNSRPRPLLTAGLKPSSKFTVDLTIPGFRQGV

SEQ ID NO: 197573 - protein, 338 aa, Oryza sativa
  Clone ID: PAT_MRT4530_93319C.1.pep
MSSSPAHAQRFYCHQCDRTVPIPPPTSPDADVLCPFCGGGFVEELGEDINPNPNPNPSPFLPHHPFFPFASPSFDLRNPSDLAAFFGPPSPSPSPSPAARHFDPSNFLHDHFTGLLSGGATIQIVLEGSSASLPLGGAAAGPGGISLGDYFVGSGLEQLIQQLAENDPNRYGTPPAAKSAVAALPDVAVSADMMAADGGAQCAVCMDDFHLGAAAKQLPCKHVFHKDCILPWLDLHSSCPVCRFELPTDDPHHAHPTLGSHRPAAPASASASPSPAPPPRLAERRFRISLPWPLRAAFGGQAESSNPTNQDPVGGSTDASGSGNNNATGGHRGYDDLD

SEQ ID NO: 197574 - protein, 107 aa, Oryza sativa
  unsure (1)..(107): unsure at all Xaa locations
  Clone ID: PAT_MRT4530_9331C.1.pep
FNAFSDKSDSTATYRLSCLRPSLXKILEEANVSLKEETNLAVKYIEIVLNMVHTSETAKCISNNSKNILYKTTLFSSCPDHRCLSHELFGMHKXATXSTYFLNGGAS

SEQ ID NO: 197575 - protein, 90 aa, Oryza sativa
  Clone ID: PAT_MRT4530_93320C.1.pep
VRPHVGGGCCRNLATFGDRPGACDVISHILWRPLQASRRPACPSPYVHAVSATCCSGGGVGALTNLPYFCIFVILNRIIHISSLLQSSSY

SEQ ID NO: 197576 - protein, 101 aa, Oryza sativa
  unsure (1)..(101): unsure at all Xaa locations
  Clone ID: PAT_MRT4530_93321C.1.pep
MASINRPIVFFTVCLFLLCNGSLAQQLLGQSTSQWQSSRRGSPRECRFDRLQAFEPIRSVRXQAGTTEFFDGTNEKVQWPAESVGRSASHRAVSVYPRGMT

SEQ ID NO: 197577 - protein, 91 aa, Oryza sativa
  unsure (1)..(91): unsure at all Xaa locations
  Clone ID: PAT_MRT4530_93322C.1.pep
HAFERISCCACCQSCRSYLANSMIVFWEYGANHYNAMLIRGYSADQASTYTXNIVDTMSNGVEKLIGMGAVDVVFTXVFTIGCLAMYMTIY

SEQ ID NO: 197578 - protein, 239 aa, Oryza sativa
  unsure (1)..(239): unsure at all Xaa locations
  Clone ID: PAT_MRT4530_93323C.1.pep
MASINRPIGLFTACLFLLCNGSLAQQLLGQSTSQWQSSRRGSPRECRVDRLQAFEPIRSVRTQAGTTEFFDDSNEQFQCTEVSDVRRVIEPRGLLLPHYTNGASLVYIIQGRGITGPTLPGCPESYQQQFQQSGQAQLTESQSQSQKFKDEHQKIHRFRQGNAIALPAGVAHWCYNDGEVPVVAIYVTDLNNAANXLDPRLRDFLSAGNNRNPQAYRREGEERSQNIFSGFSTELLNEA

SEQ ID NO: 197579 - protein, 133 aa, Oryza sativa
  unsure (1)..(133): unsure at all Xaa locations
  Clone ID: PAT_MRT4530_93324C.1.pep
MASINRPIVFFTVCLFLLCDGSLAQQLLGQSTSQWQSSRRGSPRGCRFDRLQAFEPIRSVRSQAGTTEFFDVSNELFQCTXGVSVVRRVYXPRGLLLPHYTNGXASLVYIIQGRCITGXAFQGCPXTYQQQST

SEQ ID NO: 197580 - protein, 112 aa, Oryza sativa
  Clone ID: PAT_MRT4530_93325C.1.pep
MNHKLSDPMYQKFEKKRKNMCCHCRLPSGRGEGAAGCRLPPPSHPSTAMLPATLRAATPPAAARRQPPAATSHQRRPPRRPPPSRPASAAWACSGIGGGGDGEGEERGRGEG

SEQ ID NO: 197581 - protein, 111 aa, Oryza sativa
  unsure (1)..(111): unsure at all Xaa locations
  Clone ID: PAT_MRT4530_93326C.1.pep
AATQPPARAGGAXQPRLDRRYSRIADDYHWVDQVTDALAQAGLESSNLIVGIDFTKSNEWLGKFSFHGRSLHHISNAPNPYEQAISIIGQTLSKFDENNLIPWFGFGDATT

SEQ ID NO: 197582 - protein, 508 aa, Oryza sativa
  Clone ID: PAT_MRT4530_93327C.1.pep
MGTDIAGDGEPSSPPPLPVPDGLDDNGFPLPSSPTAATAATSFADDFYRSGTDWSSLLAAPSPPPSSEESGKNKSGDSLVQRSLFQAWGIDRRPRREEEVAGVAGGAGAGASSAPSGSWPGRKRRRGGEVEAAADRKPLACPFYKKIPVVLKLKLTNIGTPFTVDAFRYGAVEGCNAYFLSHFHHDHYGGLTKKWCHGPIYCTALTARLVKMCLSVNPEYICPLELDKEYVIEGVSVTLLEANHCPGAALIHFRLGDGKKYLHTGDFRASKSMQLYPLLQRGQINLLYLDTTYCNPKYKFPPKEDVIDFAVRTAKRYLQKEPKTLIVVGAYSIGKENVYLAISKALQVPIYTDASRRRILHAFGWSDLSKMICSDSQSWTFSEETGNQLDLIKPSSRGKITIYGVPYSEHSSFSELREFVMVYICLLVSETPKAVGYSVVRLYNLPGIINAHFTKMLVFILHLFFSIITNASDTTIVPPVPKSEEQPRSSVKVKIGILCSDAASLQSM

SEQ ID NO: 197583 - protein, 306 aa, Oryza sativa
  Clone ID: PAT_MRT4530_93328C.1.pep
MPLLLLLSPPTAAAAGPAPAPAPAPVAVSLPPPSRLRASHLLFAFPRLRKYGRRDREPVATSLGELEEEDEDDEEEEEEEEEDDEEVEVEVEVDEDEFLKNRPKPVGFGAGKTYSTDIEEQLLREMGLGGRRRSSGSGPTPAKNRAAANSAKGTGEDLNDGGVCVRVWNLPKKKNIHKDLNLAFKGFPGLVNIEPAVSANKKTRDPICKGFAYLKLESVEAATSSAVCVYAFYVKEFWTSVYSLKLVFGWFVELYSQKAVSFGKVQKPIRCCVVDSQSSVDSQNQPSSGQAIRQPGLMAKNLVAAS

SEQ ID NO: 197584 - protein, 46 aa, Oryza sativa
  Clone ID: PAT_MRT4530_93329C.1.pep
LLSEVRVHLSAGSGLFAAACSYSSPPARLSLSSGSHDNSSETCVVR

SEQ ID NO: 197585 - protein, 121 aa, Oryza sativa
  unsure (1)..(121): unsure at all Xaa locations
  Clone ID: PAT_MRT4530_9332C.1.pep
VGSLGKHNSKVKLSTLASNSRSSYHPETREANMRQLDNLSEVDSEDMNHEKFXNGSITELPQPSLSQPKGASWSKSGEEKIPSATGGQAKQFRVVKFCWKFVKTQRKKSDKKRRPPNLSSC

SEQ ID NO: 197586 - protein, 88 aa, Oryza sativa
  Clone ID: PAT_MRT4530_93330C.1.pep
SQDSGSEPELTSSNSSLTYIAINTEFIDRSLCVSDFQLKKGLLCTNLVSVCWKIQAELNGVNGSGLTCTAICIPLCHPPTSRLGQLSC

SEQ ID NO: 197587 - protein, 131 aa, Oryza sativa
  Clone ID: PAT_MRT4530_93331C.1.pep
GASPSLQGAPPWWGGSFLLPQVPVSQFLLKVKFWPGAPFLLIGFFFVWSQFPGGFFSTFFFITHPFLYWFFCSGSPFGPPFFWAVFSFFWGLNLYANLVSFFLKKKKKKKKKKKKKKKKKKKKKKKKKKKK

SEQ ID NO: 197588 - protein, 228 aa, Oryza sativa
  Clone ID: PAT_MRT4530_93332C.1.pep
MAGCAVAFPGVPPDIAVLLPGRCLVFVLGPASSPFGCRSCQADPIVVRLFTKPKPPSSSRSFDRRHCTKPILASMQGSPPKSSSLSRRPVRRRQSPPFVVGHRHRFLASCVVFLSFWSLLRCRSSLSQKLPKPSFSRSKASHALLEHIESHLRKPFLHFHVMALLIEYCVFTFDNPRCTPLAKVKFIRIAAPLVMGKRSNDPKLVVSVCRVGTHGWSLWVGLRPYVPL

SEQ ID NO: 197589 - protein, 409 aa, Oryza sativa
  unsure (1)..(409): unsure at all Xaa locations
  Clone ID: PAT_MRT4530_93333C.1.pep
MKGVSSDTVRLRLFPFSLLGKAKQWFYANRATINTWDRCSTTFLSKFFPMGKTNALHGRIPSFQQTRDESIPKAWEQIQEYVAACPHHGMDDWLILQNFYNGLTPMSRDHLDAAAGGAFFSKMVRGAIDLIEKMVSNMGWSEERLQTRRRCMYTVKETEMLATKLDLLRKQLDDHDKRSQGTVKALDLHVTCEVYGSTGHSGNNCLETREEVMYMGNNNNNGYRPQGXQGWNQPCPYYQGGXVFAQAKTTDALSKKLAANDKLSFNKMIETQLAQLTSLVPANESGRILGQPDSSIENVKAITTRGVRLPKTLTVPQLPRTLRLPNLLHPPSAIFFRQSPPMADLEQSSSDAAALKKLYTGGAVPPRQTMAREVGGKSMRLLVDYQYTWNNGILLGCFPNHKCTFRLIL

SEQ ID NO: 197590 - protein, 95 aa, Oryza sativa
  Clone ID: PAT_MRT4530_93334C.1.pep
LVSISSPSPPIVSSPPAIHPRPRGGGSRTPPRGEQGREGEVALSCRHHKAVFFCNPDYPQDICVADLNSEVKVNGFPCKANATADQFLLLYFLFY

SEQ ID NO: 197591 - protein, 79 aa, Oryza sativa
  Clone ID: PAT_MRT4530_93335C.1.pep
CLPACAGFYGGSSRIEFYGLLDNAFKFFQCSPVTVFCPGLQNRHVFGFGKGVFSFLFNFVKKKKLKKKKKKKKKKKHIM

SEQ ID NO: 197592 - protein, 259 aa, Oryza sativa
  unsure (1)..(259): unsure at all Xaa locations
  Clone ID: PAT_MRT4530_93336C.1.pep
HPAPEPHTEHLSISRTSPRVRAFIEKEMGCPIEVVYKEDNRPIAAASLGQVHRAVLHNGERVAVKVQRPGLRKLFDIDLRNLKLVAEYFQSSEAFGGPSRDWIGIYEECSKILYEEIDYINEGKNADRFRRDFRNIKWVRVPLIMWDYTTEKVLTLEYVPGIKINNLTLLDNRGYSRSLIASRSIESYLIQILKTGFFHADPHPGNLAIDTDGSLIYYDFGVMGEIKSFTRERLLSLFYAVYEKDAXKVMKALIDLEAS

SEQ ID NO: 197593 - protein, 306 aa, Oryza sativa
  Clone ID: PAT_MRT4530_93337C.1.pep
MATECGVNKSRRFDPGMSRRTRRSTSLIVCYQDQHAPSLVQQLRQDDKLKTLFQRQGMELQPPYPYEDQELQSEGDEQETPNRYHDEQEEKPHHYLDEEQEKKPFQDQDGERKTPKQYLDEDQKTVQQCQYEDKKVPNQCKDEENTPGQYQDEEQKIAKQCKEEEEEEEENALEKYQDEEHKSLKAQHQCQDTERKAPGQCKTAKTKLITPPCANDVPRFSLQDLIQEKQLLIGEAKATSKLGNGKKAIADRKLPPPPAASSATLAMVIKRPDGGKKSMGVIRRCVQALNQMVKAKHGSKKNKPPF

SEQ ID NO: 197594 - protein, 82 aa, Oryza sativa
  Clone ID: PAT_MRT4530_93338C.1.pep
MRGNHHEAYQPNPTTYAMLYYRIRLDRLTLSDSNSADLSRSRFGLQPIFTLFPGRSPSRTPSRFLLHLRFLDYQIWSLTTMG

SEQ ID NO: 197595 - protein, 106 aa, Oryza sativa
  Clone ID: PAT_MRT4530_93339C.1.pep
MGGGRALLAVVLLFPLVVQIPAFHPVVYEPFDESFEGRGVLFGKGHFQGGWEHQKNDGHENYWLVGSEKGQKYAIIKELGEPGTLKGGTGGLQFGGRVQNGLEWGG

SEQ ID NO: 197596 - protein, 1148 aa, Oryza sativa
  Clone ID: PAT_MRT4530_9333C.1.pep
MPESWRDAEANASSSASVAAADSSPGNGKGGGGGGGAAVARGERAASASASARVPFHKLFAFADKTDAALMALGTLGAVANGAALPFMTVLFGNLIDAFGGAMGIHDVVNRVSMVSLEFIYLAIASAVASFVQVTCWMITGERQAARIRNLYLKTILRQEIAFFDKYTNTGEVVGRMSGDTVLIQDAMGEKVGKFIQLVVTFLGGFIVAFAQGWLLTLVMMATIPPLVVAGAVMSNVVAKMASLGQAAYAESSVVVEQTIGSIRTVASFTGEKQAVEKYNKSLKSAYKSGVREGLAAGLGMGTVMVLLFCGYSLGIWYGAKLILLKGYTGAKVMNVIFAVLTGSLALGQASPSMKAFAGGQAAAYKMFETINRKPEIDAYSTTGMKPDDIRGDIEFRDVYFSYPTRPDEQIFRGFSLSIPSGTTVALVGQSGSGKSTVISLIERFYDPQLGDVLIDGVNLKEFQLRWIRSKIGLVSQEPVLFAASIKENIAYGKDNATDQEIRAAAELANASKFIDKMPQGLDTSVGEHGTQLSGGQKQRIAIARAILKDPRILLLDEATSALDAESERIVQEALDRVMTNRTTVIVAHRLSTVRNADTIAVIHQGTLVEKGPHHELLKDPEGAYSQLIKLQEANRQDKSDRKGDSGARSGKQLSINQSASRSRRSSRDNSHHSFSVPFGMPLGIDIQDGSSDNLCDGMPQDVPLSRLASLNKPEIPVLILGSIASVISGVIFPIFAILLSNVIKAFYEPPHLLRKDSQFWSSMFLVFGAVYFLSLPVSSYLFSIAGCRLIKRIRLMTFEKVVNMEIEWFDHPENSSGAIGARLSADAAKVRGLVGDALQLVVQNTTTLIAGLVIAFVSNWELSLIILALIPLIGLNGWIQMKFIQGFSADAKMMYEEASQVANDAVSSIRTVVSFSAEEKVMDLYKKKCEGPLRTGIRTGIISGIGFGVSFFLLFGVYAASFYAGARLVEENKTTFPKVFRVFLALAMAAIGVSQSSTLTSDSSKAKSAVSSIFAIVDRKSRIDPSEDAGVTVETLHGNIEFQHVSFRYPTRPDVEIFRDLCLTIHSGKTVALVGESGSGKSTAISLLQRFYDPDVGHILLDGVDIQKFQLKWLRQQMGLVIQEAALNHATVRAALPFGLAITKTRI

SEQ ID NO: 197597 - protein, 204 aa, Oryza sativa
  Clone ID: PAT_MRT4530_93340C.1.pep
MASINRPIVFFTVCLFLLCNGSLAQQLLGQSTSQWQSSRRGSPRECRFDRLQAFEPIRSVRSQAGTTEFFDVSNEQFQCTGVSVVRRVIEPRGLLLPHYTNGASLVYIIQGRGITGPTFPGCPESYQQQFQQSGQAQLTESQSQSQKFKDEHQKIHRFRQGDVIALPAGVAHWCYNDGEVPVVAIYVTDLNNGANQLDPRQRDF

SEQ ID NO: 197598 - protein, 157 aa, Oryza sativa
  Clone ID: PAT_MRT4530_93341C.1.pep
MAASHPKPAEAVPPPEDAATAAAAAATEEEEDEWDADGFVIPNLTTQEDDVTEHTAPKPKDPEPLKEKEEKIYLGPHGAPPSQAKQQEINIVGRKQRFRNKLKEADNKFTGNAQENKVETLRELMGARTHSKGVPKSSPRDWLDPHCHESEFDRKPH

SEQ ID NO: 197599 - protein, 72 aa, Oryza sativa
  Clone ID: PAT_MRT4530_93342C.1.pep
MGKTPVRMKAVVYALSPFQQKVMPGLWKDITTKIHHKVSENWISATLLLAPIVGTYEYAMYYKEQEKLSHRY

SEQ ID NO: 197600 - protein, 40 aa, Oryza sativa
  Clone ID: PAT_MRT4530_93343C.1.pep
LANFETSLYNSFAPSTHIVHKFKNSLKYFFNHIIKFPNAH

SEQ ID NO: 197601 - protein, 352 aa, Oryza sativa
  unsure (1)..(352): unsure at all Xaa locations
  Clone ID: PAT_MRT4530_93344C.1.pep
MKMKKFYQKALDEAFVAVQESSDIEFESDEDDGKGNKGKNDVCLMARSVDEDSNCDNEVLFEEIEAVRYVNRSHVKKIKKSESCLAMSFVMNTRLVDELFLTKRALNKCQFALFASSMFNVISSKRIKQSSEKPCLTCVANEMKLKDALGRVKHMEEIVKQDEVFSCSNCRKQKGLLDACKNCANLTQEVSYLKSSLQRFSDGAGARGGEILLKPEPKNTVFKSAGIMTSLSALSSKTNXGHLVGFCFRLARKQKKEREIAFAKKRWQKLRFVPRQAVRPVLYPQSDRXKPSVRPQALLARKENVWIVDSCCSRHMTGDKNWFSSLKKASRKDSIIFGDASTSMITTTGSVK

SEQ ID NO: 197602 - protein, 52 aa, Oryza sativa
  Clone ID: PAT_MRT4530_93345C.1.pep
SYQHLLLTNCFYLDKNASRIALIPGPYACPEAADVPITSGNAQKTSIHARQP

SEQ ID NO: 197603 - protein, 351 aa, Oryza sativa
  unsure (1)..(351): unsure at all Xaa locations
  Clone ID: PAT_MRT4530_93346C.1.pep
MVSSGGGGGARHGVVAAWASFFSSRIGLDCQEAVSLGKIEVVNIPVEIGTAPSAKQVQRLTEVVSDSVKKPIYLHCQEGNVGASFDSDYILSVASGITNGKPSSNGASTSVEERFTLDQFGQVILLQCRVLVQMCRSIDNRSAGLKFVSSCTCKGGFIPTALSWEEEEADTLGQAGAGRKRLTGPRQKGGKETGFPLQLMHLKEGSDPYLPKIECYEHNHLITKVEGDGXVIVAIPTGSTAYSGAAGGSMVHPNAPCMLFTPICPHSLSFRPVILPDSARLELKIPDDARSNAWVSFDGKRRQQLSRGDSVQISMSQHPLPTVNKSDQTGDWFRSLIRCLNWNERLDQKAL

SEQ ID NO: 197604 - protein, 164 aa, Oryza sativa
  Clone ID: PAT_MRT4530_93347C.1.pep
MKPCEGEELARRRSSSAPPARFARSSTPRRQGAVLLVGLHAPVVAIEGQRRLHKSACSPQICGTYGSAVTRRLAGLTGCPPARPRCRLGLCRRPGSATARRLAGRPDLGGGSTARPVARRSGIIKLKESTTFAHGKDQIMEEATDFVHQIGTVNNIQQNQEEPA

SEQ ID NO: 197605 - protein, 45 aa, Oryza sativa
  Clone ID: PAT_MRT4530_93348C.1.pep
LRTLRLTTVSLLSEYIFLKNCQLPTYCFSRSPYRPCHPSLSLSFL

SEQ ID NO: 197606 - protein, 185 aa, Oryza sativa
  Clone ID: PAT_MRT4530_93349C.1.pep
MATANGVDLATAGLLRLLAMGMGPSVQIPGEGGVPVMMVQHIIIGDDGGDLFSGGLGGGVPPASKAAIASLKEVKAGEDGEGGDSLGDCAICLDAFAAGKEMPCGHRFHSECLERWLGVHGSCPVCRRELPAAEQQPPEEQQSGGADAGERRRPRAVVVSYVVLGDGGRGGERGEPWNIRIEDVD

SEQ ID NO: 197607 - protein, 184 aa, Oryza sativa
  Clone ID: PAT_MRT4530_9334C.1.pep
GGNILRFVPSPCQYLQGLDTSVGEHGTQLSGGQKQRIAIARAILKDPRILLLDEATSALDAESERIVQEALDRVMTNRTTVIVAHRLSTVRNADTIAVIHQGTLVEKGPHHELLKDPEGAYSQLIKLQEANRQDKSDRKGDSGARSGKQLSINQSASSSRRSYRDNSHHSFSVPFGMLIGIDMQ

SEQ ID NO: 197608 - protein, 62 aa, Oryza sativa
  Clone ID: PAT_MRT4530_93350C.1.pep
NTPNTGRLLFYRRGVGRRGEGTGIGAIKGSELAVVLGASGQTAVEVRWLRLEKEKKKGERGA

SEQ ID NO: 197609 - protein, 213 aa, Oryza sativa
  unsure (1)..(213): unsure at all Xaa locations
  Clone ID: PAT_MRT4530_93351C.1.pep
MAGAAGSSWSSLLLAAVAVALAVAAAPSLAGDPDYLQDICVADLNSEVKVNGFPCKANATADDFFSGVLASPGAAANTTTGAVVTGANVEKVPGLNTWGVSLARIDYAPGXLNPSXTHPRATEVVLVLYGELDVGSPATTSRLLRPSILRAYASVASTTPLAAXSAAHPPTQSIAATLFAASPAVPDAVLAKAFQIDDEEVDKIKAKFAPKKT

SEQ ID NO: 197610 - protein, 77 aa, Oryza sativa
  Clone ID: PAT_MRT4530_93352C.1.pep
MPNGIVETGIRARLRIAAVVARTRLLMNWLFIAGLYHGREFYPTADIKDIDSSNDEDKSDDVAAREDMKLAIITTVN

SEQ ID NO: 197611 - protein, 239 aa, Oryza sativa
  Clone ID: PAT_MRT4530_93353C.1.pep
MAGAAGSSWSSLLLAAVAVALAVAAAPSLAGDPDYLQDICVADLNSGGYRSICITVPREVKVNGFPCKANATADDFFSGVLASPGAAANTTTGAVVTGANVEKVPGLNTLGVSLARIDYAPGGLNPPHTHPRATEVVFVLYGELDVGFVTTANKLLSRTISQGDVFVFPRGLVHFQRNTGDKPAAVVSAFNSQLPGTQSIAATLFAASPAVPDAVLAKAFQIDDEEVDKIKAKFAPKKT

SEQ ID NO: 197612 - protein, 53 aa, Oryza sativa
  unsure (1)..(53): unsure at all Xaa locations
  Clone ID: PAT_MRT4530_93354C.1.pep
RARSPLRPPSPDPPXXIXPPPXPXXPTPPXXXXPPPXHNPQPTTTHTPTLFTT

SEQ ID NO: 197613 - protein, 329 aa, Oryza sativa
  Clone ID: PAT_MRT4530_93355C.1.pep
MEEAYCMMMVGRERELVAELRHLLFPSPSPTPTTPASHSTTALAGDGECCLPPGLTTTTTVSGGGRRRGRKRVNRDNDNVKLLLQADDDQEAVIADHGDANAKPLPNFTKTRRRKQQATTSTMVTTVPDFDGYQWRKYGQKQIEGALYPRSYYRCTNSTNQGCLAKKTVQRNGGGGAAGYTVAYISEHTCKSIEPSLPPVILDTTVRTTNNHQQPAAAESPAATSSSSSNMVMTSSETGNWSGQHGAYACRQMIAADEEYCCWDTPATTTTTSGSNGGNSTCAEDIELLSRPIRSPMHIAAEGNWMDDLLLVTDGLIVISNSSITHFLT

SEQ ID NO: 197614 - protein, 231 aa, Oryza sativa
  unsure (1)..(231): unsure at all Xaa locations
  Clone ID: PAT_MRT4530_93356C.1.pep
CQLPPIYPPRHRPNTQSLYEGFQKDAQVWFPYEDSADLELPSDFRFEDINHERFQTSXKSSQLQSAHVFFQSASIKEEIFKPLTSSITQSKNFDRWWGEWKLHLFHQPASMYMIDLFPDVVPQTTESSPPRQSNSGKDITYAPGLIPNGGGPSHPVIGYDAPNTLALLQGLIREPADADPSNSFCSNSLYKSKHPSLTIFVIVSLYGRLLTFLVIAEKEGCCEEEIDSNDI

SEQ ID NO: 197615 - protein, 99 aa, Oryza sativa
  unsure (1)..(99): unsure at all Xaa locations
  Clone ID: PAT_MRT4530_93357C.1.pep
EXHGTPXAIWPITLTRSDVHHWSDGXRAXGLLMXNTCTLXANXPXLDXXXHYXTCKXXYXISSXSIRNYLVPNSSTXGDQXFLKXXAVAGXNXXXGSLX

SEQ ID NO: 197616 - protein, 62 aa, Oryza sativa
  Clone ID: PAT_MRT4530_93358C.1.pep
MPNVLNAYVVPHTHSASASKRLAGGGAARGGGQRGRARGDSVPAVVSGSRREATRRFSSPFF

SEQ ID NO: 197617 - protein, 87 aa, Oryza sativa
  Clone ID: PAT_MRT4530_93359C.1.pep
MDEFGRNPEKATGQEKYDDSELLHYTETPKEKRKQRGKPNCGKNPTTWTIFPYLRRPEPSESMEERGRMKRKKESPFFRVAPRDSTT

SEQ ID NO: 197618 - protein, 309 aa, Oryza sativa
  unsure (1)..(309): unsure at all Xaa locations
  Clone ID: PAT_MRT4530_9335C.1.pep
RPNILEIINQINEKEDIIGEVDVHPSEPWILTSNMFGSVDILNCNTQVXANLFTNSISTVIAAKFIARKQWFVVGHQDGFIRVYTYESPVKQVKRFKAHVWNITTLDVHPTEPYLLSIGSQDQIKLWDWNKGWECIKTFDLHGLAYQIKFNPKDTHKFAVASLEKKIQVWNIRSSRHEFTLSGHGYIVSCLDYFTRGNQLYMITGSWDKTAKIWDCQRRTCVQTLEGHTDCITCVCSHPDLPILLTGSNDETVRLWNATTFKLEGVLDFELGKVTAIVCLKGSKRVAIGHDAGLVITEIRHGKPAPSNR

SEQ ID NO: 197619 - protein, 108 aa, Oryza sativa
  Clone ID: PAT_MRT4530_93360C.1.pep
MASSSSLPEIVSFSPESDGSSSSSAPLIGGDGELVVQLVPRDVSDGILGKFADTSEFDFDYDQSGLWSPLVLRPEVLLLAQTPAGRRRRRHHHRRRWKRKKMLCYCFW

SEQ ID NO: 197620 - protein, 180 aa, Oryza sativa
  unsure (1)..(180): unsure at all Xaa locations
  Clone ID: PAT_MRT4530_93361C.1.pep
RNPQRHASLTGSRRNLGMVNRRLKGLKLHKCKCNKXMRQETRSLSPKVQKLAGFLGEPNFTVQNHEATSSPLRQGVGKEGVSPRSGLPKPXSLRVVLHSLRRPDYFTTARKLAVAXIKCTETRXTDQTAIERPVRPAKAQSDRCWLGLTSCGSGGSGFSPRGRPAXMSSVRPPIERRRDG

SEQ ID NO: 197621 - protein, 97 aa, Oryza sativa
  unsure (1)..(97): unsure at all Xaa locations
  Clone ID: PAT_MRT4530_93362C.1.pep
QDDLKRLAAVRAVEQVESGMVLGLGTGSTAAFAVAVIGALLASGKLSGIVGVPTYMRTLXQAQSFGIQVSXLYDHPLIVLSIDCADQCIPFLTLHLG

SEQ ID NO: 197622 - protein, 522 aa, Oryza sativa
  Clone ID: PAT_MRT4530_93363C.1.pep
MEEMIKPAPAPASSEEEKEVVATAATGERRHEEATAGREEQEEEEEEEEAPVVLKKGPWTTAEDAVLVQHVRQHGEGNWNAVQRMTGLLRCGKSCRLRWTNHLRPNLKKGSFSPDEELLIAQLHAQLGNKWARMASHLPGRTDNEIKNYWNTRTKRRQRAGLPVYPPDVQLHLAFAKRCRYDDFSSPLSSPQQSAGSNVLSMDAADAAGAASSGYTSARPPPLDLAGQLAMGSRPVQLLAATPFSAPSSPWGKPFARNAQFFQFPHSSPVSPTTPTGPVQVHPVTPELSLGYGLHAGDRARLPPVSPSPGARAELPSSQLRPSMAPTTAAAAATGGLVGGALQDHPNAASLEAMLQELHDAIKIEPPAPPENRGTEEEGGGGGGNLRGFLHEQIFDKLMPIKSEDFCIVGLHSVLISLQFPGDGKPEVELKDDIETLFDLIIPATFPAAAPEPAAAATAASAAPNHSSSVSQHSSDDQDHSNGADVLDLPILTGGGGGSSEQDDWSLDGAACQWDNISGGIC

SEQ ID NO: 197623 - protein, 155 aa, Oryza sativa
  Clone ID: PAT_MRT4530_93364C.1.pep
MDSEDMGRSTGWLSSTVDQRISEQTQTNRRPIDDRSTPSWYFSSAEGPRIDFFPACRRPPTSEGQKPIPPSRRRKPKPLARTGADGEKQRRRCMPPRRCAHSPKGEGATFEQPCPGAVPVVSLSSSARRHRRPEAVDFPCASATTGGGWATRARG

SEQ ID NO: 197624 - protein, 56 aa, Oryza sativa
  Clone ID: PAT_MRT4530_93365C.1.pep
MEGCRTTNDGTRGRGALDEGPPPTGSHGHNHRKVVVVDAVPLQLIKVPGKEGEYEA

SEQ ID NO: 197625 - protein, 93 aa, Oryza sativa
  Clone ID: PAT_MRT4530_93366C.1.pep
LTASPGAHLSDTPSAFWRIGEKKGSMRSGHPMRQKWRIAQNTGERNGQIWAVYLSSRHPHNWRSHPVLPPPSGSSMKGEGRGKRGRTGGYLSM

SEQ ID NO: 197626 - protein, 400 aa, Oryza sativa
  Clone ID: PAT_MRT4530_93367C.1.pep
SGSPGCRSLEWSPHTGEHDTVDELVLQHLEPHTNIRNLRICGYEGCVVPFWIENLSVRKLVSIKLESCINWEQLPSLGELTLLRYLLLRNLPKLQQIGRHSHMSSSSSMELLLPPNLLSLEIEQCPELQELPLLPPSLVSFQIIEVNWTKLPRMGKLCSKSNETILAQLQEVVINDCPCLSSLEDSFLEQKQHMVALRNLHIHNCIHLESASIPFEAMIMLRSLCIGRCPIGTRPRGAGEMFLPPSLKDLYIRSCGDYERIVVVSLQEQQLINLSVLNLNNCSNLVSLPPSEVFSRNFTSLQIIIIQKCGNLSSLGGLESLPSLSELTIRRCAKLTKFGSSVNPYVSGGEEEHLVDSRSSLRISSLTIDLPSLLLVEPLKSLCHTEHLEIEDASQMKQLT

SEQ ID NO: 197627 - protein, 103 aa, Oryza sativa
  Clone ID: PAT_MRT4530_93368C.1.pep
RKCPPGRRHLRVLEPNCPISLTLDPGPGNPHCGLACVERLASMCCPTVNAGVVQVGFCKLVTAKLLNPSPGMATQHWGPFSLFFSLDCFPWIVCHNVSVPLAS

SEQ ID NO: 197628 - protein, 95 aa, Oryza sativa
  Clone ID: PAT_MRT4530_93369C.1.pep
KGPKGRWFWPKESPRAMPKKSPLLLIKWPLALGQLLNPCRHAPRQGEGLDPTSKTHWGLPQTIEPFYYAPPAMAKGGPLFQTFWISPFPPYGKGP

SEQ ID NO: 197629 - protein, 63 aa, Oryza sativa
  unsure (1)..(63): unsure at all Xaa locations
  Clone ID: PAT_MRT4530_9336C.1.pep
QITNPPPPLGKIFKHNTLHTVTSFIQESQLLHGHQIVPACGVPVFTAIHTLLAAAQGTTXTHP

SEQ ID NO: 197630 - protein, 289 aa, Oryza sativa
  Clone ID: PAT_MRT4530_93370C.1.pep
MSHFGRSGPPDIRDTFSLLVLNISFRTTADDLFPLFDRYGKVVDVFIPRDRRTGDSRGFAFVRYKYAEEAQKAIDRLDGRNVDGRNIMVQFAKYGPNAEPIRKGRIIEEVEKSRDRSRSRSPRRRHRDDHRDRERRGRSRSRSRERHGRDRDRDHRRHSRSRSRSRSRSRSRSLSPDYKNRRRGRDDDKRRSKSKSKSKSRSKSRSRSKSRSKSRSRSRSRSRSRSFHSASPTRHSASPPLKGSTPRRSPARNGSPEKETNGKGSPPSRSVSPSPQRAGSRSPGSDDKE

SEQ ID NO: 197631 - protein, 446 aa, Oryza sativa
  Clone ID: PAT_MRT4530_93371C.1.pep
MKQVSCSVVNKCLAYNPCLSRNYYQRSHTVKLQRSQAGQIILPRKLRKSTLWQTNFTQRQIATHCSSDLSTSCREELPSYLTVNVLKDQSCARQGIFRKVIVILNPNSGFRSSREVFYQKVQPTLELSGFMMQVVETAYAGHAHALASTVDLSTCPDGIICVGGDGIVNEVLNGLLGRDDLEEAIQLPIGIIPAGSENSLVWTVLGIRDPVSAATTLAKGGITPIDVFSVKRTQAGITHFGLTASYYGFVADVLQLSEKFRLHFGPFRYVIAGVLKFLSLPQYRFEVNYLPLSPRRNHKLLPVTEKCNDHLAADSSAEDNWVTRKGEFLGIFVCNHFCKPAQGLLSPVIAPKAQHNDGSLDLILVHGSGRLRLFCFFIAYQFCWHLLLPYVEYVKVKHVKVRPIGKTHNGCGVDGELILGEGQTEWQCSLLPAQGRLLGRHRSASE

SEQ ID NO: 197632 - protein, 132 aa, Oryza sativa
  Clone ID: PAT_MRT4530_93372C.1.pep
MALPAHTILSYLPMALTYLHHNMPLLEGTYTRSKLTSVPEGREAVAVNDPWRATRRMGSPVGRWKMMTVGRTSLFSLSSLVTGGESGGGLLSKVSARRRRESNSSAQHPAPRPISSMMSYSAATGSFAPQPC

SEQ ID NO: 197633 - protein, 142 aa, Oryza sativa
  unsure (1)..(142): unsure at all Xaa locations
  Clone ID: PAT_MRT4530_93373C.1.pep
MAFWLDREEWAQDFTSPENRYACLLTLSLLQGRTAARGVAHGGAVREVLVYGLLLAGVDHGELMGRARFCLCPTGDDEGVAAASYRVVEAITAGCCAMDIAVSFLCRRRRATSTPSQXPCRATGSPSIPSCAAVALATGFHH

SEQ ID NO: 197634 - protein, 90 aa, Oryza sativa
  Clone ID: PAT_MRT4530_93374C.1.pep
VNTKSCDLHTIKTKVTFRSKNYCPELLSESTSSVVHPQILPSPVSQALTLQRILLPIDICPSYSYLHTHTFIHHSVPSCTSAFVYSSVSS

SEQ ID NO: 197635 - protein, 49 aa, Oryza sativa
  Clone ID: PAT_MRT4530_93375C.1.pep
LQGVFGLAASEPNPFVLKFLTRSHEQSIQCIVHPGATQDISGYRPMDRH

SEQ ID NO: 197636 - protein, 80 aa, Oryza sativa
  Clone ID: PAT_MRT4530_93376C.1.pep
LQPRPIKPTNFPFMKSLYLQRFTLNTTRSQKKTTPLPIKQPTLRNKKGQTPAFLLRDPTSPNTLAPTAPFSERKLVVQPP

SEQ ID NO: 197637 - protein, 274 aa, Oryza sativa
  Clone ID: PAT_MRT4530_93377C.1.pep
MTSRNEIDEITLEDLDEEQRQVMEKRIKAIMEEIPARSLIRTHASSCYELVQNHQVDGLAQNTHYGQYNHIVPPQPPILRPPNPQPRPENMEEQISNIIRKAFGIEPRNCAKNRSGGSKVKKVKKVWVRKEAKTPEVVFIKEESQDVPTGDAVETIQAEKVEADTMTANSGSLTGTSGRSNHRPMAAGLIGPKDRPDRVALENIEKIEGNTGASTSTKNIKNHSLAPGKQPQPKWIPSDLSRSQKRRLQRLRAIGQKEKKAEDMRDQTCKNLEP

SEQ ID NO: 197638 - protein, 102 aa, Oryza sativa
  Clone ID: PAT_MRT4530_93378C.1.pep
MERRQRLVEDKLKLISASASRRRLVKLQFLIPKPRCHRRTLRPRAALAPPASSVTTGEADLVLGLAGRLPRGRVRASFLTRTAARAPSLVVHELTPSKDFKI

SEQ ID NO: 197639 - protein, 80 aa, Oryza sativa
  Clone ID: PAT_MRT4530_93379C.1.pep
RQLVQVQGDHPHFGRIWLKAKPGWFFRCPFNMVFPLGPMGAPGPFPPRGVSCDEFYQKRGSEDKNKPRYPLMVHVNLWVV

SEQ ID NO: 197640 - protein, 217 aa, Oryza sativa
  Clone ID: PAT_MRT4530_9337C.1.pep
MASPVSSCPAAAASHPSSHHHCRGVRPAAGHSFSPPTRITLVRWTPPRHGWVKLNFDGSVHNDGSGRASIGGVIRDDHGRVLLAFAERTPHATIGVVEARALIRGLQLALDHGWNDRLLVEGDDLTLVRLLRCESTHTRIPPAMLDDILWLLDSFRVCEVQHAYREGNQVADALCHEAYKAAPAARLWTPGTAMVPFPVWEKLEDDRRGVLHQRVRA

SEQ ID NO: 197641 - protein, 89 aa, Oryza sativa
  Clone ID: PAT_MRT4530_93380C.1.pep
MATRGQKGTCGTASGIARRGGHGAQAGENGAGISRPPAQPYYFGTISGKNFGYPEVSPGSGFEYGNDAETTSATGAAVQHPSHRHLLHP

SEQ ID NO: 197642 - protein, 861 aa, Oryza sativa
  Clone ID: PAT_MRT4530_93381C.1.pep
MAYKRKSPVSSPPLLRHLAAEQGRGADLHLASRGGEGILAGEDMASRSTPSKRPFQKNSSEQNGRGKWQKTKHNSLQQPQLIVQPGVPIFRILCPTSKSGNVIGKGGGIIAKIRQETGVKIRVDEVVPGCDERVIVITAIDKDREVSHVQTKENDGGVACSVDGNHGMEKDHTKEEKDESNKEMDDSEKGLGKEEKDDLEKDHDKEDRDESGKDNDKKADDSSVAKDTNSEPEAQLELEKGMPLAVKAILLVFDRIFVNEMENGTGDASGERNHVSLRLLVLDSQVGWLLGKNGSVIKQMSTDSCCEIRVSKDKLPLCALPRDELCQITGELDSVRKGLNTVAQLLFTHPPKESDVLGAHNSGSSRSFFNQPDVLPPGMQPNLHLPFQGPNVAHLPNFPEALMHGHGSVPPEPLTFRLLCSSDKVGGIIGKGGNNIKSIQNDTGCEIKVLDTVPKSEDRIVFISGPAHPGDGISPAQNAILHVQRKIVPTSNTKEGPAICRLIVSPNQVGCLLGKGGSIIAEMRKLSGAHIIVLSKDKIPKGVPENDEVVQISGASEAIQEALMQITARLRNHLFRDRMASTVPNVQPPFGLVDPQFGSYAGNHDSISPRIFPNVPQFHKDFIGRPLDEMSAPWTMKGMQVVGDPISLPDIPGMAHRGMGGFPGPGQPSIVSTITADVMVPKLVLPSLCGEDGGCLNRIREVLWKISQSFHCEIEMLWKLIVLLLAEGRFGDAYGPWGPPCVRPWAFCDWLRHYFVKFETHISTFIICRSCTELAKQWRYTSDTFRYLMNLVSQGRKFVESVVIFLYILGYHCYISIGSCTPEVSQLRCTVTILRYRESATSCESRFLPLLSFGHSGCKGL

SEQ ID NO: 197643 - protein, 232 aa, Oryza sativa
  Clone ID: PAT_MRT4530_93382C.1.pep
MTWSSDSDRDDEPATAAAASADDASLATSFFLQQPGTPPAAAPAPARRRRHKNRRPRAHRRAAAKNEEEEEVAGTEDVWRGAQWEAAWPRRAAARPVVVADDAAGAAAAREDAPGVGGEGGGLGVGRARSLTDDDLEELKGCVDLGFGFSYDEIPELCGTLPALELCYSMSQRFLDEHYHSPVAEPAPVAPSSPAQPIANWKISSPGDSPDEVKARLKYWAQAVACTVRLCS

SEQ ID NO: 197644 - protein, 218 aa, Oryza sativa
  unsure (1)..(218): unsure at all Xaa locations
  Clone ID: PAT_MRT4530_93383C.1.pep
MKQRKYSLLLLFMKDVQNGWTKVIRSASFLWWRWGSHTIDSCKEEEQLEARQEKKXISPLDRKRKSKGELGMASKRIQKELKDLQKDPPTSCSAGPVGEDMFHWQATIMGPSDSPYAGGVFLVTIHFPPDYPFKPPKVAFRTKVFHPNINSNGSICLDILKDQWSPALTISKVLLSICSLLTDPNPDDPLVPEIAHMYKTDRHKYENTARTWTQRYAM

SEQ ID NO: 197645 - protein, 569 aa, Oryza sativa
  unsure (1)..(569): unsure at all Xaa locations
  Clone ID: PAT_MRT4530_93384C.1.pep
MASSPESSAAPARHIPDELVEDIFARMPARSVLRCRCLSRAWAAALSTDAFVDHHLLLANRRGGPKLCIPPRSASADTINAWSPEGRTTTPLMAVPHGTRNGRIIPYGRPCRGLLLLHAIFARLYFVCNPSAGEVAALPDXAWRANPRPGEDYASVGLGYDARTRTHKAVRLLYHHGHPAACHVYDIAAATSTGHWRPAATXGEHRDLVHMNKLAVYAQGHLHWITTKSVGDADAIMSFSMAAEVFGRVPPPPGTTDMKGFMITELAGCLCVYPAYLSSERSLDIWLLTDYSTATWELRCRIDPTSATSPETNDFFLVNREVTPLVLTDDHRRVLLLSEEHEVAEYDAASGXTPKHAGPPELRRATATXTPQLVPYEESLVSAGRPYEDILFSPPAARAVALVLRRLPARELGRLKLVCRSWRAMIETDRFAASHNAHARETAMASFAAGCHVSLGSYYYYSLVFVPLESCSNRKPPLMSTRTVVRNACHGLVLVTDVNGERNIVHNPVTGAGRNFSFLTPRRCPPKIPEWTTAAGAPGWGTTRRGRSTCSSASPTPAARIAPPCRCGA

SEQ ID NO: 197646 - protein, 627 aa, Oryza sativa
  Clone ID: PAT_MRT4530_93385C.1.pep
MESAAAAAGWGLGAVDGVLPPELLLDVLLRLPAGPICRLRAVCRSWLAFTTDPHFVAAHAARHPAPLLAVGVQGFPRLCVDLVDLSGNLVKQILRVGKGRVVSGSSADRVLVAGEDHSVRVLNPTTGSISILPSHRCGGADPSTIAAWFAFGQTASTGECKLVRILLNIDNSRHLSEVITIGDTDGEWRETANPPGYLGWNCTNGVVFKGAAYFILDYCFSDPSFLERGCMPSFDFATEKWSVALQGPLNRILEESNGTLSYHDLANQLMLSGLKGTLCTSHWNDQFYTVDLWFLTDSEKGTWSKDHRINVDAVFHGIGDYLKVQPLLVTDEGKIVLSMQMGSKGVVQIYDPVTDTSSDIIQISIYTGAREKKVGRALYEVLPQSWALRISTALMMFRFGVIKNPKCHGQEHPIHQESVIPHQPQVTYKQIVPLGTSTHLPFVPAWVGSEESGAGHALKQSSGGERRILACVEAGRCGGIELVLPSGSGVEASRGGSELVVPGGGGVDVVLSGGSGVDVVLPRGGSGGDVEAGDGSSELVVPSGGVDVVLPGGGGVDPGGGSGVDRSRIPALLGFELPVHPSRSGYCTRSYVFALPSQFSAWYCTETELVPPGTKLYQPLDRARSNG

SEQ ID NO: 197647 - protein, 74 aa, Oryza sativa
  Clone ID: PAT_MRT4530_93386C.1.pep
MGALPPSPVVKPDIDVVIVDGTSAQSVGCQETCRALCLPPLCPLSPYPARLPIDDQNTYEFCSVFLVHTAMRKC

SEQ ID NO: 197648 - protein, 381 aa, Oryza sativa
  Clone ID: PAT_MRT4530_93387C.1.pep
MLHPLCLWVLNPATGVTVALPKNHSDEIAAGRGMMMYHGKVESHAFGEISSTGVYKALRIIRFYQRQLCEVIAVDGNNQDMWRKMQGPPATICCSKQMRCVVVDGVVYFMMEFYTTYFEIVVLPVEPGSIASFNLETEKWMTVQGPEVVHRHVQDGDSTYSELNLQLSLADSGGCLVTVHNIPPIRMDLWFLTDSETDDGRVYTRSVNKEFRSEDPGTGTCATVFEASRSSYKHFERCYGTAVGTGTARYQNPSRWIWPDPTAGRVWYRAKGWDSRSIDAAAASWIDAAASGKDDIDAAAGNDEFAAAVACFNIATATATGKDDIDAAAAGKDDIDASATRNDEFATAAACFNAAAAGKDEFDAAAAACFNACQNPPLAAT

SEQ ID NO: 197649 - protein, 127 aa, Oryza sativa
  Clone ID: PAT_MRT4530_93388C.1.pep
QPYDDDDVVGEARPTVVRHAVPRAVCTRDIDAAASGKDDIDAATAAGNDEFAAAVACFNVAAATAAGKDDIDAAAAGKDDIDAAATGNDKFATAAACFNAAAAGKDEFDAATAACFNACRNPPLAAT

SEQ ID NO: 197650 - protein, 269 aa, Oryza sativa
  Clone ID: PAT_MRT4530_93389C.1.pep
MLHPLCLWVLNPATGVTVALPKNHSDEIAAGRGMMMYHGKVESHAFGEISSTGVYKALRIIRFYQRQLCEVIAVDGNNQDMWRKMQGPPATICCSKQMRCVVVDGVVYFMMEFYTTYFEIVVLPVEPGSIASFNLETEKWMTVQGPEVVHRHVQDGDSTYSELNLQLSLADSGGCLVTVHNIPPIRMDLWFLTDSETGMWVKKFSLPSQFIIVTVHPLLVLDDGRVYTRSVNKEFRSEDPGTGTCATVFEASRSSYKHFGIYTGNLLSS

SEQ ID NO: 197651 - protein, 94 aa, Oryza sativa
  Clone ID: PAT_MRT4530_9338C.1.pep
APPFRPSAKSILRGSIRKTSSPRGSPPPKKKWGGHLFAQSEKKKKSRHNPLVSSCMQTLGALCMGLNFGHLLRVLWVCRSSKYVMLQQPLVPRN

SEQ ID NO: 197652 - protein, 67 aa, Oryza sativa
  unsure (1)..(67): unsure at all Xaa locations
  Clone ID: PAT_MRT4530_93390C.1.pep
PASASSSASPEEEAPAIAXKGFFLHPSPRSAXPPRLLPLFPVTSPRVASSSSSSAAAAVAVASPSFE

SEQ ID NO: 197653 - protein, 162 aa, Oryza sativa
  Clone ID: PAT_MRT4530_93391C.1.pep
HASAFLERGCMPSFDFATEKWSVALQGPLNRILEESNGTLSYHDLANQLMLSGLKGTLCTSHWNDQFYTVDLWFLTDSEKGTWSKDHRINVDAVFHGIGDYLKVQPLLVTDEGKIVLSMQMGSKGVVQIYDPVTDTSSDIIQISIYTGASVFTGSLLCPQSV

SEQ ID NO: 197654 - protein, 156 aa, Oryza sativa
  Clone ID: PAT_MRT4530_93392C.1.pep
MAAASSADMERIFKRFDTNGDGKISLSELTDALRTLGSTSADEVQRMMAEIDTDGDGFIDFNEFISFCNANPGLMKDVAKMSKFKLMAVAAAAAGNDDIDAAASGKDDIDAATATGNDEFATAAACFNAAAAGKDEFDAAAAACFNACRNPPLAAT

SEQ ID NO: 197655 - protein, 160 aa, Oryza sativa
  Clone ID: PAT_MRT4530_93393C.1.pep
MAKLQNCRKDPLTYMTMTMSLAKHAPRWYATLFPAPTTRRTEVEGQKRNFASIAAAVAGNDDIDAAASGKDDIDAATAAGNDEFAAAVACFNVAAATAAGKDDIDAAAAGKDDIDAAATGNDKFATAAACFNAAAAGKDEFDAATAACFNACRNPPLAAT

SEQ ID NO: 197656 - protein, 199 aa, Oryza sativa
  Clone ID: PAT_MRT4530_93394C.1.pep
MAAASSADMERIFKRFDTNGDGKISLSELTDALRTLGSTSADEVQRMMAEIDTDGDGFIDFNEFISFCNANPGLMKDVAKINYTPSISQSVAAAAAGNDDIDAAASGKDDIDAATATGNDEFAAAVACFNVAAATAAGKDDINAAAAGKDDIDAATATGNDEFATAAACFNAAAAGKDEFDAAAAACFNACRNPPLAAT

SEQ ID NO: 197657 - protein, 79 aa, Oryza sativa
  Clone ID: PAT_MRT4530_93395C.1.pep
VFYNVIYSGAKIRVTLWGQLAHSLNEDVIGNHTVVVVTSTTVQEFNGNSNVFYSTFSICTKVTRNFVFNRSVFEVKQCH

SEQ ID NO: 197658 - protein, 72 aa, Oryza sativa
  unsure (1)..(72): unsure at all Xaa locations
  Clone ID: PAT_MRT4530_93396C.1.pep
LTKMREADAGLSAITDSAKSGPITLPGRYLSGKQEHVXWAKIHTSTDXVAGPYDSLVAPPDDLQETNTMLNK

SEQ ID NO: 197659 - protein, 85 aa, Oryza sativa
  Clone ID: PAT_MRT4530_93397C.1.pep
SRCHSPDAAVHREEKCHDPVAAAAASPRPSSATSCRRPRPPTLPPPPAPHVLPLPQAAAALTRPPALVPQPPLAPPPVPLGRPLP

SEQ ID NO: 197660 - protein, 373 aa, Oryza sativa
  Clone ID: PAT_MRT4530_93398C.1.pep
MERCSVLGLGGGGGGGGRLDGELPPGFRFHPTDEELITYYLLRKVVDGSFNGRAIAEIDLNKCEPWELPEKAKMGEKEWYFYSLRDRKYPTGLRTNRATGAGYWKATGKDREIRSARTGALVGMKKTLVFYRGRAPKGQKTQWVMHEYRLDGTYAYHFLSSSTRDEWVIARIFTKPGVFPVVRKGRLGISGGGGDTSCFSDSTSASVGGGGGTSASSALRAPLAEASLFAAAAAPAVDGADSSNYGGGGGAGSATATANLVTGLELVPCFSTTAHMDASFGTGQYNPAPLAVEPPPPPPAFFPSLRSLQENLQLPLFLSGGMQAGVSSQPLSGGGAFHWQSGMDVKVEGAVGRAPPQMAVGPGQLDGAFAWGF

SEQ ID NO: 197661 - protein, 76 aa, Oryza sativa
  Clone ID: PAT_MRT4530_93399C.1.pep
GVVAEGATFRIGRRLLPPDNLGAPGGMRRAVVAAPSSLPPCPPPHPDLAVSTVTQIQRWAARKRHGSVRACPARIR

SEQ ID NO: 197662 - protein, 105 aa, Oryza sativa
  Clone ID: PAT_MRT4530_9339C.1.pep
RQGAHRRGAVFFGGRPPLHAGTTWFAPGWGVLTSLRAAARKKKKPTKKRRKRCREKKNLKKMAAVAAREFSGRGKLKKAAGEKPANRKQGKIKQRFIQFPFHSPP

SEQ ID NO: 197663 - protein, 39 aa, Oryza sativa
  Clone ID: PAT_MRT4530_933C.1.pep
MRMGAQDMKLKGLKRALKEQKARLYIIRRCVAMLIRWHD

SEQ ID NO: 197664 - protein, 114 aa, Oryza sativa
  unsure (1)..(114): unsure at all Xaa locations
  Clone ID: PAT_MRT4530_93400C.1.pep
TAKSSPFGIYSSPYILCPRGLWLGEVCSKGLMXTSNKPLTGKGEIGASAETVQTMWYGMWHSLSTDAPAETYIVPANKEQXXAFPSWAYYYAARSMGIYRFAYPRDTWHFTTGG

SEQ ID NO: 197665 - protein, 64 aa, Oryza sativa
  Clone ID: PAT_MRT4530_93401C.1.pep
ACGRLLAPANDVFASTATFYILHCHSFHSLLLVCSLLVYNLMAEHMETNSSLCWLLGWVANLSV

SEQ ID NO: 197666 - protein, 213 aa, Oryza sativa
  Clone ID: PAT_MRT4530_93402C.1.pep
MGSVLCCLADDGRPVCCFRLPWPIFNAAHNHNHNSGSIARPRADTRVAPDQGRISLTAPSQHDSMDTFRCPPRPLPWDDPRFSHHTEHHPLVGGHDKASTTFHKSGSLGESKNADSISNSKAVKDDGPSTAVKDDGSSVKHHSDGLHIGKEQVHDLFDFEDDCPICLEEYDYENPKMTLQCNHNFHLCCIYEWMERSQACPVCSKVMLFHEDS

SEQ ID NO: 197667 - protein, 153 aa, Oryza sativa
  unsure (1)..(153): unsure at all Xaa locations
  Clone ID: PAT_MRT4530_93403C.1.pep
MLLLRLRLRGRGGSVRFCVGRGRRNRGATTTWHMPCNLPNWQVLFTGHDGAVKVMLVYRTYLALLFQTGQTYRWYXTVSFFSPSPVTNLYRCVIAVPKLAKRPFRSSNLFNCVIPVPKLADHSFRDRGDTEQVEGSKRVICKFRDRDDTVEQV

SEQ ID NO: 197668 - protein, 99 aa, Oryza sativa
  unsure (1)..(99): unsure at all Xaa locations
  Clone ID: PAT_MRT4530_93404C.1.pep
MPVTEACTFTFQKETEGYSPRGILPRRRLGTTSSYNGAELASSASEHGSSPSPRERTQLPSLDSTGGFFXHKRHHRDGAKRPAVRALILLPFRLPFYQW

SEQ ID NO: 197669 - protein, 87 aa, Oryza sativa
  Clone ID: PAT_MRT4530_93405C.1.pep
FVFFFFFFLVFFFFFFFFFFFFFFFFLRKKRKKIDFNMQKRGSFFYGKRAKRAGSGKKKFFYRGKKPKILKVPSPKNKGNLFHFQNS

SEQ ID NO: 197670 - protein, 164 aa, Oryza sativa
  Clone ID: PAT_MRT4530_93406C.1.pep
IVAADPAAALERRKTEVGARGGRERRPLWQRSSPACGGWAAASHARSKEAGAQRTSITLSRRSSPARGREAPATPYLWLAPPAADGSTACTPPQPKLCRSCSSSSSSSLRSRRRRRRRSFLRARRHRRARVAAGPVPSCLSTAATTSLHKWPRGLIPFKSLPTS

SEQ ID NO: 197671 - protein, 240 aa, Oryza sativa
  Clone ID: PAT_MRT4530_93407C.1.pep
MSSQHNRFCFLDGCGTVVACSVAWASTTALRAAATCHCGPRARGRLRAGDKEEQEKAPVPPVAVAKLSSRGSARHLQPRRRKPHRKPSPRFLRRRAPSPSPPPSSFVAAAKLPDEDENGDAVRDEMEKVTGVPCSGARAAACSTAVSLLLPPQLLRRRAPPLQLLPSSHIAPPPLPPPSRVAPPPLQLLPPSHVAPPPLLCRRAAVAASRRSSRRRRAVSPLRRKRGGKRKGKKEEGGKG

SEQ ID NO: 197672 - protein, 71 aa, Oryza sativa
  Clone ID: PAT_MRT4530_93408C.1.pep
MKPPPISLPDLAGGDQGRWPQRQQREQRCWLSYSSPLPLLDLSEGDEATSGDSSKGGWRPALDLAANGSTT

SEQ ID NO: 197673 - protein, 125 aa, Oryza sativa
  Clone ID: PAT_MRT4530_93409C.1.pep
EAVGGGCVDASACISSIEDQDPTRPWTPAVGGWGRSSLDLRLRWRPGREPPQSAPTVAAGDGAASIHSGGGAGDARWRPEKGTRWGGEKGGAARTGKRGRRRIDAFDGEGEKRISERRVGLTCGS

SEQ ID NO: 197674 - protein, 117 aa, Oryza sativa
  Clone ID: PAT_MRT4530_9340C.1.pep
MDESIPWDYDGIKCASCMQGMEGSTSKHDSLVQKHVDFGILENNIQDPTATPMYLPMEFLKTITCDFSKEQELGRGGYGVVYKGAFGSKASRGLAWPGKDSRLESEKNPSPWGRASP

SEQ ID NO: 197675 - protein, 96 aa, Oryza sativa
  unsure (1)..(96): unsure at all Xaa locations
  Clone ID: PAT_MRT4530_93410C.1.pep
SRALLDPSLGGRTTRAKFTYPCLRRNTSSMARPKSNSLAGVLQRQDWKNPGLPQLNPLEAXSPFMTVRSMKKAXTERLSQELRRLKVKRYSPWPSS

SEQ ID NO: 197676 - protein, 169 aa, Oryza sativa
  Clone ID: PAT_MRT4530_93411C.1.pep
KSVGLDEISMYILKKSISEMIESFNFLINKSLSEGVVPDKWKVAKVIPIHKKGDKLDFNNYRPISLLPCAFKVMERVVQRQLLDYLKCQHSTVTALAAVTDDWFYSIDKGNYIGTIFVDLQKAFDMVNHLILVSKLESMGVIGVELQWFKHYLSNRRIRTSQSGKMSEE

SEQ ID NO: 197677 - protein, 399 aa, Oryza sativa
  Clone ID: PAT_MRT4530_93412C.1.pep
MKPPRRWMYGRGGGKGKPAGLLLLGVFLCLSVVLLLLLHGSSPSLEGEGRKPEAVEAAGGGGEEEEVAVARAEVEEAPLPPGNARLAFLFIARNRLPLDLVWDAFFRGDKEGRFSIFVHSRPGFVLTRATTRSGFFYNRQVNNSVQVDWGEASMIEAERVLLAHALKDPLNERFVFVSDSCVPLYNFNYTYDYIMSSSTSFVDSFADTKAGRYNPRMDPIIPVENWRKGSQWAVLTRKHAEVVVEDEEVLPEFQKHCRRRPLPEFWRDWDRPIPAEAWKAHNCIPDEHYVQTLLAQHGLEEELTRRSVTHSAWDLSSSKDRERRGWHPVTYKISDATPALVKSIKDIDNIYYETENRKEWCTSNGKPAPCFLFARKFTRAAGLKLLDLSLIAANGASTM

SEQ ID NO: 197678 - protein, 486 aa, Oryza sativa
  unsure (1)..(486): unsure at all Xaa locations
  Clone ID: PAT_MRT4530_93413C.1.pep
FTPLHSTAVAAALELVDPPGCTNSARVNVPWEHGKCGDAHYIAAWDHVLLPVAEAFNPDILLVSAGFDAALGDPLGGCCITPNGYALLLTKLLXFAQGRILMALEXGYNLRSIPNSVSACAKVLLGDKFRFDTPDMQPFESSWRVIQAVRDELKTSWPVLSNRLPDNISMRSRPSQIGLYPSGSDCXVEDLPDAIASVNIIQITYGIISESLSKLNLDEDKIATKTTSSNVMVEGPTDSVEPQNDGSAAVSTEGISSLSSTWRSELSKVYVWYASFGSNMWTPRFLCYIQGGKAEGMNIPCFGSHDTSPPRGSMWKTVPHRLFFGRSSTPCWGTGGVAFLNPEINHTENSYVCMYKITLEQFNDVLFQENRLVKENGESGKTESPDSPLIGLSEIEFVSRNKGVHLAPIKDSWYSNVLYLGEEDNLPILTMTCPSSDVERCRSGELPLCPPSKTYSATLIRGLMEGKHLDADAAASYINTAATRGL

SEQ ID NO: 197679 - protein, 1078 aa, Oryza sativa
  Clone ID: PAT_MRT4530_93414C.1.pep
MMLQSDFAFLLSAPSTPTTCSTKRCCASWATTATADGLIMEPQQVPINDRLSNLSNDLICRIISNLDSRQAVQTSLLSRRWRNLWCSLTSIKVDFCEFDGETDSWEGDQARFRKFVNNLLLRRDPVPVLDKFCLRSYIPHGANDQEASADANLWISHALQLKAPVVEVDQDIQTRDTLELGGHAVFASQYLTRLVLSAVSFTQGFFKQLEIGCSKLEHLSIYDSIICVDISSKTLKVLIIDNSEFSYDYNTSISTPSATSLTLIDLGGRLPLLKDMGSLVSASVYLTREAIPLDTAINIDQWFMGLSGVRHLALDFPVEVIKIKDNMQWCPKFNNLVNLTLGRWCLDSKLYALTVFLQNSPKLEKLRLEIDEGYTAKDIKGELKERSFTCEHLKIVEVDCVEDDPLEVECLEDEPDPLVNRVKKFFRNSGMTSIQINITHLDYHLPYEYNIEDNMQWCSKLNNLVNLTLGRWCLDSKLYALTVFLQNSPKLEKLRLEIDEGYTAEKITCELQERSFTCEHLKIVEVACVEDDPLEVTCLEDDDDDDPLVDRVEKFFRDSGMTSLEYPAAFYDSWRVLSEFQDLLSLLIAFDFGEEATRLQCEMVVKKEEATLLQCEMVVQRYGMDMYKGKRPPFYNAKWLSKCSLHHPRPPPVRRNASAPLGSPGWLMEPEKAPGRGRLMLSDLPDDLIRRIMSFLYARQAVRTCVLSRRWRDLWRSLTRINADFCEFKGDTRTWVGDKARFEKFLNALLLRRDPVLLVDKFWLRCPSCSFGVYSLDANLWISHVLQLQAPVLDVRAVGISRLNQAVFTSQYLRRLALSSVVLSKGFFNQLKMRCPELECLFLRDCHIHDHHISSQTLKILTINISDFSFVDKYDCCISTPSVTALTLFGPKGRVPLLQDMASLVSASVYLANDFSNFGTAGDVHRLLTSLSGVKYLALDFDGVNEVQITNENNIQWCPEFIDLVSLTLGSWCLESNFYGLTVFLQNSPKLEKLTLKLNKVHTRRIVGKLKEKSFTCERLKVVEVICIGDDPLVNCVEEFFFNSGMTSLQIRINHLDGYELYEPRLYRDEYRRRQYMG

SEQ ID NO: 197680 - protein, 278 aa, Oryza sativa
  Clone ID: PAT_MRT4530_93415C.1.pep
MDGRKDVGILAMDIYFPPTCVLQESLEAHDGASKGKYTIGLGQDCMAFCSEVEDVISMSMTVVTSLLKKYKVDPKLIGRLEVGSETVIDKSKSIKTWLMQIFEECGNTDIEGVDSSNACYGGTAALLNCVNWVESNSWDGRYGLVVCTDSAVYAEGPARPTGGAAAIAMLIGPNAPIAFESKYKASHMAHVYDFYKPDLASEYPVVDGKLSQTCYLMALDSCYRQFCKKYEKLAGKQFSISDADYFVFHSPYNKLVQKSFARLYYNDFTRDCSFCDND

SEQ ID NO: 197681 - protein, 140 aa, Oryza sativa; identical to SEQ ID NO: 174835
  Clone ID: PAT_MRT4530_93416C.1.pep

SEQ ID NO: 197682 - protein, 140 aa, Oryza sativa; identical to SEQ ID NO: 174835
  Clone ID: PAT_MRT4530_93417C.1.pep

SEQ ID NO: 197683 - protein, 91 aa, Oryza sativa
  unsure (1)..(91): unsure at all Xaa locations
  Clone ID: PAT_MRT4530_93418C.1.pep
MVXSRWGXVIPGPSMGAGSPXXTAXXAIGVPSCXIGGREPGDLXWRXRRRSXALGLPHTXMKLXSTVVEPPPRNERMVVGGGGGAXXRKRS

SEQ ID NO: 197684 - protein, 80 aa, Oryza sativa
  Clone ID: PAT_MRT4530_93419C.1.pep
CWLENLLSCHVYSFYSDKQLARKSLQIPIGTMDLVLQYPTQCSSTSSTLLLPGSRRIEAAEADLGADGLDVGLHLLAEFP

SEQ ID NO: 197685 - protein, 84 aa, Oryza sativa
  Clone ID: PAT_MRT4530_9341C.1.pep
CQAPAPTPTGTPAPAPAPVVTPTPAPTPVPTPSPAPTPSPTVAPVNPPSPTPPPKRAARSSPASRATPLLSAFAKPSRLMLSSI

SEQ ID NO: 197686 - protein, 289 aa, Oryza sativa
  unsure (1)..(289): unsure at all Xaa locations
  Clone ID: PAT_MRT4530_93420C.1.pep
LFLKRKRELLRQRLGFAVDRVHGGGSRKRKAKIDPSKTDGQDPSVHDRATGNDDDDVSGDVITGDDSGTHARRRTTARQRERRAPKRCGRRGELTDDLRRSSGALRLDDGDGVPAVYSDDGGADEVGDGLANPTTXSRATTTTEATAXDGDARLHGARALRATRGEGEGGGGGXEAASEAHGDRRRXEGRSRVXGRETNPIRDRIHGFPNEISRRFHKRKDRGDPGDHFPSINFIGNGKGRRAPPVSXLRARARGGCGRTGPAWAGEREKVLGRLSAQSQKRILKTFFN

SEQ ID NO: 197687 - protein, 217 aa, Oryza sativa
  Clone ID: PAT_MRT4530_93421C.1.pep
MGVPTITDNNSGSQFELLRQPSLGTLSNSPNRGALGSSVSTSNTTSGHGAGFENYSYLIFQWLDCISQLLRLYPSAFEFSSKFLVDFMDCVLSCRFGNFLCNSEREREQSGAVSSCHCMWTYLADLRASGGSFHKHRNPFYDPLKHNGPLVPPAAALAPTLWPQFYLRWTCPIESQGGDLESQWHAMNKKYTEAMKVTKYRSLCIPLIILLLYVESS

SEQ ID NO: 197688 - protein, 215 aa, Oryza sativa
  unsure (1)..(215): unsure at all Xaa locations
  Clone ID: PAT_MRT4530_93422C.1.pep
MDSPATPVGLSPPLLSLVLRNEPCYTKGKRGLLRQRLGFAVNRVHGGGSRKRTAEIDSSKMDGQDPSVHDRATGNDDDDVSGDVITGDDSGTHARRRTTARRRERRAPKXCGRRGELTDDLNGDGRXPNDVGDEEEAAALFGLTTATVFRRSTATAEGRTRTATTWRPRWXPPRATATTEATAAHGWSDGDDGDARLHGARALRATRGEGEGGGG

SEQ ID NO: 197689 - protein, 75 aa, Oryza sativa
  unsure (1)..(75): unsure at all Xaa locations
  Clone ID: PAT_MRT4530_93423C.1.pep
WCRCSALNHMVGGINREPGTLHVGHTMAKVFPGCRRGNLESTTTSLPSFCXVYIPNGTGGVSYRLCYRMSPSSGA

SEQ ID NO: 197690 - protein, 187 aa, Oryza sativa
  unsure (1)..(187): unsure at all Xaa locations
  Clone ID: PAT_MRT4530_93424C.1.pep
NKQIKNILQKTVNEMGXAWKNKLPDALWAYRAAYKTPWHVSNQLVYGKTSHLPVELEHRAHWAIRTWNMDLKGADSXRKMQLSELKEWRDKAYHNNAKIYKDITKRWHDKRIKHKEFKAGDEVLLFNSRVKLFGHRKLQSKXMDPYTVVDVSSHGAVTLRDDEGNIFNVNGHCLKMMDRCVLIHPVI

SEQ ID NO: 197691 - protein, 466 aa, Oryza sativa
  Clone ID: PAT_MRT4530_93425C.1.pep
MDAPSGESGGGGGGGGGRRWKGKGVTPIQPRRQLGTVLEDSSAALLRPLKKIGRSPDRLLRSASSLSTSSSAPPSPRSSSASDAPVRVISSSPSSPSPPSARHIFPFAYEASTTTVGGSPRLHPLSWQQSSMSQPASPQQQQQQPLQHQQMISFGASPPCSTTQFVVPENAQQQQMLLRYWSEALNLSPRGGPGGVPPWLYQQLLRVPPPPQKLYRGVRQRHWGKWVAEIRLPRNRTRLWLGTFDTAEDAAMAYDREAFKLRGENARLNFPDRFLGKGRAGGKGRTSVSSSAAAAASCSSSSLSPPETPDDANTQQQAPQQREQRDTAGVSMEKKQPQPPAPTSRQEGCSGGDAAAPYPAEMLHAPAACGGMWVAPDESWFSTWGPGSSFWDDYDMDSARGLFLHPRFTGDETSMDHSGTQATVPAVAATAAGMSMPCDDVPVTSSSSDLPPQGTPQTPTFMWKED

SEQ ID NO: 197692 - protein, 93 aa, Oryza sativa
  Clone ID: PAT_MRT4530_93426C.1.pep
APQAVPGMGPAIMFCDVVTGCSFPLGAGLPCGWGSCASGSVYWSVGCRAFWGWASWAGSRVPVRLVLGSGFLVSRGPGPITPLVGVWCVVLSV

SEQ ID NO: 197693 - protein, 699 aa, Oryza sativa
  Clone ID: PAT_MRT4530_93427C.1.pep
MVNTDGEGGCEGGGGDPMCVDDNAIVAVETGVGVDQGIGSQHDDAGGDRVMEGQGAVTNSGDEMGMRAYGDEAETEEAATVHGSKEGTEELLRKVVYSEEAAYKLYCDYGHRMGFSIRKGKQSYFTGTKRIRTKDYFCSKEGLKEGERLTDANFNDPHTRTNCKAMVRFRVNNHGEWKVIRLVSDHNHNLARPEERHLLRSARSLIAGRSSSVETSKQDSLSCYISMARTLAIGNADLQNLVRHLKSRANEDGMFYWDVQIDRGGRMTNFFWRDGRSRIDFDCFGDVVVFDATYRLNKHNLICAPFVGVNHHWQNTMYGCALLADESMSSFVWLFKSFLEAMGNRHPRSIFTNQDQVMSKAIEEVFPNTCHRISRWHIQKNAASRLGTLNGSKAFNKLFTKCMQGCDSEAEFEETWAGMLREFKLEDNKWLKKLYKLKQKWCGALNKHTFDGGVEYEPQCDSLSNIFNCIAEKFTSPSTIVVVVDKLTEDWREKEIDEDTRCSQKPPACIIKHSDILNHAAKVYTYRIYKLFETYFLDGCGATKFKELHCEDNNRYQFEMTMQGRGSRVCTVHFDMMTMQLNCSCSKFETMGLLCPHALKALSIKNVCSIPETYILKRWTKGAKKCVFNPKQYESSYQECMDDEAAYCSHVMRYAYDLVTKSQGNEELRKSLWETLESGEKELEKYLENVTQYALSYAT

SEQ ID NO: 197694 - protein, 185 aa, Oryza sativa
  Clone ID: PAT_MRT4530_93428C.1.pep
MEDGHAPAGAELAVALDEEEEEAAPLVSGRRGAAAAARAATSQTRDLHLLSSAFLFVFLAYHAAQNLQSTVNTDENLGSVSLGLLYTSFTAFSVVGSPVVRRMGSRRALVLGTSGYLLFIAANLVPSWYTMVPASLYLGFTASIIWVGQGTYLTSAALSHARDNNLPEGQTLGNFNGEFWGMFAS

SEQ ID NO: 197695 - protein, 95 aa, Oryza sativa
  unsure (1)..(95): unsure at all Xaa locations
  Clone ID: PAT_MRT4530_93429C.1.pep
LVTWPSLVSCGLGAGEVTARVEGVGGAGQQCPSCAVDKCKEELSRCHDXHRWHKVCEALSKLPVVVADCEMLFCQQCISLGSIWDMAGNLHKHEP

SEQ ID NO: 197696 - protein, 146 aa, Oryza sativa
  Clone ID: PAT_MRT4530_9342C.1.pep
MASKQAMNSALFSALVVVVLASAVNGQLNPCQAPAPTPTGTPAPAPAPVVTPTPAPTPVPTPSPAPTPSPTVAPVNPPSPTPPPKCPLALINLNACISVGLGNPLLNQACCSQLSSLPSDTAAVCLCEAIKVNALVNLEGQNPRHP

SEQ ID NO: 197697 - protein, 108 aa, Oryza sativa
  Clone ID: PAT_MRT4530_93430C.1.pep
IPVTPLLLILELMQSCRRNPAFYGSCLCKLPAISQMLPKLPKSCPSDLGHLCSSSSPSYLAIGDNDGQLGERLTHLVPPVLVVAPAQLLLALVHRAGHFTGTEATADK

SEQ ID NO: 197698 - protein, 104 aa, Oryza sativa
  Clone ID: PAT_MRT4530_93431C.1.pep
MREAGNKELNRVRPADAHDRAAAAGSASASALGLGLHHAAVNGTNEQPRWFLHPDLVRPPSRPLHHGSGVVQASPSTPATTSPWTTMQNSGYRGDVDVDTSLHL

SEQ ID NO: 197699 - protein, 120 aa, Oryza sativa
  Clone ID: PAT_MRT4530_93432C.1.pep
MAELASGAVSSLLGLLQKEAQLLGRMGSDVEFIKEEMESMSRTAHLASGHDKQVRTWMKQVRDLGHDCSNCVDDYLRSGDLAVHLRQGGVRRYILWTYWLVRKMHDQRNAALALRELRDP

SEQ ID NO: 197700 - protein, 75 aa, Oryza sativa
  Clone ID: PAT_MRT4530_93433C.1.pep
MAVRFEHGWLSSSLGSFGWAKVNECIRLHRQPADTQTMLIYHPSFQVQVNIHDFDKQSATFISSATGAITISYIM

SEQ ID NO: 197701 - protein, 125 aa, Oryza sativa
  Clone ID: PAT_MRT4530_93434C.1.pep
MAGGGESRSRQQQPTRAGRVTAQIAGVKGDGHDDISMSAVASKLVSRKMAIGVGLGVAGGPQQLIGGGGLTNAETSDRETGQSRAERRMDNLADECATTAARGPPAADEAQEMAAEWDGEGSAAA

SEQ ID NO: 197702 - protein, 76 aa, Oryza sativa
  Clone ID: PAT_MRT4530_93435C.1.pep
MGHFKRGIVALSKEGSLLEFPSREDDDGFSGERGWSLPPFPPENFKHIQWAPLQGWLLRDRSLAPEASDQKSRPHA

SEQ ID NO: 197703 - protein, 43 aa, Oryza sativa
  Clone ID: PAT_MRT4530_93436C.1.pep
MGHPCFRAGTARFDCWWAVPRPKLEMAKQAEGLRVRYGVLYIN

SEQ ID NO: 197704 - protein, 41 aa, Oryza sativa
  Clone ID: PAT_MRT4530_93437C.1.pep
MATSEPIKPVWTIKIITEIIQNATVQIKIKTHGPNVTCERT

SEQ ID NO: 197705 - protein, 96 aa, Oryza sativa
  Clone ID: PAT_MRT4530_93438C.1.pep
MDYIEYNSVFTLVHHGRLQHEHDHAYLTQQLDLPLVEASNLITNFTGTADSFAGRLLWTIAAGGVLSQLGMLGLVVSALVPTLCPAPCGAATAAAS

SEQ ID NO: 197706 - protein, 82 aa, Oryza sativa
  Clone ID: PAT_MRT4530_93439C.1.pep
KPPRRRREAAAPCRDLRRRRHPHVIIEPEGVADTSEGQDPQDFEQGKSSLSLEHVDPNCKIILFTNKNACNDEHPICEYAIP

SEQ ID NO: 197707 - protein, 82 aa, Oryza sativa
  Clone ID: PAT_MRT4530_9343C.1.pep
GKRSTHTRRHSKCCEHESNQYSQLTQTGGSMLIPKKKTQGKVQIYFSYATDLCEQHGVRIFFYPRLFDRHALFRRCLRLQDQ

SEQ ID NO: 197708 - protein, 53 aa, Oryza sativa
  unsure (1)..(53): unsure at all Xaa locations
  Clone ID: PAT_MRT4530_93440C.1.pep
IIFSFTRWAGINRARFLDLEGLARARARTRLLLLRRGGNLAASPQPASXXARG

SEQ ID NO: 197709 - protein, 99 aa, Oryza sativa
  Clone ID: PAT_MRT4530_93441C.1.pep
MAEAVMQEVVTQQLAVTGDGGGLTREASMLYMKKEKRSYKNDLGYEDSRKTSGSKLKQAAMPSLTAACSGTKEAGRLRTICKHDADGWTHREIISRICR

SEQ ID NO: 197710 - protein, 190 aa, Oryza sativa
  unsure (1)..(190): unsure at all Xaa locations
  Clone ID: PAT_MRT4530_93442C.1.pep
KFTAEASREEQKRKKKQGKLRWLQLLHARLWRGVKRGEVRGGSRSRGRSRRARGRARRPPRRXDAERNRVDHRRRRAAPQGQGEPREPPLPPERPRQRRQPPRRRAAAGRGEGAAAQLPAPAERQVVPRYEAPQPVPAARRGGARRRLGLRRHRRRLGRHRRPRRVRLDGHCLERCAGLAAAVDRSGFSW

SEQ ID NO: 197711 - protein, 97 aa, Oryza sativa
  Clone ID: PAT_MRT4530_93443C.1.pep
KQTMYRYRSRDPARQNRFIQRRNDALSGPRLGGEIRSKRLSYWSQKDRFLGQKMASRPAQNRACKEIDQRSMCSSRKASASLKRKIIGTHTLATPID

SEQ ID NO: 197712 - protein, 265 aa, Oryza sativa
  Clone ID: PAT_MRT4530_93444C.1.pep
MAASTMALSSPAALAGKAVANAKVFGEGRVTMRKSAAKPKPAAASGSPWYGADRVLYLGPLSGEPPSYLTGEFPGDYGWDTAGLSADPETFAKNRELEVIHCRWAMLGALGCVFPELLARNGVKFGEAVWFKAGSQIFSEGGLDYLGNPSLIHAQSILAIWGCQVVLMGAVEGYRVAGGPLGEVVDPLYPGGSFDPLGLADDPEAFAELKVKEIKNGRLAMFSMFGFFVQAIVTGKGPLENLADHLADPVNNNAWAYATNFVPGK

SEQ ID NO: 197713 - protein, 88 aa, Oryza sativa
  Clone ID: PAT_MRT4530_93445C.1.pep
IFQLSAPFGTSASGYSILLGFSGVLSGLSPLRRGSSARAVVASSCLSSSAAWSALASCDLQLRFLFGLSGSCAQESPRPLGPLARRNP

SEQ ID NO: 197714 - protein, 171 aa, Oryza sativa
  Clone ID: PAT_MRT4530_93446C.1.pep
RRRSRCADAPAAAEAGTAGRAPAARGGRARRSTRAPARTRSARGPCSPPAAAATATPARGAPPAEPSALRSRSQRRRDGDEESPAGDRPSRMLASRDRLFLSGIQFRFETACLILCSRVEIADGRDAAELDVFLVGRRTVVSSAQRLLSRRHYGELFSVLYSTKGGSFPSW

SEQ ID NO: 197715 - protein, 83 aa, Oryza sativa
  Clone ID: PAT_MRT4530_93447C.1.pep
RPLPSWWHAYLRHRPLKAGPARVDVYSGDTIGSVKSKIEYKEVISENLRQVHVGREAWLRTWAPYASLSNRAYASSLSRSSLS

SEQ ID NO: 197716 - protein, 1098 aa, Oryza sativa
  Clone ID: PAT_MRT4530_93448C.1.pep
MAGIRKTIGDDCAPYRHLRRDMRSDQHDADEVHDNDLARVESILPVFDGKYDSAAYVDWELAVDKQFDEYDFSNTEMIKAASNKCTGSASFWWYTVGNKLETWDECKTMMRKNFVFSYYKRTLLEKLEHLKQGDKTVREYFHNFKICITYSGLKESNENTMTRFFRGLNSDVQAGLTNVTYNHIGHLFMLACSVESNILKNLREKQAMLVPPITDILQGAQNIHGEKSNRIEVPSPSLTKEEEKTDAATSSEQRTTGNLNGAAINQAFHAREEQPLVETIAEMPLSQVDLLAVPCDKEELCDNASLISMPQLVNEHAISSVSLCANFKHVVHIANEVQEHELLSSLNTLGYVQFDDFCELDNLKKKLFAKSDLPCPTSAIFHIFGESDDRGIYLVHRVYICSDLEPPIHVDKTCKLERNVIANQIVSSLPCFDWKKHVVVNGLRKEHHMEKPRTVFREEGEDDVTMATMDATIAHIMDEQEDIKIKSSKCWNPIQPPTTLLTSNGRRICIRPPFSAREYLMESSWSPLSNGSILIVKFHLIEPQLKQQVAASPIMGLWACNFVWDPGPSGAHDECPRGRVDAHHKLAATIGEDRATNPSGFASTVICKADVVKYMLSAPILKGRIGKWIFSLTEFDLRYKSPKAVKGQAIADFIVEHRDDSIGSVEIVPWTLFFDGSVCTHGCGIGLVIISPRGESFEFAYTIKPYATNNQAEYEAVLKGLQLLKEVEADAIEIMGDSLLVISQLVGEYECKNDTLMVYNERCRELMKEFRLVTLKHNPSQSASRKLRYKALKYTLLDDELYYRMIDGVLLKFLSANQVKVAIGEVHEGICGTHQSAHKMKWLLWRAGYFWPTMLEDCFRYYKGYQDCQKFGAIQRAPASAMNPIIKPWPFRGWGIDMIGIINPPSSKGHKFILVATDYFTKWVEAIPLKNIDSLDAIQFVQEHIIYRFGIPQTITTDQGSIFVSDEFVQFADSMGIKLLNSSPYYAQANGQAEASNKSLIKLIKRKISDYPRQWHTRLTEALWSYRMACHGSIQVPPYKLVYGHEAVLPWEVRIGSRRTELQNNLTADEYYNLMADEREDLVQSRLRALVKVTKDKE

SEQ ID NO: 197717 - protein, 56 aa, Oryza sativa
  Clone ID: PAT_MRT4530_93449C.1.pep
PVLPARPDYNDTATAHRFWSNLTALVLPGKPTVPLAVDTHMFVTVGLGVSDCQPAC

SEQ ID NO: 197718 - protein, 817 aa, Oryza sativa
  unsure (1)..(817): unsure at all Xaa locations
  Clone ID: PAT_MRT4530_9344C.1.pep
DGNTNTKLLHLRTRHRKCNNFITKLKDGEMVVSKDEDKAQVILNFYSNFLGSSEDHTASIDLDVLNLQTHDLELLDAPISKEKLWNSIKQQMTDYXEVCWYIIKGVLMAAISTVWTIDFCNLQLLNRAYITLLPKKEEAMHAKDFRLISLVHTFAKLXTKILANRFVXLQQLVSPNQSAFIKCRFIQDNFILVQQTTRFLHSQKMPRILLNLDISEAFDSVSWLFXLEVLHKLGFGQVWRNVLSGMFSTSSTQVLLNGILSMAIAHRRGLWQGDPLPLMLFILVIDVLNLMLNRATEAGCCXPFSSWALQHRTYLYACDVGVFLXPTTLYISPTLDILHLFGNTSSLKTSVQKNNVLPIHCSDNDIVVVQDLLACEISXFPCKYFGLLLSIRKVTKSHIQPXIDHITNQLPGWKADLIYDPGWSYSPSXFVLTSMLIYRAISIDLLSXAFKAIDKIRQRFLWRGRNKVDVGYYLIAWPKVCQPWEFRGLGIXDMKSLSYALRVRWLWLQKVKPLWPWSIFPIQVSEGVTYLFSMAVVSKVDDGLVLFXKDNWLLGKRIEEVAPRLFTLVPKGRVNKCTAETLLDHIXISDVQGAFSVGVITYFLDLWDTLFLVELQPRNPYVNYWRLSNIGVYSTKFAHDFLFQSAIYFGPWEHVWKSWXPRKAYFFFMWLVPHNXNCWTMDCLARQGLPHRDXFPLCDQEDETIQHVLVSCVFTRXVWFSLLPQVGLRALAPQPLDVDFDEWXNRINILLDGNIKKGLNIYSLVILGAWTXWKHRNDCVFNGVSPSLSSSLALARKEAHLSSLARAKGLSLILDPG

SEQ ID NO: 197719 - protein, 84 aa, Oryza sativa
  unsure (1)..(84): unsure at all Xaa locations
  Clone ID: PAT_MRT4530_93450C.1.pep
MSCCGXNCGCGSGCQCGGGCRGCKMFPDXXATATTKXFXLXAPSNKANSGRMEMAVXNGENGGCGCNTCXCXTSCSGCSCCSCN

SEQ ID NO: 197720 - protein, 319 aa, Oryza sativa
  unsure (1)..(319): unsure at all Xaa locations
  Clone ID: PAT_MRT4530_93451C.1.pep
LLRTDTTIAHIMDEQGDIKMKSSKCWNPIRPPATLLTSNGRRIYIRPPFSAYWLYLVLDCLFDLLIGIRLIYTGKINNPRRGVSIAKAQHNNSRRRLRVSVVVETYEXMESAWCHGCRFRDLFGKTEPDCARGNEMVMLNINIFTINEIXRLLHASHMSNKLETWDECKTMMRKNFVFSYYKRTLLEKLEQLKQGDKTMREYFHNFKIFRHLQHSRRKKRRXDAPTSSEERTKGNFNGAAINQDEYSNIGTHGYNVFHRNCFSLERKSSKSTKTXFLHILKCIGNVRVKKSLPRNDSRPVSKACTPSRRRRCLLPSWTS

SEQ ID NO: 197721 - protein, 678 aa, Oryza sativa
  Clone ID: PAT_MRT4530_93452C.1.pep
MAGIRKTIGDDCAPYRHLRRDMRSDQHDADEVHDNDLARVESILPVFDGKYDSATYVDWELAVDKQFDEYDFSNAEMIKAASNKCTGSATFWWYTVGNKLETWDEYKTMMRKNFVFSYYKRTLLEKLEHIKQGDKTVREYFHNFKICITYSGLKESNENTMTRFFRGLNSDVQAGLINVTYNHIGHLFMLACSVESNILKNPREKQAMLVPPITDILQGAQNIHEEKSNRIEVPSPSLTKEEEKTDAATSSEQRTTGNLNGAAINQGECAVNELNMSTFHAREEQPLVKPIAEMPLSQVDLLAVPCDKEEFCDNASLISMPQLVNEHAISSVSLCANFMHVVHIANEVHERELLSSLNTLGYVQFDDFCELNNLKKKLFAKSDLPCPNSAIFHIFGESDDRGIYLVHRVYICSDLEPPIHVDKTCKLERNVIANQIVSSLPCFDWQKQVVVNGLRKEHHMEKPRTVFREEGEDDVTMATTDATIAHIMDEQEDIKIKSSKCWNPIRPPTTLLTSNGRRICIRPPFSAREYLMESSWSPLSNGSSLIAKFHLIEPQLKQQGATSPIMGLWACNFVWDLGPCGAHVGNKVDLHRQDQQPTERFRLPVVSEDRPFVGEVPEDELKTLVFCVPRLIPGRGFYAQMSSEITSEFLGMTGIESPTHEINKETIFRDQAISNLTH

SEQ ID NO: 197722 - protein, 942 aa, Oryza sativa
  unsure (1)..(942): unsure at all Xaa locations
  Clone ID: PAT_MRT4530_93453C.1.pep
RDRGKEKEWERQKERERERGRDRERDRDREKDRERERERDKERDRERDRERERERDRERERERQKDREREKKDYDSKHERYDDGVRSSKEQRFDDDKYKEKYKDDYERDKRQQDDKCLDERLTRDHESDRADYKSSKDGHRTSESHYRKDVIQEPDHYDAGDXVEVNASSLELDVASGADDXLKQKDDLQSRDMQLEISSSLQYDRTPRKDAHPSPKHLSERSPTEQRFSGRLSGGRSTDNKAERSGLTKYRDRDGDSVERSVHQDRTPAKAPYREPTPSSSSRGGHFSGTSPNHPLPPPPRHRSDDSSFLGLHDDDRRPQSGDRRFHQKRNDMSSGRGHGHAWNNPPSWPSPVANGFVPMQHGVPGFHPPVHQFSAPPMFNLRPQMKLNQPGVSYPMHESVDRFSTHMRPFGWPNPLDESCPPHLQVWNGGSGVFASEPYMYGRQEWDQNRQHSVSRGWETTGDALKGQNELHEREPSVTKKEPDCSATPVPETSTGQYNLNSRIEQKEMDQTLEKNGTKDDLKSSFRNTGGSGGAPLMTSMPSNSGTAIFSKSYLSKISVSRDLVESELYKRCISLLADFGIANTPEVVGTGLVQRALALHKNQTAKIVSPTHSILETDRKTYLPEDNHDDTEMTDHTVSKELLVDNSEPHHGADTMEKELPLRQELAGGIGVTSPASIEPGNVGAPPVIIEPDVGMEDVAPPKIVEPDEGMEDAAPPKIVEPDEGMEDAAPPKIVEPDQGMEEVASPTIKEPDEDIEVMPLGTAEPGKGMEEVAPGGISEPEKGMENLVPPGIAEPVKDGMDDVAAPSAGPAAGLGDGVPEVTVELADSAQEKPPAMGELGDGMEVMPPPVTETSLGKEDSPAVPSSPEVQEIVSGMHAGIEKGMEGETDNLIDDNPGDGEVNASSLELDVASGADDCEALVESRVNLSRIPNSPESTH

SEQ ID NO: 197723 - protein, 217 aa, Oryza sativa
  unsure (1)..(217): unsure at all Xaa locations
  Clone ID: PAT_MRT4530_93454C.1.pep
MSLPSLANEEKADAPTLSEEGIKGKLNGAEITQDELFLNGLYEEHHMEKTRTIFREEGEDDVTIATMDTTIAHIMDEQEDIKVKASKCWNPIRPPAALLISNGHQISIRAPFSAREYLMESSRSPLSNGSSLIAKFHLIEPQLKQQGVVSPVMGLWACNFVWDPGPSGAXMWGAPQSGIGLICTGNINNPRKGVSIAKAQHNVSYAQLTERSGQQQP

SEQ ID NO: 197724 - protein, 177 aa, Oryza sativa
  Clone ID: PAT_MRT4530_93455C.1.pep
LVMDQTLEKNGTIDDLKSSFRNTGGSGGAPLMTSMPSNSGTAIFSKSYLSKISVSRDLVESELYKRCISLLADFGIANTPEVVGTGLVQNNGSFGKINRKLGTPNLLGSHNLKNKSDIFQRALALHKNQTAKIVSPTHSILETDRKTYLPEDNHDDTEMTDHTVSKNCLSITLNHIM

SEQ ID NO: 197725 - protein, 144 aa, Oryza sativa
  Clone ID: PAT_MRT4530_93456C.1.pep
LTSTESSSSSTRGQPAASKKDCKKQASSHCSANTLCRTTVVQNSGKGKTAAEVRRIVSAPAHRCVPWDCMRFRREEERTWAAGNSNLAIRYTNLLQKMTIKWRRIDINSDDKSIGRCLQSDLCMNGSRTQNWHDELGQNSQVCI

SEQ ID NO: 197726 - protein, 266 aa, Oryza sativa
  Clone ID: PAT_MRT4530_93457C.1.pep
MVAIRAPKSHRAKRELLKHAPKLVETGKKTLVLHGTKTSAVLNSVLADLFHLKRDNAVRYSKKNENIRPFESGGETSLEFFSLKTDCSLIVKLAPKLGSKPFFTFIGEHFESVEELKHLKEVLLDLFRGEVVENLNLAGVDRVFVCTAISPTTVYLMHCALRLKRSGTSIPRMELVEVGPSMDLVVRRHRYPAESLKKEAMKTADHAKKMKNVTKDPVQGKLGKVYIPDQQIAKMSLSNDIKGLKRERREAKKNKEHTKKQKINVE

SEQ ID NO: 197727 - protein, 60 aa, Oryza sativa
  Clone ID: PAT_MRT4530_93458C.1.pep
LEKLLVNLSSYIVKYKSKPQHQFCPIRTITCSKHRQGIYCNCRANKKNAYTSLFPRCVAL

SEQ ID NO: 197728 - protein, 310 aa, Oryza sativa
  Clone ID: PAT_MRT4530_93459C.1.pep
MVAAIRVPRSQRAKRELLKHAPKLVETGKKTLILHGTKTSAVLNSVLADLFHLKRDNAVKYSKKNDNIRPFESGGETSLEFLSLKTDCSLMVCGSHSKKRPNNLVLGRTYDHHIYDLVEVGVENYKSIESYVYDKKLAPKLGSKPFFAFIGEHFESVEELKHLKEVLLDLFKGEVVENLNLAGVDRVFVCTAISPTTVYMMHCALRLKRSGTSIPRIELVEVGPSMDLVVRRHRYPVESLKKEAMKTADHAKKMKNVTKDPVHGKLGKVYIPDQQIAKMSLSNDVKGLKRERREAKKNKDHSKKQKINPE

SEQ ID NO: 197729 - protein, 205 aa, Oryza sativa
  Clone ID: PAT_MRT4530_9345C.1.pep
MGISLLPPMDFNLRDLFPNPENLDCLVDQFYTQEKDNLIKVILSDKAPGPDGFNGFFLKKCWQIISQDFYRGVRQGDPLSPLLFVLGAELLQRIVNKACSLGLLTKSINELDERGFPIIQYADDTSILLKALQREVFCFKALLNSFAHSTGLKVNYHKSCLYPINLSHENAVLFAGLLGCTIGTMPFTYLGLPMGTTRPRVVDFC

SEQ ID NO: 197730 - protein, 84 aa, Oryza sativa
  Clone ID: PAT_MRT4530_93460C.1.pep
KDQEHILAEVSDHAAVKSCIISRAPPATENAQVMSFMPCLNTHFMYIEQSRDTRRSRTRVHITELAQIKAECVVMQKRRRELII

SEQ ID NO: 197731 - protein, 892 aa, Oryza sativa
  Clone ID: PAT_MRT4530_93461C.1.pep
MTREHDGDGEEVATAVHGDAGAEEDGDRNVVDKSEFSDAVHVVVDRDDEEPEFPSDDDEGGDDDVRVSFATAVGDSDEHLREEQGELDLDDDDEEDVSRYEYDYGMWMEAEPMSIQERRRRLLQGMGLASSRDLLRSRSARMRPILPPNIPRCASRRQPPPQCPAAAADDAPSTSTAATVKRQRNAVLTRCRSDSRLAVRGGGAARKPPTFRRVYSVPHSLHGSPVHKALRAAARSRSPLPLPAPKDERENTVRKLDDGKEFVVSGQPAAGGSRGALSDLKTGVQLSLDEFERFIGYTPFVKQLMRRSQSQPVAAGAANGDAKPGKKKPRWLKNIKLVASAAGLIQEKYKESNCGGGGCGRSSSSSSSSAEQAHQPGVTMSKSASTNAATMASSSSSLERPKVHSFGKTARELTGMYFRQEVRAHEGSIWSIKFSPDGRFLASGGEDRVVHVWHVVDDGAPPSSMSPELLSSSQSLPPLAPHGDGGLAAQLSRKLRARRWKTCKDVLPEHVVVPETAFALADEPACSLEGHLDDVLDLAWSMYSQLLLSSSMDKTVRLWDTEAKACLKLFPHNDYVTCVQFNPVDDGYFISGSLDSKVRIWSVAERQVVDWSDLDDMVTAACYTPDGQAAIVGSHKGSCRFYKTADCKLNQEAQIDMNISKKRKSHAKKITGFQFAPGNPSEILVTTADSQIRVFNGITVLQKFKGFKNTSSQISASYSGDGRYVVCSSEDSNVYVWRRATSPGGAAGGGVAVKAKTWRTSRAYECFFCKDVSAAVPWPLSPCLPPTRGGGGGGDDDERASSSVRGAVVGGDASASRSPARQLGSLPLRPKSGPMTYSGEKQLGVPREPSSRWHGGAEGGNAWGMVVVTASLAGEIRVYQNFGMPLSLFRKT

SEQ ID NO: 197732 - protein, 1339 aa, Oryza sativa
  unsure (1)..(1339): unsure at all Xaa locations
  Clone ID: PAT_MRT4530_93462C.1.pep
KTSASYPPLLAEVVRRRAGAGSGAGAPGGAVXNDNNNGGNSATPSSGGPFSGYNLLLLLLLLALFLFPLLALSLYYVRYVLVPVLHDASSMLSHYWYVPVPDIHDAHSMLLVMLRSPYTAYAMIIVSISWIKICRLMTIFPTIQKPDRSFSVVGFAAALKPHAFDGSNYKRWKARALLWLTAMQCFYVSRGKRSEPPLSPEEEAKFEASDCLFRGALISVLADNIVDVYMHMPSGKDMWDALEAKFGVSDAGSELYVMEQFYDYKMVDNRSVVEQAHEIQMLAKELENNNCELPDKFVAGGIIAKLPPSWSDFATSLKHKRQEFSVSDLIGSLGVEEKARAKDVRGKKVEGCSSANMVGRGSSLLMGNGSLAAVHGVGTVDLKFTSGKTVQLKNVQHVPSIKKNLVSGSLLCREGFRLVFESNKCVVSKYGTFVGKGYDSGGLFRFSLNDMCNNHNAVNHISENDESNVWHSRLCHVNFGCMTRLANMSLIPKFTLVKGSKCHTCVQSKQPRKPHKASEARNLAPLELVHSDLCEMNGVLTKGGKKYFMTLIDDCTRFCYVYLLKTKDEALHYFKIYKAEVENQLERKIKRLRSDRGGEYFSNEFASFCEEFGIIHEMTPPYSPQSNGVAERKNRTLTEMVNAMLDTAGLSKEWWGEAVLTACHVLNKIPMKHKEVTPFEEWERKKLNLSYLRTWGCLAKVNVPIAKKWKLGPKTVDCVFLGYAIHSVGYRFLIVNSGVPDMHAGTILESRDATFFENEFPMKYTPSTSSKETVMPHEHFAPIEHNDQTPEENPEEDNIVDTRKSKRQRVAKSFGDDYIVYLVDDTPRTIEEAYSSLDADYWKEAVRSEMDSIMSNGTWEVVERPYGCKPVGCKWVFKKKLRPDGTIEKYKARLVAKGYTQKEGEDFFDTYSPVARLTTIRVLLALAASHGLLVHQMDVKTAFLNGELEEEIYMDQPDGYVLEGQEGMVCKLLKSLYGLKQAPKQWHEKFDTTLTSAGFVVNEADKCVYYRYGGGEGVILCLYVNDILIFGTSLNVIEEVKDYLSKSFEMKDLGEADVILNIKLQREDEDGITLVQSHYVDKVLSRFGYSDCKPAPTPYDPSVLLRKNQRIARDQLRYSQIIGSLMYLASATRPDISFAVSKLSRFVSNPGDDHWQALERVMRYLKGTMSYGIHYTGYPKVLEGYSDSNWISDADEIKATSGYVFTLGGGAVSWKSCKQTILTRSTMEAELTALDTATVEAEWLRELLMDLPVVEKPVPAILMNCDNQTMIIKVNSSKDNMKSSRQIKRRLKSVRKQKNSGVIALDYVQKARNLADQFTKGLPRNVIDSASREMGLIPT

SEQ ID NO: 197733 - protein, 425 aa, Oryza sativa
  Clone ID: PAT_MRT4530_93463C.1.pep
MAEMVRHLELLLEVVHQELEPVPRTTTPTEAVLPHNPAEGHSQAMQCFYVSRGKRSEPPLSPEEEAKFEASDYLFRGALISVLTDNIVDVYMHMPSGKDMWDALEAKFGVSDAGSELYVIEQFYDYKMEKARAKDVRGKKVEGGSSANMVQKKNPHASRNNKKVKPDVKPKAATNFKKKGKGKAKGDCFVCGKSGHWAKDCPERKDRKSANMVISEGGGTSGYEHNDQTPEENPEEDNIVDTRKSKRQRVAKSFGDDYIVYLVDDTPRTIEETYSSPDADYWKEAVHSEMDSMMSNGTWEVVERPYGCKPVGCKWVFKKKLRPDGTIEKYKARLVAKASHDLLVHQMDVKTAFLNGELEEEIYMDQPDSLNVIEEVKDYLSKSFEMKDLGEADVILNIKLQRGYEDHLNEVNNGSRTYSTRYCDS

SEQ ID NO: 197734 - protein, 577 aa, Oryza sativa
  Clone ID: PAT_MRT4530_93464C.1.pep
MLHELLLALLGFTGDFVLDAASSPSATRRRRPVPPEAAAGGDVGPASFRLAPDLTFLQPSERSAIERLISLGFYYRELNRFATESRDLSWINSPIDVSPTHGEKTVKAKVRKGSAYRRAIANGIAEILSVYRSAVLQVEQNLLSDPLPILATVTHGLNKFEVLLPPLHELVMEIEQKDIKGGQLLNLLHKRCHCGVPELQSCIQRQEDRDKENDSSQVDVADKFTQKSAKETSLTSWHTGFHVSLDMLPEYIHMRVAESILFAGKAIRVLRNPSPGATLQESMNQSQNVKGSYRMQSLIGGSGALKELPNFPNISAEELLPQAEADKIDAMLKELKHSSEFHKRLFESAVGSIRTMAANNLWQLVVVRADLNGHLKALKDYFLLAKGDFFQAALKTIGDEDKYFARVSLRMSSFGIKASTSQKDLQKSSTPEISSQGKATSELALDGWDSIALEYSVDWPLQLFFTPDVVSKYRKVFQYLIRLKRTQMELEKSWAAVMHQDHADFSDYCKDRKNGDATQLRRQRSKPFWRVREHMAFLIRNLQFYIQVDVIESQWNVLQAHVQDSHDFTELVTFHQE

SEQ ID NO: 197735 - protein, 599 aa, Oryza sativa
  Clone ID: PAT_MRT4530_93465C.1.pep
MSITGDNNNTGDKEKEPPVNSNRGNTTSNSSKWPFSGVLPDSIVDVYMHMPLGKDMWDALEAKFGVSDAGSDLYVMELFYDYKMVDGRSVLEQDHEIQMLAKELENNNCELSDKFVAGGIIAKLPPSWTDFATSLKHKRQEFSVTDLIGSLGVEEKARAKDNRGKKIEGGSSANLVQKKNPHASHNNNKKVKPDVKPKATTNFKKKGKRKAKGVCFVCGKPGHWAKNCPYRKDKKSANMVISEGGGTLGFLIVNSGVPDMSVGTITESRDATFFENEFSMKNAPSTSSQEPILSPEHFALIEHIDQTLEENPEEDNILATRKSKRQRTAKSFGDDYIVYLVDDTPRTIEEAYSSSDADYWKEAIRSEMDSIMSNGTWEVVERPYGCKPVGCKWVFKKKLRLDGTIEKYKARLVAKGTMSYGIHYAGYPKVLEGYSDSNWISDADEIKATSGGRLHSTGILDGSDETNLFETSSTEKDFNSGNGQPPFRAAVNPEADQPDTPADPTPSRPPSPPVPRKGSSYTSDQAVTHSRLWPTDRPRRGGGEARPPTAVTGGAGSGGDGRKAAAHGRSSGVAGRPKRKTKAATTTRREEGRTSGGDT

SEQ ID NO: 197736 - protein, 699 aa, Oryza sativa
  Clone ID: PAT_MRT4530_93466C.1.pep
MPRCDVCTDGRAIRILGSARRDCSLFVCFIFFLVPSVRARTASTIATNGEKGGTDGAENINTNGGNYNNNASSSGAFSRSREVLAPIWCRRRTLMHPTTTTTMSNLTSNPRLQPILRRKARERQRATALCVVGRCSSLLMGNRSLVAVHGVGMVDLKFTSGRTVQLKNDEALHYFKIYKVEAENQLERKIKRLRSDRDEEYFSNEFSSFYEEFGIIHERTPSCSPQSNGVAERKNRTLTEMVNAMLDTAGLSKEWWGEAILTACHVLNKIPIKYKEVTPLEECEKKKLNLTYLRTWGCLAKNEFPMKKAPSTSSQEPISSPEHFTPIEHIDQMFEGNLEEENIVDTRKSKRQRTAKSFGDNYIVYLVDDTPRTIEEAYSSPDADYWKEVMDVKTAFLNGELEEKIYMDQPDGYVLEGQEGMVCRLLKSLYGLKQAPKQWHEKFDKTLTSVGFVVNETDKCVYYRYGGGEGVILCLYVDDILIFGTSLNVIEEVKDFLSKSFEMKDLGVADVIINIKLLRGDDGGITLVQSHYVDKVLSRFDYSDCKPAPTPYDPRTVSYGIHYAGYPIVLEGYSDSNWISDADEIKATSGYVFTLGGGAVSWKSCKHTILMRSTMQVELIALDTATVEAEWLCELLMDLPVFEKPLLAILINCDNQTVIIKVNNSKDNMKSSRHVKRRLKSCQKVEKLRSDSIGLCLDG

SEQ ID NO: 197737 - protein, 478 aa, Oryza sativa
  Clone ID: PAT_MRT4530_93467C.1.pep
MAHRELVHRTTTPTEAVMPHNPAEGLSQAMQCFYVSRGKRSEPPVSPEEEVKFEASDCLFRGALISVLADNIVDVYMHMPSGKDMWDALEAKFGVSDAGSELYVMEQFYDYKMVDDRSVVEQAHEIQMLAKELENNNCELPDKFVVGGIIAKLPPWSDFATFLKHKRQEFSVSDLIGFLGVEEKARAKDNRGKKVEGGSSAIMVQKNPHASHNNKKVMPDVKPKATTNFKKKGKGKAKGDCFVCGKSRHWAKYCPERKDIKSANMVISEGGGTSGYGRERFLLVHGVGTVDLKFTSGKTVQLKNVQHVPSIKKNLVSGSLLMGYRFLIVNSRVPDMRVGTIIESRDATFFENEFPMKNTPSTSSQKTVIPHEHFAPIEHNDQTLEGNPEEDNIVDTRKSKRQRVAKSFGDDYIVYLVDDTPRTIEEAYSSPDADYWKEAVRTSHGLLVHQMDVKTAVLNGELEEEIYMDQPDGYVLEG

SEQ ID NO: 197738 - protein, 133 aa, Oryza sativa
  Clone ID: PAT_MRT4530_93468C.1.pep
FKGSKAKVNFPDEVAGASIAAVQLPRHHQHHPPTSLPPLPVPAHLRPHFSLAGGQSTTPAPAAAAVAAPPREEFPDLSSYAHILQSGDLEYDFHAAVSAGLTTTAGRSSSSSSLSMPPPSEDLDYKPPFGPSN

SEQ ID NO: 197739 - protein, 219 aa, Oryza sativa
  Clone ID: PAT_MRT4530_93469C.1.pep
MSAPGAGAAAGAAAASGDGAPGAGAVANVNTNRGNSASQFSGGPFSGHASRKSIASLVWVIFGSGFAAALKPHAFDGSNYKRWKARALLWLTAMQCFYVSRGKRSEPPLSPEEEAKFKASDCLFRGALISVLADNIVDVYMHMPFGKDMWDALEAKFGVSDAGSELYVMEQFYDYKMVDDRSVVEQAHEIQMLTKELENNNCEGDPLESTCRHASLSIL

SEQ ID NO: 197740 - protein, 174 aa, Oryza sativa
  unsure (1)..(174): unsure at all Xaa locations
  Clone ID: PAT_MRT4530_9346C.1.pep
FFFFFFLDQKHESTARTRLLCLTQGFFYACVYPATSSSVFHNFIRFGXQGWQQPGACARHHVHWLQLNIFHITVQHAHASTSITHFKAIPSVAHTSQWCITTATHCPQARTMTNKGCTWDAITRPLQLAHLPADLTTGSAPTTTXMXSLPTSHYPVTGALKLXATLPQIIFKVS

SEQ ID NO: 197741 - protein, 633 aa, Oryza sativa
  Clone ID: PAT_MRT4530_93470C.1.pep
MHMPSGKDMWDALEAKFGVSDAGSELYMLAKKLENNNCELPDKFVAGGIIAKLPPSWLDFATSLKHKRQEFSVTDLIGSLGVEEKARAKDNRGKNIEGGSSTNLVQQKNPHASHNNNNNKKVKPDVKPKATTNFKKKGKGKAKGDCFVCGKPGHWAKNCPDRKDKKSANMVISESGGTSGLNVIEEVKDFLSKSFEMKDLGVADVVLNIKLLRGDEGGITLVQSHYVDKVLSRFGYSDCKPAPTPYDSSVLLRKNRRIARDQLRYSQIIGSLMYLASATRPDISFAVSKLSRFVSNPGDDHWQALERVMRYLKGTMSYEIHYTGYPKVLEGYSDSNWISDADEIKATSRYVFTLGGGAVSWKSCKQTILTRSTMEAELTALDTATVEAEWLRELLMDLPVVEKPVPAILMNCDNQIVIIKASETTRCCDVCTDGRAIRFLGSATRDYSLFVNIYFIFTNMSNTGDNGNTGYKEKEAPVNTNGGNTASNSSGGPFLGHAHRLLTPASEAPTTNPHTHPREGGKEGESLPPPSPPANATAGASPHADILRHTRADAGGLLVVVRGGEEAPPPRGSSSSLVRGGGGSWRLAKGACRGRGGGGGGVVVFARRASRAREAPPRRRLRGAFCKYSIEQQ

SEQ ID NO: 197742 - protein, 60 aa, Oryza sativa
  Clone ID: PAT_MRT4530_93471C.1.pep
QLLPNPVNLQNLHAFQLLFMHPQYSFQLHVIIGGCRILMHAQFFIIWGHIYYLLISCITS

SEQ ID NO: 197743 - protein, 1015 aa, Oryza sativa
  Clone ID: PAT_MRT4530_93472C.1.pep
MDHVVYLSADKLLTEQFADNVAMARPSDIRAVLASYQGRDIPAEFIERSKEHQRASLPASTARTNTSGRSPDQPEAEPVQIVAAMRPRAFAPPCLPGSGPLPGLAVPGRGDLFPAAGSVVGRRAAPAPAGRGAVARAVDGPSAAAAVAAAAASAAADVPPPQITWQIVVGAVAGVTPFVVAGVEFGKRIIAQKKCEICGGSGLVMKKDYYVRCQGRSRHLLLAHQLRIQLLSASAAAQLLSAAAHHRRHFEVGVGMPHARARAGPWAWPRRGVAGGGRVSRRYPFAATNPRSHDSLRNNASTFFLLIDKEAASFWGVPPARLLIAMSGVAAAAIGGGGAPPPTGAAPPPTPTGAGSGAAMQCFYVSRGKRSEPPLSPEEEAKFEASDCLFRGALISVLTDNIVDVYMHMPSGKDMWDALEAKFGVSDAGSELYVMEQFYDYKMVDDRSVVEQAHEIQMLAKELENNNCELPDKFVAGGIIAKLPPSWSDFATSLKHKRQEFSVPDLIGSLGVEEKVRAKDVRGKKVEGGSSANMVQKKNPHASHNNKKVKPDVKPKAATNFKKKGKGKAKGDCFVCGKSGHWAKDCPERKDMKSANMIISEGGGTSGYGRERFLLVDGKRVACGCSCVGYRFLIVNSGVPDMHAGTIFESRDATFFENEFPMKYTPSTSSKETVMPHEHFAPIEHNDQTPEENPEEDNIVDTRKSKRQRVAKSFGDDYIVYLVDDTPRTIEEAYSSPDADYWKEAVRSEMDSIMSNGTWEVVERPYGCKPVGCKWVFKKKLRPDGTIEKYKARLVAKGYTQKEGEDFFDTYSPVARLTTIRVLLALAASHGLLVHQMDVKTTFLNGELEEEIYMDQPDGYVLEGQEGMVCKLLKSLYGLKQAPKQWHEKFDTTLTSAGFVVNEADKCVYYRYGGGEGVILCLYVDDILIFGTSLNVIEEVKDYLSKSFEMKDLGEADVILNIKLQRGDEGGITLVQSHYVDKDGLCLNVIRVAFPSRDVDLQNISEGTHLYEFDC

SEQ ID NO: 197744 - protein, 317 aa, Oryza sativa
  Clone ID: PAT_MRT4530_93473C.1.pep
MAITLQDVSMLIRMPLAGQAIVLPDPLVDWRDDIIGRYACIVPEDDSDIKCFFSEDEARGPTLHWLSQFEVGYMKDDTENYHVELHLEAYLLWHFGWVMFTSGHRNTVDARMINLARFIAQGNIQSFPQWSWGSTVLAATYRGLCEACTKTSFKQPVFTGCPLLPQWANVQVRSAYEYFTEVFDLLKEDNVQWCPYTNEETQRRAPTGLNTLCLCDSSYWLTKKMLLYDIAVEAYSPQHVMRQFGLYQEVPVPLGETVPPKIHLQNRKADASVRRNIFAKMTPWVEQWSRATLDIVNESRPYDRCPMHNALYNSCQR

SEQ ID NO: 197745 - protein, 797 aa, Oryza sativa
  unsure (1)..(797): unsure at all Xaa locations
  Clone ID: PAT_MRT4530_93474C.1.pep
MQCFYISRKKRSELPLSPEEEARFEDSDCLFRGTLISILADNIVDVYMHMPSGKVMWNAFEAKFGVSDTSSELXSWSSSMTMRWSITEKARAKDNXGKNIEGGSSANLVQKKNPHASHNNNNKKVKPDVKPKATTNFKDKGKGKAKGDCFVCGKPRHWAKNCPNRKDKKSANMVISEGGGTSGYGKFLPTILSVFHSPDWWVDTGANIHVCADISMFSSYQVGRDSSLLMGNGSLAVVHGVGMVDLKFTSGKTVQLKNVQHVPLIKKNLVSSSLLCRDAFRLVFESNKCAVSKYGTFIGKGYVSGVLFRFSLDDMRNNNNDVNHISENDEFNVWHSRLCHMNFGCMTRLANMSLIAKFTLVKGSKCHTCVQSKQPRKPHNASEARNLAPLELVHFDLCEMNGVLSKEGKKYFMTLIDDCTRFCYVYLLKPKDEALYYFKIYKAEEWWGEAILTTFHVLNKIPVKHKKVAPFKEXGKEETKSLIPTHMGLFGQEHSNQTPEENPEEDNIVXTRKSKRQRVAKSFGDDYIVYLVDDTPRTIEEAYSSPDADYWKEAVRSEMDSIISNSTWEVVERPYGCKPVGCKLVFKKKLRPDGTIKKYKVRLVAKGYKKRSLNVIEEVKDFLSQSFEMKDLGVANVVLNIKLLRGDEGGITLVQSHYVDNVLSRFGYSDCKPSPTPYDSSVLLRKNRRIARDQLRYSHIIGSLIYLASATSPDISFAVSKLSRFVSNPGDDHWQALERVIRYLKGTVSYGIHYTVYPKVLEGYSDSNLISDADEIKATSGYVFTLGGGAVSDHLNE

SEQ ID NO: 197746 - protein, 91 aa, Oryza sativa
  Clone ID: PAT_MRT4530_93475C.1.pep
NPKPFDLHFKLSPPPCFFFNQKGFKTCPNLFLSTQIHGAPPNFQIFGSPFLFFFPQAPNFGGNKTGFSLGLNPLPFFEAFPNPDSQTLRPR

SEQ ID NO: 197747 - protein, 743 aa, Oryza sativa
  Clone ID: PAT_MRT4530_93476C.1.pep
MATICENIPKPQTGAAGAKRTHGLGMRERCPKRCHTLEKRNRNGPAHWACGTEAHTRNGRAAPRWYAGPVGVAVLKFWEHGGGSGRAVARSGSAGPWRSRTPGMADDWPYPLLSRDRCMSPCTTDVFQPFKWLEGIMITWKQDNKVHADGEQIQGKGCHLHDRQLSSLTHQWIGGMISLEDLLALFQRMIATSKVGYMRDDTENYHVELYLEAYHLWLFGWVMFTSGHGNTVDARMINLARFITLGNIQSFPQWSWGSAVLATTYGGLCEACTKTSFKQPVFTGCPLLVKLWSYERFPLGQPYMTEPVADSTLFGNSTDDRPTYGMRWCWGPPQWANVQVRSAYDYFTEAFDLLKEDNVQWCPYTDKETQRRAPNGLSTLCLRDSSYWLTKKMLVYDIAVEAYSPQRVMRQFGLYQEVPVLPGETVPPRYTYVDIPEIADVDMLYPMQSAPVTHLTGDIVEELYAETTSLWEKLRDNIAGSHEDMMSALDRMRQKCKRIMRAASCRHASDMHRPTGHRFADPLPERPSTSSMPSTSRPSTSARPSASTRPKPAVRPVEPSTIIRPDNEGSTAVIPSIPHASTTGQWQGGFAPYAGSSQLVPPMRTEAGSSQFQGGFSGIPQINMPMFSMGTNDQWQGAHTYNTGMYSPKQRMEYAGSTQSYGKPCSYGGGSSTAHHEIGPSQLDEPPPITQPTQDYSHVDFSGVEVVRRSVRERHSPERLSLLGRRPPTGARRKGKTKVTSTS

SEQ ID NO: 197748 - protein, 111 aa, Oryza sativa
  Clone ID: PAT_MRT4530_93477C.1.pep
QKLAGNATRFIPEDLTMGRVYDYMFHLLTEYAKLLKYKPTVPDRAVEVTVESMTRGRRGLERQFMVDTMVEAGSGTGEPCELPPPFSSEELETLKKRQADAVRQVETWEKR

SEQ ID NO: 197749 - protein, 191 aa, Oryza sativa
  Clone ID: PAT_MRT4530_93478C.1.pep
MDLRRHDFNVISTRIHELLKFQLPFFGTVTGTTLGLKLKCQTVQVKKRINFYRPSDFQSHCFVNVCLKTQELTVKTRRTNRGMIQMSLHIEFRSARNSFKIKFVMRHGWNSRDVDIIMAYDVDRARCELATPAIFEHFSLLQKRDRLVVLGWIGLDSSLIGARDGGEWRRRRPQLMNSGLTDACPRANRPK

SEQ ID NO: 197750 - protein, 225 aa, Oryza sativa
  Clone ID: PAT_MRT4530_93479C.1.pep
LPSLSGRIIVDGSTGLTAGLGRVEAEGLADVDGLEVEGMEEVDGRSGRGSANLCPVGRCMSDACLHDAARIIRLHFWRIRSRADIISSWDPAILSRSFSHSDVVSAYSSSTISPYENKRYDQYIVRWVTGADCIGYSMSTSAISGISTSAIVTSRTCVCAVYHRMYNAYIRRSYGGSGRTIACHASGSPVSMDTSCSVIAISPHGRWNVCLRPPSKQRVRCIGVK

SEQ ID NO: 197751 - protein, 182 aa, Oryza sativa
  unsure (1)..(182): unsure at all Xaa locations
  Clone ID: PAT_MRT4530_9347C.1.pep
MVLLRWNGKTKQRPGCYVMRRSRRWQWRGLVVARAAVARCRSRQSGGGARVHGGIGARVVYCGSGAVDGMRQSAARPAMQAARHGDGGSGGSGRLESAGLGDGDRGRXGGIGRXRGEVKWSSWGGQTGAVSCGVSGGKGGGRGGGCVHVVGCELGCGRAPHFAATWAAMAVGVGRREVGGGA

SEQ ID NO: 197752 - protein, 179 aa, Oryza sativa
  Clone ID: PAT_MRT4530_93480C.1.pep
MVAPFLLSCSVFQLARQVQLHVHGPMLNSELHYSQEKNKRKVGDVPAWGKPLKFPTGAEAETDRVSTRESSEKWSASAYVYLQWLGRTAATVCCRQKLASAACAWLTVFVLINDAKARESNPDGGVDVLIIHDDGKRFETVGILRFKKGGGVVCRVAEAFNFGNDGFFERARNRRFCRI

SEQ ID NO: 197753 - protein, 1058 aa, Oryza sativa
  Clone ID: PAT_MRT4530_93481C.1.pep
MGLVLTLLVLLVIMSSSTSTTVAEHHRIRSNDTDLAALLAFKARVSDPLGFLRDGWREDNASCFCQWIGVSCSRRRQRVTALQLPGVPLQGTLTPHLGNLSFLIVLNLANTSLTGTLPGDIGKLHRLELLDLGYNALSGNIPATIGNLTKLELLDLQFNRLSGPIPAELQGLRSLGSMNLRRNYLSGSIPVSVFNNTPLLAYLNIGNNSLSGLIPTAIGSLSMLQVLVLQYNQLSGSLPPTIFNMSRLEKLQASDNNLSGPIPFPTGNQSTIQLISLAFNSFTGRIPPRLAACRELQLLAISGNLLTDHVPEWLAGLSQLSSISLAANDLVGTVPAVLSNLTKLTVLDLSYSKLSGMIPLELGKLIQLNILHLSANQLTGPFPTSLGNLTKLSLLALDRNLLTGPLPVTLGNLRSLYHLHIAENHLQGELDFLAYLSNCRKLQFLDISMNSFSGSIPSSLLANLSINLLKFFAEDNNLTGRQIGTLKGMVTLSLGGNKISSSIPNGVGNLSTLQYLSLSYNWLSSYIPASLVNLSNLLQLDISHNNLTGALPSDLSPLKAIAGMDISANNLVGSLPTSWGQLQLLSYLNLSQNTFNDLIPDSFKGLVNLETLDLSHNNLSGGIPKYFANLTFLTSLNLSFNNLQGQIPSGGVFSNITLQSLMGNARLCGAQHLGFPACLEKSHSTRRKHLLKIVLPAVIAAFGAIVVLLYLMIGKKMKNPDITASFDTADAICHRLVSYQEIVRATENFNEDNLLGVGSFGKVFKGRLDDGLVVAIKILNMQVERAIRSFDAECHVLRMARHRNLIKILNTCSNLDFRALFLQFMPNGNLESYLHSESRPCVGSFLKRMEIMLDVSMAMEYLHHEHHEVVLHCDLKPSNVLFDEEMTAHVADFGIAKMLLEDDNSAVSASMPGTIGYMAPEYALMGKASRKSDVFSFGIMLLEVFTGKRPTDPMFIGGLTLRLWVSQSFPKNLIDVADEHLLQDEETRLCFDYQNTSLGSSSTSRSNSFLTSIFELGLLCSSESPEQRMAMNDVVSKLKGIKKDYSASMLEMQRRRQY

SEQ ID NO: 197754 - protein, 921 aa, Oryza sativa
  Clone ID: PAT_MRT4530_93482C.1.pep
MGVGPHCTTSLLIILAVVITSSLLTTTIKADEPSNDTDIAALLAFKAQFSDPLGFLRDGWREDNASCFCQWIGVSCSRRRQRVTALELPGIPLQGSITPHLGNLSFLYVLNLANTSLTGTLPGVIGRLHRLELLDLGYNALSGNIPATIGNLTKLELLNLEFNQLSGPIPAELQGLRSLGSMNLRRNYLSGLIPNSLFNNTPLLGYLSIGNNSLSGPIPHVIFSLHVLQVLVLEHNQLSGSLPPAIFNMSRLEKLYATRNNLTGPIPYPAENQTLMNIPMIRVMCLSFNGFIGRIPPGLAACRKLQMLELGGNLLTDHVPEWLAGLSLLSTLVIGQNELVGSIPVVLSNLTKLTVLDLSSCKLSGIIPLELGKMTQLNILHLSFNRLTGPFPTSLGNLTKLSFLGLESNLLTGQVPETLGNLRSLYSLGIGKNHLQGKLHFFALLSNCRELQFLDIGMNSFSGSISASLLANLSNNLQYFYANDNNLTGSIPATISNLSNLNVIGLFDNQISGTIPDSIMLMDNLQALDLSINNLFGPIPGQIGTPKGMVALSLSGNNLSSYIPNGGIPKYFSNLTYLTSLNLSFNNLQGQIPSGGIFSNITMQSLMGNAGLCGAPRLGFPACLEKSDSTRTKHLLKIVLPTVIVAFGAIVVFLYLMIAKKMKNPDITASFGIADAICHRLVSYQEIVRATENFNEDNLLGVGSFGKVFKGRLDDGLVVAIKILNMQVERAIRSFDAECHVLRMARHRNLIKILNTCSNLDFRALFLQFMPNGNLESYLHSESRPCVGSFLKRMEIMLDVSMAMEYLHHEHHEVVLHCDLKPSNVLFDEEMTAHVADFGIAKMLLGDDNSAVSASMLGTIGYMAPVFELGLLCSADSPEQRTAMSDVVVTLKKIRKDYVKLMATTRPGKKLMATTVSVVQQ

SEQ ID NO: 197755 - protein, 142 aa, Oryza sativa
  Clone ID: PAT_MRT4530_93483C.1.pep
GCSLARAVGSVAATEASGGSSIGPDVVLSYGAPFLLSRFPPIFRKRLLSTMKMVLEVLPLEVQWDSIQALELGGCSPVAACSGQPVHSLTGVMRCMSQRPAASESVGSSSTARRDVGRPQGTEPELAKWGALSMSSQRDRME

SEQ ID NO: 197756 - protein, 113 aa, Oryza sativa
  unsure (1)..(113): unsure at all Xaa locations
  Clone ID: PAT_MRT4530_93484C.1.pep
MGNCGASQRAVESWADGDEWEDEAAASSSSEDDGHRERMEHVAEVTIRITKRQLHELMERKGAGNGHGKISRRSTQQLLXADIMNSGEVHHHDQHREAHWKPALQSIPEAVES

SEQ ID NO: 197757 - protein, 59 aa, Oryza sativa
  Clone ID: PAT_MRT4530_93485C.1.pep
EKDSCIYARLRRGKRNMFAFSSSRIFYFLFSDISMFCIVSSIHITDYIKCVKKDGSEMN

SEQ ID NO: 197758 - protein, 46 aa, Oryza sativa
  Clone ID: PAT_MRT4530_93486C.1.pep
RINQGIFSNTEQFSQHGEIRYERQNEKTCNKWVVLTECPALTQMHK

SEQ ID NO: 197759 - protein, 101 aa, Oryza sativa
  Clone ID: PAT_MRT4530_93487C.1.pep
NLPIKTAYDCFYQRELQHIIGYIMSRTLNKSDTTPMVAKFAIYKHKLVKKKVNMHLYMSPKLILTASITDVTAASRAPKLYPFMYCIGRGIHFMIALLLIL

SEQ ID NO: 197760 - protein, 98 aa, Oryza sativa
  unsure (1)..(98): unsure at all Xaa locations
  Clone ID: PAT_MRT4530_93488C.1.pep
GDRRVDPNPAARDHIHPSPIAVSESALFLLDIKGLVLVWRDYRGDVSSLQAERFFTKLFXKEGDSDAHSXPVVYNYSRVTYMFIQHNXVFLLTAFRQN

SEQ ID NO: 197761 - protein, 373 aa, Oryza sativa
  Clone ID: PAT_MRT4530_93489C.1.pep
MFESRNSRRSVTMDARRRRLSPVVVVAAFLFFPLFFGSQPAAAYGEASGAGGMTALQKHAAFFDKDNDGFVSPTETYDGLRALGLGAGFSILSAALINGVLSLKTRPRGYLDTEATRRRDSRDSGTETAERVRSSQRARQGREETAGDARAMDARRRRLSPAVAVAAALLFFPMFFGSHTPAAAAAYGEASGDAGVTALQKHAAFFDKDGDGIVSLSETYDGLRALGLGSGLSSLSAAFINGVLSPKTRPDNGTAPRLSIYIENIYKGIHGSDSSAYDSEGRFVAEKFEEIFAKHAKTVPDALTSDEIDELLQANRKPGDYTGWVAASSEWKILYKIGKDKDGLLRKEAVREVYDGSLFTKLAAARINDENQA

SEQ ID NO: 197762 - protein, 356 aa, Oryza sativa
  unsure (1)..(356): unsure at all Xaa locations
  Clone ID: PAT_MRT4530_9348C.1.pep
TLCFPQSLINSVLSSIPTYYMCSLQLLVSVVKAIXSAKKNCLWRGNNPTSTRRSLASWDLVCRPKDKGGLGVINLRVQNIALLLKHLVKFYKGHDLPWVQLIWNSYYNFKVPHLVWNKGPFXVEGYSGSICSTPLEDCFLLPLNTQAYGEFTVLEEEWSSLFXNGKGDEWSFIRNCDKYTAKRFYKLTYSNVHVPRPFVWIXKTKCVMKIKVFAWLLFRDRLNIRDMLDRXHCAKENKDLTCELCLNNIRETREHLFFFCPFSQHCWQHLGIAWNPDLEFFQMVVLARIQFNKRGFLEIFFIAAWHIWKQRNGKIFRNELPSFSSWRALFXADVLLHLCRMKDPLKHIIFYWLQTV

SEQ ID NO: 197763 - protein, 551 aa, Oryza sativa
  unsure (1)..(551): unsure at all Xaa locations
  Clone ID: PAT_MRT4530_93490C.1.pep
TARTASYETAISAEREARPNGLKEARPSHWAGAGARRRPIRGARKGEGAVRVDRTHHARSRVGPACLRHGSRRDGRTRGAAQGFRVSAVHARAPDGPRMXRAHAQPVGAPWTVRARGGXRKEAADRLGSVKAEVAPTWRLRGSHVGRREEEEGGAAEWTADGGRVHRSKALPQWKKKAHRRREGTRGSEPTARIRRKEAGGGGLRRRAPLASKGGKRRRSRRDQFKAVGVSPGFKEFISGVGWGRATPWRSGDERRPPGASGDGGKPMAGGGEARGFVHARGRGQTGRENGGRHYRAETGAVTSGRQRGSELSGLGPGKGRKMGARSPASRVLARTGLPGARRRTATARAEEGRQWGEPTLAVKRSAGGNGGFVGDAKAATAWMHWAAKAVDRAXEIEPREREEQRRLARGELALGQGGGGELAVAPVVQAVAGGDADAVWCSAAGQRGRPAARRRRGRADSGSDRPVDLLASERXARRGGAAGFRTAAAGKSAPRRGRKEAERDSEERERKKRGDASLSRHMQRTCGEVEKRAERRWAGEEESAHRGRGR

SEQ ID NO: 197764 - protein, 412 aa, Oryza sativa
  unsure (1)..(412): unsure at all Xaa locations
  Clone ID: PAT_MRT4530_93491C.1.pep
MSGFEGFTNPFPKSSTNNGVCGIFGIRAQRARISRKEKYLWNIGKDILKNIFDSLTSGVNKKAEREARPNGLKEARPSHWAGAGARRRPIRDARKGEGAVRVDRTHHARSRVGPACLRHGSRRDGRTRGAAQGFRVSAVHARAPDGPRMWRAHAQPVGAPWTVRARXGGRKEAADRLGSVKAEVAPTWRLRGSHAGRREEEEGGAAEWTADGGRVHRSKALPQWKKKAHRGREGTRGSEPTARIRRKEAGGGGLRRRAPLASKGGKRRRSTRDQFKAVGVSPGFKEFISGVGWGRATPWRSGDERRPPGASGDGGKPMAGGGEARGFVHARGRGQAGRENGGRHYRAETGAVTSGRQRGSELSGLGPGKGRKMGARSPASRVLARTGLPGARRRTATARAEEGRQWRGGVGV

SEQ ID NO: 197765 - protein, 126 aa, Oryza sativa
  unsure (1)..(126): unsure at all Xaa locations
  Clone ID: PAT_MRT4530_93492C.1.pep
AAFSDRGGGGGGGGVRGGAYEGSSGDVVDEMKNLFKSKIKWQHRSNDPASSQGQGQGLPQQTPPSPSPASSPSGGPPALSVSTVSSSSPSAAAXPTGAAAAGXGGGGGGTGWXDYMLSEGGVPDAA

SEQ ID NO: 197766 - protein, 79 aa, Oryza sativa
  Clone ID: PAT_MRT4530_93493C.1.pep
MSSRRRRWADPAAAAPFAPSRLPPAADPATVAASVAAAGRSGGGKRVQRRRLPPPPLTFLLRWIRRRWQCRRQRRADPA

SEQ ID NO: 197767 - protein, 145 aa, Oryza sativa
  unsure (1)..(145): unsure at all Xaa locations
  Clone ID: PAT_MRT4530_93494C.1.pep
AARTKAQHFQRKRGXAXFRPLRSAAAAAXARTPFRRVVPAAETHEIDSACLHRVVAHLEGRIVDEEHAAPMRKDGELFQRAAPRGVRNGQSLLLGAAHHRVRVASNGGACDGEVVEMRLTELPQQGHEARRSSFALRRHADCIPR

SEQ ID NO: 197768 - protein, 96 aa, Oryza sativa
  Clone ID: PAT_MRT4530_93495C.1.pep
MGAPPANPNFARSQAPSPQGRVSARVQEQYKTMSSRRGGGGRRGRGRGRGRSALAENDMDFHETSAPSSPSTISDKEDNIEFTSQQPCLVSPAAEH

SEQ ID NO: 197769 - protein, 144 aa, Oryza sativa
  Clone ID: PAT_MRT4530_93496C.1.pep
PRVRPRVRPRRSSTRTCTRADLPFTTTGAALLIHTAFGSVMTSDSVLTDVEYDRRRHRKPPKAGGAADEGPHHQDQAQEARRRPARRMLPRATQLRMPCQAVGSVLPCVRHHSQHIRSDAELTAFLAGYGTHSATGNCSWRRRH

SEQ ID NO: 197770 - protein, 242 aa, Oryza sativa
  Clone ID: PAT_MRT4530_93497C.1.pep
MAPTSKLSQGIKKASRSHTYHRRGLWAIKAKHGGAFPKAEKPAAAAAAAAPKFYPADDVKPRQPSTRKPNPTKLRSPSSSNLPEFSLFRFILLMRSSITPGTVLILLAGRFMGKRVVFLKQLKSGLLLVTGPFKINGVPIRRVNQPYVIATSTKVDISGVNVEKFDDKYFSRDKKQKAKKTEGELFETEKEATKNLPEFKKEDQKVVDAELIKAIEAVPDLKTYLGARFSLRDGDKPHEMVF

SEQ ID NO: 197771 - protein, 99 aa, Oryza sativa
  Clone ID: PAT_MRT4530_93498C.1.pep
MLQSGSISSKRNSRALYHPLRMMYRSIIQQERDTGLRESEGFELTVNLVIQRADETNPTTTTEKKRNAELVLDNAATNLGGGPPEVLPAARHLQPPLLT

SEQ ID NO: 197772 - protein, 189 aa, Oryza sativa
  unsure (1)..(189): unsure at all Xaa locations
  Clone ID: PAT_MRT4530_93499C.1.pep
MAPTSKLSQGIKRASRSHTYHRRGLWAIKAKNGGTFPKAGKPAAAAEPKFYPADDVKPRAPGTRKANPTKLRSTITPGTVLILLAGRYMGKRVVFLKQLKSGLLLITGPFKINGVPIRRVNQAYVIATSTKVDISGVKVDKFDDKYFARXQEGKGRKTEGEXFETEKEATKNLPDFKXDDQKAVDAEVI

SEQ ID NO: 197773 - protein, 161 aa, Oryza sativa
  Clone ID: PAT_MRT4530_9349C.1.pep
MGISLLPPMDFDLRDLFPNPENLDCLVDQFYTQDMDSLIKVIPSDKAPGPDGFNGFFLKKCWQIISQDFYRGISSCRIRTGSSVLFWDDIWNDKIRSNAFPSLYMVALDKTLSVKQMGSTPLEDCFLLPLITQAYGEFTVLEEEWSSLSLQNGIGHEWSFI

SEQ ID NO: 197774 - protein, 181 aa, Oryza sativa
  unsure (1)..(181): unsure at all Xaa locations
  Clone ID: PAT_MRT4530_934C.1.pep
ASIQLELLYSLVGSGFPMVPTPTPDPQHSPTPDLRLPSKQTKGRFSLGWAKPPPIAGPPTQRPSXPPRQQCHHQTTNTFAWVPPPPFNFLQPLPMLHPAQHGCLRLPKALPLPQAVPTIRVANGLPAMPPSLPVAPMQAAPNPTSXAHPNHLTPPTWFAARWVGXHLAGPPAPHNGSPSSP

SEQ ID NO: 197775 - protein, 222 aa, Oryza sativa
  unsure (1)..(222): unsure at all Xaa locations
  Clone ID: PAT_MRT4530_93500C.1.pep
MAPTSKLSQGIKKASRSHTYHRRGLWAIKAKHGGAFPKAEKPAAAAAAAAPKFYPADDVKPRQPSTRKPNPTKLRSSITPGTVLILLAGRFMGKRVVFLKQLKSGLLLVTGPFKINGVPIRRVNQPYVIATSTKVDISGVNVEKFDDKYFSRDKKQKAKKTEGELFETEKEATKNLPEFKKEDQKVVDAELIKAIEAVPDLKTYLGARFSLRDGXAPHEMTF

SEQ ID NO: 197776 - protein, 520 aa, Oryza sativa
  Clone ID: PAT_MRT4530_93501C.1.pep
MEKFLVAAPPPSGDAPAAPVPPRRHRWSRVAAELDGRIDARFRHRESVRLRDSFSEMNRVVNDSVLGFQAVREGISAMEFDKKGIYLASVTASGCLTVHDFETLYCSTYGPSRGLPDESSNYLLHISNSMPLCAVRWNPANQDEIVCVSRQTDMVLLFDIGCVSSTPTEILRKGRSRYPVLSEFRKGLTDVAFSSDDKTGLFASGLDGAVFMWDMRLSKKHCLELIGHPESQFSSVKLNIDNRTVFAATKEGTVHAWDLRGGRASAAFQSHNEVQQLSSVKISTLLGKIPSLKDQTNIVSSEILSIDFNPSCSYQLAFHLDNGWSGALNINTLSVSHLHCPPPDWLEHMNFMWQKLHRKPTWLPTSSIYAVGSASNTVGMHLLDFHPDTSSACHVDYKGEIRGSDEKKPAANKFIPSSQRVVSCAAHPFCHTILAGTQCQHVSCAVDAAADPDRGCPGLLAGGAVGVAVSKEGGVGDACSPSQEALDSSHRRRQRWHRDFDRLSRAGISQYSAQASVSVL

SEQ ID NO: 197777 - protein, 78 aa, Oryza sativa
  Clone ID: PAT_MRT4530_93502C.1.pep
MEGGEVARVEAEVVSALLLRAPGDRRHHHHPRAQQRVDMAVSLFILGFSLRVCFSLRVSSPGSEWWAASTSVAAAVDV

SEQ ID NO: 197778 - protein, 122 aa, Oryza sativa
  Clone ID: PAT_MRT4530_93503C.1.pep
MGLGALAKPVPVCRGFRRIIFARAAFWRELHSAKVVLPKSWLSPVRLHSRPSPSTFGVSLLLELLVLVGSANGSPCHSNAERARAVASELELDEVAVGVVLELKRGASGAKCSIYRSGGVIF

SEQ ID NO: 197779 - protein, 1037 aa, Oryza sativa
  Clone ID: PAT_MRT4530_93504C.1.pep
MSHGGPFQPRSPPAGDDLSPWAAFEGSSWAAFQEGSSSSPAWHAFQPRSTVGPSQAPFYLSPGGHILSTPAGDDRSPGGSSQPRRSLADRSPGNRSELRSTPAGYPSPGRASQPRRTLENRQGWGGVLPNFTSVLPVPKTGFGNLMGLSVKLILSAMFYHCGWAGAAQTTMAAADSGLNGLSPPPNPRRLRLRLRLSPPASRRLRLRLRLPRAACAAARRKTMVAPKMVTVNELLGLTQIRGYVEKELSNLAKKKQIFVPILVRALDGSGLHWYLLVVDIENGIRSDCGFYMLLYMERFGRMKIDDINEDIYENPNNNPKDVSDEVIAQDEYHILDDTICLSPPPSDLRNSPPRPNLTVSPMSHEDGRNDGPLPPSSPGTSDGNKNLEDAQPQEEADRSSVGIAENAEAGNQANHARTSDGNQKLDDAQAQGKANRSSEGSSLDTRTDNERSRTSDDEAGGNEVDEGEKGVPSSPPRREQNPSHALDKDIVYYSRKKKEKKRKEKSRSSLDNDLIQLGKRCRIATTRTAIKTTRREWPDDAIVKEVYELATDCKEQVILNFGAIAMTGSEIEQSFQKVECAGDIISLFIKYLENNTYPDDSRIFVPPLYKGKGGMKKKIKDALGGSNEKKSAVEFPHRFPNDSVFAAMYFLEHFIGVAGVLNKLTWDEKDTDLSLGWLEDLSFLSDPNYPSSTELEDYYIYPSAVIEIILLTETYPSVGWEIYPCLVTQIILLSLQELSFTRTSTYPSKLLDLSFCRTQTYPSVGWEIYPCLVTQIILLSLQELSFTRTSIVKLHGVPSRIVSDRGTQFTSRFWKSLHKAMGTKLDFSSAYHPQTDGQTERVNQIMEDMLRACVLTYGKDWEQSLPYAEFSYNNGYQASLGMSPFEALYGRKCRTPLMWSEVGERALVGPAFIKEAEERVAEIREKLKAAQSRQKSYADKKRREVSFEPGDFVYLKVSPIRGTRRFQIQGKLAPRYIGPYQVLKKVGAVAYLLELPEGMSDIHPVFHIKWAPALAPAPPSQTTGARRQDKGAWRKVI

SEQ ID NO: 197780 - protein, 1788 aa, Oryza sativa
  Clone ID: PAT_MRT4530_93505C.1.pep
MGPSGREGSGEEVNLEVANMGEAASTEEGDADAIKEDEAASTEEGDADATKEGEASTAEVEMKDPKIHTRSSPNSVILAAQELSSDARNVVITAGFEQLLYMSLEGFGNREILRFLMNNTHTEQTSEGVEIKIEGSKLPPITENVVAHVVGVPEGSGESLEFEQDTKKQGEIKKAVHNLLKLPDSVDDCEPIADEKKRDRKHKTIMNGKIGVDYLRDVMEEAKETKDVELEVKCFFFIAFHTLLLPEKDGYLTLHQMQAGMNLARIQRINWRKVLLNHLKDGVKSWWKSQAKSTKPGAKSTKPGGVASVYISGPVTVLLLYYLDFLKSKSESDVSQTPRICYYGESMVTDLVQETMQKDGKRFDNLKFRTTEETCYSRSYNECEKVKVQKVSGKQKKNKRTRLGKNKGEKGDKEEKGTHVNPAVRRKEVVKRYGERAEKDSGAKNDMVAHIPALEDFVKSSLEHMPRYLHSDAIKIVKQNHSSIVEMYEKIMKTQSQMPSKMESLVDRYKDLDEFYSKHIMSKADWEQKHFGNKAAVDINGITIAEHDFVKSMKLNGWISNFIVDVQCSIWREEEEWKDKIILSQSAVNELLGLTLIRGYVEKELSNLAKKKQIFVPILIRALDGSGLHWYLLVVDIENGIRSDCGFYMLLYMERFGRMKIDDINENDVLMYRKKLVKDIYENPNNNPKDVSDEVIAQDEYHILDDTICLSPPPSDLRNSPPRPNLTVSPMSHEDGRNDGPLPPSSPGTSDGNKNLEDAQPQEEADRSSVGIDLDKLKSKRFLIVFDDIWEHDFSKAASTKRFSKTEWEKLLAPFGPGETNGNMVLVTTRFPKVAETVKKGANQVDLHGLEPDEFWDFFQLCAFSETQDDNDKEKLFDIGKQIAKKLKCSPLAAKTVGPLLRKKPTRKHWMEILEKEEWLKQKDGDDSIITALKISYDYLPFYLKKCFSYLALFPEDYEFDSLEISCYWDSIGIINSSGKNDTIEGIGSQYLNELYDNGFLMKGDDNHYVMHDLLHELSQIVSSRECANINYSSFRADDILPSIRHLSITIQDKYTESFKEEMEKIKKRVDIRNLRSVMIFGSYRSRRIANVVRDTLNEIRALRVLFIFMNSPHSLPDNFSKLVHLRYLKIGSPWGFKVCIPSTVSKLYHLKFLDLKSWGGSNNNLPNDFNRLINLRHFLAKKEFHSNVPEVGKMKCLQELKEFHVKKDKIGFELAQLGQLEQLRGELCIFGLKNATREEAIEAKLKHKSNLSKLRLDRGGNREKNTSSSSSRTQVVSNENQDDDIILDSLQPHSNLTELSIVNLGGGMAPSWLGSNIIHLDTLHLDGLERLDCISCPKLNELPLSSCSSSSCTMWFPKLRRLNITRCLELSVPLVPHTSTLTYVRVNDSVRGFNTSKKLTLDGYNGALAFQNLGNLEEIYIGDVHNMSLIDFQQLRSLRRLTVTLCRDTFLRGLDEHVVVVFNSVRVLNLSGFLLTRKMLSNLFRCFPALYVLSMSPSKESHEEVKLQIPSSCSLKTIRLFKCKNLILPPLDDGQGLVNLTSLRNLHIDDCGKIFSQWYMGKPAQTTSNPFPSSLLELSICRESRIHSMALLSNLTALTSLQLIDCCNVTMDGFNPLITSNLNKLCISSCGSAPADLLAEMARTKTTMPQVAFQLKDLVVDSISAVLTAPICSFLAPTLHELGIKDDVDRVSSFSDEQEGALELLVSLKKLSFDGLWVLQSLPEGLHKFPSLTELSISHCPQIQSLPKNGLPTSLETFSVFICSSALEEESKRFTEEKERYYSESDD

SEQ ID NO: 197781 - protein, 73 aa, Oryza sativa
  unsure (1)..(73): unsure at all Xaa locations
  Clone ID: PAT_MRT4530_93506C.1.pep
TPPFPLLAQSPYTPPPLPLPTGAPPHSPLTPPCNRTLTPPVPCVTPPLTVTFSXXLTPXSXXFFPSFLPPFLF

SEQ ID NO: 197782 - protein, 199 aa, Oryza sativa
  unsure (1)..(199): unsure at all Xaa locations
  Clone ID: PAT_MRT4530_93507C.1.pep
MALALSTSAAAAAAARALAARVTTTTTRGYAASAASSAMRRAAAAVEGKGAAGMTQAKDGSSSPAAREVSWVPDPVTGHYRPSNFAGXRRRRRPPRXPPRPQLRPRVMRATSPSFDRRRRHPSIYICSAVTTHYLLXXTAPRRTPLRLRVHLDDEHDPLSPGGGSARGGRIPTVSLVGVGWMLCSCAGSFCTSXVTASR

SEQ ID NO: 197783 - protein, 1319 aa, Oryza sativa
  Clone ID: PAT_MRT4530_93508C.1.pep
MTSYAVSSGGLLRVVPGESTGCLAAAGVPATRRRPRNPPPPPGFPASPGPLCKSGHEQSTAREQRGERLLRRWRAAAQLGTCGAGWPDARLRRRSRPMATGEGTDLGCGKASPDDPHPTLRAPTFLHDYLRLSFPERTGNCDHFGSRRLIESMGPSGREGSGEEVNLEVANMGEAASTEEGDADAIKEDEAASTEEGDADATKEGEASTAEVEMKDPKIHTRSSPNSVILAAQELSSDARNVVITAGFEQLLYMSLEGFGNREILRFLMNNTHTEQTSEGVEIKIEGSKLPPITENVVAHVVGVPEGSGESLEFEQDTKKQGEIKKAVHNLLKLPDSVDDCEPIADEKKRDRKHKTIMNGKIGVDYLRDVMEEAKETKDVELEVKCFFFIAFHTLLLPEKDGYLTLHQMQAGMNLARIQRINWRKVLLNHLKDGVKSWWKSQAKSTKPGAKSTKPGGVASVYISGPVTVLLLYYLDFLKSKSESDVSQTPRICYYGESMVTDLVQETMQKDGKRFDNLKFRTTEETCYSRSYNECEKVKVQKVSGKQKKNKRTRLGKNKGEKGDKEEKGTHVNPAVRRKEVVKRYGERAEKDSGAKNDMVAHIPALEDFVKSSLEHMPRYLHSDAIKIVKQNHSSIVEMYEKIMKTQSQMPSKMESLVDRYKDLDEFYSKHIMSKADWEQKHFGNKAAVDINGITIAEHDFVKSMKLNGWISNFIVDVQCSIWREEEEWKDKIILSQSAVNELLGLTLIRGYVEKELSNLAKKKQIFVPILIRALDGSGLHWYLLVVDIENGIRSDCGFYMLLYMERFGRMKIDDINENDVLMYRKKLVKDIYENPNNNPKDVSDEVIAQDEYHILDDTICLSPPPSDLRNSPPRPNLTVSPMSHEDGRNDGPLPPSSPGTSDGNKNLEDAQPQEEADRSSVGIAENAEAGNQANHARTSDGNQKLDDAQAQGKANRSSEGSSLDTRTDNERSRTSDDEAGGNEVDEGEKGVPSSPPRREQNPSHALDKDIVYYSRKKKEKKRKEKSRSSLDNDLIQLGKRCRIATTRTAIKTTRREWPDDAIVKEVRTAIKTTRREWPDDAIVKEVYELATDCKEQVILNFGAIAMTGSEIEQSFQKVECAGDIISLFIKYLENNTYPDDSRIFVPPLYKGKGGMKKKIKDALGGSNEKKSAVEFPHRFIYCPVLFSGEWIVVCFQLKNMKQIGILCNNGGDEIKNFALDLGKKLNKVLGDCNYKTVSFDEKSLSFFPSCVQPNDSVFAAMYFLEHFIGVAGVLNKLTWDEKMRDQYIKSYSRGILTCLIQHKENTADVPDGILALFE

SEQ ID NO: 197784 - protein, 191 aa, Oryza sativa
  unsure (1)..(191): unsure at all Xaa locations
  Clone ID: PAT_MRT4530_93509C.1.pep
MALALSTSAAAAAAAAARALAARVTTTKGYAASAASSAIKRAAAAVERKGAAGMTXAXDGSXSSAAKEVSWVPDPVTGHYRPSNFAGGXRRRRPPRRPPRPQLRPRVMRATSPSSDRRRRHPSIYICSASTTHHLSTAPRRTPLRLRVQLNDDDDASSPGGGSAGGXGGXPTVFLLRVGXMLCSCAGSLCN

SEQ ID NO: 197785 - protein, 888 aa, Oryza sativa
  unsure (1)..(888): unsure at all Xaa locations
  Clone ID: PAT_MRT4530_9350C.1.pep
AASLLLFLFAGHLPCQRRVAPPPPPVVWPSARRPAVPSRPIGLGRSRPSNPWTGGGPSLWSRSTVDRHLVSRLYANSHKPSLYPLAHLHRWCGLLSTVVVLSLRDIFTSPAWTLVFPNTTVHPLTRNISDHVPCVDQIDTKIPKSPIFKFENYWVEMEGFFELVSRIWAIDPGYEDPAKCISFKLKCLRKSLLHWSKNLSKLTALLVNCNAVINFLDLIEEHRPLSILEWNFREIIKIQILMLLEFKRLYWKKKXSTNRWILLGEENTKFFQAIATERYRSNSISQVQDQHGQIATGHNHKADLFFHSFKNRMGISLLPPMDFDLRDLFPNPENLDCLVNQFYTXEVDSLIKVIPSDKAPGPDGFNGFFLKKCWQIISQDFYRLAAHFHACYTDLQLLNMSYITLVPKKSSPETVNDYRPISLMGISLKFITKLMADRLQSVMPKLVHENQYGFIKGRTIQDCLAWSLEYIHQCQXVKERNYIAKVFDSIEHSTLISIMKCMGFPEKWLQWIQMIFSTAHFSVLLNGVPRNSFKCRRGVGQXDPLSPLLFXVLGAELLQRIINKACSLGLLTKPINELDEKGFPVIQYADDTLILLKASEREVFCFKALLNSFAHSTGLKVNYHKSCLYPIDLSHENAGLFAGVLGCTIGTMPFTYLGLPMGTTRPRVVDFAPLVDRVERRLIASSQFLPQGGRLTLINSVLSSIPTYYMCSLQLPVSVVKAIDTARKNCLWRGNNPTSTRRSLASWDLVCRPKDEGGLGVINLRVQNIALLLKHLVKFYKGHDLPWVQLIWNSYYSSKVPHLVWNKGSFWWRDIVALTDVFRGISNCHIRTGSSALFXDDIWNDKIRSNAFPSLYMVALDKTLSIKQIGSTPLEDCFLLPLSTQAYG

SEQ ID NO: 197786 - protein, 183 aa, Oryza sativa
  Clone ID: PAT_MRT4530_93510C.1.pep
RATTGPPTSPAAPTPPTSAPPTSPAATPARDARDLAVVRPTTTPSIHIYLLRVNYSSPLDRAAPHAAPPPRAPERRRRRIIAGRRIGRRRRRHPYRFLAACGLDALLVCWFFVHLSCNSEQGLTLLLLFLFFNFHGFTTYPSVMVLMEQVINQFNFLSKKKKKKKKKKKKKKKKKKKKKKKKK

SEQ ID NO: 197787 - protein, 62 aa, Oryza sativa
  Clone ID: PAT_MRT4530_93511C.1.pep
RAPHVPGQIGEAEDAVGSVPRAARGGRLGLRGGLMDGDAGLAEEGCGCRATITAKESTMASD

SEQ ID NO: 197788 - protein, 87 aa, Oryza sativa
  Clone ID: PAT_MRT4530_93512C.1.pep
CSGRGARSRAAYGWRRRPPRRDSPSSCRRSSRHPDERHLLLLQEVKSVHCSGYCLSPLGEFGGLNSLPNHQSKSKMMCGCCLLQLRC

SEQ ID NO: 197789 - protein, 62 aa, Oryza sativa
  Clone ID: PAT_MRT4530_93513C.1.pep
TQFWGTNKTPFFFLMKFGRPNPSADPAKKKKLCGIVNPLYFIFAAYTCESNWRGHGEDTTSE

SEQ ID NO: 197790 - protein, 91 aa, Oryza sativa
  Clone ID: PAT_MRT4530_93514C.1.pep
HLDTRQKSVSHREGNIGRQSMEHRQHRGAAGRAAPGTEQHSTAQGAQQAEQHTGHGHIRQVTGGGAQGSTPPTRPRRSGAPPGQATLDTAS

SEQ ID NO: 197791 - protein, 129 aa, Oryza sativa
  Clone ID: PAT_MRT4530_93515C.1.pep
MDFKGVGEWRKIQIAELEEWREKASHNAKIYKERTKRWHDKRIKIKKFKPLDKVRIFNSRVKLFGHGKLHSKWEGPFDVIDTSSHGAITLRDDSVNIFKVNDQRLKIFLEPNETLDEEVDVIKLIDNEP

SEQ ID NO: 197792 - protein, 63 aa, Oryza sativa
  unsure (1)..(63): unsure at all Xaa locations
  Clone ID: PAT_MRT4530_93516C.1.pep
MSGILAWAADVVAXAGAANDDEADDARAVASAAITPEQRLLAADLDAKAASLGRSIHDLXLRV

SEQ ID NO: 197793 - protein, 50 aa, Oryza sativa
  Clone ID: PAT_MRT4530_93517C.1.pep
MSSAGSHDPASRLLPAKVEIGSLESHPGSPAESAKGGQRGLPVRSPMLRQ

SEQ ID NO: 197794 - protein, 106 aa, Oryza sativa
  Clone ID: PAT_MRT4530_93518C.1.pep
VPVSSFLPFRVTPYVFSYTHQMGAMPVTAGSTRTPCVPLRRRPPPRARRRRRRAKPHTCPPCASRPSSRGLRCARGGDGADRRRRAGYDRCVQKAGILTFAEASRQ

SEQ ID NO: 197795 - protein, 29 aa, Oryza sativa
  Clone ID: PAT_MRT4530_93519C.1.pep
GMFLLSKGIQICHFRHLSYASVAISSCLF

SEQ ID NO: 197796 - protein, 211 aa, Oryza sativa
  Clone ID: PAT_MRT4530_9351C.1.pep
MASASPSSNSVVGGAGAGAGDVCCMCGDRGLPEELFRCRLCRVRLQHRYCSDLYPRATAYRRCNWCLVREPAPAAAAGAAGHVHAMVDKPTTVRRKTASSSSPPPSSSMTDQETSPTTMSSEAERQRRLQEAAGWSASRRAPDTAGLGRPVKKQKAAADDDEGEEAPGARAAPAAKGNNGGNKEEMQAAGKKTGVKVRVRRYKLLAEVISC

SEQ ID NO: 197797 - protein, 98 aa, Oryza sativa
  Clone ID: PAT_MRT4530_93520C.1.pep
MEATAAAAATPARSALPFRSRVAGAARPGRAPALAAAPGKGLAPRRAGGTARRGPIDLLHIHSLRRKRFVQRCPRREPSRRESHQSRRGTDMNDRREA

SEQ ID NO: 197798 - protein, 114 aa, Oryza sativa
  Clone ID: PAT_MRT4530_93521C.1.pep
HEDRRASFNAEDTAKDDDLELEELENVITCLDGGVFTLLEMVVSSTICNMKVHRALINESVDLSLMFPAAYDKLHVGPRRLKPSAAFHDITPCNHTIPLEHVQLLVTFRTKDIF

SEQ ID NO: 197799 - protein, 342 aa, Oryza sativa
  Clone ID: PAT_MRT4530_93522C.1.pep
MDRYGEKQQQQQMFASYVDASLLAASGEVQGERPRARRRRRRGARCVGGGGGGGEVDGGDPKKRRLSDEQVEMLELSFREERKLETGRKVHLASELGLDPKQVAVWFQNRRARHKSKLLEEEFSKLKHAHDAAILHKCHLENEVLRLKERLVVAEEEVRRLRSAAGSHTASGEGGDIMGLGGSGACVAGSPSSSFSTGTCQPPSFGGGDHLGDDDLVYVPEYGGYADNSVVEWFSLEVIVVNGGTTSRAFGKRTMAAPPLIVVQVWDHDLDVCRQQEKVAREDGYRFCHPIAISVSSVSVSGPNKSGTLDSEADHVNCWLGAKVKPRVHGPGQYHARPQVCL

SEQ ID NO: 197800 - protein, 386 aa, Oryza sativa
  unsure (1)..(386): unsure at all Xaa locations
  Clone ID: PAT_MRT4530_93523C.1.pep
LLITFNQVDHPENSLGVGYLEMVVSSTICNMKVHRALINESVDLSLMFPAAYDKLHVGPRRLKPSAAFHDITPCNHTIPLEHVQLLVTFRXRISFRPELSSSTSLAXNFAYNIIFGRPALAKFMTNTHYKYVTLNMPGLADLIMVPPDAKGTIACIEQSHMAQASFGSSGDRANQSLAPPPSKPWLVTYDFVPIKDIALGDDPSKVAKIDDGXIVNKKARSSPSSGLIPTCMINHRLTVHXGHVTCSXKVRRHAPKSQYFIREEVPRLLDVGFIQEVTHPECLVNSVVIPKSNNKLTMCIDYKVLYKTSTKCDLLYVLDAYFGYHXHIDKEDEEKSSFITLLTTYLXVCTPFGLKNTXPSLQRMMCITLKSXLGHNIEACINDVVI

SEQ ID NO: 197801 - protein, 90 aa, Oryza sativa
  Clone ID: PAT_MRT4530_93524C.1.pep
MSMSMLVKRERTGTCDEEEESVLGMGEREGGVGVWQRRKRDTNGSGKDNEGKGGQHGRREGGVDVGTGWHVASLLDSRRCPAGLDQLEIC

SEQ ID NO: 197802 - protein, 130 aa, Oryza sativa
  Clone ID: PAT_MRT4530_93525C.1.pep
MMSKSTSKIFTHEDVDESQTSIFRSKEPKIADMSRAMDEEEEHTCRQDCRRKTKASMNVGPTPSPNGQAPMTFSLLHNKLMVMMMGTCATIIEEGFAPDYSVFYANKQASSDCPTDHIADHITGKEFGEG

SEQ ID NO: 197803 - protein, 66 aa, Oryza sativa
  Clone ID: PAT_MRT4530_93526C.1.pep
LEKPPPPFFFFALFFFFRFLTNSLFQPARHFSFLHTPFYPSLINMFSPLIRFPNFYCLSPPLLFFL

SEQ ID NO: 197804 - protein, 487 aa, Oryza sativa
  Clone ID: PAT_MRT4530_93527C.1.pep
MAAAGTSVARIAAAATTRVSEVEPPPATPSRASTPVPSPVPSPSSTFPDFAEEYIRHSFLVRLTQSSDARVAERFMQFLVNYTAPGDQLPFYPTEARALLQRKNSDCHELLVHFDHLREMDKILAFHMCNNQNRKINKILSSVILAEFLLNISLQDDVSEETREEKVIKHKPTIESKVILRFIGMPNYRITTLKEFLVKNQDALVEKVRLFSKDNVLVPAKLGSSLFQCCILHLIANHKMGVSWNGEFELTDWEISDDMVSLKKVHHGPLPDDSKVADLEKLVDLLAPFFLKKGSPLFFKQLKDDVTLTSRTLVSASDWEWFWDYLGSHVFYMPPVARLHLIKDLFVAIKTFKLTWVKPFSTVLLDFTEFGDWTIGPMSKTDGQESIYYKVFWHKVKPEDIDPKNPKYWPNYGDLLSFIRNLIEHLDEHKHEENITDIVDAELFASNSYQDFLPQFLQRVSSACLMQGKFKSSWDAFKGSGNVNLAA

SEQ ID NO: 197805 - protein, 54 aa, Oryza sativa
  Clone ID: PAT_MRT4530_93528C.1.pep
VCVNFTWTFQGLSHIFSSIALQGEKVQDKNIRLMFIWFQVEPASIVSLMLADHK

SEQ ID NO: 197806 - protein, 206 aa, Oryza sativa
  Clone ID: PAT_MRT4530_93529C.1.pep
MAPFIDLGRGGPTAAPGKPRLVMIIADPGRESTAAMEWALSHAVAEGDAILLLHINMPPNSAGGAGPSRTGSGGSAGSPLTALLGAGAAGDADFMETMSAACKARHPRARVRALRVEPATEGREAKAQTILAESQRRGVELLVIGHRRVSSFLGLRSPSGSSRAHDSTAEFLIEHSKCVCVSVQKKGQNAGYLLNTKTHKNFWLLA

SEQ ID NO: 197807 - protein, 624 aa, Oryza sativa
  Clone ID: PAT_MRT4530_9352C.1.pep
MEHKGLCILAVVIAFQLAGGEAVTDATARARRFACNVSAPCDTFVVYRTQSPGFLDLGNISDLFGVSRALIASANKLTTEDGVLLPGQPLLVPVKCGCTGARSFANVTYPIRPRDTFFGLAVTAFENLTDFVLVEELNPAAEATRLEPWQEVVVPLFCRCPTREELSAGSRLLVTYVWQPGDDVSVVSALMNASAANIAASNGVAGNSTFATGQPVLIPVSQPPRFPPLTYGAIAADPGAGKHRHGIIVATSIAGSFVACAVLCTAILAYRRYRKKAPVPKHVSPKLSWTKSLNRFDSNSSIARMINGGDKLLTSVSQFIDKPIIFREEEIMEATMNLDEQCKLGSSYYRANLEREVFAVKPAKGNVAGELRMMQMVNHANLTKLAGISIGADGDYAFLVYEFAEKGSLDKWLYQKPPCSQPSSSSVATLSWDQRLGIALDVANGLLYLHEHTQPSMVHGDVRARNILLTAGFRAKLSNFSLAKPAAMVDAAATSSDVFAFGLLLLELLSGRRAVEARVGVEIGMLRTEIRTVLDAGGDKRAAKLRKWMDPTLGGEYGVDAALSLAGMARACTEEDAARRPKMAEIAFSLSVLGQPLSVSDAFERLWQPSSEDSIGIGNEVAAR

SEQ ID NO: 197808 - protein, 94 aa, Oryza sativa
  Clone ID: PAT_MRT4530_93530C.1.pep
MAVREGALCCEGYGLWFGHFPPPFPKVLQLAAIVPLELFNWFQMPRFQPLPLVPTTLAVVIKPSVYLVDVVNNSSLKNPLFRSFRLVQMKVENI

SEQ ID NO: 197809 - protein, 152 aa, Oryza sativa
  Clone ID: PAT_MRT4530_93531C.1.pep
GRAPPPPTLILEAVAAAADAVQIDPGRSSPPSNLTQVDHLRRLPQHREAVADAHPREALTTARIDSGGRCHWRLPIWEAEGCCLPRRLLLLSASTPVSLLSSSFFLRDCSHRGPPRPELHPELLISLKMADDGRFSDLLWMPHGQHKVSKIS

SEQ ID NO: 197810 - protein, 131 aa, Oryza sativa
  Clone ID: PAT_MRT4530_93532C.1.pep
TAASASASTSTSTSASTRHHRWRERVALSSASTSPALQSPPSGPTSPSNRHRWRRRRATTSTLVAPTRDNLRSPPPRRRPPSTKHYRLRGNLHSLLFDYSSNFSSEISQIAVYKLCNKARSNFSCSPPHLI

SEQ ID NO: 197811 - protein, 318 aa, Oryza sativa
  Clone ID: PAT_MRT4530_93533C.1.pep
ARGIIKQERPVIIGGPFSPDIEQILRDRAFLTQSPVISACDPGIRSITKCIGWDCGKPYQSCDIVIEISNDIPLFIELQDLKLQLLGDHQRQNAVTACCTALCLRELGRKTTGTPTRAGKEKTEEPGRSQEVTKEESAGLGLGGGCRVLAGGAPAGAPAKATAEEERTVQPRGPLALVVGMANDKEHLGYYHPINPCPRPDVVLLTEASIAGGRSRSMPASSLKEIWMAAAQSQGISCYSDIGTITGVEAPIIASRPTTSRSLSGDKPMLIGCCTPFSSDLIRVASRLLQTQEDGDTGLICVTGSLHMVSSVLGQLRQ

SEQ ID NO: 197812 - protein, 91 aa, Oryza sativa
  Clone ID: PAT_MRT4530_93534C.1.pep
MERRRVPLPPPPPPLSLPWEAVITRPPPPPFPPDLAEGRAPPPPFPPDLAEMRVLPQLLDGLMEHRGGRCHHLRSRCRAGRRRSSWTPDGA

SEQ ID NO: 197813 - protein, 387 aa, Oryza sativa
  Clone ID: PAT_MRT4530_93535C.1.pep
MEHGEISSKAPLVAPVAAGVNRAVAVVDTFLRFIAIIGTIGSAIAMGTTNETLPFFTQFIQFEAKYSDLPSFTKFDAASSIFCMHGRTDRFFVAANAVVCTYLVLSIPLSIVHILRPRARYSRLFLVFFDTAMLALLTAGASAAAAIVYLAHKGNVRANWFSICQQFDSFCERISGSLIGSFAAMVLLVVLITLSAKRKKLSARYQAAHKDPLLDFNDWRKKGGVPEVKRFAELNKVRDLISISALNISFCSYGFGVTDMNMVLLGQEAFDLVASNKIAKGDVLTVAKIAGITGAKQTSNLIPLCHNLNLSHVRVDLTLNEEDSSVMIEGEASTSGKTGVEMEAMTAVAIAGLTVYDMCKAASKNICITDICLQHKSGGKSGSWSRS

SEQ ID NO: 197814 - protein, 93 aa, Oryza sativa
  Clone ID: PAT_MRT4530_93536C.1.pep
RQRERGVQHTGVSTERDRQKARARKHTSNQYGCPARSQPPADTIRDDRNTHGPNRNATAQEESSEASQQKTETYNKDRAPADATRTNPRPTIR

SEQ ID NO: 197815 - protein, 170 aa, Oryza sativa
  Clone ID: PAT_MRT4530_93537C.1.pep
MQHDAISNIAYHPSMDFTSFFLPQTDAYSHDLSALLDMAVVDPYISCNGSSITMIPVTEDEANAQPMNHGNDERKKRRLVSNRESARRSRVRKQRRLDELSSQVSELRDTNQRLLVELNHMISKHARIVRENSQLREEASDLQRKLSEMKMEDAEVAAAAAAAPRTLEVA

SEQ ID NO: 197816 - protein, 67 aa, Oryza sativa
  unsure (1)..(67): unsure at all Xaa locations
  Clone ID: PAT_MRT4530_93538C.1.pep
RRGFSWAKGTHHSRAGPYHGIIRRQGXTHGSWTMLSRVSVSLSNTYILGYHCDMLCMFLDKRGEGDF

SEQ ID NO: 197817 - protein, 113 aa, Oryza sativa
  Clone ID: PAT_MRT4530_93539C.1.pep
KGSDSSCCPKHNNYEFIDCCRLIDSSTHILLFFNVMLNCAVSSEQMPQHFFSVCDIAVIFCIFLLLTMLFSFIFVVLKWRGKNNSLVFFLILTERSICFCPFEASPWPRMWRY

SEQ ID NO: 197818 - protein, 89 aa, Oryza sativa
  unsure (1)..(89): unsure at all Xaa locations
  Clone ID: PAT_MRT4530_9353C.1.pep
AHKGFSGVSADFMTSDLQPMDALTFRIVLNAXYINASRVGYTGLYWYFITSSSTDCLYIIIYIGYIGDYLNPIAIGWNYSIGLSADRLF

SEQ ID NO: 197819 - protein, 182 aa, Oryza sativa
  unsure (1)..(182): unsure at all Xaa locations
  Clone ID: PAT_MRT4530_93540C.1.pep
MGGGGALLPPRPFPPQRWWQTGRPSRDERRWRRFGYAASSPEVFNGPRRREGVEAGGQLAKVAHGTGIEVCPAHRGGPQGVGNEEGSRARCGGEXPXPGRRSVWWVVACRPCMPTPIDTAFPNLQELGIYSIGMEKEGREIELLVATSTSKEGCFALGYFLTLSRSTPASSESIVPWGEKGE

SEQ ID NO: 197820 - protein, 318 aa, Oryza sativa
  Clone ID: PAT_MRT4530_93541C.1.pep
MLSHAHAAAGSPAATAPSSPTRRRCAGKDDVDDADDDGGGSEQFFFFSAPASPVHYILRSPPSSTTTTTAAAAHYAPGVDGDHGCGGGGGGDFEFAARQHGAGNGAAAMSSAEELFVAGRIRVGCLSPIRQEEAGFGEQEEGCVDEGESGGQRPPPRRARSASPPRSPHLAKIAEPSDSFASSSSSSTSTSSSSSSSSSAKSTRRRISLRDLLLGSTANSDSATAAAAAERSSGFWPPSIWPSSRSKKTATLALPCPCPCPPSLQPARRSTSSERSSAPPPRRRATSLPYRQGLVLGCLGFGARSYGLAKSMHPLSSG

SEQ ID NO: 197821 - protein, 166 aa, Oryza sativa
  Clone ID: PAT_MRT4530_93542C.1.pep
YVRTLYVPPSFATAGAARCCLLLRSPPLPVHAAVTRSHLVAVFAPTTTGASRRGLILAGDCEEPVRRRSASSSAGAVARPRHSVAIPSPHRTGGREEGERGEADNGAAHELAQRDSLCLGVLVPAAWRGSRLGCASSGWEQATRIGACVLPGGLDRDIGRLAGWAA

SEQ ID NO: 197822 - protein, 100 aa, Oryza sativa
  Clone ID: PAT_MRT4530_93543C.1.pep
SQPGKQSETDMPLLYTLRQRGIRSQILLERFLSYLLIRLLHCEFSIFIELCSCIVFHVYCCRCEYVSVIEFSSHLVSMIIRNIYRVPFGSGKHGVRNFLC

SEQ ID NO: 197823 - protein, 346 aa, Oryza sativa
  Clone ID: PAT_MRT4530_93544C.1.pep
MAAPAPELMDDVVEEILLRLPLDDPSCAARASAVCKHWSHLLADAGFLRRYRAFHRRRAPPRLGFIYDAGSPLARFAPTTAFRPADLDHDGWKPMDCRHGRALFRTSASAVLCAVSGCDHGGCHGGPFAVAFVANYVMEGEEEEITSPTSAWLYSSETGTWSAPSTVRHHNAEPFPKPSVLAGDGAVYFLTWHGRNILRYDLRKLDLTVIASPEIDDDDFENHLLMTTEDGGMGLARLVSGHSLQLWSWKPVSAAAAWVQLRVIDLDLVIPGDAMRPRLLGFAEGTDMVFVDTTYDGAQVVQQIELSTLKVTKVLDECYASCVLPYMSFFLPGRQKGKLPPSAITL

SEQ ID NO: 197824 - protein, 264 aa, Oryza sativa
  Clone ID: PAT_MRT4530_93545C.1.pep
MQPDIPAFGNWDTTGNTPYTQKFENARKNKKAGISSHPNDPRRHPEPPSKSPLHPAYTPDAQGQSPMNPQHGRRQEADPHRRHSLSQQREVGGGIGSAPRSPYRMVHGSASPAQPNNPSKPKHRSSGMQTPERRASSEGHGQHTPRRSRDKQGGRGYDAPEDDVAVPPFGEWDEGNAASGEKFTGIFNRVRDDKLSPNTSTRQPDTNRSQENKVKQLTFSVMSYTDTQVILWTYIYFLFFSRHALAVYFETTGDKITDIAGEVP

SEQ ID NO: 197825 - protein, 753 aa, Oryza sativa
  Clone ID: PAT_MRT4530_93546C.1.pep
MASRAIIRRRKYALEHTNIPVLLRHSSISTFGQEKFGCEIEQSTASQNSRESNHEKAQYILRKQGLLGLSILCHPTRGASLASYESKPQTFGFPLGARYFLQSVRPTSSTAGQPKVGILDERSENQNQNQGKKEASPEECDQAVEGLSTAKAKAKAKLVQEVQKSDQSIIHKFWAILLGIGPALRAVASMSRADWAAKLKHWKDEFVSTLQHYWLGTKLLWADVRISSRLLVKLAGGKSLTRRERQQLTRTTADLFRLVPFAVFIIVPFMEFLLPVFLKMFPNMLPSTFQDKMKEEEALKRKLKARMEYARFLQDTAKEMAKEVQTSRSGEMKQTAEDLDEFLNKVRKGGHVSNEEILSFAKLFNDELTLDNMNRARLVNMCKYMGIQPFGTDHYLTFMLRKKLQEIKNDDKMIQAEGVESLSEEELRQACRERGHLGLLSTEEMQNQLRDWLDLSLNHSVPSSLLILSRAFTMSGKMKPEEAVVATLSSLPDEVVDTVGTVLPSEDSVSDRKRKLEFLEMQEELIKEEEKRQEKEDKAKLEVPKATEEDVALKEMTEPTAREEKELKKAKVEHDRKEQLCDISQALAVLASASSVAKERQEFLNLVNKEIELYNTMLEKEGTKGEEEARRAYKAAREESDHAAEIAAGEKVSSALIERVDAMLQKLEKEIDDVDARIGNRWQLLDSDRDGKVTPDEVAAAANYLKDTIGKEGVQELISNLSKDKDGKILVEDIVKLASQTGESNEQEETPRQ

SEQ ID NO: 197826 - protein, 147 aa, Oryza sativa
  Clone ID: PAT_MRT4530_93547C.1.pep
LTAALGAAATRAGRRAPNLVLGPGCGSFERITGARELRQVSDFGGSDNDPGRPERMPRFSREQGLNASASLEVQGTQERAVVAEDRAKASHLLSGPDVFGLMRSPSADRELYSEVVRAAERGANQERERMDAVLSATVAANRAGANR

SEQ ID NO: 197827 - protein, 173 aa, Oryza sativa
  Clone ID: PAT_MRT4530_93548C.1.pep
MVDGVADDPWLLPVLADDDDPQVVEVDAVLDLHAYIPQVSHPAPDPLLIRRPGAHADGFLDGPELPPDEVDAGGEPLPLLVALIEKVEELHGNVHQTQGGLHLQLSLILICFSLFSFARSVDSVAKLSCVVSRDPGDEDMPLAIAVPFVCFGRRRRKKILFTPHLPLQPGDPL

SEQ ID NO: 197828 - protein, 58 aa, Oryza sativa
  Clone ID: PAT_MRT4530_93549C.1.pep
QLWVFLLCKLQNEFQSPHNSSWCKPISRFKFFPFYPPPILFLRYAEVSLLLKINILVP

SEQ ID NO: 197829 - protein, 104 aa, Oryza sativa
  Clone ID: PAT_MRT4530_9354C.1.pep
VLVLLLPQFFLLLRILPSICLIGDKGGGILLLFLQEKARFFVSPFAACSGRRKAMLFLLISVFFFRWSTPFCCYFTFASLRSAERKKAKVVEKKRKFCLLPLQI

SEQ ID NO: 197830 - protein, 102 aa, Oryza sativa
  Clone ID: PAT_MRT4530_93550C.1.pep
RARCRCSRRLPSRPISPPPASTSPPPLHALPPRRRPRTPTPLRPTPPPNPTSAPLLPFPDQRCPHPSPIDASAARALPQPAPPPPGATAPSLAGRGDGRRRW

SEQ ID NO: 197831 - protein, 30 aa, Oryza sativa
  Clone ID: PAT_MRT4530_93551C.1.pep
LRFSVLMNSAVSLKKQFAPYQIPLARNLLG

SEQ ID NO: 197832 - protein, 86 aa, Oryza sativa
  Clone ID: PAT_MRT4530_93552C.1.pep
NKAQGRGGVPPLLGPGANKKGEAPGGGPPGVRPPQGGGPPGPGSGGPPPGPRWQGGISKLPPPEGQSAPPRLVGANPFFAPKGPQK

SEQ ID NO: 197833 - protein, 224 aa, Oryza sativa
  Clone ID: PAT_MRT4530_93553C.1.pep
MSAPGAGAAAAAGGDGGSGAPPGAGAGGGAPGAGAGAANNNANGGSSASQSSGGPFSGYILLLFLFSLLALYCYVPVPDIHDASSMLLRYCYVLIPDIHNVVHDVFSRTTATWPRALCRTTYLFIVSLESRPDELLMREPKEIGHADSKFPHRTAFRHPCNTVSEAPGVAAPSGRSQRSQAIGCVERCHQLIIVTGSCRCATHYQDHHGKDKSRVCSHCDRPVT

SEQ ID NO: 197834 - protein, 45 aa, Oryza sativa
  Clone ID: PAT_MRT4530_93554C.1.pep
GRVGFPSQPAAVSSTPREGGKATRRFLGRRVYPSLPSRVSSTDLI

SEQ ID NO: 197835 - protein, 347 aa, Oryza sativa
  Clone ID: PAT_MRT4530_93555C.1.pep
MDLGSCYLGGNADAVEFCPHRPFRHVLAAATYTLQEQGGERQDRAGSVSLFAVDAGEEDAPRRLRLLHTVETAGVFDMKWSPVAPLLAQADAHGRLALWRLEQEDGSDKGAVLRDVCSGDISSSMCLFVDWNQTAKALSVGLSDGSLSVVSMREDRLEVSEQWTAHQYEVWTCYFDRANPHLLYSGSDDCSFSCWDLRQNPSNAVFQNKKSHNMGVCCIAQNPLEGNMLLTGSYDEFLRVWDIRSMVKPVNVKSLNLGGGVWRIKYHPLIADVVLAACMHNGFAIVKVGTGDAAVVETYCKHESLAYGADWQINEGAEQNKNFSVVATCSFYDRLLRVWQPENLGNL

SEQ ID NO: 197836 - protein, 142 aa, Oryza sativa
  Clone ID: PAT_MRT4530_93556C.1.pep
MASPKAEEAVAAEVEAEATGSVAVAAAAAAAATSDDGGEQGHSGKKVRLPDPYVAAILSLKREPPPSAQYLEVLSPEKELEYTGHCKELEDELEAFEKDGYFVVDESYLEETAACLAMANEQLAKLDFSGIVFGDWDYDDLD

SEQ ID NO: 197837 - protein, 45 aa, Oryza sativa
  Clone ID: PAT_MRT4530_93557C.1.pep
MARGLGDTVGVAPLCVTLFPSEKSVLAVEKLRMWLRRWHGCRAYT

SEQ ID NO: 197838 - protein, 79 aa, Oryza sativa
  Clone ID: PAT_MRT4530_93558C.1.pep
GKGSSSITKRETNYSQKKKGFHVLINATPISKRSLSWTMLSFGKLLPQQTWEESPRINKMQKNLVSPKNPIEGRLCHKT

SEQ ID NO: 197839 - protein, 100 aa, Oryza sativa
  unsure (1)..(100): unsure at all Xaa locations
  Clone ID: PAT_MRT4530_93559C.1.pep
GTFYSRTVFGIMPASHAIVFVRMNSCARVLRRDASLPLYHHPMQSTLDILFXYNKPSLIQVHHEWHTNHPKSWESEWSFGRGLVTSVPILFVVDAPSSSI

SEQ ID NO: 197840 - protein, 81 aa, Oryza sativa
  unsure (1)..(81): unsure at all Xaa locations
  Clone ID: PAT_MRT4530_9355C.1.pep
LLLQNYTSILCKNGSVHLEMGEVQFCRCACNTGLGSARATDGECSNPQVGQNSNACCSSNFLDXCQNHKFGYMEQLQLTYG

SEQ ID NO: 197841 - protein, 367 aa, Oryza sativa
  unsure (1)..(367): unsure at all Xaa locations
  Clone ID: PAT_MRT4530_93560C.1.pep
MSRILPIPHRLSAASGGRWMWLIISALAAGSRMPLTTIAVQAGEAGHFCGSTGNHRGKVLQLAYTHTVLALTSSICLSCLTYSFTSPGVRLVDSKLILVPYLKDGLIPPSTPIDVAQHKHQLLNYVTLRVSQQLVLYFGTYRPGIPSPGCYLVLNTWANSVAIIPPLHTTCVTSMSHCGIGTGVTILRHNDYYDYVLVELFSHQDTRTHLASNKVTLFLWWSPSSGPRTGILVCDHIDKLSTGTDDDDDHLLLFFISLPEECVMKPSLLSWKRLAEEHRTMICRDPETILFISMDNYIQGLPIGDTVLTTWTLKFPLTNHWTWEKHSAPSLFVGDLLNDLPVLKLXESKDDRKALHIANCPPHYYRV

SEQ ID NO: 197842 - protein, 591 aa, Oryza sativa
  Clone ID: PAT_MRT4530_93561C.1.pep
MDQYEVLEQIGKGAFGSALLVRHKLEKKKYVLKKIRLARQTDRTRRSAHQEMQLIATVRNPFIVEYKDSWVEKGCYVCIVIGYCEGGDMAEAIKRANGTYFSEEKLCKWLVQLLMALDYLHANHILHRDVKCSNIFIARDQSIRLGDFGLAKILTSDDLASSVVGTPSYMCPELLADIPYGTKSDIWSLGCCIYEMTALRPAFKAFDMQALINKITKSIVSPLPTKYSGAFRGLIKSMLRKSPEHRPSAAQLLKHPQLQPYVLQVQLKSSPTRNILPIHQSLTDKVKKMTFPSDVVDSARRRMARRNSLGNERTVTFSKPSPERNSVSSTRSIKEYTTTQSVKGLSVDSSEAGDEVTSKAIITKTSSILRTPKSLPAKTYTARNQLEPPKTSYNRTYRSELPSKTTPNKIARPARRASLPLSTYETPTKRSISILEQLDSPDVSVNAPRIDRIAEFPLASSEDPLLPIHNKLSPGHGSCSTPPFINRSITKDKCTIQVLRTDGDNGSDSSGRNATAASSRGSNDSRQQRFDTSSFQQRAEALEGLLEFSAQLLQQERYEELGILLKPFGPEKASPRETAIWLTKSFKETAS

SEQ ID NO: 197843 - protein, 207 aa, Oryza sativa
  Clone ID: PAT_MRT4530_93562C.1.pep
MCNPVPFGQDVAFSISPNTTPPPLCHRTAVTSTAATRRKPDIDRFHRTHIGSAVLYPIGRRRQPETGRPHDSPTDGPAAQRRRQRRTKRARGARDHSVLIMPRAVGIIACEGSPRIRYSDLPVSLSDKINHFAQKCTGHNISRYEIDAEQKPFGGVCVRWHQYRVDREAIWLITRDSICDAQTNNARSPPRPPACVILLISTIDMYY

SEQ ID NO: 197844 - protein, 34 aa, Oryza sativa
  Clone ID: PAT_MRT4530_93563C.1.pep
EHPVQRQKSSVYTSHITQARTVKDEETWVMEYGG

SEQ ID NO: 197845 - protein, 54 aa, Oryza sativa
  Clone ID: PAT_MRT4530_93564C.1.pep
RSTSGTGPWQEILTKIHGYHKGMSKIQGRSKDIQVQLSGVHRAIFSSTIIYFIS

SEQ ID NO: 197846 - protein, 257 aa, Oryza sativa
  unsure (1)..(257): unsure at all Xaa locations
  Clone ID: PAT_MRT4530_93565C.1.pep
YLSWYCTSSLKWYHWWKGISILSCFTRGKIGESSEIAARGAAARCDGNRREARRWRQRRARWPTPAAAAVAATAGCTTTAAGCVTRDGDGNLDGRRRRRVRCVTAALDARRRRRARFATAEVDAWRRRSMRDGGGRCAAVEVDARRQRSMRDGGGRCPTVGSMRRRRSMPDGGSELDGRRRRRRARWATTAAAXASSMGDDGGGRCPTARAATSSMGDDGAGLDAGRPSMGDDDMEEWKRDLIFVSPIIPLLNQRLD

SEQ ID NO: 197847 - protein, 534 aa, Oryza sativa
  Clone ID: PAT_MRT4530_93566C.1.pep
MGGGGGEQQQLEVLHALDVAKTQWYHFTAIVVAGMGFFTDAYDLFCISLVTKLLGRIYYRVDGSPSPGTLPPHVSASVNGVAFVGTLSGQLFFGWLGDKLGRKRVYGITLMLMVLCSLASALSFGHTPTSVMATLCFFRFWLGFGIGGDYPLSATIMSEYANKKTRGAFIAAVFAMQGFGIITGGLVAILVSASFRAAFPAPPYGEDPVASTPPQADFVWRIILMLGALPAALTYYWRTKMPETARYTALVANNAKQAAADMSKVLQVVEMRNIGNNGGSRRPFGLFSGEFVRRHGLHLVGTSATWLLLDIAFYSQNLFQKDIFSAVGWIPKAATMSALEELFRIARAQTLIALCGTVPGYWFTVALIDVVGRFKIQAVGFFMMTLFMLTLALPYHHWTAPGKNHVGFLLLYGLTFFFANFGPNSTTFIVPAEIFPARLRATCHGISAASGKLGAIVGSFGFLYLAQSPDRSKTEHGYPPGIGVRNSLFLLAACNLLGLLFTFLVPESKGKSLEEMSGDAEAQEEAPPPLQTVL

SEQ ID NO: 197848 - protein, 99 aa, Oryza sativa
  unsure (1)..(99): unsure at all Xaa locations
  Clone ID: PAT_MRT4530_93567C.1.pep
ERGYGQSTPTIIYGTTEATTYKPTYANTRRRILTSGIGTASPLRCLRILLGETKALSLILPGTDSRRKTTLLSTTSQTFRPPCRQXLDRLPQILYWCDY

SEQ ID NO: 197849 - protein, 87 aa, Oryza sativa
  Clone ID: PAT_MRT4530_93568C.1.pep
VCFFFYFFFFYYFLFFFLFFLFSGKLQEGKKKCENKAIMDLQVTGSEGHKFPHSTNRKLEKKTRYIWVKNFPRAQNFYFEKKKRETL

SEQ ID NO: 197850 - protein, 81 aa, Oryza sativa
  Clone ID: PAT_MRT4530_93569C.1.pep
SHSMATKYIIGSVAASFAFAYVCEIYIAEGKLLGGTTTRTMATDEWGKETDKKFQAWPRTAGPPVVMNPVRRQNFIVKSSE

SEQ ID NO: 197851 - protein, 81 aa, Oryza sativa
  Clone ID: PAT_MRT4530_9356C.1.pep
MPAKEETIVYEADPDALTVDLVDDPLVKEFRDKLVDEVLTIDAGDMEALFEEHQENPELERTLMLISQSDQDADAADGDTP

SEQ ID NO: 197852 - protein, 153 aa, Oryza sativa
  unsure (1)..(153): unsure at all Xaa locations
  Clone ID: PAT_MRT4530_93570C.1.pep
PGDLGGGFQCXGSGGRRPPPLGQVSXPPGEGQPSFGGGGGGGFNVGRSGTPHGGRGNCPVVGGPKNLAETCPTQLQLGPPAGRVVGGKNGFGAFRPPELFCPNMDNRPGPFRLSKDSGFFQGGGPQAFPYGRDSPLFPPEWAPPPGLKVFFCP

SEQ ID NO: 197853 - protein, 79 aa, Oryza sativa
  Clone ID: PAT_MRT4530_93571C.1.pep
VRLSAIHFQGRFIRQVSFYALLSGFQLPWPPSCCLNEPTPFVVSGMSVHSGTATQRLVDPTSPVLLTKNGPLRTRYHSD

SEQ ID NO: 197854 - protein, 82 aa, Oryza sativa
  Clone ID: PAT_MRT4530_93572C.1.pep
IAATESTKHGLKCMESFAKTEKKQKEYKKLLQSGKFSMAKLLRQPSEIQWRRSGDVVGAGRVRAKGCPRLAIFYASPRRGGG

SEQ ID NO: 197855 - protein, 120 aa, Oryza sativa
  unsure (1)..(120): unsure at all Xaa locations
  Clone ID: PAT_MRT4530_93573C.1.pep
LLIHEGVQAEGELLKLGRVPVLDSTDIVGYKIGLTIIRDGLKGDPSKYLEMTVRLVGVSAETTTGVMRLLQMLDTGALLLDDINNXDSVTNSRLDNLYGCRHSLPDGLMRATYLMIADKD

SEQ ID NO: 197856 - protein, 452 aa, Oryza sativa
  Clone ID: PAT_MRT4530_93574C.1.pep
MARAARFHRLGMGPRSTRGRVLMFLLLVLMMAVGANRDSTAAGFARTVSKAEVLASPPPISPAVNAVIIIRNRVVLSIANIFSVAVSLWPFFVRWRYGSWFITRQIFSAKVVACNLVASVTWTIYMMVQMYAGVLDPHDPLCFGGMLRNGMWTITKSNSTDFSLTTPIVINTMLAGVLSAFWALYAWIFDPKSPNYFMIANSLAAGMSSIQFVWLLVLRNSHREVNGQIVEVESLRCVLLSVAKSLERLGAAAPTEEFLQQTKYLLRLQEGLSIGLQSLDLMESAFLRLEQELVKNVARTANHVLEMQDKQDAAANFVARSDDNNANDVLRACRILREGCTTNKNAFDSMQEAIQHKIANAEGGENNLKDRINAAAAAIRGLAISMGYNMQTINGRGIPPTVKIAFNFCCEQILSVKTCADAPFVWLGFGGFSLRRRLNLRFDNVNWPDVPL

SEQ ID NO: 197857 - protein, 65 aa, Oryza sativa
  unsure (1)..(65): unsure at all Xaa locations
  Clone ID: PAT_MRT4530_93575C.1.pep
WAXTKSKPAAPAPPPPXVAGRAPXPNRASPWAWGRXRGAAXXRLGGRGRRASWCRCRXGLDSGIL

SEQ ID NO: 197858 - protein, 77 aa, Oryza sativa
  Clone ID: PAT_MRT4530_93576C.1.pep
WEQAQTRTKQCKIRSATQHQVLLGQQSAPTRTESRPHRNSGHGRHAPLFSTCAPVHTSSFVHAVHAPATIPFASKEA

SEQ ID NO: 197859 - protein, 421 aa, Oryza sativa
  unsure (1)..(421): unsure at all Xaa locations
  Clone ID: PAT_MRT4530_93577C.1.pep
LKLILSVFEKLSSLKINFHKSELFCFGQAKKYNDQYSNIFGCKLGSFPVKYLGIPMHFRKLGNKDWKIIEQRIKKKLSSWKGKHXVCWGGRLVLINFVLSSLAMFMISFFEIPKGVLQKKFXYYRSRFFWQGDDHKKKYXLTRWDIIYQPKDQEGLGVHNLEIQNKCLLSKWLFNLINEHGVWHDLLKRKYLSNHSITQVDRKPGDSHFWSGLMKVKNTFLNMGSWIVNNGEQTRFWEDKWIGNVAFKDKYPSLYAIVRRKNSSIANVMRFVPLNVSFRRALVGQNLANWHNLCASIVHIQLSQLNDCFIWNYHQNGQFTVRTMYLALINNGYIERNKIISKLRMPLKIKIFMWYLLKGVVLTKDNLARRNWNGSLRCCFCMKNETIQHLFVECHEDSELLKTACRILETTVMQLFVNFGW

SEQ ID NO: 197860 - protein, 59 aa, Oryza sativa
  Clone ID: PAT_MRT4530_93578C.1.pep
MYLLCSVSFPSPKQVSLFSSLLRRPAAAEGASERGGGGGQGCGVRSGRWRAWQWAAPPP

SEQ ID NO: 197861 - protein, 132 aa, Oryza sativa
  Clone ID: PAT_MRT4530_93579C.1.pep
MTRVIHDSGEGMQKEALAMVSSDVNFPKGHFPDYKIGPNNQIIDPEEIHEAVPLKEIVAKETAQLLEQRRRLSVRDLKEKFEKGLSGASKLSEEAKRREAASLDRQVLLKKLRDVLDTLKKRVAGRNRDDAD

SEQ ID NO: 197862 - protein, 151 aa, Oryza sativa
  Clone ID: PAT_MRT4530_9357C.1.pep
LGVGVRTTHKFCLFFFRSALRAFASPNEKKILSTQDTVFSLSLSLSLCFEFVDSVQITRLVVIDRWLVSSIQSCRSPGSQFLDFPILFSFPKFFSSFLLFFVLISSSASPLPVQGQKLAVEFHTVEAQLEFFSSNFIFSSVLFPLSLFVLA

SEQ ID NO: 197863 - protein, 113 aa, Oryza sativa
  unsure (1)..(113): unsure at all Xaa locations
  Clone ID: PAT_MRT4530_93580C.1.pep
FLFVKKKGPLGVTLSVQKRGPFEGGLWYGILWGGSDGDQKGGNFFFWGGKFDLGGGHPTGGDPSQGGQAANGQGSHPGGEWEKKRARSQEKXKKKMEIKNNIKKKEKKKIXNI

SEQ ID NO: 197864 - protein, 65 aa, Oryza sativa
  Clone ID: PAT_MRT4530_93581C.1.pep
MTLTDDGRRRPHRNKWKWNELHAVVRTVDRKRRRRRRACRGRGHHSPEDDLSDVANDHGSRLTAG

SEQ ID NO: 197865 - protein, 52 aa, Oryza sativa
  Clone ID: PAT_MRT4530_93582C.1.pep
MDTLLVEPHSAFDLGVLRLLIDMDPDGCGVFLRQAPSCFSGKGRGEAQGYDG

SEQ ID NO: 197866 - protein, 74 aa, Oryza sativa
  Clone ID: PAT_MRT4530_93583C.1.pep
MNLAKFSSPIFFENQTIWSKKSAQIPSPEAKFIKKSALVKNHLFGRFSFFKTLRVALLKNLFWYKLNVLILPPS

SEQ ID NO: 197867 - protein, 442 aa, Oryza sativa
  unsure (1)..(442): unsure at all Xaa locations
  Clone ID: PAT_MRT4530_93584C.1.pep
PFLFPLPPPTAGHSLPTGNRAPSPPPPXPRAPPPPPPLRAPPPPPPXPRPSSPPLPSRAPPPPLPLXRPSPPPPPSRAHPPPASSPXPSQPAPPPRPSLTGVASPRPSPPAAPXSSPSPPPPPIEYAAAAGCACFLSHIARCFHLPPPRAPRRGPSPPSPVAVRALPPAAALAPPPIPSASQPRACHPRXPRSVPHPSRTLPPTAPXSKTPPHPNPPPPLTHTHTAAPQVAPPPAHSPAASPPPPDPYPESRALPCPYPLLFSSSYPPIFSPAPTPPPPPPTEKTHTKLVPXSPSPSHQTPPPPFTNGDGDSERRPGGRRAAASPPAVAGPRPPKPPPPHMTPPXTALPPPPRLPPPSISAPPPSPLSLPFPPPPLSXPPIPFSPPPSPPVTPPPVPPFLPPPPPQQPKSPSSAGETKPTAPSPHRSKRPVGFGRCPPLPPT

SEQ ID NO: 197868 - protein, 405 aa, Oryza sativa
  Clone ID: PAT_MRT4530_93585C.1.pep
MAGREVVVVEAAPSFGTGTSSRNSEVIHAGIYYPPGSLKASLCVRGREMLYKYCAEREIPHKQLGKLIVATGVAETAKLDMLLKNAKENGVDDLQMMEGSEAMEMEPELRCLKALLSPRTGIVDSHSFMLSLLADAENLGTAISYNTTVTNGYIGDEGLELHISESKALENHSVGSPVSPQLILFPKLLINSAGLSAAPLAKRFHGLNQVFVPPAYYARGCYFTLSQTKSPFSHLIYPLPEDGGIGVHVTLDLNGVVRFGPDVEWIDGGKDVTSCFLSRFDYSVNPTRCSKFYPVIRKYFPNLKDDSLEPSYSGIRPKLSGPGQPPSDFVIQGEDIHGVPGLVNLFGIESPGLTSSLAIAEYIVSRYFRLHAARKPAGSCESHYLGIYDCDLCLPFASTKPLSAT

SEQ ID NO: 197869 - protein, 98 aa, Oryza sativa
  unsure (1)..(98): unsure at all Xaa locations
  Clone ID: PAT_MRT4530_93586C.1.pep
PAAMDFIDKVITVDPIXIITGEQALTHADLHRVRDIIDEPVGLEPFSLGPDQEAIVQAQSNQVLFNSGAGLGSYIPALDFSAGMNDPGTNELCLYVFL

SEQ ID NO: 197870 - protein, 93 aa, Oryza sativa
  Clone ID: PAT_MRT4530_93587C.1.pep
MEGSMASVVALWNEWEIRVLVLSSLALQVFLLFPAVIRKRNVSAVLGLLLWLAHLLADSIAIYALGEMKTGEMGIEEEEEEMIDCQGYELDSA

SEQ ID NO: 197871 - protein, 885 aa, Oryza sativa
  Clone ID: PAT_MRT4530_93588C.1.pep
MEEADDAPPPWRPSKPAAAIDGSSGPLAAAAARLSGRSRALPSSRDFHFYNNFPSFRSPVGAAAARAGASLAALGAAPFYPKRHPPFPGDDLDDAQDWVVGVIDDLAEQFGASMDEFKAAREEEEATGRRATEEDGFQVVYGKKKKKVMGGGGGEEGVGRGGEAFGGGSGSVKMATRDKSAAPGAKAKVPFHIPTIPRPQDVHRILVDNSSKPFEHSWLEKSDDGSRVVHPLEKIPMEQLVDRDFPESEPIKPPALDDTPFTHVEDLKSLEVLATKLKSATEFAVDLEHNHYRSFQGLTCLMQISTRTEDFIVDTLKLRKYLGDYLREIFKDPTKKKVMHGADRDIIWLQRDFGIYVCNLFDTGQASRILQMDRNSLEHLLHHFCGVTANKEYAREDTHYLLYIYDLMRLRLVKESSDENDLLLEVYKRSKEICLQLYEKELLTHSSYLYIHGLKENEFDARQLSVLANIYKWRDSVARGEDESTGYILPNKTLLEIAKQMPATTGRLKRIVKSKNSYLERHLGHVISTIRSAIANCDAFESIAEQLKKGRLEELAVANMKSNDGDTEMVPADDGNNDDDNVGPSDEHGAVASVENVGAASHCTGNVTSGASSVNVQLENPAETKSLGILSGVSGQDMEVLSNGDRKQVAKATVQVSKRPTAFGALLGKPTSGRRQNLFSGFSSGQNMVDKIKSSVALPFHNFCGGAKSPATSIPLEESVRPEPESIQYSDPACQTEDVIQLGTETDGPQPPENHNKDGQGHLVPDDMEMSRSPPEHSSAGAKQRFQSLIESRNQQQNHKPHQEPEFNHQLKPFDYAEARKNITFGERKAERIKDNAVARAINKDSGDKGRTSNQFGAGENEGNRQNPRGRQAFPPSGNRSATYH

SEQ ID NO: 197872 - protein, 76 aa, Oryza sativa
  unsure (1)..(76): unsure at all Xaa locations
  Clone ID: PAT_MRT4530_93589C.1.pep
LXYPAPDCPARSNSXASFVIFRKRRKCLFTLPPSWQHRRLARPFQLVSEPNIRIGLKSWRDQHVTRGDRPKETKWR

SEQ ID NO: 197873 - protein, 81 aa, Oryza sativa
  unsure (1)..(81): unsure at all Xaa locations
  Clone ID: PAT_MRT4530_9358C.1.pep
SKVHHRSLNLYCCVIAVPKLANXPFRSSNLFNCVIPVPKLTDHSFRSSNLFSCVTPVSKLGFEYHLGQIERSKDFIFKNNS

SEQ ID NO: 197874 - protein, 226 aa, Oryza sativa
  Clone ID: PAT_MRT4530_93590C.1.pep
MASSSLLLACVVVAAMVSAVSCGPPKVPPGPNITTSYGDKWLEAKATWYGAPKGAGPKDIGGACGYKDPAFIHVTDMNDEPIAAYHFDLSGLAFGAMAKDGKDEELRKAGIIDTQFRRVKCKYPADTKITFHIEKASNPNYLALLVKYVAGDGDVVEVEIKEKGSEEWKALKESWGAIWRIDTPKPLKGPFSVRVTTEGGEKIIAEDAIPDGWKADSVYKSNVQAK

SEQ ID NO: 197875 - protein, 228 aa, Oryza sativa
  Clone ID: PAT_MRT4530_93591C.1.pep
MASSSLLLASVVVAAMVSAVSCGPPKVPPGPNITASYGDKWLEARATWYGAAKGAGRKDNSGACGYKDVDKAPFLGMNSCGNDPIFKDGKGCGSCFEIKCSKPKACSDKPVLIHVTDMNDEPIAAYHFDLFGLAFGAMAKDGKDEELLKYVAGDGDVVEVEIKEKGSEEWKALKESWGAIWRIDTPKPLKGPFSVRVTTEGGEKIIAEDAIPDGWKADSVYKSNVQAK

SEQ ID NO: 197876 - protein, 131 aa, Oryza sativa
  Clone ID: PAT_MRT4530_93592C.1.pep
ASGPASPSPPWRCCPASTPAPSPCTRCCCSSPWRLPKSQGVRGHSRRCTGRGTAAASRTAPPPRRTTAGAGAAARTPLREASRPLRPSADNNTPPALQARNLLAQAYQLPSLIALCCVHCSALQHEIQRGA

SEQ ID NO: 197877 - protein, 267 aa, Oryza sativa
  Clone ID: PAT_MRT4530_93593C.1.pep
MASSSLLLACVVVAAMVSAVSCGPPKVPPGPNITTSYGDKWLEAKATWYGAPKGAGPKDNGGACGYKDVDKAPFLGMNSCGNDPIFKDGKGCGSCFEIKCSKPEACSDKPALIHVTDMNDEPIAAYHFDLSGLAFGAMAKDGKDEELRKAGIIDTQFRRVKCKYPADTKITFHIEKASNPNYLALLVKYVAGDGDVVEVEIKEKGSEEWKALKESWGAIWRIDTPKPLKGPFSVRVTTEGGEKIIAEDAIPDGWKADSVYKSNVQAK

SEQ ID NO: 197878 - protein, 125 aa, Oryza sativa
  Clone ID: PAT_MRT4530_93594C.1.pep
LGRRRGCGRTRPLAAAAAAALRPGRRPRSSASTSSRSSPRSPCSRSSPPRGSSAPTAPSSLPHSPSAPTRPRSRRPARSPCAPWRRAAMRVSPPTLVGRPPRCRRWGTRSRWRRRRRPIPTGGSS

SEQ ID NO: 197879 - protein, 910 aa, Oryza sativa
  Clone ID: PAT_MRT4530_93595C.1.pep
ERRRHAVAGDGNRTTCAVNLKGEIPAMEAAIVSASTGVMRSLLAKLTNLLGGEYKLLKWLRREMEFLESELRSMSIFLERLEDTQKLHPQMKDWRDRVRELAYDIEDCIDDFILQLDSKDAKVGFGQKLLASRRIGHMIRELKARVMEESERQRRYMLDGLASGPSVRVKVDPRLSALYVDEDRLVGIDAPRDEIIGRLLDKRRSASAKQVMTISIVGCGGLGKTTLANQIYCKIKGKFECAAFASVFQNPNTKKVLTNILSQVATTAAVEDDEQAIINKLREYLSDKSRIITTTRIHDIAKLCCSSHGDYIYEMKPLGVIDSKILFDKRIFDPEERRPPQLTEVSEEILKKCGGLPLAIISISSLLASKPKSKDQWDRVKVSLSSTLERTPDIETMEWVLSLSYSDLPNHLKTCLLYLSIFPEGYEINRERLVSRWIAEGFIYKKHGQNPYEVGDSYFNELVNRSLIQPANIKPDGQTNACRVDDTVHDFIVSMSVEENFVTLFGGSKLVPRSHGKVRRLSIQNGGIQENIVTSTHLVTSQVRSLTLFAVEMPSLLGFGMLRVLDLEDCYALEDHHLTNLERLVQLRYLSIRTSPISELPKQIGQLQYLETLDLRATGVEELPSTIGRLKSLVRLFVDYHVKLPKEISNMHALEELTSFSALMYSPDFLKELGQLTNMRVLRVICDCDSFKGDAGSCLENLASSLCNLGTYNLHSLFVDINGYGEDNFSLDTWQPVPSRLRRFSIDRWCPINKIPNWVGSLINLEELVLYVNKIWQEDFELLGHMPALSSLTIYSNTALQGRIIISGFHSTKFFKFYCNPAGLTFDAGSLLKLECLDVIMNVFNTKSSNGSFDFGIQYLTNLRNVYIQLDCNGSTGGELEAAKASIKSSVNKLPGQPKLNLSTLNENML

SEQ ID NO: 197880 - protein, 128 aa, Oryza sativa
  unsure (1)..(128): unsure at all Xaa locations
  Clone ID: PAT_MRT4530_93596C.1.pep
AITTCVFXVXEPLTXXPXAPXLXKXPPTPLLXXIRWAIVIPXXXXPXKXRXLNSXDXHAXLXGSSLTXEVLLXTHGGXXVFXXXTSXSIRPXHHVXGXXXPXPSQTLCSXKDXVXXGRXXFFXFXLKE

SEQ ID NO: 197881 - protein, 348 aa, Oryza sativa
  Clone ID: PAT_MRT4530_93597C.1.pep
MACDADAPLAYSSKCLLPIVVSEKIRPLRRMRFLSSTLGCSMDQDSISLPFRRSTRARGCISVPFGGAEATPRFHFHPHARQPFDGMPPLAPRKRKAVAAARGRKKKERVAPDRISALPDEVLHLVLSLLPVHDAVATCVLARRWLHLWKEAPGLSVECININFPEFLPEKEQLFVRWIQRALRCQARVLRISLIDWVELPNMTLISQHLTRLELQGISGDDNFLDLSGCPSLVNLNMDTCCIYVDKLSSSSLKTLAPFLESMPSLLQAIVRFDEACEDKCQKSVSGGCDDDDDDYCFGCADEVVAGYGTNGMCLQGLSEATHLELSADPAVFSYNLVVVTMLGTVGS

SEQ ID NO: 197882 - protein, 243 aa, Oryza sativa
  unsure (1)..(243): unsure at all Xaa locations
  Clone ID: PAT_MRT4530_93598C.1.pep
GLQESAPGVRPIWARDXFPDPDIKPGPLPELPVLPLQYIAFDFPAAYLGKLKAQYAATAGASKICSAFDIVIAKLWQCRTRAIAADPAAAVKLCFFASARQVLGLETGYWGNAIFPVKVSAAAGEVAASSVIELVGVVREAKRRMAGECLRWAEGRTGGADPFQMTFDYESVYVSDWSKLGFNDVDYGYGAPSSAGPLVNCDLISSVIVMRAPAPLAGTRLLASCVTKDHADDFAARMREDLV

SEQ ID NO: 197883 - protein, 1985 aa, Oryza sativa
  Clone ID: PAT_MRT4530_93599C.1.pep
MAIGGSDWEREGDEGNLFDGMQQGAAGQAGPSGGGGGGGGGGGGGADRLSALPDAVLFRIVSHLGARQAVRTSVLSKRWRHVWASAPRVDVRHPCACDESADQERFHGFVTTMLLRRRPFAPIKALRLCWSHDGDANNWIAHAVRRGAEEIDFSARHHQDDPKPELEYTSFISHKIKILKLTRVRMGIKFITQICYRCTFLEELELKNVNSLEGQIQSTSLKRLSIINCLISDGFLVDAPNLISLCFFRPLSGKSTEGANHSSDNRSWPFSASVWEFDDDGSDHDDDFFAIASGGEHFDDKRDNESDQDNGSSDEDSDDKRDQESDHDEDVPSSPYSDSKDSCDGSDSECESYESSDKEGDDLEDCDSNDMLENLIKVARGLTAYHGEVLLRRQLENFPMFNNLKTLSLGEWCMVPDFSALSTILKKSPKVERLYLHLDMIHRGRGDIDPSGGSFACNNLRKVKITCCKDDEMVHMLKQFLQRNGISLEKIVHHTSSTHNGEEDGGGDSSNLFDGMHQGAARQAGQSGGGGGGGGGADRLSALPDAALFRIVSHLTARQAVRTSVLSKRWRHVWASVPRVDIRHPCACDERADQERFGDFVTTMLLNRRPFAPIKALRLWWSHDGDAETWIAHAVRRGAEEIDFSARHHQDDPKPELEYTSFISPKIKILKLTTFGMDIKAITHICSRCTSLEELELKDFRRLDGQIRSASLKQLSIINCFISVAFLVDAPNLISLCFIRPLSFERTKESICSSDNRRWPSPVWKDDNDGFDHGDIFAIASGEHFDDKRENESDQDYGFDDGSDDNIASESDHDDDGPPSPYSVSYDGDNECESYEPGNKEESDRTVAYGEIADEYSSNGDPGDEYRGNYVNHDSANYGRANKFGNLNFPVKSIVDASAHEGELLLRRLLENFPMFNNLDTLSLGELFDGMHQGAAGPGPSGGGGDRLSALPDAVLFRIVSHLKAREAVRTSGLSRRWRHVWASAPRVDVRYPCACDGRAVDQKSFRDFVTILLLRRRPLAPFKALRLSWSHDEDDVSAWIAHAVRRGAEEIDLSARRHHGYPVPDYKHFISPKIKILKLTHLGTTRFTADNTLDLLCSGCTSLEELELKDIKSLWGGIQSDSLKRLSIINCHVTSDGFLVEAPNLISLCCIRPARAVPWFSHMVSLVEATVVLDDSRLSDDYQQPVLEDDNDGSDYDDNFFAPKAEGPDDKRDNEADNDSGDKRNRDGSKSDLDDHDGEYDHEDGSESGDKEVDDLEGGDDRTVTYGEIADESSSYGIPIPSDEYGGNYGNHDYTIFGGDHMLDHLSDVRTLGLLGHQGEMLLRRQLENCPIFNNLNTLTLGEWCMAPDFSALSTILENSPHVERLYLNLDMDIHRSRGGINPTGGSFACNNLKKVKITCRNPFDGMQQGAAGQAPRRDDGEAAGPSGGGGGGGEDRLSALPDAVLGRIVSHLKAWQAVRTSVLSKRWRDVWASAPRVDIRHPCACNERADQERFHGFVDTLLLRRRPFAPIKALRLCWSHDGDANNWIAHAVRRGAEEIELSTRHHQGSLEPEPEFTSFISPKIKILKLMRVGMDIRSITQICSRCTSLEELELEDVRLLEGQIQSASLKRLSIIKCYIDDGFLVDAPNLVSLCFIRPLGIERKGGSNSSSDRLWWPVWLNDDDGYDHDDDFFANASAVQSDDKRGSKSDQDDLEGCNDDDCTVAYDEIADEYSSNGGPGDEHGGYSESDDSTICGPYGLFNVLVKTSLIMIAREGELLLRRELENFPMFINLNTLSLGEWCMVPDFSALSTILEKSPNVERLYIHLDMVHRGRGDIDPSGGSFACNNLKKVKITCCEDDGETERARGSFEARKEVVNVVVEEEEVRPAIVVVVAGLTWTAATMCSVPMAVMRLQQRRCRRRGVARRWTSRHWLRPLDRLGFMGWSGGGDEPRSLCRYAVPSSTPLYMAQCDGGPPAIGLGAPDQGAGQGPLEPLGSRGGRSI

SEQ ID NO: 197884 - protein, 189 aa, Oryza sativa
  Clone ID: PAT_MRT4530_9359C.1.pep
MFPPGLIHHRPDGGEAGRAAGGGPSLVLTADPKPRLRWTADLHERFVDAVAQLGGPEKATPKTILRTMGVKGLTLFHLKSHLQKYRLGKQSGKEASEQSKDASYLLDAQGGMSVSPRVSTQDVKENQEVKEALRAQMEMQRRLHEQVEVQKHVQIRMEAYQKYIDTLLEKACKIVSEPACLKRLQHLGQ

SEQ ID NO: 197885 - protein, 402 aa, Oryza sativa
  Clone ID: PAT_MRT4530_935C.1.pep
MDVKSAFLNGELQEEVYVQQPPGFTVGKEGQVLKLNKALYGLWQAPRAWYSKLDACLVSLGFTRSDHEHALYTQRYAHKPLIVGDDLLITGQDAGDIKEFKLEMLQQFRMSDLGMLSYYLGIEVRQDHNGISLSQSAYALKLLEKTGMVDCNPCHAPMEAKLKLSKSNTAALVDATYYRSIVGGLRYLVNTRPDLAFSVGYVSRFMAEPREDHMAAFKHILRYIAGTRDHGVSYSGGKTEELKLIGYNDSDMAGDVDDRKSTTGVLFFLAQIPITWQSQKQKVVVLSSCEAEYVAATTAACQGVWLQGLLSEILGAPATTPILKVDNKPAIALSKNPVHHDRSKHIQTRFHFIRECVDAGKIIIEYASSVEQLVDLLTKSLGRQRFQELSELVGVINTKGQS

SEQ ID NO: 197886 - protein, 62 aa, Oryza sativa
  Clone ID: PAT_MRT4530_93600C.1.pep
TPGGKKHLFYSPKHSRFITLGSLIISSSQEKNDILRILYIFMYNMYVNLRAKIWGLPDTLQA

SEQ ID NO: 197887 - protein, 220 aa, Oryza sativa
  Clone ID: PAT_MRT4530_93601C.1.pep
MSCSTALTKPQLLASKAAPEFMETFSSVQLAGIFNLISSRRAAALDDEFLPPPPLSAFSTRHVAPALLDLRHAQIQSYDIVAGGYGAPPSTHLYNAIYGALSSSSAPVYLKLSTFPTGIHLNVVACFQGHERTATAAKIAEGAAAGSTRCCGRHWHGGKKDLELQAYSRWDTHRQPMLRRAGSVCGTASDVNVCPRPRSHDDPTDQETLTHGHYPNASKS

SEQ ID NO: 197888 - protein, 25 aa, Oryza sativa
  Clone ID: PAT_MRT4530_93602C.1.pep
LAVSQFIVLIIIHMLNLMGSIWDLF

SEQ ID NO: 197889 - protein, 84 aa, Oryza sativa
  Clone ID: PAT_MRT4530_93603C.1.pep
MGHHEGFVAMFFLSVHGRKLSDQVTGTPISVRIVNTNGTSMMDELRKTLDRRGPGVQRCDAVVGSINTSKMSDAKVFTFVSFPV

SEQ ID NO: 197890 - protein, 538 aa, Oryza sativa
  unsure (1)..(538): unsure at all Xaa locations
  Clone ID: PAT_MRT4530_93604C.1.pep
MYCSHCQDNCPVVKDPDKNYTCCGLCGKVLDDQVYDGEPTFQKGADGQARLAGSILSSIESGNSVSHERTINKGREEIRQIVSSLHVAGGDTIISMAHRYYTLAVDKNFTRGRRTTHVAAACLYIACRQSKKAYLLIDFSDHLQISXLCQVLLLAEHPVIQKLIDPSLFIHRFXNTGRKPSGLCGAALYIAALSHGYDYTKADIVAVVHVCEATLTKRLIEFENTDSGSLTIEEFLAKADEQVLVTKISPKSGEVLCKHKDKAEHFAHGLCEKCYNKFMKLSGGLEGGSDPPAFQRAEKQRLEAAKNAKGTAASKEAALESVCEARESDVENNITTPPKNIIGDKHSTIPSVKVAGDSVATEDPEGEGKNDKADEGPESLSDIDDAEVDGYLHNEEETQYKKIIWEEMNKEYLEEQAAKAALAAELAARGVVVEEGKRKRRRHNEDGKNATPAQTPAEATQNMLKRKRLGSKINDEAVNKLYNTKDEDGKADKEMDFNDEYGQDTGDGETFEGGYDYPDYNYDGYGDGAYGDYDGVDF

SEQ ID NO: 197891 - protein, 146 aa, Oryza sativa
  unsure (1)..(146): unsure at all Xaa locations
  Clone ID: PAT_MRT4530_93605C.1.pep
MATMTSAVTSSPAATREHVLDGERRRDGANGGYQRVELDSANSPVAWMAADDXRMTTAARLSGGGLRVGGDGGASVRNVGNGEVDEMLLLLAILMVATVTEDDGCNSGTARLDRRRRWRASGRRSRRRSDGLRRRRSGGRKRRRPH

SEQ ID NO: 197892 - protein, 129 aa, Oryza sativa
  Clone ID: PAT_MRT4530_93606C.1.pep
QTELVESLLFEMQDLGIRPSAGSHNCLISAYGRQKKMSGKAEYAFLRMKREGIKPLSSSYNALLFAYAVNGLHEKAHTIYVDMKREGLKPTLETYTALLNTLRRAGDTQKLMETWKTMIDEKAGGTRVI

SEQ ID NO: 197893 - protein, 55 aa, Oryza sativa
  Clone ID: PAT_MRT4530_93607C.1.pep
ASWEVARVSTPPRTSKGTEASVPAFKSGVYWPRPLHTSLYVLCKLCMCQLDWMLA

SEQ ID NO: 197894 - protein, 111 aa, Oryza sativa
  unsure (1)..(111): unsure at all Xaa locations
  Clone ID: PAT_MRT4530_93608C.1.pep
RAKKTGFNSKEETKKEDNKTSKNSRVESMMERYLEMRSKQAEEEVAAREKVCSQATDYFVKCVXLSSMDVTKQEKAKDYAVLKTPANREVFMCACEDDLESALIXLRSEMA

SEQ ID NO: 197895 - protein, 146 aa, Oryza sativa
  unsure (1)..(146): unsure at all Xaa locations
  Clone ID: PAT_MRT4530_93609C.1.pep
SKFSGQDNTSTMEHISRFLAQXGEASTEEALKVRFFXPLSLTGSAFTWFSSLSSNSIRGXANLEKXFHDYFFTGINELNLSDIISVEQQEGESAMEYIQRFHNVCSLYYGLSLNDEQLADLAFHGLSAPIRDRFFCHEFDCLAHLM

SEQ ID NO: 197896 - protein, 70 aa, Oryza sativa
  Clone ID: PAT_MRT4530_9360C.1.pep
MPCGVPQGGLLMEPCEVGKPVEGSWLRRPRNQLKGSEGLEAQSRDPETPESEPRMASRSGHGHCSPSNHH

SEQ ID NO: 197897 - protein, 728 aa, Oryza sativa
  Clone ID: PAT_MRT4530_93610C.1.pep
MAKMIEALGFGVSSSREGYLSDCEGLRGYCGDYGYPIPTRHEVYAEEPTIVDLCDSSDDDSSYEADESEDDSEEMEVAEGGMEGTENAVALEGGEIRTKTNEVRKGKAISSEIPENRLVVYNCDNDPLASQAPSESESNSEYIPGDDAGSDDDEEIIEIEKHYKDMKRKVKAGQLDNLDDVYLGGQGWQNMNNEAGGEGDGIAAESPEDESMEEIGTDGEFKKAVTKYALAERKVINFIKDDLKRIVTLESLHACPPRRDNKMVTATRIAEKYGKIILANPGWNLAHMKATVQEEMFGEASVPKLKRAKAMVMKKAMDATKGQYQKLYNYQLELLRSNPGSTVVVNREIGTDPPVFKRIYICLDACKRGFVDGCRKVVGLDGCFFKGATNGELLCAIGRDANNQMYPIAWAVVHKENNEEWDWFLDLLCSDLKVLDGTGWVFISDQQKGIINAVEKWAPQAEHRNCARHIYANWKRHFSDKEFQKKFWRCAKAPCRMLFNLARAKLAQHTVMLYAMELTALRTNTLDEFTADCYKVDAFKSTYKHCLLPVEGMNAWPEDDREPLTAPGYIKMPGRPRTERRREAHEPAKPSKASKFGTKVRCRTCKQKKEGNWHLDYHYFSLSVKGNQADKKSPIGGRKFRLILRKSTTAHRAFGPARHGPRRVGPCLGRECGTWAGTARPGALVGPCRPDKPRPRHGRAWAVPSRAAHMANYSFSSRTCQDNYKEQS

SEQ ID NO: 197898 - protein, 60 aa, Oryza sativa
  Clone ID: PAT_MRT4530_93611C.1.pep
FSIHSSSSFSSCIDYVRSGWFIFVFLKKPERTLPFLGLYHRIFDFQKISLIIMSLEHYLA

SEQ ID NO: 197899 - protein, 913 aa, Oryza sativa
  Clone ID: PAT_MRT4530_93612C.1.pep
MDLLDKLVVRFHFNGEFVTSGREKKYCGGREALSYIDRDKISLPEIFGHLRDHCKVMEGTMLHWLFPGKDLNSGLRALLDDTVCKLMEDCIDDLGVAEVYAEEPTIVDLCDSSDDDSSYEADESEDDSEEMEVAEGGMEGTEDAVALEGGEIRTKTNEVRKGKAISSEIPENRLVVYNCDNDPLASQAPSESESNSEYIPGDDAGSDDDEEIIEIEKHYKDMKRKVMALLLRAPEDESMEEIGTDGEVSTKENKFPRYKKKVGTPCFELGMKFSSKKQFKKAVTKYALAERKVINFIKDDLKRVRAKCDWASCPWVCLLSKNTRSDSWQIVTLESLHACPPRRDNKMVTATRIAEKYGKIILANPGWNLAHMKATVQEEMFGEASVPKLKRAKAMVMKKAMDATKGQYQKLYNYQLELLRSNPGNTVVVNREIGTDPPVFKRIYICLDACKRGFVDGCRKVVGLDGCFFKGATNGELLCAIGRDANNQMYPIAWAVVHKENNEEWDWFLDLLCSDLKVLDGTGWGIINAVEKWAPQAEHRNCARHIYANWKRHFSDKEFQKKFWRCAKAPCRMLFNLARAKLAQVTPAGAQAILNTHPEHWSRAWFKLGSNCDSVDNNMCESFNKWILEARFFPIITMLETIRRKVMVRISEQRKVSARWNTVVCPGILKKLNVYITESAYCHAICNGADSFEVKHHTNRFTVQLDKKECSCRTNTLDEFTADCYKVDAFKSTYKHCLLPVEGMNAWPEDDREPLTAPGYIKMPGRPRTERRREAHEPAKPSKASKFGTKVRCRTCKQSCAQSRKRKATGTLTTTTSASQSKATKPTKKAQMEPLQIVRVNARAKISTPSGGSARVDLQANVAGSNSSTSAAVTVTSGKASVSVSAQEPARTTTKNKAKVPLLLLPPWESDKL

SEQ ID NO: 197900 - protein, 383 aa, Oryza sativa
  Clone ID: PAT_MRT4530_93613C.1.pep
MAIYTGRPPPPPRSPPRRHAGRRAGRLRAVPRVAASAPAACIVVKEKKKERRGVRDKERDKNSDHQRKGSNERRRRRRRRRLLRLIRGGWPSKSFGLHIYRRKFAARSSFLIRNDYGVWSQAHRRLIRMTRLGYWIVYDLDAKELRTWYEERLLRDRGMARWPEYGAGDREEVRSLIARVREEYWRRMPEHRRQKFVARLEEERRLKEESDQRQQLAAAADERRGAQMAAVDDGKLRASSRSSTQPPPRRRRRRRRWAPPPPPPPPRLLVAGHCAAACLPCALAGSRLGTSRPACQRRIAAWGGNFPIGSGDPAGTRPYGVGTGGEFSPAAQPGPAPPHCHPYSYPRQLVLSPGAGLLGTLRPCLSTVHGRLPSPISRPHTRA

SEQ ID NO: 197901 - protein, 84 aa, Oryza sativa
  Clone ID: PAT_MRT4530_93614C.1.pep
VVAHLARLVSPSALVAGFQKQSQLGYVGVVGGVGVGVGASGLDDNVQRSARQTRSDVLTGSVIPACQALDKPRQADVALAAAAK

SEQ ID NO: 197902 - protein, 876 aa, Oryza sativa
  Clone ID: PAT_MRT4530_93615C.1.pep
TVQLDITAFLKTVKKNKHKFYPAFIHILARLMNAHPEFRMAMKDGELVIWDSVHPCYTVFHEQTETFSSLWSEYHDDFRQFLHIYSQDVACYGENLAYFPKGFIENMFFVSANPWVSFTSFDLNVANMDNFFAPVFTMGKYYTQGDKVLMPLAIQKFDDKLSNMRIGRRPGRPQGVRVGRFINAAGTTGFPTGKRAVSATQLISTEKLPAQRHPVTQNSNGRGVAQADNGRKEVKPSNDQTVGQSDGMITTMVGSHAVLAKGNQNRVLAVPSGTNNFTGELCCSSSDPIHVPSPGSKSAGTFGAIKREVGVVGARQRPSDNTATNTSTSNSSVKVPTSTATKENASNGQQSRSSGVSSKNSRPSSSTHLSSRPSSSSQYHSKPNTPVGHPKVNPQLEWKPKSVSPSPANHADNVVHSSAASSVDGNQAHMAGLSKKLSQTNVSEDEHVIIPAHLRVPDSERTHLIFGNFECDVESKAFTLAPDASTNREFNAHSSSRSTDDVPPTDQTDLVGSCVMLPKSDSFVSVSEYQHPLTEDMEVLSPGVFGEHRTNDMISTQVSHSSPQPQHQDNSAVHDFKEYEPDSRYEMPFITKAVDSEATQNIPYPSEVMGLHAANFNQLSVTAATQHPVPQMYHMHVSQYPNCLPYRHVFSPYYVPPVAVQNYSSNPAFTQLPSASSYLVMPNGTSQLAPNGMKYGPPHQCKQMFPGGPAGYGGFTNQNGYPVNTGVIGGTGSVEDANMSKYKDNNLYTLNPQAETADVWIQAPTDIPVMPSTPFYNMMGQPMSPHTAYLPPHNGHAPFSPVQHPAHLQFPAMPHGLQPTTMTMVQNPQPMVHQPACPPLAGNIGIDMAAMASGAQVGAFQQNQLSHLGWAPPSFL

SEQ ID NO: 197903 - protein, 109 aa, Oryza sativa
  Clone ID: PAT_MRT4530_93616C.1.pep
MAVAAGRMEQRGGGADMRDQPDSGSRGRRWHRLVGGPHRAVAQGGETPGWLSSARLQTGRPVRRCGCGERPPTAATGGAGDSGGTLPKRRRGQEAAKRPKTAAHTGKGE

SEQ ID NO: 197904 - protein, 199 aa, Oryza sativa
  Clone ID: PAT_MRT4530_93617C.1.pep
MARTALYGSKEVDPLLVLQTKVIILFYGMVTIVLVLGIPAAALLSNAAEKVKYTLDLAAVEGMDVAAAATAGAGGSTVISPAFNLTLRVENPRTFRPWCLDRGDVVVSYSGVALAWGRVPGFCVQKRSTAKLTVVPWGKNVHLSQELRERFVSELQEGTAKVYVEMKLHYYANFGMAAFAPSTGMVGISQELTLGGRDE

SEQ ID NO: 197905 - protein, 112 aa, Oryza sativa
  Clone ID: PAT_MRT4530_93618C.1.pep
PFLSLYGETPNVAPNLKVIAQRGRPLGQRKVKRSLWGSPPPPPLFVPLWGGLPFRLLGVRLFWGGLPVRACLVTAPKEKGSCPLCYLSRVAPGVSLSGLCSPAPTGFSLWPP

SEQ ID NO: 197906 - protein, 74 aa, Oryza sativa
  Clone ID: PAT_MRT4530_93619C.1.pep
RQRGRLERGGLPGEFANLFLVVEGLRDLPPQRAHPLLPLRPQRLRHLAARRRRRGGGKKGALELGFWGVSEAKE

SEQ ID NO: 197907 - protein, 417 aa, Oryza sativa
  Clone ID: PAT_MRT4530_9361C.1.pep
MFPPGLIHHRPDGGEAGRAAGGGPSLVLTADPKPRLRWTADLHERFVDAVAQLGGPERIDPFRDTNVIGAVGDGANVIGAIMLDYSVNDVGTAKRVYSWKATPKTILRTMGVKGLTLFHLKSHLQKYRLGKQSGKEASEQSKDASYLLDAQGGMSVSPRVSTQDVKENQEVKEALRAQMEMQRRLHEQVEVQKHVQIRMEAYQKYIDTLLEKACKIVSEQLASSGFSISDNDLPELSGGVMCGSADTLSSSIFHQLSVSPINLHSPEGKPTPSGIEGQMILQKSPELKRNLALPSPPFVQPCVAPAPVVIVAQGSRRRDRQVVADLVRPSVVALGHRSTAVVVKPKVAAASSSPPSPSVDLPPPFWSPVSSPRRPQPVGAVRSRRRAVVRRRACAARAVVGDDVTADVIVAVSRGPP

SEQ ID NO: 197908 - protein, 170 aa, Oryza sativa
  unsure (1)..(170): unsure at all Xaa locations
  Clone ID: PAT_MRT4530_93620C.1.pep
RSQGPVKAWVRPPPGWSKLNVDGSFSNSSGQAGIGMILRNSEGXSIFTARQVIANCVDALESELMACKAGLALALHWSILPIVLESDSILAVSVINGETEDKSRFAYLIRELXSLQRGEREVKIQKVHRDHNKISLELANSARLANRSDFWFGHESNCFSALILEECNHS

SEQ ID NO: 197909 - protein, 155 aa, Oryza sativa
  unsure (1)..(155): unsure at all Xaa locations
  Clone ID: PAT_MRT4530_93621C.1.pep
FFFFFXIXFFLRGTELNGXXNLPNTXXXCPVXPXDNXELLKDKNXRTFXAXLXXPXXXTPTLWPKNFEDMGXSKXQXAQXXGLXXXRXXCELVGNLKXRXXXLCXXXXLGGTMEXPXSXYSASRPNXXXXXEXGXNGTPFQTEXWLGGXNDLTLX

SEQ ID NO: 197910 - protein, 179 aa, Oryza sativa
  Clone ID: PAT_MRT4530_93622C.1.pep
MAESCSRGGERKTSRRQRRQASGNIKNRLDELRGSSQALGEHPIRCFGPRHCDDRMTQPLSRFELETSGSDTILSCMHQPVAPKSLNLIGKGGQFTLYTPTSRTARTFQGQERFAQGAKLNTECLGRRGFGWTGWDSGSFSSSSPTTTRGGWIQSRRRGGSKVKAVASAAFSAYQLHRC

SEQ ID NO: 197911 - protein, 57 aa, Oryza sativa
  Clone ID: PAT_MRT4530_93623C.1.pep
IQPVVVIVPTIWLWACFSFLLLSAVVCVRTIEHRVLYALRFLLFSARRCFHDRFCPS

SEQ ID NO: 197912 - protein, 76 aa, Oryza sativa
  Clone ID: PAT_MRT4530_93624C.1.pep
MAHGDQSYRCGLNSRATLKGRSCYHGRSLPLPLLRAGAAELPRGYRIRTSAPLSRAGAVDPLTNVPEAASVSVACP

SEQ ID NO: 197913 - protein, 45 aa, Oryza sativa
  Clone ID: PAT_MRT4530_93625C.1.pep
LLYTCTTHIKSLTFSILTFNPKTNHFKLYQMQIPSIYKKLLFTNF

SEQ ID NO: 197914 - protein, 86 aa, Oryza sativa
  Clone ID: PAT_MRT4530_93626C.1.pep
ICTPGVYVIYQSRSIQLLSAHRHPLPRGFYLSSGGIWAPNAGLHRFSSISGEGVSPTFRRALVNLSFTSASFKAASLRSLGSLWFG

SEQ ID NO: 197915 - protein, 66 aa, Oryza sativa
  unsure (1)..(66): unsure at all Xaa locations
  Clone ID: PAT_MRT4530_93627C.1.pep
MARQTAGGGTPTIGIHRRLQVGDDGIHRKPQKRNEEDARNSFVQFNVEDARGFXRDFSTFFFLGLP

SEQ ID NO: 197916 - protein, 149 aa, Oryza sativa
  Clone ID: PAT_MRT4530_93628C.1.pep
MASAAEAAEELTRMHRELPPSTANEEAEAVDAKLVSVDEHRGGAPNRSVPRRGRRLRRLSSWASWTAGWTAPGPAAARQARSPALRTKRSLRCWRPPRQEEKGGLGTTLRGLEEALHGGIPAWTLTEVDGPSPIGKTQVCLKLALLATI

SEQ ID NO: 197917 - protein, 146 aa, Oryza sativa
  Clone ID: PAT_MRT4530_93629C.1.pep
TNIIMCPILSITTSINHPTPPSSNAGGRQPITIHPSMGTVLGLLTGAQQRHTPSNTSKCQIHQIIPNNLALKQHVQVPQITGTGTAPVSLTSIDWHPHACKGLGLHQYLYIPHQGPPLGTRWVDPGNSRHGYPAGVPSFPSSVSQY

SEQ ID NO: 197918 - protein, 98 aa, Oryza sativa
  Clone ID: PAT_MRT4530_9362C.1.pep
SHKSDEIEIASSEEPGIHIDWRWLNALRKSLTIYIFFCASIISIACDCISVFWPATEICKNTLVGVLAKNSGKKSGIDSNSDRVEIESDFCRGLAKLE

SEQ ID NO: 197919 - protein, 74 aa, Oryza sativa
  unsure (1)..(74): unsure at all Xaa locations
  Clone ID: PAT_MRT4530_93630C.1.pep
MKDCGRKNSSAVKNRAAQGQRCSAWCGXEDGWRGVESIVHKVFDRRAMKKWMSSGTVIAMDELDLWIGLGRQRL

SEQ ID NO: 197920 - protein, 69 aa, Oryza sativa
  Clone ID: PAT_MRT4530_93631C.1.pep
INLGPSGSQFVLGFRVYASLRWEDTLNTRFPFEPIWWFLSQFVGGICIVCNLSGISPVFHLHLNRSGSI

SEQ ID NO: 197921 - protein, 51 aa, Oryza sativa
  Clone ID: PAT_MRT4530_93632C.1.pep
WCQLGQARFRPNRDHRCLISGFGMNALDLLLMAEAGHFRSLACSSTVNHSY

SEQ ID NO: 197922 - protein, 825 aa, Oryza sativa
  Clone ID: PAT_MRT4530_93633C.1.pep
MASLPLPALHHEPLLSRSHRRLPPSPPPPPLPSRLAAAHPSAPSPSPRDDERLRLRAEELRSYAAALQGCAASRALRRGKALHARLLRSGPRPDAFLHDSLLNMYCKCGRLADARSVFDGMPHRDVVAWTAMVSAITAAGDAGAALRLFAEMSEEGVVPNGFALAAALKACTVGSDLGFTPQVHAQAVKLEGLLDPYVSSSLVEAYVSCGEVDVAERALLDSPVRSDVSWNALLNEYARDGDYAKVMLVFDKLVESGDEISKYTLPTVLKCCMELGLAKSGQAVHGLVIKRGLETDRVLNNCLIEMYSKCLSAEDAYEVFARIDEPDVVHCSLMISCFDRHDMAPEAFDIFMQMSDMGVKPNQYTFVGLAIVASRTGDVNLCRSIHAHIVKSGFSRTKGVCDAIVGMYVKTGAVQDAILAFDLMQGPDIASWNTLLSGFYSGNNCEHGLRIFKELICEGVLANKYTYVGILRCCTSLMDLRFGCQVHACVLKSGFQGDYDVSKMLLDMYVQAGCFTNARLVFDRLKERDVFSWTVVMSTYAKTDEGEKAIECFRSMLRENKRPNDATLATSLSVCSDLACLGSGLQLHSYTIKSGWNSSVVSSALVDMYVKCGNLADAEMLFDESDTHDLVEWNTIICGYAQHGHGYKALEAFQEMIDEGNVPDEITFVGVLSACSHAGLLDEGRRYFKLLSSVYGITPTLEHYACMVDILAKAGKLAEAESLINEMPLTPDASLWKTILGACRMHGNIEIAERAAEKLFESQPDDISSCILLSNIYADLKRWNDVAKLRSMLVDRGVKKEPGCSWIEINGKLHVFLSQDGCAKY

SEQ ID NO: 197923 - protein, 423 aa, Oryza sativa
  unsure (1)..(423): unsure at all Xaa locations
  Clone ID: PAT_MRT4530_93634C.1.pep
MYTDRWTSKXIDSTQYRFLDVILDDFSHYVWTFPLRFKSDTFATLSRFFAFVKTQFAASIRNIQCENGREFDNSTARTFFLTNGVSLRMSCPHTSPQNGKAERMLRSLNNIVRSLLFQASLPPSFWVEALHTATHLINRHPTKTLHHHTPFFALYGAHPSYTHLRVFGCKCYPNLSATTPHKLAPRSIMCVFLGYPENHKGYRCFDPVSNRVYISHHVVFDEHSFPFAEMTNSADAPNLDFLEDFSSPLPAPIGRRIGSSSSRPAGTPPGPRASVGTPSGSARQASPASSPARPTEAGPSSAGPDEHAMVTRGKSGIRRPIDRLNLHAAPLSPVPRTYRAALADPHWCTAMEEEYNALLANRMWDLVPRPPGVNVVTGKWIFRHKFQADGSLDRYKARWVLCGFTQRPGIDFDETFSPVVKPA

SEQ ID NO: 197924 - protein, 366 aa, Oryza sativa
  unsure (1)..(366): unsure at all Xaa locations
  Clone ID: PAT_MRT4530_93635C.1.pep
MAAHTTPTSPLPPRGPRPPARRPPTTEARGPPPASPATTSLRPRASSTAHVGRHPTLPXRPTPAKSPHPPPPXAPSPPPSPTPTASAPPPKPTTPPPSPPPPKPRTRRPPTAKGKPSSRPPPSSRTLLPSRTPPPSSSAARWPRRGAXPAPPRSPQRSSAPARPERGRPAWPSSAXALTTARRWPALPRFPRRSLAPARPERRRPAWPSSAAPSPPPPLPRPSSSXPPNPTPPPPAAXAVAAPPPSRLLPNPRSPSSSCCSSPAPRRPPPXAPRPRPPRSSPRLPRSTPGRAPPPRSSPTAPRTPTAPAARSAAARRPRTTSPPPRXPPLALPRRRRRPAGRVLLDRPRPDLVRMAGPITNAPRRH

SEQ ID NO: 197925 - protein, 317 aa, Oryza sativa
  unsure (1)..(317): unsure at all Xaa locations
  Clone ID: PAT_MRT4530_93636C.1.pep
VEAPGAHSRSSRPRCWGLTSRTPTSPSGSRAPSPPPSPTPTASAPSPKPTTPPPSPPPPKPRTRRPRVXASREMRREREKKKRAAPTSNGAAVSRGEAPDAAVATAVKTNAGEVRESKXPGAHSRSSRPRCWGSTSRTPPSPSASRAPSPPPSPTPXRKRSSSKADTADNSSPSSPPPKPRTRRPRVGRRAEPGSAPPPWWWSQYSMTRARAAPLTTSGRLTTTSSSPPPPLPRPSSSILLIVPDAAVITFDEDGTGAGEEEEGDAAAAGRRPPSQRRRPAVCSLPRRPGLRERERESREGRKGERRGEIEMMWTPD

SEQ ID NO: 197926 - protein, 60 aa, Oryza sativa
  Clone ID: PAT_MRT4530_93637C.1.pep
FFFFLKRERGVSVILFTSPFLSTGVKIAVQRYITYVHGVFQVIEKKEVIEKNKSKITSME

SEQ ID NO: 197927 - protein, 163 aa, Oryza sativa
  unsure (1)..(163): unsure at all Xaa locations
  Clone ID: PAT_MRT4530_93638C.1.pep
MTRACLTRFTHAYFKRLQGKIDNRTRIMIAYRGRIRLTNQDNSLDDTPTYRYVXRFTDYAITAHVVYAAVAYVLELAGAYSHELPTYCAEADRTDYAXAYCAVSLLARHQLSLRGVDHNCEDYDDAPADDYYAVPAVXRRALRATSTVGLVFTATENPVFGAL

SEQ ID NO: 197928 - protein, 125 aa, Oryza sativa
  Clone ID: PAT_MRT4530_93639C.1.pep
MAAEQRQQQQMMQEGFEDYLPVMAERLGEEGLMQELASGFRLLMDPASGLITFDSLRRNAPLLGLGGMSDDDLRGMLAEGDFDGDGALSEMEFCVLMVRLSPDLMDEPRRWLDDAVAQASQFLFH

SEQ ID NO: 197929 - protein, 115 aa, Oryza sativa
  unsure (1)..(115): unsure at all Xaa locations
  Clone ID: PAT_MRT4530_9363C.1.pep
YGYLSDRIVRIWIXYKYGYCLPDTNTDMLLGFLSDTDNNSDIRKKYFRIRVRSYSILICIQDNPYLFPYSSYPYSFSYPNTQLPCLSNRGRVTATRNITFSMKYMLLTPLSGLGS

SEQ ID NO: 197930 - protein, 680 aa, Oryza sativa
  Clone ID: PAT_MRT4530_93640C.1.pep
MEPQLAALCNPRLLHSPHAFLPKATSTSTSTSSSSSSAAAGGEALKPRPRLPPPQQQQPGVSHHHHTRRRRELGAAALASLCAGIEALAAEGRHDEARDAFRGARAGAPFTPLPASTYDALVASAAALREPGFAAAVLWHVESSGFEPGQRAWNRVLRMQLACGMLAEARQVFDGMPARSEATWGTMMGGLIDAGRPRGALALFRELWEEVGGDAAPRVVVVAVRAVTALGSARAGQQLHCCVAKTGMYEDQYLSCALIDMYNKCGKLDEARRVFDGVPQKSVVAWNSMLASYSLHGCSEEALDLYHSMCEGGVDIDQFTFSTMLRVFSRLGLLEHAKQAHAGLIQTGLPLDIVGNTALVDLYCKWGLMEDARNVFERMPIRNLISWNALIAGYGYHGMGQKAIEMFEELIAEGIAPNHVTFLAVLNACRFSGFVEEGKRIFQLMTQNQRTKPRAMHYACIIELFGQQGRLDEAYSMIRKAPFIPTANMWGALLTASRIHRNLQLARLSAEQLLAMEPQKINNYVELLNLYINSGRQTEVSKVVNTLKRRGLCIHAACSWITVRKKDHRFFFKDSLHPQSSEIYRKLDSLLKEIKQLGYVAEENELLPDILPDEQKTSKVYHSERLAVAFGLISTSLSTTLRVTQCHRLCHDCHKLLICRGSETNSGLEIAWFNEDKAVC

SEQ ID NO: 197931 - protein, 62 aa, Oryza sativa
  Clone ID: PAT_MRT4530_93641C.1.pep
IYVSDGCWTLWQTRLHVHGPKLPDTLHHGRCKTTYHGLNTTDDLFFPLPYSNEAYSQDVSGT

SEQ ID NO: 197932 - protein, 125 aa, Oryza sativa
  Clone ID: PAT_MRT4530_93642C.1.pep
QPRGIPLFPKGAKRTIGRNPLKPYPNPKDPTIAGKAKPTSSRKEPLWASQKTHGGKNPFPKFGKKNRSKKRLKKGPENTVPPRFQGPPRKGPPGTPLGKSWGRKRLFSEKHGRLSKKKGQSGNIP

SEQ ID NO: 197933 - protein, 169 aa, Oryza sativa
  Clone ID: PAT_MRT4530_93643C.1.pep
LLSFLKLSHRWIILSPIDFHVLILPPKRLIIKYVILIVVDLFSNGLDHVYRCGYMPPEYIERRQITKKFDVFSLGVIIIDIIAGPSGYSKCAEMTSQQFIELVQGNWKKRLHAATSRYASQEADSLQVKTCLEIALRCIDKDRAKRPTISDIVDKMNEIDTLKMSLLSK

SEQ ID NO: 197934 - protein, 168 aa, Oryza sativa
  unsure (1)..(168): unsure at all Xaa locations
  Clone ID: PAT_MRT4530_93644C.1.pep
WRRAVGRCRRQGQSKSAVRRRRAVESLFLFLQGLVSLHGYXNMYTRGHCNLSPRSIQXAHHHLLTFYFILSSGGTXHLTRGCITFRSPAKGXVQCSAGSGNXLVYVGVVQGCISTXTSCIALVWIVYLPAYLSYVLVNVALVSXFSSMGCLSLXGFCRYRLNCFTRFH

SEQ ID NO: 197935 - protein, 1061 aa, Oryza sativa
  Clone ID: PAT_MRT4530_93645C.1.pep
SGRRRIFDGLPIPADKSYLKEGLSRIDEGWAAARFDSLPHVVHILTSKDREGEIQFLKEQSDLIEDVVDEVVHAYHHGFNKAIQNYSQILRLFSESAESITGLKGEMAEAKKLLGRKNKHLGQLWYRSLTLRHVLSLLDQVEDVAKVPARIENLMAEKQLYAAVQLHVQSMLMLEREGLQAVGALQDVRSDLAKLRGVLFYKILEELHSHLYNNGEYSSVTLSMVDNEELPTSTATGRLVNSMQPLSRRTRSIKGDNHFGASADGIPKTSSVGGSSSFDGPDDDSSIDMHESDGGRSRRDSKSISREVPIFLSCATPDEFLESVTKADASLSVKYLRTLVQCLSMLGKVAAAGAVICQRVRPTIHDVITSKIRAYSEETSKSNVNKAANENSDVSHSNGRAARYQLLKQKTKNGASLMASQLVVSPISPAMAPTGDAQCAASQLLSAIFECLVDILENHITVGELLEQKSSTEVDNANTPHMANGDASWNPDSESSQATGGFTVAFSLSVVQSECQQLLCEILRATPEAATADAAVQTARLANKDPVKEKRQDGSEGLSFAFRITDAAITAPNEGTHFAGQGWRRNSTVPQEGYGTASVIPDQGIFLAASVYRPVFEFMNKIGLMLPQKYWQLGNDGLLAFVNNFLKEHFLPAIFVDYRKCVQQAISSPAAFRPRVHATSVYSPLVENGRPVLQGLLAVDIIAKEVLGWVQLMPNYATELVEYVRTFLERTHERCRASYMEAVLEKQSYILLSRNDVESLMRLDPANLSLQNSFGQLDHSIPDAEAVEVEIELSDLLLDMCPIKQENLIHDDQKLILLASLSDSLEYLADSVERLGESFINSSTMLENKNHIHQGRHTRSTSAIPKSLASLANEYRRLAIDCVRVLRLEMQLETIYHMQEMTKREYVEDQDAEDPDDFIISLTTQIARRDEEMAPYIAESKRNYVFGGISSVAANASIKALAQMKSINLLGVQQICRNSIALEQALAAIPSIDSEAVQQRIDRVRTFYELLNLPFESLLGFIAEHEYLFSAKEYLSVLKVNVPGREMPMDAERRISQILGH

SEQ ID NO: 197936 - protein, 225 aa, Oryza sativa
  Clone ID: PAT_MRT4530_93646C.1.pep
MDDSSFGSEPTTSSSGGEAPASPPSTASSSSDGAGGKKKRPRKDGHHPTYRGVRMRSWGKWVSEIREPRKKSRIWLGTFATAEMAARAHDVAALAIKGRAAHLNFPDLAHELPRPATAAPKDVQAAAALAAAADFPASSANAGASNNPDGSDDASAGSASPPPPPDAADDALFDLPDLLLDLRYGPPSSGLSCASSWEDEVGLISGAGAAAAGVFRLEEPLLWEY

SEQ ID NO: 197937 - protein, 68 aa, Oryza sativa
  Clone ID: PAT_MRT4530_93647C.1.pep
KFIDGCMSTQFARNLLLAMIFSTLAAAAALVAHPGKPKLCPLKAALMYWVKPSRCLRVSPFDLLSFTR

SEQ ID NO: 197938 - protein, 154 aa, Oryza sativa
  Clone ID: PAT_MRT4530_93648C.1.pep
RLASPSAHRGREWRDPVVSGCELRRTGASTCAARRVRRRRRVEGVATAAATARGESSGRRRHGSSGGTREPRDAARGGGGARMKLWRRRAKKAVAPTQSSAPGASPSWSSAVQLHSSQPTPCHHLRHDANNRPAHGVVHKLCCCTWICALGCLC

SEQ ID NO: 197939 - protein, 406 aa, Oryza sativa
  Clone ID: PAT_MRT4530_93649C.1.pep
MALVPLVTVLLFAGSCLGSAPPTTSPAASAASTATRTVVVDGITAIYKPRRLAVGHRNLARQGATGGLLRYTTRLPYGVTVGRATGRCSDGYLIIDFLARDLGLPLLNPYLDEGADFAHGVNFAVAGATALNTTALAARRITVPHTNSPLDLRWFKEFMNSTTSSPQEIREKLSKSLVMLGEIGGNDYNYAFLQTWPMDGGYSLGNVTRMIESVATAVDLVPEVVQSIASAAKEVLDMGATRVVIPGNLPLGCVPSYMSAVNATDRAAYDARGCLVALNLFAALHNAWLRRAVGELRRAYRGAAVVAYADYSAAYAATLDGAAALGFDERRVFRACCGKGGGGAYGFDVRAMCGAPGTAACADPGRYVSWDGVHLTQRAYGVMAELLFRRGLVHPPPINFTNSARA

SEQ ID NO: 197940 - protein, 374 aa, Oryza sativa
  unsure (1)..(374): unsure at all Xaa locations
  Clone ID: PAT_MRT4530_9364C.1.pep
MENNAMQPMHVDGGAAQGEVPSGVKGPGGSKQKTFKRMTWETRGKILPAGSGXGDPGKEKIDGGRGGSFGKRRKEGELKNSEEQNPMEAGLAIQSCVYGEAQSDLRXQTWDTLRSLAMNPAQPWLMAGDFNEILVAAEKQGGRPKCQPQMDKFRDTLPDCGLIDIGFEGDMFTWRNNSHTEEGYIREHLDRAVANQEWRVKFPSFRVVNGDPRHSDHRPVIITTCGGRKGVMQRGSSSFRFEAAWLAEEKCREVVSENWEMASTLAEXVMNAVKVVASGLSNXSTNVLGDLEKRIKKLKKELEACRRGNICKEKVVKEGVLKYKLEKLEEQRLLSKVKKKVTEEMNECLMAEFIVEEIKTSIDSIGDLKGPGPD

SEQ ID NO: 197941 - protein, 77 aa, Oryza sativa
  Clone ID: PAT_MRT4530_93650C.1.pep
ENGVLCDTDVYNGLLLRLCVEGHVGEALALAKKVAERGILIEASCADRLMDLLKQYGDEELAPKISELRRCSEVLSH

SEQ ID NO: 197942 - protein, 415 aa, Oryza sativa
  Clone ID: PAT_MRT4530_93651C.1.pep
MKHNNLLVRRAASTTGLLLILLLLVAFTVCNYSSLKLSTRQYIDGTSARSSSTRASYASGGGGGAACDVARGEWVPDPAAPYYTNETCPLIDSRQDCMKYGKPGLESILRWRWRPHGCDLPRFDAAAFLRLVRGKSMAFVGDSVARNHMQSLMCLLSKVEFPTEIEAKDCIHCTRKYHYRAHNFTVCVFWAPFLVRWNLTRAGALQFMDPHNVFLDEADPEWSRGVAGYDYVVLNGAKWFTRPTILYEGGRLVGCNNDCHGGDPNATAATAPPEYAVRASFRTALRALREHPVFRGTVIVRTVAPPHYENGKWYDGGNCLRTRPMRSDETGLPETEAAFHAAQVEEFRAAAAAAAGGRFLLMDVSGMMQMRGDGHPGQYGHWPHEKVGFGIDCVHWCLPGPVDAWNELLLHLLRG

SEQ ID NO: 197943 - protein, 41 aa, Oryza sativa
  Clone ID: PAT_MRT4530_93652C.1.pep
SASVSNIIMSRNHRLHDLIHMLFFSRNLMHHTLSLTTTVHS

SEQ ID NO: 197944 - protein, 71 aa, Oryza sativa
  Clone ID: PAT_MRT4530_93653C.1.pep
MKIIFVFALLAIVACNASARFDALSQSYRQYQLQSHLLLQHQGRRPCSEFVRRQRIIVAAPLWQPATSPLG

SEQ ID NO: 197945 - protein, 111 aa, Oryza sativa
  Clone ID: PAT_MRT4530_93654C.1.pep
MAGGKKAAVAVLLVVMVVVSLSAVAPAAAAGAPFMVCGVDADRMAADCGSYCRAGSRERAPRRECCDAVRGADFKCLCKYRDELRVMGNIDAARAMQIPSKCRIKGAPKSC

SEQ ID NO: 197946 - protein, 75 aa, Oryza sativa
  unsure (1)..(75): unsure at all Xaa locations
  Clone ID: PAT_MRT4530_93655C.1.pep
VESQVLAECASGWAMRDNQSDSQIDNETWAMAFDGTLNSXGAGAGFILTSPAGGQFKHAIHLSFRGSNKTTYKSK

SEQ ID NO: 197947 - protein, 394 aa, Oryza sativa
  Clone ID: PAT_MRT4530_93656C.1.pep
MIMEDLIVSLDPEVTNFVFQQEERLFQMWYPDSFIRIIGTDSLIRTHGLLHRHIKNLALRLFGPENLRREIIHDVQKTVEASLSSWLNQPSIELKEAVSSMIFKVTAKKLISYDSSTSDGKMWKQYDAFTQGLFAFPLCIPGTAFYKCMQGRKNVIKMLKEILDERKNTEEHHESVDFFDVIEEVKAKNPDQMTENAVLDLLFLLLFASFETTSSGITAMLIFLTDNPEALQELIEEHNNIRKRKADKNSEITWEEYKSMKFTSHVIHEALRLASIAPVMFREAIEDVHIKGFAIPKGSKIMICPYTVHLNPVVYKDPNTFNPWRWKWCLQGFHGLWRGAALVCWCSFCQAADGGFPPLPSHKSSWKAIKGGRMALSPGLRFPEGFHIQLFPKA

SEQ ID NO: 197948 - protein, 141 aa, Oryza sativa
  Clone ID: PAT_MRT4530_93657C.1.pep
LQAWQPPRPLRSLGGLHDPSRSRRHRGECKGRATTRYCCSKLRAPARRGEKGFGAGEESREGRSASPGLDLATPLLCLVPSLLGSSLPVAARWTEESTSNKQGNKQPRSHTWRKYEEKSQKLAASNQEVTPTWRISGTTAQ

SEQ ID NO: 197949 - protein, 80 aa, Oryza sativa
  Clone ID: PAT_MRT4530_93658C.1.pep
MDNQSTPIEINLSTHSSIHRHPSVSAQPSSTHIHRQHTGRRRSSITYAGVPREGQIAERRHQRTSSASGELVSVRSTTID

SEQ ID NO: 197950 - protein, 647 aa, Oryza sativa
  Clone ID: PAT_MRT4530_93659C.1.pep
MATIGWIRGYRTSLLLTGKWDKPDPFDGRGLLWHLKMYQEDKYSCIDHSTSYLHVQSVRDFPIEKLNAEVVLVRLDSELICNPLGSCSLSLERTVSTIKYLQKAGAKVLLVTSWTPVLQSVYPVLKSTETFADYMSSLLQVKVVPVNGVPGLTSFKPEGWMQNDIILFENLLNFKGENANCNDFSQKLASGAAIFVNDSFSLSHKMLASTVGITRFCHASLAGFHFEEELMQLRKITDTTRRPFIAIIGGSNFLGKAPALNLLASLCDGLFFVGKLSLQIMNGFGIPVPSCFVEKNSTKEVLQLIQTAHNRNIPIYYPTDTWCLNNKNNNHEKLEILDSAELLPGWTPADIGPSTLEKISSLMPLYKKVLWIGPTCFDLTEEFSGGAAQLGRILDKASHDSCDVILVGSAACKAVKGISGSSSKYTTFKNASVVLEFLKGKILPGVAALDKSYPYQIPWNAIFSDSSQPLVVDIGSGNGLFLFQMARDWEGSNFLGLEMNKKLVVRCLRDVASVDKRNLYFVSTNATSTFRSIVSSYPGQLALVTIQCPNPDFNREQNRWRMVRRMLVEAIADLLQPNGKVYLQSDVESVLLRMKEQFMTHGKGQLVVDDDGGGDHQMDNPFGAASDWERHVLARGAPMYRTMLRKV

SEQ ID NO: 197951 - protein, 971 aa, Oryza sativa
  Clone ID: PAT_MRT4530_9365C.1.pep
MPNNAAIGSIVAAVGVVAVVCAIAAVTSSKKDRNGELTANVRLSTVCSVTRYPGRCEQSLGPVVNDTIDPESVLRAALQVALEEVTSAFNRSMDVGKDDDAKITKSAIEMCKKLLDDAIEDLRGMASLKPEEVTKHVNDLRCWLSSVMTYIYTCADGFDKPELKEAMDKLLQNSTELSSNALAIITSLGELMPAAKSNGSTGAHRRLLGLQGSEAAEGVSLRELLAVHDKVQELTDVKDVSRHLLSETLDAITEMSHDAGRRLLGVTLSEATDDSDDSGLPGRRLLSMSFHDADHGVHGGDHRRLSMSFHDADHEVHGGEHRRLSMSLNDADPEEQGGEHRRLSMSLNDADPEVQGGEHRRLSISLNDADPEVHGDEHRRLSMSLNDADTEVHGGEHRQLSMSLNDADTEVHGGEHRRLSMSLNEAGTEQPSGEHRQLSVSSSDAGSSTDSTSDSDTPGGDPKEPAAVDDSKNAVPGEPAAAAAAEHRQLGTLFNAIHNMTSKADTVKRRLLSMPQDGSDATEHEGGGRALLSIQLQSIADMSAEMNRHLLAAELPDELAGKRQLLSTTLRELNEATTAAKGQLDKIENGTVHSDAIPERILGDEYRATPHHRLLTTDVVGTIEDIEHERHNQPKPGEFPSWVSAHQRRLLQAGTQKPDKVVAKDGSGDFKTITEAVNAVPKNSPTRFVIYVKAGEYNEYVTIPSSLPNIFMYGDGPTKTRVLGNKSNKDGVATMATRTFSAEGNGFVCKSMGFVNTAGPEGHQAVALHVQGDMSVFFNCKFEGYQDTLYVHANRQFFRNCEVTGTIDYIFGNSAAVFQSCLMTVRKPMDNQANMVTAHGRTDPNMPTGIVLQDCRIVPEQALFPVRLQIASYLGRPWKEYARTVVMESVIGDFIKPEGWSEWMGDVGLKTLYYAEYANTGPGAGTSKRVTWPGYRVIGQAEATQFTAGVFIDGLTWLKNTATPNVMGFVK

SEQ ID NO: 197952 - protein, 435 aa, Oryza sativa
  unsure (1)..(435): unsure at all Xaa locations
  Clone ID: PAT_MRT4530_93660C.1.pep
QKPPKPPKTPPPKNPPXKNTNPPPXNKNPPKNPXKKPPPKKKTKXQTPPKKPXXKTPPPQKQKPKPPPPKKXQPNQKNPKXKPKNXNTPQNPTQKTKKPTXNXXXXPKNPPKTTPPQTNQKXKPPHPKKKXQKQXKPPXQKPPKKTXHXPPXXXTPXXPPXXPPPPQXXXSXXXXXXXSPSSTPAPMVLTSAAGRPSPRRSPRLPPPPPPHTPPTATXSPPPPPLLSCSRSRPDLGQPLLPKRXTPPRPPSXPRQPVSARPPLPPADPSLLSSLXGPPPASRPAAVAPPLLPPPXPPAVAPPVTPFASPPPPPXPPNPRGAARSRSPSSRNKSGNKSPTNPXPSLPSTPPPPRLSPPCSSRPPPPXPPDLAPPPPSSTSPEVSPPPPREPPPLPPPGPVHQQMHAPPPSGWPPAPRIPACRRTTSCSRLVGGGAD

SEQ ID NO: 197953 - protein, 538 aa, Oryza sativa
  unsure (1)..(538): unsure at all Xaa locations
  Clone ID: PAT_MRT4530_93661C.1.pep
ELTLHDLAGNNSAATTFTLHLYLDKVLATALVDSGSSTTFISPKLVSGANIPILSHSPLSVKVANGDTLQTSAICHNISYTIQNEQFVSSFRFLDMKGYDIILGSDWILAHSPLTVDLKARELTVFTPLGKAITFSNVTIPPANFVISAHEMDKLLVHDSIGALLYCKTLQSTVXPWAHTPLELLAVLQDFLDVFEEANKLPPHRECDHTIPLLPLTKPISARPYXTSSPQKNALEDLVQQLLDAQTIQPSMSNYSSPAILVKXKDGTWCLCIDYRQLNAVTIKNKYPIAIIEDLLDELQGACYFSKIDLRSGYHQIRMNPAGIHKTAFSTHIGHFEYLVMPFGLTNAPTTFQALMNKILAPHLRKFVLVFFYDILIYSKTLSEYLHHVRQVLHILRTHNLSAKPSKCVFGHQQVEYLGYIITSQGVATDTAKIKVVQDWPVPANVTLLKGFLGLADYYRIRFIKNFGVICRPLFDALKKNNLIGVHNSXAAFEQIKLQLAQSPVLAMSDFSQPFVLEADASGFVIAAVLMQNGRPLA

SEQ ID NO: 197954 - protein, 99 aa, Oryza sativa
  Clone ID: PAT_MRT4530_93662C.1.pep
VQVVPFNISLCTVVGNRIENSRLPIGLLCSNSHHCTECFEKKNTLPCRSNRVVHILTYGLYECAVVPCLDSSSEGFCSSQEIKVLSSHTVHGSREQCYS

SEQ ID NO: 197955 - protein, 107 aa, Oryza sativa
  Clone ID: PAT_MRT4530_93663C.1.pep
WMDGSADRSAGLGVRLRTAPPSSSTDDRSHSSLLCMYDGRILSKMLAEVGDSQTALPLAASFSSSKASLVASVLMKKMLALVIVDGEKLRSCRCRCWTPLFMCFGPH

SEQ ID NO: 197956 - protein, 34 aa, Oryza sativa
  Clone ID: PAT_MRT4530_93664C.1.pep
NRLGSSGPVICYTYNSLVSLDRRWVSHKPPLFCV

SEQ ID NO: 197957 - protein, 236 aa, Oryza sativa
  unsure (1)..(236): unsure at all Xaa locations
  Clone ID: PAT_MRT4530_93665C.1.pep
RKRGLLRQRLGFPVDRAHGGSRERTAEIDPSKTDGRDPSVHDRATGDGDDDVSGDVISGDGSXRRKLVGERRRDDENGGHQDVERDAANSPVTKEMADDQRTATATRKKRRRSSAXRRRRCSGGLQRRRRGGRGRWRLGDHNGDLPERRRXLERRGHTAEAAATTAARGHTTLGRYRRRETKARGATGSGGLGDPFKGARRRRRRPTATGDAKETSGLGEREESDSISNPSISKPK

SEQ ID NO: 197958 - protein, 250 aa, Oryza sativa
  Clone ID: PAT_MRT4530_93666C.1.pep
MEPAFPNGGAAAPPPPMAAEQLPPAAAVVREQDRLMPIANVIRIMRRVLPPHAKISDDAKEVIQECVSEFISFVTGEANDRCHREHRKTVTAEDLVWAMDRLGFDDYVPPLTAYLRRMREYEGGGSGGGGGGGRGAAAAPAVVPPPPPPPPEDAFRYVQVHHPVYAAPGEPVQGYGYPVAMSSALPAPHVHVGVRGGGQHEVFGGGPAPLAVYYGGAPYGEASSRGGCSAADEGSSSSSASPAPVGPNYE

SEQ ID NO: 197959 - protein, 168 aa, Oryza sativa
  unsure (1)..(168): unsure at all Xaa locations
  Clone ID: PAT_MRT4530_93667C.1.pep
SRERTAEIDPSKTDGRDPSVHDRATGDGDDDVSGDVISGDGSGXAQARRRTTARRRERRAPGRRARRGELTGDQRNGGXSTDGDGDEEEAAALFGLTTATVLRRSTATAKGRTRTVATWRPQWRPSRATTMTGATGAHGXSGGDDGGARSHDARALPTARDEGKGGDG

SEQ ID NO: 197960 - protein, 346 aa, Oryza sativa
  Clone ID: PAT_MRT4530_93668C.1.pep
HRAGAACGPGRTELPGVGFPAGICRGRRGRGTSPRHRDACWSPRRSPAGCSRLLARLRGAALKRSVDLARWITEAAFPLIATTMGGDRGKKPVDTPADMLLSSRKRWLGDGGSDRAHGGCLFYETTPSSFTHGSSSSSPNRPLHDRMEVDTKESEIPRQRTENDRKISARIKRSHQARRRQRYEDQEDRVHGNVHFASICPPPVSWLELKHNMEVKLDLNLDDIEKSIVIPRCQEMDTSGNPDKVDKYLVAAKNLTRILNLEHPVLTETGHLRDRARSLHGTTISSIITEFCYLKVWRMTLQASSLRADISNSSEELSIDTTPNLQVAQPGYWVDTSAEKAIIDGS

SEQ ID NO: 197961 - protein, 83 aa, Oryza sativa
  Clone ID: PAT_MRT4530_93669C.1.pep
LDLLLLLLLAAGDGQRPSRPVVGAAVSYTAGGSSRDPVPRPLSRSFSATVARPLSTALFPIPKLIFPEGTLAHTLAQVKGQAR

SEQ ID NO: 197962 - protein, 76 aa, Oryza sativa
  Clone ID: PAT_MRT4530_9366C.1.pep
ASPPGLGGFSSTLLGGFSPVHSGPPEVEMARGFRRGLVVAKRPARANDIQKLGGQFRIRNLGMVVSFSVGVPNCLV

SEQ ID NO: 197963 - protein, 65 aa, Oryza sativa
  Clone ID: PAT_MRT4530_93670C.1.pep
ILYAGILMCYKNNPSVAKLAVELCRSIVVDNERRGPPSCNIHQRCQRMIVQNMFKVPKEWRHACR

SEQ ID NO: 197964 - protein, 176 aa, Oryza sativa
  unsure (1)..(176): unsure at all Xaa locations
  Clone ID: PAT_MRT4530_93671C.1.pep
HHQFRTVLAADLEGISGPMSTCWKAYGVYFQMVVVPHQNSYRATGNLQNKPRISLLGEVIRVSTRVITKGDMVLQLRGSRACAXRSQIYLCRDSAQIXCLSEPFGRSGTLVHIIPTIPTITTIIGRLYKPLAFSLHSQTSSNSSLISLKFSLVVSSWWNRNSVEIRCPEAFGRVRV

SEQ ID NO: 197965 - protein, 79 aa, Oryza sativa
  unsure (1)..(79): unsure at all Xaa locations
  Clone ID: PAT_MRT4530_93672C.1.pep
PPAAGNAPAPKPAAGEPPKEPAPPXKKEGNPPSSSEGFGLPNVIKGAQSLMEKKGAGEKNPGNGGPPGGLFKMAQGFFK

SEQ ID NO: 197966 - protein, 106 aa, Oryza sativa
  unsure (1)..(106): unsure at all Xaa locations
  Clone ID: PAT_MRT4530_93673C.1.pep
MSPRCSTNCPNAGEGAXXGAVXRSSVFGLEIMSRRSHAAARGGSVKILRELIERRSDVSEYLDFRGSTVLHAAAGRGQLEKGRSLQAAGAARVDPPSTGYRIPQVX

SEQ ID NO: 197967 - protein, 78 aa, Oryza sativa
  Clone ID: PAT_MRT4530_93674C.1.pep
RRRIHGCIHDTADHTDSYTGTRSVSTRRCSCQSSFRTHICAHASAHSVQHRILQVKLPWRFYRRWHAGVPPAERCCAG

SEQ ID NO: 197968 - protein, 74 aa, Oryza sativa
  unsure (1)..(74): unsure at all Xaa locations
  Clone ID: PAT_MRT4530_93675C.1.pep
LILIERILDLSYAMAEEGSCTQQDVRSTXACLQDLLALDHRQPRLMXSEIDRQWATIPQGDMKESVPKKLPFVH

SEQ ID NO: 197969 - protein, 130 aa, Oryza sativa
  unsure (1)..(130): unsure at all Xaa locations
  Clone ID: PAT_MRT4530_93676C.1.pep
LVGVKDTVIIQEVAGERSEEAEEAAERVAADSGDEAAPAXVADEDNAVKTTAAVEETTARPDQPCTHHTPARSQIIAEFQIPLKFNFLKRKNRVSSSFTVEEKNQQQLPVKLQDAGEPTRTPEQTVTSRT

SEQ ID NO: 197970 - protein, 68 aa, Oryza sativa
  unsure (1)..(68): unsure at all Xaa locations
  Clone ID: PAT_MRT4530_93677C.1.pep
YASTAGRQLXWTAARGEGAAAVVPACPSSALPRRWGRRWPLLPCSTSRRRLAPRPAVDGAAAAAFFPL

SEQ ID NO: 197971 - protein, 72 aa, Oryza sativa
  unsure (1)..(72): unsure at all Xaa locations
  Clone ID: PAT_MRT4530_93678C.1.pep
YQAAAAADDDEKRWRRSGARALLFLRPSIHRPLPPPPPPPPSPLXPLTRALPPPRPLSRFLSSPESRLRCSK

SEQ ID NO: 197972 - protein, 310 aa, Oryza sativa
  Clone ID: PAT_MRT4530_93679C.1.pep
MESLASQAKPAAVLWLAGFLQAARLHRVVSFCASSRPLSARIAQCFLLNGFISWGGIMVLSTLHLQVRVEYTLYYNFWFRSYPFSICGMFWYYELKHKIFQCNYSLYAFISLNLKYNDIAKHALDVVKRKSLDATKALDAHTISESTEKPEGFDEVAIGIGEQVYSILLLTIFFIEVSVIGYIPYFGKPMNFLLLSLMYAYYCFEYKWNFFAVSLNERLDFFESNWAFFAGFGSPCVLPIFFFSPLTSYGVMAILYPLFVLTAAGTQAEKVIDQLKPSHGGKLQRIPVFFIAKRLTTQVLQLFPEVHKEQ

SEQ ID NO: 197973 - protein, 255 aa, Oryza sativa
  Clone ID: PAT_MRT4530_9367C.1.pep
MRRKYARSAVGGQCIVRTCAGGWHGARDKGDHVAACGGWPVQRYPYVDIDLDDGGAMGFDDEVSERRLRGSGCSGLGGDISSRRQRSVAGWGQPIGFAPHLQPPEAASLLNRRPALLARPTHVPTSSAFPAHPRTPTTLSPTSYFRKFGDLSDFFLDECSFLGGRSGVVPELSGVRPFIVRIYGVRSRCASSEIPLHVSVGRDPVKFVEPILGTHSSDKLRLRDMGENGADALWRSWPRRFTAPRGGSPPHPLGQ

SEQ ID NO: 197974 - protein, 279 aa, Oryza sativa
  Clone ID: PAT_MRT4530_93680C.1.pep
MAFVSAFVSAAAAATTAAAFLPGVSSASRAGTPLLSLQRQPLAGSLRAAAQGSSASSGQVVMESKVKAKKKKGSGAGNLPGAIDAEIREAQDYLAIDEQEPVPENFPFEILDEEGMSVVILKRDYKDEKIEVIVSMPNLEGGPEFDDEEAEGEGKNASKDDEDEEEDESAGDSSVSLKVTVSKGSGPKLEFTCTAFREEITIDDMLIVENAATEGDEKFPYEGPEFTELPVNVQKGLFKYLEQRGITLPTTNYMHDYMVTKQTKEYVGWMTKLKDFVRQ

SEQ ID NO: 197975 - protein, 495 aa, Oryza sativa
  unsure (1)..(495): unsure at all Xaa locations
  Clone ID: PAT_MRT4530_93681C.1.pep
GREARRERDVALHRVTWRREGVRYRLSSSHSTTPSSSSQRRPRRRRRSAAPVVVVATPFPSSSSSQLPPPQQPRRQGGKAAKRRRWPAEAVLGGAAARRPSGARPSPRWLAPAPHRRARPCHRRRRRXGDAAPSPRPSESGKLHAGDLATAAVDAVMCACEVQLLYKLGDNTLDEVKEVVHVKQDAPPPSSFLPNSSVCTYKLHYLSTTWAQVRTIAQVIIVVHAITQGLQSLFVKACGVNISVQVDLSNTKVDYLINSACQKMRVNVKDTYAVLCGKILEYNKPMTFDEKFDDIHANTWFYTVDLVPALQRQTRTNPPVLPWLSVRYFSDFASYNIQKVLNHITAMHWENLSYNGAFNSDNIIFHNGAVTIQGVLTVQFNGVTCAKDFAKLYSIFIAKFTPHGCLHFANNFLKHAQNRFMLHEVEAAFSNCLEEYLPHVLKAIARLAQHNPQGRQYLVDVKQQSGGAANESYLARLMEASWRDGGMLEYKEKQP

SEQ ID NO: 197976 - protein, 65 aa, Oryza sativa
  Clone ID: PAT_MRT4530_93682C.1.pep
SIQSGIETKKLMFIEFPRPTYERGPSHPEPCLKQNLRVLHLRGSGVKVKKPSFGFKGPHLKSLGL

SEQ ID NO: 197977 - protein, 97 aa, Oryza sativa
  Clone ID: PAT_MRT4530_93683C.1.pep
SVDSVGSSAGSSGAVRSEIGGSCTRSLHRYESSAESVCSSLSWLVSPGVSDTSFCCSQGVVSPQSALFASAVASHEMIFFLIIRRIGIGSGIILYNG

SEQ ID NO: 197978 - protein, 63 aa, Oryza sativa
  Clone ID: PAT_MRT4530_93684C.1.pep
CFLFFQGTNHAVQVSRFVPPSSLQPPAPMNLARPSSAFPGAGAMPPNPPGSIRLPFPGPPRPS

SEQ ID NO: 197979 - protein, 79 aa, Oryza sativa
  Clone ID: PAT_MRT4530_93685C.1.pep
GKEALFPPWKRGGGKKKARIWLSIHQKRGSWVLGKPRRGGYGATLTPQTPRRVSVITRAFKEKRINPQTNPHPTWILGG

SEQ ID NO: 197980 - protein, 67 aa, Oryza sativa
  Clone ID: PAT_MRT4530_93686C.1.pep
VLASCTNPYASLQLPPLSSLSRLVLDLSLQSYSSNLRHLGFRCDPGFRVSSSQFVVFLLLLVDFGPI

SEQ ID NO: 197981 - protein, 107 aa, Oryza sativa
  unsure (1)..(107): unsure at all Xaa locations
  Clone ID: PAT_MRT4530_93687C.1.pep
KSXYXVHTHVXXXXISCXKCXWTXSSSXXAKXTXXXDXXVXTXINTXVLXPSXLVSGHHXFALXXXTXXXXXXSLPLHDXNTSFYXMEDCTYVHHGXFIXDXLQTEP

SEQ ID NO: 197982 - protein, 51 aa, Oryza sativa
  Clone ID: PAT_MRT4530_93688C.1.pep
HVLHAGGRGMQPGELATGALGPLQVLCHPPPVINVPPYSRLGVRAGCHLVV

SEQ ID NO: 197983 - protein, 81 aa, Oryza sativa
  unsure (1)..(81): unsure at all Xaa locations
  Clone ID: PAT_MRT4530_93689C.1.pep
REVVSFRPKFPSALDNHSRGPRGALQAAGALLRHHPVNLEPETPVQRWLDDVANLVTTXSSSARRRARRSATASRRSTAPT

SEQ ID NO: 197984 - protein, 106 aa, Oryza sativa
  unsure (1)..(106): unsure at all Xaa locations
  Clone ID: PAT_MRT4530_9368C.1.pep
FFFFFFFFFWXHVSXISGSSGRNDXRSKGIPGLXSAPQREDNRXFCLLNKSIDPNTPVAPAQNSSRKXTHIXHEKKSMLLSFFDLTSXGLAVVYFLLDLXXKVXTS

SEQ ID NO: 197985 - protein, 46 aa, Oryza sativa
  Clone ID: PAT_MRT4530_93690C.1.pep
MVPGSNATPTQMNGTGSKKNSKFRGTRSAKQYWCPHEAHMVYRPVV

SEQ ID NO: 197986 - protein, 741 aa, Oryza sativa
  unsure (1)..(741): unsure at all Xaa locations
  Clone ID: PAT_MRT4530_93691C.1.pep
MAEEREIFESQWAPSDVTEENLKEMVAHGVLPAKEIIGWRPAYGEAFPTPDTHEVVMFSHFFYGGFSLPTSKFFRGILEFYGISLHHLNPNSIVHIAKFVHACEAFLGIRPHFALFCHIFFLKPQPNKNKPCVVGGADFQLRGTLSQKYFSMPFKTSKKGWHANWFYVQNPEPALPEYSCLPPTYQETWNSLPMGDEASQALTLMECMLKLKEQGLQGEQITRHFIKSRLATIKERSRTAFEFDGKNDPNREDPESLEFKIMKERMPKIFSTSIVVSYSHILPVVPYNAFNPPPQEFSLMKSDLLTAQRRSPRQHGQASGGPKIQPTPQPSTPKPTNQSGSQKKKLVLSDDEGNNAKKASNKEATGKQPRQANPPKMKTSSRPIPKIKKSSRKPSNIDPSGKDPKSTDKEEDRPTGSQSATDNVETGNEPSTGNQSAEAETGANQEPPTRDQPGVEQNKDIPETEGQASSPPLNDTNTGPEASTFDKRIHLRNEEKTATLEKLVPHLGTLEATRAQLHETRELDSKTEHDLRDRLAELQEVNFELSGSSKGCTTVXQTAKITELEKXIKALEKDKDELTKHRDSALKDVKDPQDXSQAQFEVLVNKIKKLEGXRDEVSNAXATPLVQATFFNNNGPSSFDAVEIIXKLRTTPDIYVKNIKEAGXMGASMALASXTNLLYPKININDIDAFAAGTSEEDALEXIYDAQKAAVKIVCXTLRRRDFQDSNLGXPGADITDDEKT

SEQ ID NO: 197987 - protein, 44 aa, Oryza sativa
  unsure (1)..(44): unsure at all Xaa locations
  Clone ID: PAT_MRT4530_93692C.1.pep
FFFFWXKCLSIVRXGVKNVHAKKSICRRPKATKILDHEISMSWY

SEQ ID NO: 197988 - protein, 65 aa, Oryza sativa
  Clone ID: PAT_MRT4530_93693C.1.pep
MECQNLNLAAGDVVAGQTVHGSVRPPSARSDRLWLWRLCIATKNQTSVTDQWGRSNRLYHAGQTN

SEQ ID NO: 197989 - protein, 104 aa, Oryza sativa
  Clone ID: PAT_MRT4530_93694C.1.pep
QHFFPPMLIGGKPTDPLKLLIHPFFLKQAFLPKIKPMVTSQKSNNPGGWFKKIPNQHLNKIKRPGMETRAGIGTQRSLLTNKTLNIFPQTNLFPREKNGQVNFL

SEQ ID NO: 197990 - protein, 517 aa, Oryza sativa
  unsure (1)..(517): unsure at all Xaa locations
  Clone ID: PAT_MRT4530_93695C.1.pep
PSLSHDPLPLSHPIILSSRRERAAAAAGARALLPLVVPPPPLRRKPLHRTLARLAARHGGAVFGLRLGSRRVAVVSSAPAAEECLGAHDVAFADRPRLPSGRILSYDWSTMGTASYGPYWRHVRRVAVTEILSARRVQHFADVHVREARAMARHLHRAAVRHGVGGAARVRVELKSRLFELLMNTMMAMIXATRRTTASNDDDGKVSKEARWFREMVEETMALTGASTVWDFLPAALRWVDVGGVGRRLCRLRKSRTRFLQGLINDERKEMEQEQGGDRAQPAASRRTMIGVLLSVQRQDPDACPDQLIRSLCISSLEAGTDTSADTIEWAMSLLLNNPNVMRKARDEIDAFIGXTSRLLEASDLTKLQYLQCIIMETLRLYPPAPLLVPHEASTDCSIAGFHITRGTMLLVNTFAIHRDPQVWNEPTSFIPERFENGRSEGKMAIPFGMGRCKCPAENLGMQMVGLALGTMIQCFEWERVGEELVDMTEGSGLTMPKEVPLQAFYQPRASLMHLLY

SEQ ID NO: 197991 - protein, 166 aa, Oryza sativa
  Clone ID: PAT_MRT4530_93696C.1.pep
RAVSGSAWNKAKTGAGLWAAQDNALSRAAHFYDSPVLADYARVQVARVNGNQMSLVLDIPTPEGIELLGAELPDGDGGVDPAVTEPPPADWVTWLLAATPVRQGWSHSLPPHHHHRRRYSRPATFSSLLEAAVTGEDRDAAIPGCFLAIVSAGGAACHSLLRDRDG

SEQ ID NO: 197992 - protein, 79 aa, Oryza sativa
  unsure (1)..(79): unsure at all Xaa locations
  Clone ID: PAT_MRT4530_93697C.1.pep
ASHASVLAPPKVITAQSACVEQENVVLVARAAKLVDRWCSVNKVPRYNERVPGVSMNIQKECPPFDPLLXRPWQIPCAT

SEQ ID NO: 197993 - protein, 51 aa, Oryza sativa
  Clone ID: PAT_MRT4530_93698C.1.pep
LGVEYLSDVASQLGYSSIDSVTLEDMVLEIVRQIERLIRAKSMMEAAGKPF

SEQ ID NO: 197994 - protein, 126 aa, Oryza sativa
  Clone ID: PAT_MRT4530_93699C.1.pep
MHLRPLLSLAWLLVAALFLLQSSPTSSSSSPPPPPPPPPPSGAAAGEDNGGGSAIWAGVVAADTGGGGGEKAAQRRSLRRVGLHRTPPPPTSNDGGIESISPPPPPEQDGQFFSSTGYPTRPPPAS

SEQ ID NO: 197995 - protein, 61 aa, Oryza sativa
  Clone ID: PAT_MRT4530_9369C.1.pep
ENLKRKKGCWESKCIHRYLHLKSKCCLGRRGQGEEELGSALDDVLLDPNTGKTVSQLRNSL

SEQ ID NO: 197996 - protein, 90 aa, Oryza sativa
  Clone ID: PAT_MRT4530_936C.1.pep
TILFVYSSKFLSRNVGIAEVIPRSWLSFVSCILPPTWVCNQQTRQVRKSYMLARCLILNFLLSNCKRFYTKPIKCLGCVPVNDLKIFWVL

SEQ ID NO: 197997 - protein, 99 aa, Oryza sativa
  Clone ID: PAT_MRT4530_93700C.1.pep
MAASHSLPLVDHRLPLRGYRSSKSLRKPLLPPPSSPSLAPRSSPTRFCCPGMEVEVRVDGLQKFADQPRPRHAQCLNTGNSLEPQQKEEKGRRKREKRE

SEQ ID NO: 197998 - protein, 75 aa, Oryza sativa
  Clone ID: PAT_MRT4530_93701C.1.pep
MRPGQAEVSTHGDPEGTGQRLISLHSSLQDQGQGHSYPTRLHPRPIAIPNREGMKRRQRRKNSFHKKIYYVPIER

SEQ ID NO: 197999 - protein, 103 aa, Oryza sativa
  unsure (1)..(103): unsure at all Xaa locations
  Clone ID: PAT_MRT4530_93702C.1.pep
SSRDDHRVYRSHGAQDYGDKDYTEPPAVTLIETVQLXSCAFYHAXIAELMVTFLLLYITVLTDMVVINYTFKCATVXLQSTVCAFESMIYVLEYCTHGYANAT

SEQ ID NO: 198000 - protein, 251 aa, Oryza sativa
  unsure (1)..(251): unsure at all Xaa locations
  Clone ID: PAT_MRT4530_93703C.1.pep
TPHGHHATRRGNDNDERARRRRPGTTEANGEGATSAAIFGRRRDAAGTRLGNAEARTKTTTGXAALEGVRTTNENGXRRDERHDDRERREDDDRNRRGGNKGSRQXLHGDEDGVECAACRCDAEGGDGDVGRRTGTAEGTAGGDVDEEEGEVGAAAAVFRRIRGQAGVEGESATSTKETATSADALARRLGDHGEARDEAKTIERRMRIPFYRGGEGAGHGRGRNGDGKHGRRPWKAAGNGAAVPGDWGRH

SEQ ID NO: 198001 - protein, 336 aa, Oryza sativa
  Clone ID: PAT_MRT4530_93704C.1.pep
MDSRRESSETLRNKCAACYRQYNRMEHLVEHMKVSFHSAHEPRCGVCAKHCRSLESLREHLIGPLPKVECARVFAARGCSICLNLFDSAAAVRYHRASTCQFTRAAPMPRGSYGGRAVAMACKMVGGGSDGSLDICARVCLIGEDENVIFQTYVKPTTTVTNYRYEMTGIRPEYLRDAMPLKLVQRRIQDILCNGEPLWKIRPRSSGRARILVGHGLEHELERLGLEYPAFMIRDTAKYPPLMKTSKLSNSLKYLTQAYLGYDIHTGIQDPYEDCVAAMRLYIRMRSQAHPRDYASGSGETQNNYPAWRQRELERMSPEELLALSGSDYYCWCLDF

SEQ ID NO: 198002 - protein, 69 aa, Oryza sativa
  Clone ID: PAT_MRT4530_93705C.1.pep
MRATAAWDVDGRDRRWRVAWPPSGIPGRERDHAAPGPPGSGAQEGVYVEGESGTRKCGGARSRCGGDKC

SEQ ID NO: 198003 - protein, 170 aa, Oryza sativa
  unsure (1)..(170): unsure at all Xaa locations
  Clone ID: PAT_MRT4530_93706C.1.pep
MQHLVNTSKSETKVHPWLTPLLLLHLEPATRSDLRLTIINLATSRSRXIACRLLSRRTTRALHLAISLSNAAHRKAWATPPRVFDSTNRERXSSPASINPEXSRLTVSPLKVAHRKVRATRPKCPTHRLVRQSLLPPSTRAPRLVVSLLIAAIERFXRRLKCLIPPIKFR

SEQ ID NO: 198004 - protein, 86 aa, Oryza sativa
  Clone ID: PAT_MRT4530_93707C.1.pep
CWWLHLPSSTSPLPITAIMTARSAGLASVKAAATMTSATSTAAATAVHAVNGASAIRAAHEDDEWIDGKLNARKPYTNIYLLYIHE

SEQ ID NO: 198005 - protein, 374 aa, Oryza sativa
  Clone ID: PAT_MRT4530_93708C.1.pep
MALLPCIAIAVLLSSSLAAAVTGPPGTIERVVKQQILASIPPGGHGAGDVHPPVLFLTSPSGKYAAYFVRSHTVPGAGGLGADFCYVEVVVNKGGEGDAAVAAGGGMSVWESECRPVSTVNTCTLLFSWHGLEVFDGSQEVWHGETNTDGTNFLQRLELVDDGDMRIRDKDGELAWRASDEPRHAQHCGAPGSPGLATAFPPFAEPIGAHSSDLPFGMFPGGNGRAAELPQAADAAAGALGGVGAVAPLPGAVGGAGAVAPLPGAAGGDAAAAPLPGDMGGDAALAPLPGALGGVDPAFSPLPGDLPDPAAAAAAGGAAAGVGGVGAGALGAGAVGAFGSQPLVDNSPYDSGAWKVDGHLVAIVVALGVVLGAI

SEQ ID NO: 198006 - protein, 66 aa, Oryza sativa
  unsure (1)..(66): unsure at all Xaa locations
  Clone ID: PAT_MRT4530_93709C.1.pep
RNLRKIDADIGVRFTRSPGSDVLDGVHSHYNFIARGIINHGGPVGSAGWVNVCILYLLXXAXLFFV

SEQ ID NO: 198007 - protein, 41 aa, Oryza sativa
  Clone ID: PAT_MRT4530_9370C.1.pep
TQKCRFHVFLQLHRVNHISFLYTLHTLLFSRVHIYTLHFIP

SEQ ID NO: 198008 - protein, 285 aa, Oryza sativa
  Clone ID: PAT_MRT4530_93710C.1.pep
MHKGDSVPWIDCFHDHYGWSALRDLGDLSWLDTIIWKDIITGLTHFRSVSKSIIGDGRSTSFWFDNWIGGDALFQLFPALFSHATRPNISVAEALATPELLLHLRPRMSTMATHELANIQALPIWDNQAQVKCKIFLWTTHKRRIFTNERRAQRGLAASARCPFCSSDEDVEHLFLRCAEVATIWHTFGLDEQQIASLPQLEGVWDIPPPGQPATPRVWRTILLAVMWNIWKGRNNKVFNSVDEPATLVLRCCASDIDLWSHRCKNAESKQQLRNWASYLSVINS

SEQ ID NO: 198009 - protein, 106 aa, Oryza sativa
  unsure (1)..(106): unsure at all Xaa locations
  Clone ID: PAT_MRT4530_93711C.1.pep
PQGGPLTPPXXNVGVYGMVISPPPMIVGPVPNPFGNGFFQGDPHAPLEAPPPCPGVFAKGGYPGFPGSLLVDPATGASFNPNGGPGRKNLVPALVNPPPWACSPLG

SEQ ID NO: 198010 - protein, 970 aa, Oryza sativa
  Clone ID: PAT_MRT4530_93712C.1.pep
MGDSSDDDFQSAAAKKMEAVATYWAAVKKDDPTLNRFALSNLESKVFSWSIRDIFNRDLLKHQGGYAYLLAVVRANQPSGYSSQVKRIPDTFSSLESYLDSFTCPLVEEVHADVFSSLDGYAHANFIEVVRMEKLDNEKFIFGFEVSEPSKDEKSRETYDPTEGDIIAMSTQKPKHVRFSNVEMMRFPTDCCIVQLSSSIPVEADPETKMPKGAIFAVFLINMKTYNRIWKCLRLGANDGNLANLQNKSSTNMVNLVRQYKPKVVEDNSSQVSQCLKHGSMDFLGLEKLNLNASQLNAVADCVSVMENQLSSLKLIWGPPGTGKTKTISTILWAMLIKGRKTLTCAPTNTSILEVASRIVRLVRGCSDGSACFLSDIVLFGNKKRMKIDDGHELSVIFLDSRAERLLPCFVPNTGWRHCLCSLIDLLENSVTKYKYYIEDVLEKRKDIEKETAEKDQGENVPWRMQFGNGSCEKKCGRPEDKEEASRLLPFKYYLKDGYNNLSQNLSYCIEILYNNHPRNSGTERSFQCMLEVLELIKILHGMINCYKGNADIWSDELLETMIEEDSDPVLWSEQLVSVQTSTCIKSKFRLARLLSFRLYNVPMDVSPSGICGPFKQPEKANLLEMLIVDEAAQLKECETLIPLQLPGITQAVLIGDEYQLPALVKSKIADNAFFGRSVFERLSLLGYSKHLLNVQYRMHPEISRFPVATFYDGKISDGSNVTSKNYERKFLASKIFGPYSFINVDGGHETAEKNGRSLKNTIEVATVLRIVQRLFKEAVSTQSKLSVGVVSPYNAQVRAIQEKVGKFIKNGLDAYKPAKVSETKAKLPFMRSLKLARFSLSGRLKYRMASVSRLVCSVVTRVCRRKKTMCVTVSIVLLTILLIFRGYTVSSVHRRDSDQPLDIPCLLLSSLARVRKQVSKMSARNKSRRQKQVKKSECVDAIQSVVNYWEKLKKRDSSLSKFALSYLVR

SEQ ID NO: 198011 - protein, 647 aa, Oryza sativa
  Clone ID: PAT_MRT4530_93713C.1.pep
MDRGEPSLKPEWLVRGHGAVAATSLWTGTSSPRADDQGRSISSRNQSSGRDRERSSQQSISRRSSGSIGPRRHDRDGTAKSRGYASFGRSNRDRGGEKDSESRNWESRLGPPDDPLYDGFKPFSSCRPERDRLNHTRLKVDTLNQAVGESLDNGVRSVSRKVSGGVSFEREFPHLGSDDKNGKQDVGRVPSPGISTPIQSMPLGTALDGRSSVLAEVPVLSGPTNCPVPSSLLRTGSSKQMEVPNCGTALSMAETVMQAPLKISTTPQLSIDTHKIEERTMKQCILRPRTPSSNKISNSHRIKSPHSGKEKQSLELYVSSSSDKLKSKGARAGDSNGPVKGTMQLPLQLSGSFIRAPVKHELVKPTQSGSFQVLSREQNGTVNTAKESTSNPASPVLGRSYSVEPLRKPIVNQKLKGVANGLPLQLQGSFGERKSSAKDKHKFFELLRSKSLNGSCTSTVSSSTLLDEQNNSCLELFDSGVKCMEHGSSSCEEANSCEGSQQHLSDNEEINPPWEPHDVFDEGMQEVLSDNRDFNSSSEIADTQDVYMKPHTNNAGSSPSIIPAEIYDGSMGSNCSDDETVMLFEPIGTGEEESYPAQDRPSPEEMAFLVSLGWKEDEIVPPLKQEEIADCLCHNVRLQQKLEECRG

SEQ ID NO: 198012 - protein, 105 aa, Oryza sativa
  Clone ID: PAT_MRT4530_93714C.1.pep
IRGFPPGNETRGMTYMTFQIHNSNGSRNDQTGRLEHNGPRLLAETTRKNERDYGTGGGDLQRVVWTGEGGKKKSNHSEPDACPEGARKIAYGSRKGTRLGEPNGG

SEQ ID NO: 198013 - protein, 90 aa, Oryza sativa
  Clone ID: PAT_MRT4530_93715C.1.pep
FKFGKKFLVLYRKFNFLPNTKGGVFQGGVFFFPPFRGPGVYPGISGRVLGGFQFFFFGGVFKVGGNKGISFFLGKIFFRLNFQKNYGREN

SEQ ID NO: 198014 - protein, 273 aa, Oryza sativa
  Clone ID: PAT_MRT4530_93716C.1.pep
MGNCLERSLGGGGGGAHCDAGKKKRAVLVEEELAAAAVEEEEEVRKQGGEKVTEVKIRITRKQLEELLRRLEEGSDGGGGGGAVVSELLCMTSSCNFRHRPEQWRPSLHVIPEDKLRVGFLGRTQSDKAAAVPEWRSAVARGEAVAGAEHTSIVPGLRRRRSDEDDAAVPERRSAAVRRPEGRRRRQGRSTPPSCLCSSDGDGDGGSESEDMATGGDLMRMQLFLAEVVHLVLLLVWGRRPELRVVASAGVEEEDGGIKHVKHSSVRRCNTVR

SEQ ID NO: 198015 - protein, 73 aa, Oryza sativa
  unsure (1)..(73): unsure at all Xaa locations
  Clone ID: PAT_MRT4530_93717C.1.pep
LLIHSALPWPRXAPPSPPPSPPPPPSPSPASPPPRRTPSPSPXLPPXGPPXXXPPHPDPPGPASSSAPAVVDD

SEQ ID NO: 198016 - protein, 120 aa, Oryza sativa
  unsure (1)..(120): unsure at all Xaa locations
  Clone ID: PAT_MRT4530_93718C.1.pep
MAKILPPQIIDEASLQQGRVDCKNAPIVRPIVYGNEARYFXGKKREGDGHTHEWKVYLKPFNNEDMSTWIKKVHFKLHDSYXNPNRIVMNPPYEVAETGWGEFDIVIKGYFLDPNERPVT

SEQ ID NO: 198017 - protein, 820 aa, Oryza sativa
  Clone ID: PAT_MRT4530_93719C.1.pep
MVCRRASIPAATEAAAVASWPLGPLALALALAILSAMPHVALSQNLTCKDVPFPFREERSGATSVPGFMVTCGRNNEAMLRIGEHIYKIDKVSVPEHFITIRAGPIQQVCYDRSRRPKQIKPITRVDPAPAPTSLQATPFTFSRRNKLVATGCNYRFFANFTSSSGGGDGTPTSCDTWCNDGSSDTIFNGSCADKACCTTEMQMDGAQEFNLTLKPSGNVEASTCSAVFFLDKDEQVFTSAGDGRNMALKEALVPLGYRKMFLDWAIPGNCEQNSVVTVPVWQHEHMQMKGTRGTRTSKTGAQLRTIYEDINECRDMNNNNCSRDATCTNTDGGFTCSCPKNTVGDGYRAGTGCSIDSLPPSGLDVCAHPERNPCMYPEYCKDEQGVTSCACPEGRNGDGRKKGSGCKRHFPLDTALGVGLALTVTLATTLLCYYWTMKKRKVARKRAELFRKNGGLLLQQRFLMITSQGEESSAKIFSAEELKNATDNYSDGRILGRGANGTVYKGILPNRTTIAIKKSILFDESHVEQFVNEITILSQIDHPNVVKLLGCCLETKVPLLVYEFIPNGTLFQHIHNKRTLTWEDCLRIAEETAGALAYLHSTSSTPIIHRDIKSSNILLDENFVAKIADFGASRSVPSDHTHVTTLIQGTIGYLDPEYFQTSQLTEKSDVYSFGVVLAELLTRQKPISVGRPEESCNLAMYIVILLNERRLLQEIEPQILVEAGEEQIYAVAQLSARCLNVKGEERPVMREVASVLHGLRESFDEEQIIRSDESIQIINEQESVHSEARPISSLQSSDETSTTQYSLPSEILSASHLER

SEQ ID NO: 198018 - protein, 221 aa, Oryza sativa
  unsure (1)..(221): unsure at all Xaa locations
  Clone ID: PAT_MRT4530_9371C.1.pep
PILCILTPTVISQLLLVWDAVLPTXLLSGVEDRFVWCWTSDQCYLARSAXQAFFFGXHSFACANLLWHAKGHAKCKFFLRFAYQQRCWTADLFQKRGIDSHYVCPFCAQEFETANHILLDCVFPXRPXHHVLSPEGWTALLSGGNLLKDWWSSGRTCLPKHLRACFDSLVLLISWQLWKXRNSRVFDSALSSVSVFIESIHSEGCLWFSAGITAFEGLLGV

SEQ ID NO: 198019 - protein, 99 aa, Oryza sativa
  unsure (1)..(99): unsure at all Xaa locations
  Clone ID: PAT_MRT4530_93720C.1.pep
MKLSMKRPPYNRTSRMSLPFPGAPELLSLLEIVXTPGVHEDXSLWSGYCQCEVVERLCRDAFHVLGRGSYVGQSRSAGKVYIHCSVSKQNKRTQLQIES

SEQ ID NO: 198020 - protein, 656 aa, Oryza sativa
  Clone ID: PAT_MRT4530_93721C.1.pep
MGPPELVRSAERKATRVARSTLSSLRREKREEARRRRMRLGASATKWRQSFPTVEGDLGVDKVEVAREGVSEHSYNTEQAPGWGKRRRCSSARSAATGEVARDEDFRSRIGNDGRYFDLVDFSAIDVFYVPNSLTVYEFKIPYRFNLSQGTLMEKFGTPVQCQHLWWWARRLNKTYRVDRPLTTEEEKLSVCSKKYSFHFGLKSAVLSKKSEKEGCSTLIPNHSEINEDDALVFLKLFDPEKAQLQFPDSEINRFISFVLVSHFDKQEIKFDPSVMCEAIDIHLTFSDSGITTGDIICYQKSLPQNWRIYSSVASFLQHVCDHKEEEWKRHILEEEIAVLKRQADTDRLQKDESMTAIYKPHLCNEVCDQLKHERDNAVRQVNELCDQSTPVILNFSRKDLEQAIEHFKNTGDFGDTEYGHLYKGMIHYTIVAIKLSSSQSLFQQEPTALVHSDLRPCNILIDANYRSKLCNFGLSNLFLQPGTCPPNLMARLPYMDPEFNTTGELTTLSDVYSLGVIILQLLTEMPPLTLSEKVAEALESDSLHLLIDKSAGDWPYIQAKQLALIGLSCTEMTRKKRPDLLTKVWKVVEPLTRKPLAATWPYLQSATGDSCVPSAFICPISLEIMKDPQMASDGFTYEAEAIRSWFDRGNILGLR

SEQ ID NO: 198021 - protein, 131 aa, Oryza sativa
  unsure (1)..(131): unsure at all Xaa locations
  Clone ID: PAT_MRT4530_93722C.1.pep
QIQVGVAYSPRWRRMLGDVPTGQGLPAPTPPDTGRDMGALLAVPSACXSVTDWSRPIDACQSGGASRGGRQATWPRGKVEWLFPSTVHAPGPISPIDYLCYQPGLKIIFSPGSNAVRVSWRLDSLVSRHRR

SEQ ID NO: 198022 - protein, 58 aa, Oryza sativa
  unsure (1)..(58): unsure at all Xaa locations
  Clone ID: PAT_MRT4530_93723C.1.pep
MLGDVPTGQGLPAPTPPDTGRDMGALLAVPSACXSVTDWSRPIDACQSGGASRLPTPY

SEQ ID NO: 198023 - protein, 141 aa, Oryza sativa
  unsure (1)..(141): unsure at all Xaa locations
  Clone ID: PAT_MRT4530_93724C.1.pep
SRSHGPSKYKFFTWLVLQNRLWKTDQVQRXDXPNQRICPLCXTCNETAIYLIAHCQVTKRISGAIARWAQINLQMEQXNTIDMVEXWWATLAHTTGILKNTLRSLILLVSWEIWKKRNAYACVPGFQRITLTPTIIIAKIK

SEQ ID NO: 198024 - protein, 112 aa, Oryza sativa
  Clone ID: PAT_MRT4530_93725C.1.pep
RFLITGCPHRRQPSDPPPGRRHRQPHKQQHRAGRLGQQQPRRRQAAGSRRQQPWPVAGSPVRFSGGDAALSRSSSGRGVTSSPPTTDDDVSAAMEQCYYHGISEPHSSSLTG

SEQ ID NO: 198025 - protein, 76 aa, Oryza sativa
  Clone ID: PAT_MRT4530_93726C.1.pep
MDATTSSGASSSLPLHLIIDDALALVSPLQQSFQRSQRHCFGGSAPGEFPLAANPSIVLHVLTSCNLEPDDLAHLE

SEQ ID NO: 198026 - protein, 164 aa, Oryza sativa
  Clone ID: PAT_MRT4530_93727C.1.pep
RYTTTSTTTRGTIMLSKQLTSRLKEEQEKDQHQLNVAQCDRLIRTVSCKHEANHAIKKVNINVLQLFDDIRLYVPPSYVVLTSGKTSGPGSRSGEQSPPSVIVADQKESALSSPSKSSETQAQPATSTTGEVLEVNFKDVLAHIIDSLSPSNVSSWFSLTLRRL

SEQ ID NO: 198027 - protein, 110 aa, Oryza sativa
  Clone ID: PAT_MRT4530_93728C.1.pep
DGASVGGAFLPWHCRRSIPNKVTKTTQISAKYHQMARATKGSGKKFYIRRGDQDVRGGGGLYKHKLQGGVERWWQLQLHALACALPSRGSHSFVTNLPRIIGSEWLAIIT

SEQ ID NO: 198028 - protein, 52 aa, Oryza sativa
  Clone ID: PAT_MRT4530_93729C.1.pep
YDSPIGKAGTPCHGTGPEFPGRPTRVRRNAWEIYSPFKRYFRGMGPKKKKKK

SEQ ID NO: 198029 - protein, 611 aa, Oryza sativa
  Clone ID: PAT_MRT4530_9372C.1.pep
MQQLQARRRRGAPGGRRRITHGAPLLAAVAVLLCASVRFAGASPPPGPVRCASGTANCTVTNAYGAFPDRSTCRAAAAAYPASERELLRVVAGAAASRTKMKVATRYGHSVPKLACPGDGGGGGGGLVISTDALNRVVAVDAGRMEITVESGVTLAELIDAAAGGGLALPHSPYWLGLTVGGLLSTGAHGSSVWGKGGAVHEYVVGMRIVTPAPASEGHAKVRVLAAGDPELDAAKVSLGVLGVISQVTLKLQPMFKRSVAFRRRDDDDLAERVAAFAGEHEFADILWLPSQGKAVYRIDDRVPNTTSGDGAVYDLVVFQSSPTVAIQANRIGEDALEATANSAGKCLAGSATIARLAAGNYGVTRRGVLPPPPGAAVVGYQNRIQSSGSCLSGADDGLLTACTWDPRVRHNSFFFQSGISVPLSGAAAFIRDVQRLRDLNPDALCGLEVYYGVLLRYVRASTAHLGKPEDSVELDLTYYRSRDPAAPRLHEDAVEEIEQMALRKYGGVPHWGKNRNAAFDGAIAKYPKSGEFLKVKGSYDPEGLFSSEWSDKVLGVAGAGGVSVVRDGCALEGLCVCSEDAHCSPEKGYLCRPGRVYKEARVCRRVAGDH

SEQ ID NO: 198030 - protein, 44 aa, Oryza sativa
  Clone ID: PAT_MRT4530_93730C.1.pep
LMELMTLTGLNMGSSCFHERKNTHTLMTYEEADQCSLIVSRRRH

SEQ ID NO: 198031 - protein, 73 aa, Oryza sativa
  unsure (1)..(73): unsure at all Xaa locations
  Clone ID: PAT_MRT4530_93731C.1.pep
LNTSNHASKPQHSQIKDEATKLGYADNTTTXXEGLLNPXNPXFPIRPGFNRDISQCAVPFYWAAQFTGAICAS

SEQ ID NO: 198032 - protein, 30 aa, Oryza sativa
  Clone ID: PAT_MRT4530_93732C.1.pep
VTAAAKLQIHDTPRKGRRGRLRKSEKRKRS

SEQ ID NO: 198033 - protein, 52 aa, Oryza sativa
  Clone ID: PAT_MRT4530_93733C.1.pep
EKNLLASMHPLDVMWLSDHVEMCGAVLRYTCSYYSLFSEGMLHGCLCKKKKK

SEQ ID NO: 198034 - protein, 54 aa, Oryza sativa
  Clone ID: PAT_MRT4530_93734C.1.pep
PPHPDVLSPHKESKICLSFSSAHTPHVSSTALRPLSACSASPTPPSPLRRETQK

SEQ ID NO: 198035 - protein, 54 aa, Oryza sativa
  Clone ID: PAT_MRT4530_93735C.1.pep
LTEARARLICTWPETPQNVTAAACGIHSFARCSPMSSTSSLPKPQSWRTRDPMA

SEQ ID NO: 198036 - protein, 220 aa, Oryza sativa
  unsure (1)..(220): unsure at all Xaa locations
  Clone ID: PAT_MRT4530_93736C.1.pep
MERTNKKKSRREPLPPFHAVAGAAAGLPTPSSGHIWEGGGEGSRRRRPPPSLLRPDLGGKGRGAATAVATAXPLPPPPASPLPPPARSGREGXEGSRRRRSDRAAAAPRCCRRCRRSPSLLRPDLGGXGEGEPPPPGPRRRRPXSAAPPRRCCPPPPPPPGAHAAAPLGAATASGRRPGRGERRRGEGRGEAGEDSWRGEGRGEEERRSFGSKGYVRLRK

SEQ ID NO: 198037 - protein, 55 aa, Oryza sativa
  Clone ID: PAT_MRT4530_93737C.1.pep
MVAGVEFDLNQAKMTGGYRGGSLVGSFAIAYLCDTFAYDTKAFVGLIPKTVFYKE

SEQ ID NO: 198038 - protein, 231 aa, Oryza sativa
  unsure (1)..(231): unsure at all Xaa locations
  Clone ID: PAT_MRT4530_93738C.1.pep
ILPPIAGNARAKCGQIPWAGAAYTAAVPTSPVAGSLSSPIKWNPLAPFSRFSPLPRSPVVPSHLPAVALLFPPRRALPAASPSSTVRRPAVPSPSPASQQLLLPRPALRFARXPPEARSRRRPVALPPLYHLKPPLPRRSDHRRAAPASPSSSPEFPRSTASPSSPASQRQASPSSSSSSAPRRQALCRPRLAFVQGSPPKSFPRRSPPSSPSCLRRARSSLSFPCLVAWW

SEQ ID NO: 198039 - protein, 93 aa, Oryza sativa
  unsure (1)..(93): unsure at all Xaa locations
  Clone ID: PAT_MRT4530_93739C.1.pep
DHLIMLXLLXQMXDHRAHTTXNYDFXSGDYQMXQLGHKMYGQDSPSSDXGQSHQEESAMNVSSPNXRHTSTXSDNDDGHQMPXQGKQRQYHRX

SEQ ID NO: 198040 - protein, 53 aa, Oryza sativa
  Clone ID: PAT_MRT4530_9373C.1.pep
MIQLKKKIMRCWGPDAMAIKDMGVNLSTSRATTNGKDGAMGEILLALSPLPIP

SEQ ID NO: 198041 - protein, 265 aa, Oryza sativa
  unsure (1)..(265): unsure at all Xaa locations
  Clone ID: PAT_MRT4530_93740C.1.pep
MACPPFRAVTAGGAFPPSSSGVAAIIPPPAACAASPVQRLSSSPSSLDIAASPSTPACPRFRRNAVVPRRPFHPPRWSSFGNPFRRARVPADVAVSTSGIAAAXRRVPRRPRLRAAAAGCPRRLLAGPGRRRRRPLVVPGRRGVRPSVEPFSSVVRVRQASRCSPVVVFVLGFASSSVAPAASRLRPRIAAEVIPSPSVSASPVRRCRSHASSRGGKDPSPSLPRPRPFGVAHAYCAVVGPASVVPEVLEAWFAVVAEGLEGRSL

SEQ ID NO: 198042 - protein, 129 aa, Oryza sativa
  Clone ID: PAT_MRT4530_93741C.1.pep
MVASGLGRNQLRPRLGVERDRRRALPALLILGPLRDSNRLLVARHELRNARSTVVSIDVGSTADTVEARCGHGWMDDRRWHRRRCSRTRSRPLGSGKKWEKEGAAAACHGWVAGKLPLLRARRHDSEKK

SEQ ID NO: 198043 - protein, 427 aa, Oryza sativa
  Clone ID: PAT_MRT4530_93742C.1.pep
MEEKKQQQQRPQRGRDGILQYPHLFFAALALALLLTDPFHLGPLAGVDYRPVRHELAPYREVMARWPRDNGSRLRHGRLEFVGEVFGPESIEFDRHGRGPYAGLADGRVVRWMGEDAGWETFAVMSPDWSEKVCANGVESTTKKQHEMERRCGRPLGLRFHGETGELYVADAYYGLMSVGPNGGVATSLAREVGGSPVNFANDLDIHRNGSVFFTDTSTRYNRKDHLNVLLEGEGTGRLLRYDPETKAAHVVLSGLVFPNGVQISDDQQFLLFSETTNCRIMRYWLEGPRAGQVEVFADLPGFPDNVRLSSGGGGGRFWVAIDCCRTAAQEVFAKRPWLRTLYFKLPLTMRTLGKMVSMRMHTLVALLDGEGDVVEVLEDRGGEVMRLVSEVREVGRKLWIGTVAHNHIATIPYPLEEQSSSNVLGD

SEQ ID NO: 198044 - protein, 271 aa, Oryza sativa
  Clone ID: PAT_MRT4530_93743C.1.pep
MEAATPTRPPHAAPSSSPSPSPASLRQWRPAAQRNLRNQWSRLLAAKARYMPGMDLGVLKDMPGIREKASGKLARREEQCQSMLLSAYREMVLATAELVRASHSMRCFSKVAANSPLIRFTERQDDMNDSGDGGGSPVFKWFSVLEFENLAQELVDMFISELQLKRLLVLELLSVTFKEGVQHDASLEWSNELFDGEFNEFQSIGLLSGDSYALPKNWSAGVSKAWQPDQTPSHEVLQVYLTSWLANVNIKTSRIDEIFELVGEEMQIKLS

SEQ ID NO: 198045 - protein, 101 aa, Oryza sativa
  Clone ID: PAT_MRT4530_93744C.1.pep
MNLLGLIKPSLAHCPYRPTSKEVVNDEVTTGSNDEQLARSPRRPCRARSSRATGNAPAGEHQGRYIRRVAREGCTTHPATSSSRTYVPRLSGISYARCLTQ

SEQ ID NO: 198046 - protein, 57 aa, Oryza sativa
  Clone ID: PAT_MRT4530_93745C.1.pep
MRAIVLNKPVSGTALVLDEIINHVQSLQRQVEYLSMRLAAVNPRVDFGGLDNFLTTE

SEQ ID NO: 198047 - protein, 760 aa, Oryza sativa
  Clone ID: PAT_MRT4530_93746C.1.pep
MAASLAIVAVVVALCVAAAASAETATYIVHMDKSAMPSGGGGGNGSTSLESWYAATLRAAAPGARMIYVYRNAMSGFAARLSAEQHARLSRSPGFLSSYLDAPVTRRDTTHTPEFLGVSGAGGLWETASYGDGVIVGVVDTGVWPESGSYRDDGLPPVPARWKGYCESGTRFDGAKACNRKLIGARKFSAGLAAALGRRNITIAVNSPRDTDGHGTHTSSTAAGSPVPGASYFGYAPGVARGMAPRARVAVYKVLFDEGGYTTDIVAAIDQAIADGVDVLSISLGLNNRPLHTDPVAIGSFAAMQHGIFVSTSAGNDGPGLSVLHNGAPWALTVAAGTVDREFSGIVELGDGTTVIGESLYAGSPPITQSTPLVYLDSCDNFTAIRRNRDKIVLCDAQASSFALQVAVQFVQDANAAGGLFLTNDPFRLLFEQFTFPGALLSPHDGPAILRYIQRSGAPTAKIAFRATLLNTKPAPEAAAYSSRGPAVSCPTVLKPDIMAPGSLVLASWAESVAVVGNMTSPFNIISGTSMATPHAAGVAALLRAVHPEWSPAAIRSAMMTTAATLDNTGRSINDMARAGHAATPLAMGSGHIDPNRAADPGLVYDAVPGDYVELMCAMGYNLSDIRAVTQWSTYAVNCSGASSPDLNYPSFIAYFDRRSAAAAAAETKTFVRVVTNVGAGAASYRAKVKGNLGGLAVSVTPSRLVFGKKGETQKYTLVLRGKIKGADKVLHGSLTWVDDAGKYTVRSPIVATTLSSTRL

SEQ ID NO: 198048 - protein, 778 aa, Oryza sativa
  unsure (1)..(778): unsure at all Xaa locations
  Clone ID: PAT_MRT4530_93747C.1.pep
MPPWWGKSFSKDAKKTTKENRIDTFHRLMSPNNNKGSTKSKRSCRRGNDSSVEKSCRSTTVSRPTSPSKEVSRCQSFSADRPHDHHLPIPPVPPPSTRTISDITKSKPIFNNRGKPPLLLPPPKPNRPPTRHGNSEVVSDVMVASASGNCSNNDGEGDSQLESTVGLDAENATLVALKIRSSNARKECPGPITAKNMKEIHRPANQVHGSHILSTSPRGVAADSYQSNLQNPRPLVLDSAPNSLMSSPSRSPRRICPDHIPTSAFWAVKPHTDVTFVGSGQCSSPGSGQTSGHNSVGGDMLAQLFWQPSRSSPECSPIPSPRMTSPGPSSRVHSGSVSPLHPRSGGMAPESPTNRHDDGKKKQTHKLPLPPLSISHSSFHPNNSTPTSPISVPRSPGRTENPPSPGSRWKKGKLIGRGTFGHVYVGFNSDSGEMCAMKEVTLFLDDPKSKESAKQLGQEISLLSRLQHPNIVQYYGSETVDDKLYIYLEYVSGGSIHKLLQEYGQLGEQAIRSYTQQILSGLAYLHAKNTVHRDIKGANILVDPSGRVKLADFGMAKHINGQQCPFSFKGSPYWMAPEVIKNSNGCNLAVDIWSLGCTVLEMATSKPPWSQYEGIAAMFKIGNSKELPPIPDHLSEPGKDFIRKCLQRDPSQRPTAMELLQHPFVQKAVSLEKSVLSEPLEHLAVISCRSSAKFSDXAHTRNISSLGLEGQTIYQRRGAKFSSKHSNQPTATRDLQSHQEARMISLPAGLQILILGNLFECIKSLRGFRRGWYLKLTF

SEQ ID NO: 198049 - protein, 351 aa, Oryza sativa
  Clone ID: PAT_MRT4530_93748C.1.pep
MAPTPEIYPSALGLFAGRRWEAHGGREEMEAARWWRSRRIYDGDDLGTAKGEGRATRANELGKRPTGFECGMMAAMTELCASVEDDVSEYTSNTNVFLPPPSLCDDELSHNLLHFLPFSSLPPPSLCEHELRHNLLPFYHRWPSPPSLPSANALKDGGRVTSAPMVTSGDGRRERVDGAEGSAVGRSQRRRIGEREGERCGQMERGKGATKEECEEDRSSRHRGRIGNTTPVALWVGTSRISGANSSPSSLSRLHCHNDVHVEGQKDFVDNLLDTAVKCMRTASLIYTLSTGEEPEDERPILDMAQFRQEMEVLDDGTAMPMDSAPNSSLDVDKILKVLDVNCLTEDGVPL

SEQ ID NO: 198050 - protein, 136 aa, Oryza sativa
  Clone ID: PAT_MRT4530_93749C.1.pep
MAAHTRNISSLGLEGQTIYQRRGAKFSSKHSDIRIRSNISCPVSPCGSPLLKSRSPQHSNGRMSPSPISSPRTTSGTSTPLSGGNGAIPFNHLKQSTYSNEGFAIPSRSPDDLFASRPTDPDLGQFIRVHQVSQGL

SEQ ID NO: 198051 - protein, 172 aa, Oryza sativa
  Clone ID: PAT_MRT4530_9374C.1.pep
GTKKPNKQQKPKKQPKGGGEGKEKKKEKKKNPKKKKKNRKTKKKKKKKKKTNQTSQKKNKKKKSKTKKKKKKKKKHPKNPRRKKKGKKISDKRNHKNHQKIWAHEKADQTKPRGPPAKTPTWPKRGTPERADAGEPGEAGHGTTGRRRRASSTTTTARARRNKQRRRGGRRP

SEQ ID NO: 198052 - protein, 43 aa, Oryza sativa
  Clone ID: PAT_MRT4530_93750C.1.pep
VFWYWVGFCSLFIYLLFHMVWKPFNPFRRKKKRKAAQLECKLA

SEQ ID NO: 198053 - protein, 132 aa, Oryza sativa
  unsure (1)..(132): unsure at all Xaa locations
  Clone ID: PAT_MRT4530_93751C.1.pep
PLGAQMFFIGEVXGGRPFGAGPFSPDGFRWPPEIELEPPFPPGKFFSGLPKKLQGAALNFPWGNSIGGGGVPSPNIVRAFFQLPTLPANSPKVGFFFCGGFRCYLGFPRDFSFPVALYYFFFRFGQLVVILS

SEQ ID NO: 198054 - protein, 65 aa, Oryza sativa
  Clone ID: PAT_MRT4530_93752C.1.pep
TIQFSLVNSFGAENCVFFHQASDLCLACFPGLAFHPLDGILQAIPHVFALYLIPTHFRTHIALLF

SEQ ID NO: 198055 - protein, 652 aa, Oryza sativa
  Clone ID: PAT_MRT4530_93753C.1.pep
MQRQGRHLERSGSKRALDAGGGGGDDDDRAPKRPRVPALASVIVEALKVDSLQKLCSSLEPILRRVVSEEVERALAKLGPAATPARIQGRSSPKRIEGPSGINLQLQFRSRLSLPLFTGGKVEGEQGAAIHVVLLDANTGRVVTSGPESFAKLDVLVLEGDFNKEQDEDWTEEEFENHIVKEREGKRPLLTGDLQVTLKEGVGTIGELIFTDNSSWIRSRKFRLGLRVSSGFCEGVRVKEAKTEAFTVKDHRGELYKKHYPPALKDDVWRLEKIGKDGAFHKKLNSNGIYTVEHFLQLLVRDQQKLRTILGSNMSNKMWESLVEHAKTCVLSGKHYIYYSSDARSVGAIFNNIYEFTGLIADDQYISAENLSENQRLFADTLVKQAYDDWINVVEYDGKELLRFKQKKKSVTTRSDTAKASTSYPSSYGSTHSHKQLTGGPVNIEQSSMSSMSEDGTRNMSNGSQAARYAANPQDISQSITMPYDMSSLRPEEQFAGSSIQTQASRSSNMLALGPTQQQNFEFSALGQSMQPSPLNPFDDWSRLQENRGGVDDYLMEEIRVRSHEILENEEDMQQMLRILSMGGSSANMNHGDGFSPFMPSPAPAFNYEDDRARPSGKAVVGWLKIKAAMRWGIFVRKKAAERRAQLVELED

SEQ ID NO: 198056 - protein, 102 aa, Oryza sativa
  Clone ID: PAT_MRT4530_93754C.1.pep
RELASFAPSFSGTSSAAGSSGGSGSSAGGSSSGAGDVLSTTRACWPMGTTVGTRKTAKRHESGLRTGGDGSGGSQGRSQTKMKGAGSSDNDHSGSGGSDKAT

SEQ ID NO: 198057 - protein, 502 aa, Oryza sativa
  Clone ID: PAT_MRT4530_93755C.1.pep
MAAMASLYRRVLPSPPAVEFASEEGKRLFSEALESGTLQGFFNLISVFQTQSEPAFCGLASLSVVLNALAIDPGRQWKGPWRWFDESMLDCCEPLDKVKAEGITFAKLACLAHCAGANVRSFRADQSTIHDFRHHLVRSASSQDCHLIASYHRKPFKQTGTGHFSPIGGYHAGQDMALILDVARFKYPPHWVPLPLLWEAMNTTDDATGLLRGFMLISRHTAAPSLLYTVSCRDESWKSMAKYCMEDVPDLLKDESVDNVPALLSRLVKSLPANAGNLIKWVIEVRRQEEGGSGLSKEEEERLILKEMILQQVRDTELFRLVRELQFTKQPCCSCSYSSDDDSFTRIAASVCCQGAALLTGNLSSKDGFCCRETCFKCVQVDGDGPKTVVTGTAVSGVNEQSVDMLLPISTLETSVCNSNSSNEVVKYPSRTDILTVLLLALHPSTWVGIKDERLKAEFQSLISTDILHDDLKREILHLRRQLHYVRSCKEEEYGDPVPQSH

SEQ ID NO: 198058 - protein, 556 aa, Oryza sativa
  Clone ID: PAT_MRT4530_93756C.1.pep
MSASLLSSSLSPLSLSLSFPGSGRRGWAAEQASSCGGGGRGPRRPPTGVPPVRVKARRGRAERGKGMTRRRTSLSGPPGAPPPSSLVQCSLLGSPPESDAINAAIRVAAAESREGEGNDKEEDFLVGSARAAAWGGDMGGGGDERGEWEAAVREEVGVGGWWDDPDGDELRARFKAFTGQRRDWPQPKLLFWKGLLLRVARRLRLCSAPARLVLGVWFARPGGLTPLCLPQVLEEMRADGEILLKSELIDPTTGSLYQLVRRMSQMAVISKQPIAQDDILVFKSLIEERAAEIVDQLRNSHWTSTCIVTISKFNAFFHGQEDSHVALCYLTQCGKARYIVDRRQDSVEGVKFSLMAAQVPAVSKLDHNTLHLILTEEKLQQQLDVLDRQWQISRRRALVSFKSGDKQSAYRYVRQSKLFSESRKRFTPLLERVEEVISLIASAETTKKVNEAIKVSIQAMNEHHVSVEEVNEHLKEVDDLVATQREIDAALGSVILQSMDSEENIEEEFMKLEAELQDEFPHVQEDPVSHANEEFPNDEDVDSLSNNLSNIKLEAI

SEQ ID NO: 198059 - protein, 44 aa, Oryza sativa
  Clone ID: PAT_MRT4530_93757C.1.pep
GFSTRPSQSGQTCLSKAGRPSPLRLPRHMKRSPTRVISRICRRR

SEQ ID NO: 198060 - protein, 406 aa, Oryza sativa
  Clone ID: PAT_MRT4530_93758C.1.pep
LPGDIVTQRFKEVLISAASTAVEPPAPLCDKSASEKVAAINALPLTDVVGPLVDHHASALLKDKVANISSVPVIAGGSGTKRKPWARSSAIASSRQKSASFEDLGSLAPPPKRRVLKLPTGKSPLLSPSPWGLPPPEVANWSNMVVECHRLLESISRAVEAQMDRVVARATVADGRVAQPEARLEVAHEDLQKMKEIMAGNEMQRQGLEKKMNDTQDILFSLRDSLRKSLTSLHQLALSCGVESSIPTHPDETSLTSDGEVGMSSGPPNLGVVGLPSENSDLDGIIAEQDRRIAYWKTKFEVAELERSLVVVKQEQAVEALRGCEVWLKSYLKSCCSAMADVCRQLKVDRAEPEESTAGYLSLMRGACAQLEGIGQRIDINLKEECRHASHYDGSHVLACIQDRRS

SEQ ID NO: 198061 - protein, 90 aa, Oryza sativa
  unsure (1)..(90): unsure at all Xaa locations
  Clone ID: PAT_MRT4530_93759C.1.pep
MGIVEGNQKEKVHRRSLNLSSGYKNVLEMQNQIFGRPAXAACERRRGGGGGKGGGRRRDGGRQRRXQWGGGHAGSAGGGLGLEGEERMEA

SEQ ID NO: 198062 - protein, 230 aa, Oryza sativa
  Clone ID: PAT_MRT4530_9375C.1.pep
MRKSLLRFMPAPSPSFCDEFRHFQCFAMAQFALKRPVVRIGFLSNLYRLRRCANRQVRKTLLAILRSLSLRSDWRVIVLLHSHPILVKVYLFNKKKDKEGNGGGKTKEGNGENSKDQKGGEKTNDADLPRWPKLTKYDNSANHLVIYTRHVIEHGMDPAQLESDDEVLEDEMYQLDDESIEMLSELDLLYSHYLELNDMLEELFYSGMMTKELWQVFEEILDVHNMVEPL

SEQ ID NO: 198063 - protein, 57 aa, Oryza sativa
  Clone ID: PAT_MRT4530_93760C.1.pep
PLFFFFFSLETYPVCIPKHVQGYVCLFTTHLTPLPLINRVGAGGSFISKKQGQNHKP

SEQ ID NO: 198064 - protein, 225 aa, Oryza sativa
  Clone ID: PAT_MRT4530_93761C.1.pep
VEMAGVGAWRWCGGRRHRVGAWWWCGGRRRRVEVVRRPALLRGRRGGAATGVAASPRGGGVAAETARRRRRRQRWRGGRRGEVETTGDGRRWQGRGGAAGAQDLDAPPMPRELGNGECRTPPPTQPLSRSRVNLAMDLGRKIFGLLGYGELRISGKKSRIVSDRFRVPTDTIATVFEFISEKNYPNPYPILKISEENPTEAIRIRKQVRNSETIRTTFIPTSKIK

SEQ ID NO: 198065 - protein, 82 aa, Oryza sativa
  unsure (1)..(82): unsure at all Xaa locations
  Clone ID: PAT_MRT4530_93762C.1.pep
LELSDSSSCQWTGPTAVRWTVTIVKCTYSAVMLWAPHDRFQCGKWVXPGNPKVGNGSAWFLGDLRRSDNWCPIEPCSHALKH

SEQ ID NO: 198066 - protein, 156 aa, Oryza sativa
  Clone ID: PAT_MRT4530_93763C.1.pep
MSAEEEEGPTTTTTMDPNDAAVPTLAAAAVAAGDEKKPPAGKVPMPDDYIATILSLKREPPPKPEYLSLLSPEEREKQLEFDAVCAKEDDALEELQAKILAGLRKDGYYLVDESFLEKSAAMRAYVSEEWAKMDWAGSGIIFGYWDYDDPQCVQYL

SEQ ID NO: 198067 - protein, 51 aa, Oryza sativa
  Clone ID: PAT_MRT4530_93764C.1.pep
MADVEVYADVAAAGAPNKKTFRKYSYRGVDLDALLDMSTDDLVQLFPARAR

SEQ ID NO: 198068 - protein, 93 aa, Oryza sativa
  unsure (1)..(93): unsure at all Xaa locations
  Clone ID: PAT_MRT4530_93765C.1.pep
NXEEFMPERFLSNTMAGYNGNNFNFLPFGTGRRICPGMNFAIAAIEVMLASLVYRFNWKLPIDQAANGGIDMTETFGITIHLKEKLLLVPHLP

SEQ ID NO: 198069 - protein, 63 aa, Oryza sativa
  Clone ID: PAT_MRT4530_93766C.1.pep
HPMASVFPVSRRLNIERTTRILRAFCNVDIPNGVVVVCCRLPETVSKPFDRSQSSAGHVCYVL

SEQ ID NO: 198070 - protein, 96 aa, Oryza sativa
  Clone ID: PAT_MRT4530_93767C.1.pep
NPWILFLRPAPFFRPRARPPLFCFFPPKNFDIWPARSWGSFCPKRTPPPFFLPPCFLFFITPAPPLWHSLVSFFPPCNLFCCTICPFFFACMNRKS

SEQ ID NO: 198071 - protein, 83 aa, Oryza sativa
  Clone ID: PAT_MRT4530_93768C.1.pep
KLYRVRYGAVVQIVFQDTGIFAAEEHPMHIHGYHFYVLATGFGNYDPVRDAHKFNLVDPPSRNTIGVPVGGWAVVRFVADNPF

SEQ ID NO: 198072 - protein, 1003 aa, Oryza sativa
  Clone ID: PAT_MRT4530_93769C.1.pep
MERNDNPLHAGSGQATTLEGSEGREPIIRAGFARTDTDNGGSDVLFCGSEMDHNNLQPAGSGQAMTTEADNNRAWQLQKYLMLLTILVATVTYIAGLNPPGGVWLETKDGHLTGNPILPDTQPTRHYVFYYFNATAFVVSLVLIPFLLQPCVKAAAQLKAVRVAMVFDLVLLMVAYIAGSCPDRPTTIFASLLSVVVFGCVVVHWLVAPSSKGQLWLDKPNKVLMLLAIFVVTVTYVAGMRPPGGTWEHAQEAGRSDAGEPIWLERHRGRFMAFLVSNTIALVASLAVVMLVLSSRLRRNMSCLALHVFIITMALLGLLGAYVSGSCTEWIFTVQVGCVAGAIAVILPCISCLPIVECLFGGFKSQHHSLAGAPGRRVTIQPLVPIVPVGEGEPVMAGTPGLPRMTPTESTMVVHRQHSSEAHANPLNNGRSMILLLATLTATVTYQAGLEPPGGVWRDNEGGHNGGDLILLATHAIRYKVFFYCNSAAFVASIIVVIILQSKDLVNRYALHAAIILDLMGLMGAYAAGSWRDIGASLSIFVLVAAIIVLLVVTYIVSCKSLTRGNNGNVSLAEQKRKRELQKRQKLLLNLAVLAITITYQAGLTPPGGFWIEHADEEHHNGDPVLGDNHRGWYTAFFFCNTTSFMASVVTIVSLVSQSLSEIDMAYCKALYCCVFVVLAGLTGAFACGTSRRMQESMYVLGSASLGLTLAILYIHRSHPMVRNGDGSNHADDDTELVGDVVTNGQHITTHKMCKYLMLISILAATITYQAGLTPPGDVWPAADDGEGHAAGDPILRDSDRWHYLAFLYSNSVSFAASVLVIVLLLRVVVVRKLSSFLPLITVVHAVAVVDLLALLAAYATGSSRDRGTSVYVVTVAATVLVYVAIYAGLSSRHCGREQDGNGGQRPHASGCLIWARVVLMTPMFDGMPSQPEVFNDDERISETVPIKSTMKKEGISMDKALDRLLEKFELMEANRRQEEKFNQILHKLQEIEACRSKAAVGI

SEQ ID NO: 198073 - protein, 85 aa, Oryza sativa
  unsure (1)..(85): unsure at all Xaa locations
  Clone ID: PAT_MRT4530_9376C.1.pep
SVNLKVVKDTTXXTKXSPTNNQPXSKSTSSGKAKPVRSAKPSKXSSPSPKVXKXRPKXEGQKGDALNKLGXKLTVVGGTQGKAQS

SEQ ID NO: 198074 - protein, 163 aa, Oryza sativa
  Clone ID: PAT_MRT4530_93770C.1.pep
MAGKSLIPFIGSSSNSTHNLDGEPTPANQLIPVEQYTMEGVNALWAQPLATVSGSPAILEPVGELPGSAEPFSAPFGSPFSSKIPLPSPYDGKAAPPPAERYVGTLFTKAGNEEKEGAAESRRPPPMKVKHHLTPPPIVRAPGQYQEDEVKSPEPSIHMLAHK

SEQ ID NO: 198075 - protein, 52 aa, Oryza sativa
  Clone ID: PAT_MRT4530_93771C.1.pep
TTYCARRRIGAAAIDTLSIVPGLMAAVGIGYSVWFAYRYLIVKPEREALFGK

SEQ ID NO: 198076 - protein, 69 aa, Oryza sativa
  Clone ID: PAT_MRT4530_93772C.1.pep
LFHLRQTSMISMNSDGVISYLFSTQYIIYKYGVLDFYGQDYVVQKKKKKKKKTKIKKKKKKKKKKKKKE

SEQ ID NO: 198077 - protein, 70 aa, Oryza sativa
  Clone ID: PAT_MRT4530_93773C.1.pep
VLRPVVESVGVFLMVEFAFTLLSLGWSRCWVVWAVCRMDDVGARPLDPSAAPGLLAVRYCSCPRPVWLGP

SEQ ID NO: 198078 - protein, 377 aa, Oryza sativa
  Clone ID: PAT_MRT4530_93774C.1.pep
MRSSAADAPPPATASEIGDLPVEIVSDEEMALIEAALSAAAAASRPVLSSAAARRAVQLSSCAAYSAASGGDIEDSPPLPTPRRGSLLARFRDRRALAVTDITATEWCDKQQEFVLEHGKPEMTQAMKAGSERHAQLEQEVIERVEVTIRSAEESWAVKFMNFIVGANQLMLEGITREIPVIGVVEGSWMIGVIDELRMPPDGISVHPILVDTKTRYKPTVPLEAQKRNGRLQVMCYKYLWDNLISEKFPAENFFSYFDLDPGYLLSDDIKQYIRLLGLNAKTLEDVLKYFKVTCHTLPRSQEQLLLRYELQADNSLLEEYQFSYDARWLKDQFQEVLSFWQGAREPKFVSEEERWKCSFCKFANNCPINASTSRCC

SEQ ID NO: 198079 - protein, 187 aa, Oryza sativa
  Clone ID: PAT_MRT4530_93775C.1.pep
MEYLRSCWGPASSPAGRPPKGSDAAGRQDGLLWYKDAGQLVAGEFSIGRVQANNLLEDHSQVESGPLSTTDPNLQGTLVGVYDGHGGPETARYINDHLFNHLRGFASEHKCMSADVIRKAFRATEEGFFSVGTGEVLAMQLSAEHNASFEEVRRELQAAHPDDPHIVVLKHNVWRVKGIIQNLDVLF

SEQ ID NO: 198080 - protein, 393 aa, Oryza sativa
  Clone ID: PAT_MRT4530_93776C.1.pep
MLSAAMEYLRSCWGPASSPAGRPRKGSDAAGRQDGLLWYKDAGQLVAGEFSMAVVQANNLLEDHSQVESGPLSTTDPNLQGTLVGVYDGHGGPETARYINDHLFNHLRGFASEHKCMSADVIRKAFRATEEGFFSVVSSQWSMRPQLAAVGSCCLVGVICAGNLYIANLGDSRAVLGRLVKGTGEVLAMQLSAEHNASFEEVRRELQAAHPDDPHIVVLKHNVWRVKGIIQITRSIGDVYLKKPEFNREPLHSKFRLQETFRRPLLSSEPAIVVHQLQTTDQFIIFASDGLWEHISNQEAVDLVQHNPRNGIARRLVKAAMQQAAKKREMRYSDLKKIDRGVRRHFHDDITVVVVFFDSNAITTANWSRPSVSLRGGGVTLPANSLAPFSVPT

SEQ ID NO: 198081 - protein, 1066 aa, Oryza sativa
  Clone ID: PAT_MRT4530_93777C.1.pep
MALGFPECISAVVLISLSTMIAASSGLSMSNSSNTDLTALMAFKAQLSDPLGILGRNWTVGTPFCHWVGVSCRRHRQRVTAVELPDVPLQGELSPHIGNLSFLSVLNLSNTGLMGSVPDDIGRLHRLKILDLGHNDMLGGVPATIGNLTRLDVLDLEFNSLSGPIPVELRLSHNLRSINIQMNYLTGLIPNGLFNNTPSLKHLIIGNNSLSGPIPSCIGSLPLLERLVLQCNNLTGPVPPSIFNMSRLHVIALASNGLTGPIPGNKSFILPILQFFSLDYNYFTGQIPLGLAACRHLKVFSLLDNLIEGPLPSWLGKLTKLNVISLGENLLVVGPIRDALSNLTMLNFLDLAMCNLTGAIPADLGQIGHLSVLRLSTNQLTGPIPASLGNLSALSVLLLDDNHLDGLLPTTIGNMNSLTELIISENGLQGDLNFLSAVSNCRKLSVLCINSNRFTGILPDYLGNLSSTLESFLASRIKLSESIMEMENLHMLDLSGNNLAGSIPSNTAMLKNVVMLFLQNNEFSGSIIEDIGNLTKLEHLRLSNNQLSSTVPPSLFHLDSLIELDLSRNLFSGALPVDIGHLKQIYKMDLSSNHFLGSLPDSIGQIQMITYLNLSINSFNDSIPNSFGNLTSLQTLDLSHNNISGTIPKYLSSFTMLASLNLSFNNLHGQIPGGGVFSNITLQSLVGNSGLCGVVRLGFAPCKTTYPKRNGHMLKFLLPTIIIVVGAVACCLYVMIRKKVKHQKISTGMVDTVSHQLLSYHELVRATDNFSNDNMLGSGSFGKVFKGQLSSGLVVAIKVIHQHLEHAVRSFNTECRVLRMARHRNLIKIVNTCSNLDFRALVLPYMPNGSLEALLHSEGRMQLGFLQRLDIMLDVSMAIEYLHHEHCEVILHCDLKPSNVLFDDDMTAHVSDFGIARLLLGDDSSMISASMPGTVGYIAPEYGALGKASRKSDVFSYGIMLLEVFTGKRPTDAMFVGELNNRLWVSQAFPAELVHVVDSQLLHDGSSSTTNLHLHGFLVHVFELGLHCSADYPEQRMAMRDVVVTLKTIRKDYVNWMVLMGSTAQQ

SEQ ID NO: 198082 - protein, 153 aa, Oryza sativa
  unsure (1)..(153): unsure at all Xaa locations
  Clone ID: PAT_MRT4530_93778C.1.pep
CWSSTSSSSSGRCGAGAGRRAARRRRRPGARRRGTAVEPEEEEGRACPPTRSARCRATTSSRAGGGGDCAVCLEELEVRGPVXRRLPRCEHSFHAPCVDSWLRKSRWCPVCRADVVGRAPEGERKMAAAAAAVKTTVAGRSSSPATGEIVAER

SEQ ID NO: 198083 - protein, 216 aa, Oryza sativa
  unsure (1)..(216): unsure at all Xaa locations
  Clone ID: PAT_MRT4530_93779C.1.pep
MHGARSSRRVAAAVAAPADCNLRGFSERSHWRPTTEAGDGRVGVGAAGRPAKQVGGKNSARQWGGEAAGGNGFINAVELARSMANASPHTRGHVERMGRMRAEQREQRRGAGGGAAARRRGAADGESGGVGGDPSGWAKGRRGRRPRAAXDGYDLTARSAASPPILRRSPPPNPGSVWRTSKNDVCDGDSAGAQFFTSIRHTHDGCPDRGAAADAL

SEQ ID NO: 198084 - protein, 69 aa, Oryza sativa
  Clone ID: PAT_MRT4530_9377C.1.pep
MTMIDGGVVSGNRLAVAWERERPHEMRGTAHLSGCPHVPCTVQRIMVSWTPRVLAYGHAVDVSTSLLRN

SEQ ID NO: 198085 - protein, 81 aa, Oryza sativa
  Clone ID: PAT_MRT4530_93780C.1.pep
SSWKRKKRLMGLKGEGPGVGAGDGEAEDGEGGVAEGGGHVGHGDLFFSCVTLPRGGGVSSLRRGRVHRHRHRNIADVAVTH

SEQ ID NO: 198086 - protein, 225 aa, Oryza sativa
  Clone ID: PAT_MRT4530_93781C.1.pep
GAPPGVGSPRKPKEGDNPWVWGLYPPPGFPPYNPPTPFQKGVMKTDPKPGGGGGNHPGPPPPRSGGAPPNMLGAPQPTPVKGGGFPPPPGVGGGEPDAPGQRGNPPGGGGPKGGSPKNPPRGGPGGPLGGGTPGGALERGGGGSKKPRGKTSQGQRGPGRGNTPGRKRKPPRALWGTLGRTRGGAPPPPRDFEGGGCFLHPPAGGTGKNPPPPAPGGGNTFSPGG

SEQ ID NO: 198087 - protein, 587 aa, Oryza sativa
  Clone ID: PAT_MRT4530_93782C.1.pep
MEGSNVYTKDTVDDLDDKQGQGFMSADDFEEIDIGPGDRPRPTFTSKNLSSEFRTKLIELLKEYRDCFAWEYYEMPGLSQLIVEHRLPIKSGVRPYQQPPRRCKANMLEAVKAEVTRLYDAGFIRPCRYAEWVSNIVPVIKKNGKVRVCIDFRDLNKATPKDEYPMPVADQLVDAASRHKILSFMDGNAGYNQNFMAEEGIHKTAYRCPGAIGLFEWVVMTFGLKSAGATYQRAMNYIFHDLIGWLVEVYIDDVAVKSKEIENHIADLRKVFERTKKYGLKMNPTKCAFGVSAGQFLGFFVHERGIEVTQRSINAIQKIQPPEDKTKLQELIGKINFVRSFEFAYTIKPYATNNQAEYEAVLKGLQLLKKVEADAIEIMGDSLLVISQLAGEYECKNDTLMVYNEKCRELKDGFQLVTLKHVSREQNVEANDLAQGASGYKPMLKDVEIEVATITADDWRYYKGCQDCLKFGAIQRAPASAMNPIIKPWPFRGWGMDMIGQINPPSSKGHKFILVATDYFTKWVEAIPLKKVDSGDAIQFIQEHIIYRFGIPQTITTDQGSIFVSDEFVQFADSMGIKLLNSSPYYA

SEQ ID NO: 198088 - protein, 146 aa, Oryza sativa
  unsure (1)..(146): unsure at all Xaa locations
  Clone ID: PAT_MRT4530_93783C.1.pep
PKQRRKINGRRRRRGRSGGNLRLDNDGATTTGATAAHGWSCGGDGGARLHDARXYRRREAKARVAAGSDGLGGPFIGARRQRWRPTVTGDGEGSRRFQKRKGRDPEDHFPSIDFTGNGKAWPNLEGDDGGAAIGLGRRQRREEDED

SEQ ID NO: 198089 - protein, 108 aa, Oryza sativa
  Clone ID: PAT_MRT4530_93784C.1.pep
VVAASQRARTGDAQTLSTPAASRLVHLVSCCSMGSSPFACRWRRSPGRTHATDRRAAEAVFERRGAERPPSGVARYTAADGGDGANELCPVPGLRRVPKRDTILLRTL

SEQ ID NO: 198090 - protein, 64 aa, Oryza sativa
  unsure (1)..(64): unsure at all Xaa locations
  Clone ID: PAT_MRT4530_93785C.1.pep
MHVIDWDLAAGCNXARFLHELDHRREGRGMALASLKLTAFMVTAFHNPMEPHLPHDKLSSLHVR

SEQ ID NO: 198091 - protein, 169 aa, Oryza sativa
  unsure (1)..(169): unsure at all Xaa locations
  Clone ID: PAT_MRT4530_93786C.1.pep
MLYKSGSRKQMAEIHPSKTDGQDPTVHGQTTRDDDDDVTTGGGSGAQTRRQTTARRRERRTPTRRGRCGELTGDQNNGGRSTDGNGVEEEAAATFGLTTTAMLRRPTAMADRRTRSAMAWXSRQQPSRATTTTGAAAAHGXTNGDDGGARLHGARALPATRGESEGGGG

SEQ ID NO: 198092 - protein, 116 aa, Oryza sativa
  unsure (1)..(116): unsure at all Xaa locations
  Clone ID: PAT_MRT4530_93787C.1.pep
MGGEKGVGRRGKVRRRRPPANVAPNDRKRSRHGLAHVRGVARVPTTTAXVVFTGTREGWGFRLITLAKLLSRASASSXWPAPIPQAHSRPHRAAQKPMCSGILSCKKGARNKTRAF

SEQ ID NO: 198093 - protein, 324 aa, Oryza sativa
  Clone ID: PAT_MRT4530_93788C.1.pep
MSDLLSVQIAIVVDSYAVLDGSRSSNTEMTQQTIGRVPHDLVTTRLQGKVEGLHASLPGRKDICGTHLSFTQKRYNGQEEQVRGRGYSPAPGIGDAARAPRWSGCAAAAQPRSGLHPRRQRGVGIRILRLRAYLSASTRTWRKPEEGWMKLNFDGSSKHSTGIASISTVLRRGLELAVQNGWRLIWAEGDSKVMVDVVRDRADMQSEKDLRLCREIATLLPQLDDMAVFHVCRGGNKVAELGHRVPTWVAGASYVALAAVSIVVVPLPYPQLQHCHARCAVVRHWPKGKRKREIRREEGEEGLEREDDHVAPHVSGSHCIFLCE

SEQ ID NO: 198094 - protein, 240 aa, Oryza sativa
  Clone ID: PAT_MRT4530_93789C.1.pep
MLSVLTLVKDSCAECEHYKVTWYMAVHIIYLEWPDLPEKGHLGFEATGFCRCSARRSSSARLGFAVNRVHGGGSRKRTAEIDSSKTDGQDPSVHDRATGNDDNDVSGDVTTGDGSGVHARRRTTARQRERREPTRRGRRGELTGDQNNGGRSTDGDGVEEEAAATFGLTTAMVLRLSSATAEGQTRSATAWRSRRRPSRATTTTGAAAAHGWTNGGDGGARLHGARALPATRGEGEGGGG

SEQ ID NO: 198095 - protein, 57 aa, Oryza sativa
  Clone ID: PAT_MRT4530_9378C.1.pep
GPSGQGLQGGFSLGGGLKIRWATPGRHIKGFKGGWAIKGPFLGGSKTFVAIIGPGAF

SEQ ID NO: 198096 - protein, 107 aa, Oryza sativa
  unsure (1)..(107): unsure at all Xaa locations
  Clone ID: PAT_MRT4530_93790C.1.pep
DVSGDVTTGGGSGAQARRRTTGRRRERRTPTRRGRRGEFTGDQINGGRSTDGDGVEEEAASGCLRRRRRGGRGRRXLGDHDGGLPERRRRPERRRRTAGRTAATAAL

SEQ ID NO: 198097 - protein, 110 aa, Oryza sativa
  unsure (1)..(110): unsure at all Xaa locations
  Clone ID: PAT_MRT4530_93791C.1.pep
LVNFKLVNYTPRIKKINYTPIKXKKSGLREFARKIPTGHLLVQTGFQSTKTHPCPFSKYKRVLHEMRYYEETIMILNLMPDLVPELVYSATANTTHYRDFDKANLFIKPK

SEQ ID NO: 198098 - protein, 90 aa, Oryza sativa
  unsure (1)..(90): unsure at all Xaa locations
  Clone ID: PAT_MRT4530_93792C.1.pep
GLRLSKNDQASHGPIMRSRARKIQXRFTPEDIITTQRRMCYVEDYKGYVEQESAHAQPVAVYASKKIVYAAKXAQLPRLVRPNQSYFSML

SEQ ID NO: 198099 - protein, 141 aa, Oryza sativa
  Clone ID: PAT_MRT4530_93793C.1.pep
MATIAAARGISTNDIAHMAFRFSKGPMDSGWGELPACAVVRITAASGLADKDVNHMVFLCHHWANVLLEELTMASGFGRAEACVQAMVGCIPRSTVSGMLHTLAGRTTGWGITSFGIFCLLCEGEERLPPLPDSPNGLFVF

SEQ ID NO: 198100 - protein, 300 aa, Oryza sativa
  unsure (1)..(300): unsure at all Xaa locations
  Clone ID: PAT_MRT4530_93794C.1.pep
LFFKRKRELLRQRLGFAVNRVHGGGSRKRTAEIFPSKTNGRDRPVHSRTTEDDDDDVSGDITTGGGSGAQTRRRTTARRRERRTPTRRGRRGELTGDQNNGGRSTDGDGVEEXSGGNLRLDDDGGEVDEIGDGLVTTTATSXRAATTTGATAAHGWSCGGDSGARLHDARALPATRGECEGGGGSKEAAAKAHGDRRHEGKSRVRRREIDPNRTRIHXFPNDFSRRFQKRXGRGDPEDHFPSIDFTGEGKARWAPPVSGRTRARERAARLRAGLGQEREKXVLGRLSAQSQKRIFKTFYN

SEQ ID NO: 198101 - protein, 752 aa, Oryza sativa
  Clone ID: PAT_MRT4530_93795C.1.pep
MAPAVAVVAAAAAFPFRLFSAEARRNTKGSRSKRGSARPLKPSPPPRPSASSSAAGGGGATTFTRLPLRNAPASVEVTLDRFPTANPEPRASTFTRRNGERLGDDEEDEEEEEDEVELGLRGATTFARLPLRDSPDGGDLTIGHFDAGVAPQEGLRSRAISRQLVEHLDDVEEEEEEQVVSRLDIFEGAKGREARAFLPDEDDEDDDVVVFDPEYDGYSDDEEFVATAVEQSPRGDAIAVAELEKLKYDNDDDDDDDDEVVVFHPDDDEEVDVFEDYDDDEEEETKEKGVPAVMRCFDTAKIYAKAGDGGNGVVAFRREKYVPLGGPSGGDGGRGGNVFVEVDGDMNSLLPFRKSVHFRAGRGAHGQGRQQAGAKGDDVVVKVPPGTVVRSAAGDVELLELMRPGQRALLLPGGRGGRGNAAFKSGTNKAPRIAEKGEKGPEMWIDLELKLVADVGIVGAPNAGKSTLLTAISAAKPTIANYPFTTLLPNLGVVSLDFDATMVVADLPGLLEGAHRGYGLGHEFLRHSERCSVLVHVVDGSGEQPEYEFEAVRLELELFSPSLVDKPYIVVYNKMDLPEASERWNKFQEKLQAEGIEPYCISAMNRQGTEDVVLAAYKVLQKDRQRMKDDEEWNGPENLNHVADAIKRERRAPMNEFEIFHDKGTNTWNVVGAGIERFVQMTNWQYSESLKRFQHALEACGVNKTLIKRGVKEGDTVVVGEMEMVWTDEPSKTRSSKTMNSKDDSVRWPEFG

SEQ ID NO: 198102 - protein, 215 aa, Oryza sativa
  Clone ID: PAT_MRT4530_93796C.1.pep
MDSPATPVGLSPPLLSLVLCNEPCYTKGKRGLLRQRLGFAVDRVHGGGSWKRMAEIHPSKTDGQDPMVHGQTTRDDDDDVSGDVTTGGGSGAQTRRRTTARRREQRTPTRRGRRGELTGDQNNGGRSTDDDGIEEEAAATFGLTTTAMLRRPTATAERQTRSATAWRSRRQPSRATTTTGVAAAHGWTNGDDGGARLHGARALPATRGESEGGSG

SEQ ID NO: 198103 - protein, 295 aa, Oryza sativa
  unsure (1)..(295): unsure at all Xaa locations
  Clone ID: PAT_MRT4530_93797C.1.pep
LFLKRKRELLRQRLGFTVNRVHGGGSRKRTADIDPSKTDGQDPSVHGQTTRDDDDDVSGDVTTGGGSGAQTRRRTTARRRERRTPTRRGRRGELTGDQNNGGRSTDGDGGDGPPATYGDDGGADEVGDGLAITTAXSRATTTTGSAAAHGWTNGYDGGARLHGARALPATRGEGEGGDKGWKAAAKTHGDRRHEGKSRVRRREIDPNRTRIHGFPNXFSRRFQKRKGRGDPEDLFPSIDFTGEGKARWDPPVSGRARARAAAGGLGQLGPGRGREKVLGRLSAQSQKRILKTFFN

SEQ ID NO: 198104 - protein, 125 aa, Oryza sativa
  Clone ID: PAT_MRT4530_93798C.1.pep
VTTPEPPRWSSNWGRRFTSTGMDLVVMMKETHQRWIPVAVWSTSSSPSPSSSPPSPPLAEAHQSCLLLPDLAVPRPTTVNSDGRGEEGEARQHDDWLLSFGRRVLGGGGVVSVTEMGMEGGEKEK

SEQ ID NO: 198105 - protein, 136 aa, Oryza sativa
  unsure (1)..(136): unsure at all Xaa locations
  Clone ID: PAT_MRT4530_93799C.1.pep
MARRAPPFVLLVAAAAAALVVVPATAATAEALVAHWGMRAAPCLEGTVEEECVADGXGRRRRAEAVAAAAAAVPADGRLRRRLGRGGGGGXYISYAALMRNSVPCSIPGASYYNCRPGADANPYTRGCSAITQCRD

SEQ ID NO: 198106 - protein, 145 aa, Oryza sativa
  Clone ID: PAT_MRT4530_9379C.1.pep
GTRIRRCMRYKAYKALLIVQTCRRCRLLLCAAGLILVVRGGPAARGLRRLLRGLLLQRLLIPLAALLRGEPVLGALGVGLPRLRALAVAVPLVAASHLPDSGLPPPRLDLAPPPPAGDDDLADADDDDTDGGLLELPEYFPSPRA

SEQ ID NO: 198107 - protein, 221 aa, Oryza sativa
  unsure (1)..(221): unsure at all Xaa locations
  Clone ID: PAT_MRT4530_937C.1.pep
PTAKRGSRITLLDTLLKEDAPNHVLNIINQTKTMITASVLVNSVSVRTSTSSRVPPLXYQDYHXPSLSARHQPSLSVAASGSNRRSRDHAERSVHSLADRHREYHVEXPCSPRHRQPIDLHDTINRHHAERGNRRHHSPDRYEDDQDGVAAFTSDLRRVDWPAVFKPTGIEKYDAKTDPESWLTVYGLAIRAAGGDSKAXANYVPVALDDSARXKLHGLPR

SEQ ID NO: 198108 - protein, 216 aa, Oryza sativa
  Clone ID: PAT_MRT4530_93800C.1.pep
MKVLGPFEVSAVSEGRTGLGLGIIIGTCEVTSVSNERLGFAVNRVHGGGSRKQTAEIDPSKTDGQDPSVHGQTTRDDDDDVSGDVTTGGGSGAQTRRRTTARRRERRTPTYRGRRRELTGDQNNGGRSTDGDGVEEEAAATFGLTTVTVLRQPTATTEGRTRSATAWRSRRQPSRATTTTGAAAAHGWTNGDDGGARLHGARALPATRGEGEGGGR

SEQ ID NO: 198109 - protein, 285 aa, Oryza sativa
  Clone ID: PAT_MRT4530_93801C.1.pep
MDLVVMMKETHQRWIPVAVWSTSSSPSPSSSPPSPPLAEAHQSCLLLPDLAVPRPTTVNSDGTEASPPPSLGSFAGRSTILSYGELQSLPRARPKFMGTNGAQGSKGASSTTTNPTNDDKKKKPAQAPGADADADGGGKKNNSDYVDKTLSTTANLVKLLPTGTTLAFQALAPSFTNHGRCLAINRYISGGLIAFCCAICALLSFTDSIIDRKGRPYYGLAFPADEDTGKGGFVPFNYEKPRRPSNGAATAAADDDDSWEVYFVDFDPEDTGGETLCSPGPQVEE

SEQ ID NO: 198110 - protein, 114 aa, Oryza sativa
  unsure (1)..(114): unsure at all Xaa locations
  Clone ID: PAT_MRT4530_93802C.1.pep
LAVQGGALGVEDARPALLCQLRNCHAPSGLLLEELVISRIRFIFFSKRLALGQQLFNGHPGXNFSNGHPGLADPVSRIAQPVGISHVGRPPSVPGSPRGSSPTPPRQIHMSLGI

SEQ ID NO: 198111 - protein, 296 aa, Oryza sativa
  unsure (1)..(296): unsure at all Xaa locations
  Clone ID: PAT_MRT4530_93803C.1.pep
LFLKRKRELLRQRLGFAVNRVHGGGSQKRTAEIFPSKTNGRDRPVHGRTTGDDDDDVSGDVTTGGGSGAQARRRTTARRCERRTPTRRGRRGELTGDQRRNGGDLQLDNGDGVPVAYGDDGGADEVGDDLAITTVTXSRAATTTRATATHGWTNSDDGGARLHGARALPVTRGEGEGGGRGWKAAAKAHGDRRREGKIRVRRREXTNPIRDRIREFPNXFSRRFQKRKGRGDPEDHFPSIDFTGNGKGRWAPPISGRTRARERPAHLRAGLGQEREKVLGRLXAQSQKRLLKPFPI

SEQ ID NO: 198112 - protein, 252 aa, Oryza sativa
  Clone ID: PAT_MRT4530_93804C.1.pep
MEQRKFLLCLILGLLATSGPAKTVNADSPFDFYYLILMWPGAYCTDSEYGCCVPKYGYPSEDFFVKSFMTFDSSENTAVVRCNSDNPFDINKLDSIENNLNHYWSNIKCPRTDGVNSWKSEWNSYGVCSGLKELDYFKAGLQLRKNADVLSALAEQGIKPDYQLYNTAFIKWAVNQKLGVTPGVQCRDGPFGKKQLYEIYLCVDKDAKSFIDCPVLPNLSCPAEVLFHPFHTWMLNTTSAANIVMPTETVLA

SEQ ID NO: 198113 - protein, 202 aa, Oryza sativa
  unsure (1)..(202): unsure at all Xaa locations
  Clone ID: PAT_MRT4530_93805C.1.pep
MPPHFPRDSDSDQNVRMPFHGHKSIHKLLGGGQVEYNIIPLLCQIAILAMLVIFIWSNAAPLLDRAPPRIPEIIISEHAFREMALTVHYKLTYTVSVLYDIACGKDLKRFLLFWTNNQIVYDIKVVXSLLVLSAIGSSCSLTSLLYIGFLCAHTLPVLYQRYKTEVDHLVAKGSDDIKKFYKKVDSNLLNKIPRGPVKTKVK

SEQ ID NO: 198114 - protein, 105 aa, Oryza sativa
  unsure (1)..(105): unsure at all Xaa locations
  Clone ID: PAT_MRT4530_93806C.1.pep
MGTIQTFLKIKXTNKSSQRTLTKSLTQXDINILINRYNYLKRALSLNGNDRYLNQGPYRVYVRLYRLLAISAQSAQSVXLARFNILRFLFDIQLXIRVYLAKFHC

SEQ ID NO: 198115 - protein, 85 aa, Oryza sativa
  Clone ID: PAT_MRT4530_93807C.1.pep
REGIAPPRRPSPMPPSIAYAPHRSLPSPSPLQHLAGLHPRLKSRFFFVFHRLPANLSLHCFIETWSVDLVVSANVVYGFSSDLWI

SEQ ID NO: 198116 - protein, 343 aa, Oryza sativa
  Clone ID: PAT_MRT4530_93808C.1.pep
MGVPRSEGYVIELHRLMRRLRYPRFPIYRVRQCGPVWEAWVEVHTRVPSKSDYSFPTRHRRDLPETAMQGAAREAFLRLSSIHRAELVSTEFAHHPFREESNSVCTVQDTPCCYNPIVTLLSRWAEAVDDFYEEALLEIDDQQRRVGKLESEVTDLTVHQLQLEEEHQAGGSEIDSLKAQLQVHVGRDRYFFLTRPYPPAFHALLGEVGMLATESAPYLVDPTVTQPPAPEIVHTPLIPTPSPQLGSSMKTPIQVDSETEGTDTEPEIEPDITDPLEDETPVPRITFIGGPRTLSTARKSARPPGKKPKPNPEATTSEPWGLGFARASDHPLPAPGSCGWLDD

SEQ ID NO: 198117 - protein, 57 aa, Oryza sativa
  Clone ID: PAT_MRT4530_93809C.1.pep
IRHEASLSLFWLPPLPFLPSPRRSGRGEGHRWLRRRRGSWAAAQAEGVSRATTTAPT

SEQ ID NO: 198118 - protein, 128 aa, Oryza sativa
  Clone ID: PAT_MRT4530_9380C.1.pep
ALVRVNRATLNMLKKVEPYVTFGYPTRKLISDLVYKRGYGKIDKQRIPLTSNDIVSKGLGRFGIHSVEELIQEIFTVGPHFKEANNFLWSFKLNSPKGGFNNKRHPFQKGGDWGNREEEINDLVRRML

SEQ ID NO: 198119 - protein, 246 aa, Oryza sativa
  Clone ID: PAT_MRT4530_93810C.1.pep
MVTRLSRWAEAVDDFYEEALLEIDDQQRRLGELETEFQQLSDQYNDRRGMMDTLEEQLRKSQEHVSQLEEQLRAAIVSTTGASTSSAIGRDRYFFLTPPYPPALHALLGEVDMLVTESAPYLVDPTVTQPPAPEIVHTPLIPTSSPQLGSSLETPIQVDSETEGTDTEPEIEPDITDPSEDETPVHRITFIRGPRTLSTARKSTRPPGKKPKPDPEATTSEPWGLRFARASNHPLPAPGSCGWLDD

SEQ ID NO: 198120 - protein, 160 aa, Oryza sativa
  Clone ID: PAT_MRT4530_93811C.1.pep
CDRRDRYFFLTPPYPPAFHALLGEVDMLATESAPYLVDPTVTQPPAPKIVHTPLISTLSPQLGSSLETPIQVDSKTEGTDTEPEIEPDITDPSEDETPVHRITFVGGPRTLSTACKSTRPSGKKPKLDPETPTSEPWGLRFARASDHPLPAPGSCGWLDD

SEQ ID NO: 198121 - protein, 830 aa, Oryza sativa
  Clone ID: PAT_MRT4530_93812C.1.pep
MVAAGEAGQHHESGGAEWRVTVAEAPEAEVEHENAKGARRGCCCAPAAAAWVLWWLAAPWKWVARFGRTAWKVGADDPRRVVHGFKVALALTLCSAFYYVRPLYVFTGQTAMWAVLTVVVVFEYTVGGCMYKGLNRAMATVAGGALALGVHWVADKSGDDAEPFVLTASLFVLAAAASFSRFIPTLKARFDYGVTIFILTYSLVAVSGYRVDTLVTMAQQRLITIAIGAFICFAVCTLVFPVWAGQELHVLVARNMDKLAAAIEACVDDYFSSAEHAGGGGDAATALSEKARGYRAVLNAKASEDSLANLARWEPGHGKFGFRHPYGQYQNAPAHFKRHLAGACVALSQHCAAVLREASGSVTSMTRSGRLALVVGDMNAAAQDLRNELRCLAEILDDDEEEEAASSEAEQHEHNTAPPPPPPLIEALPLFTAASLLLEISTRAEGVVAAVDALGTTAKFKKADHAEPPATTTLDAEAAMPVPNSNAIAADEAHGNATAGEHDKKETAEQTTTTSASTVGQQQEARDQVGQLVKLLMRRRSTKKWARGEPKVGPCPRPPLDFPPVHAPSPRSRSTELAGHPPVVPSPRHRSMDLASHGLALPSSRHRSMDLASHGPVLPSPRNRPSRKGKSGHMTSASGGITATMVVPRCVLEHDTMEKVDNRRGKQEKNWERRWQELGHGLAGPCEGEKAGKAQRARGWNQPRREMTGWRDFSSKETEEFSEFLEGMILIESKREVVKTKRYATGRGPPSFSTPMSYGVEEGRGPRSDGSHCCRDLGADAKDLSGAVATAGEEGAPEDDQAALAAAVEPVVVVAVAIGGVTGGGAVRAQ

SEQ ID NO: 198122 - protein, 227 aa, Oryza sativa
  Clone ID: PAT_MRT4530_93813C.1.pep
AFLGLSSIHRAELVSTEFAHHLFREESNSVCTVQDTPCCYNPIVTLLSRWAEAVDDFYEEALLEIDDQQRHMGELETEVTDLTVQQLQLEEEHQAWGSEIDSLKAQLQVHGDQFQQLSDQYNDSRGMMDTLEEQLRERRDRYFFLTLPYPPALHALLGEVGMLATESAPYLVDPTVTQPPAPEIVHTPLIPTPSPQLGSSLETPIQVDSETEGTDTEPEIEPDITNR

SEQ ID NO: 198123 - protein, 64 aa, Oryza sativa
  Clone ID: PAT_MRT4530_93814C.1.pep
MDGSGDSARRAMRSFPGDGVAAATINRCFTSPTDPKPTPTPFPHSRATGVRLDRYHGCAHGGAA

SEQ ID NO: 198124 - protein, 840 aa, Oryza sativa
  Clone ID: PAT_MRT4530_93815C.1.pep
MVAAGEAGQHHESGGAEWRVTVAEAPEAEVEHENAKGARRGCCCAPAAAAWVLWWLAAPWKWVARFGRTAWKVGADDPRRVVHGFKVALALTLCSAFYYVRPLYVFTGQTAMWAVLTVVVVFEYTVGGCMYKGLNRAMATVAGGALALGVHWVADKSGDDAEPFVLTASLFVLAAAASFSRFIPTLKARFDYGVTIFILTYSLVAVSGYRVDTLVTMAQQRLITIAIGAFICFAVCTLVFPVWAGQELHVLVARNMDKLAAAIEACVDDYFSSAEHAGGGGDAATALSEKARGYRAVLNAKASEDSLANLARWEPGHGKFGFRHPYGQYQNVGAAMRCCAYCIDALAACVGAGGQAPAHVKRHLAGACVALSQHCAAVLREASGSVTSMTRSGRLALVVGDMNAAAQDLRNELRCLAEILDDDEEEEAASSEAEQHEHNTAPPPPPPLIEALPLFTAASLLLEISTRAEGVVAAVDALGTTAKFKKADHAEPPATTTLDAEAAMPVPNSNAIAADEAHGNATAGEHDKKETAEQTTTTSASTVGQQQEARDQVGQLVKLLMRRRSTKKWARGEPKVGPCPRPPLDFPPVHAPSPRSRFHGARRPPAGGAQPEAPVHGPGEPRARAAELETPGFRPSRKGKSGHMTSASGGITATMVVPRCVLEHDTMEKVDNRRGKQEKNWERRWQELGHGLAGPCEGEKAGKAQRARGWNQPRREMTGWRDFSSKETEEFSEFLEGMILIESKREVVKTKRYATGRGPPSFSTPMSYGVEEGRGPRSDGSHCCRDLGADAKDLSGAVATAGEEGAPEDDQAALAAAVEPVVVVAVAIGGVTGGGAVRAQ

SEQ ID NO: 198125 - protein, 95 aa, Oryza sativa
  Clone ID: PAT_MRT4530_93816C.1.pep
HGQLPLFLCSNVQSLSFPVMLEVRLLWKWGMNMCMCSRLGWTYGLVKYTELITILQILFYCPDLRILTRTRHATVPLVQQVGNVYTNHLPTWYLH

SEQ ID NO: 198126 - protein, 82 aa, Oryza sativa
  Clone ID: PAT_MRT4530_93817C.1.pep
ASGAAAATKRLTASHLWPAGSKNAVRGKSKSKSHHRTFADVHNFQAVFHQLDDDSDFYDSDEEDYRHLLYSSKSRVVPGHYR

SEQ ID NO: 198127 - protein, 301 aa, Oryza sativa
  Clone ID: PAT_MRT4530_93818C.1.pep
MAELMRRLVAHHGCAALLITFSGLASPRQHQRPPSTLSWTSTKRRMIANDAVLEGMKQVADELEDQDATPSWTSTKLTRLAIVVVAAAMVSTSTCCPRKNSWSLRMSNGTNSKDGTPPCHSTSAVVPVLETSITFSTAGVVPPHRVTLKSFLKNERRAKRRWASAAPDPPVPFPLVVGARGVGELGARRGEGELDLSNCHSRLPRAPAASQSRGLSLPLLLLLPVNDGVRFLWALCNAGEQLPEGYEARRGGDGWVPQLRVLTHVAVGAFLRAPREEGIGSDTGKQKGGQNANMLPHWTAT

SEQ ID NO: 198128 - protein, 558 aa, Oryza sativa
  Clone ID: PAT_MRT4530_93819C.1.pep
MTNLNGEVGPTPHAPGQRRPGSPLDAPSDNMDEEISVDPSQGNNSEAVNTSNINQADKAPDLPEIMREAPFEGPELNLPDLDEQNNDPMDVNEESSPFVSKNITPPALERTISPGQGGLSGTSIPNARGSTSTTYDNIEDVIPMDIGMPDFRIEPSPPRVQDEMNAQPVQGEMNAQPVQDEMNAQPVQDEMNAHPAQDKRRIRYDNEIVFSNAYMKRQIDGGELHRLVSKRRKLPQAAVDVWKFNRIRQKDGFLLDPLVHGMCATLRQTYERTFPHVIDPEAESGSVEHTPGVANDSIQDTHDHQLSPKSPGNTDAQPEHQFNQQAPRNSDGQPEPELNPKSQAKQARSHFDDMPEIPRFSPQNIPSPIRDDNSPFKTPGAGGTPKSRLGETPASGTPADMSYMSPGQDSDPQVSPFPFNDELDGDLPEIPSLMSTPGVISTAGTGTTGLGSMSARTRAVAQYFKDQMASATSDDQPGKFILNRILEGRHRKQAARMFFETLVLKSYDYIDVEQEAAYGDIAVSVKPSLSGAQFQCLDPHIISFDPREGALVGFAEMA

SEQ ID NO: 198129 - protein, 314 aa, Oryza sativa
  Clone ID: PAT_MRT4530_9381C.1.pep
MWGLLRRSSSSGFSSSSTAEEVTAGIDGSGLVALITGASSGIGAETCRVLVMRGVHVVMGVRNLSAGARVRDEILKQVPSAKIEILNLDLSSMSSVRRFAENFKALNLPLNILINNAGVCFVPFKLSEDDIELHFATNHIGHFLLTDLLLEKMKVTAIESGIEGRVVIVASNSYKHPYREGIRFDKINDESGYNKIFAYGQSKLANILHSNLLSSNLKEQDAKVTVNSLHPGAVVTNIMRHWYFVNGMGISVGKFFVKGVEQGAATVCYVALHPQVAGVTGKYFVDCNVTELKSHALDMGLAKRLWDFSLNLIH

SEQ ID NO: 198130 - protein, 146 aa, Oryza sativa
  Clone ID: PAT_MRT4530_93820C.1.pep
MSVMDRLAPRLLSTESSNHKMNPSSSSSPLLDNFFRSDRAKRMDTSKVQFSKDDLKEFDRYLDERTKQAERNLLLSLDKFCDACERRASLLRDIKAMLEARNKRSAQKLCFGFNVLRILKISISIEICSGPTKKYLEIPVPRASYA

SEQ ID NO: 198131 - protein, 228 aa, Oryza sativa
  unsure (1)..(228): unsure at all Xaa locations
  Clone ID: PAT_MRT4530_93821C.1.pep
MVTVHDPIDQQRPAYPVPFFNRTPRASCIATVAAAAPPCRHPASPAGRKVSTASARPRRLAPSPSPSLPQAGGGVLSVIFPIASGGAPPPAAYTGPPAAPNPAASTEPPPPSRPPXSAARRRATASHGHPFKASELPLFPPPSFPPPLPHPTXDPNSSALCQSLGSPAPEKKRWLPELEKKSTNREAHPVEWRWGNPIRRGTFQRTGPAEKLFGKGALHIAHMLLLSR

SEQ ID NO: 198132 - protein, 86 aa, Oryza sativa
  unsure (1)..(86): unsure at all Xaa locations
  Clone ID: PAT_MRT4530_93822C.1.pep
MAPMKLYGLTLPXNVTSCLSVLXEPAHEYEIVPLDFSKGLHKDPLHLCMNQSVHLPTLXDGDLFLXESRASRKYVCRMNKPDLLQD

SEQ ID NO: 198133 - protein, 159 aa, Oryza sativa
  Clone ID: PAT_MRT4530_93823C.1.pep
TRLGLDVGGGTGTLAARLKRAANATVLTTTMNLGAPYSEAAAARGVVPLHAPLQQRFPVGDATMDLVRAGHAVNRWIPEAALEFLWYDADRVLRPRGLLWRDHFWCRRPDLAAVYQPMLRRLGYKTLKWAVADKTTPTPTAPPGAKHDHVYLTALLQKP

SEQ ID NO: 198134 - protein, 222 aa, Oryza sativa
  unsure (1)..(222): unsure at all Xaa locations
  Clone ID: PAT_MRT4530_93824C.1.pep
MAAAAAEIVGSAAARMAAPAVRPAPPAAAAAAAPPQPRRAVAARSLRTSTSDRVAADLALGSNGSLSAQNIAENTADATSQVVSANSRRKTKIVCTIGPSTNTREMIWKLAETGMNVARMNMSHGDHQSHQKVIDLVKEYNAKNTDGNVIAIMLDTKGPEVRSGDVPEPIMLEEGQEFNFTIKRGVSTKDTVSVNYDDFXNDVEVGDILLVDGXMMSLAVKS

SEQ ID NO: 198135 - protein, 35 aa, Oryza sativa
  Clone ID: PAT_MRT4530_93825C.1.pep
MSRRPPAENGLDWTSPSAPLDVGFGVDVQDFSPMT

SEQ ID NO: 198136 - protein, 582 aa, Oryza sativa
  Clone ID: PAT_MRT4530_93826C.1.pep
MAAAAAEIVGSAAARMAAPAVRPAPPAAAAAAAPPQPRRAVAARSLRTSTSDRVAADLALGSNGSLSAQNIAENTADATSQVVSANSRRKTKIVCTIGPSTNTREMIWKLAETGMNVARMNMSHGDHQSHQKVIDLVKEYNAKNTDGNVIAIMLDTKQMSCDDRTSVMQGPEVRSGDVPEPIMLEEGQEFNFTIKRGVSTKDTVSVNYDDFINDVEVGDILLVDGGMMSLAVKSKTADTVKCEVVDGGELKSRRHLNVRGKSATLPSITEKDWEDIKFGVENGVDFYAVSFVKDAKVIHELKDYLKSANADIHVIPKIESADSIPNLQSIIAASDGAMVARGDLGAELPIEEVPLLQEEIVRTCRSMQKPVIVATNMLESMIDHPTPTRAEVSDIAIAVREGSDAIMLSGETAHGKFPLKAVKVMHTVAQRTESSLYNPTTSPSLVAHPQALLNEEFSQSQLSKMFGSHATMMANTLCTPIIVFTRTGSMAVLLSHYRPSSTIFAFTNEERVKQRLALYQGVVPIYMKFSDDAEETFSRAISSLLNAQFVKEGDYVTLVQSGVKSIWREESTHHIQVRKVQG

SEQ ID NO: 198137 - protein, 116 aa, Oryza sativa
  Clone ID: PAT_MRT4530_93827C.1.pep
TVINLKRKKMVVVTRRKMEHSFFLNYDVAEHRLRCWLALKNICSPSLLSFLPSFLPSFLRVLPLYVSRRADNIRRGFCTSIFASIKINRIPAPPWRREHATSGPIRPIVSRIHLPL

SEQ ID NO: 198138 - protein, 191 aa, Oryza sativa
  Clone ID: PAT_MRT4530_93828C.1.pep
MPAMAKPASRAAKPASAPKKQKAKPSAAAGGSSHPPYFEMIKEAITVLKERTGSSAHAIAKYMEEKHGASLPANYKKMLSIQLRGFASKGKLVKVKASYKLSDAAKDSPKAKPAAPAPKAAAPKPAKDAAKPKKDAAAAKPKKAPAAGTKRKAPEKKVVAKPKKSPAAKAKAKPKTVRSPAAKKTRKAPAA

SEQ ID NO: 198139 - protein, 385 aa, Oryza sativa
  Clone ID: PAT_MRT4530_93829C.1.pep
MASAASATESQKSAKPKGSTASQEDEAKDDIEMLLEGLDLRKDEEEDVELEEDLKELEADARWLALARVHTEKSFSHGALFASMRSAWNCAKEVDFRSMKDNLFSIQLNCLADWERVMEEGPWIFRGCPVLLAEYDGWSEIESVVLETYPTWVQIHDLKEKIRTGSIATQLVRKAGTVIKLDEASVKGSGDGVRMLVFCGICGLVGHVTKEHGDGVHLPEAIQYPDTLVAPEFRRSGNWFNGGGRKGRGQGRGRGWSGRSYRPDSDMAAYDGGDDEEMMDTATSPSKQVAKHYAPSTSVKKRLALEQVTSPNLKSKQALLLENTPVQDDGNINTEALPKEVDESNSKEEDSSTSLDSKRQKKVDEGSNTDDLATSAGSLEEYRRA

SEQ ID NO: 198140 - protein, 683 aa, Oryza sativa
  unsure (1)..(683): unsure at all Xaa locations
  Clone ID: PAT_MRT4530_9382C.1.pep
MNPYFIGFAIPFLASLLFTKRKGEKKRGVPVDVGGEPGYVIRNHKFERPVETHWEGVSTLAELFEQSCEQYVYMPLLGTRKLISREMEAARDGRSFEKLHLGQYEWKSYADAFKTVCNFSSGLVRIGHQRDERVAIFADTRAEWQIALQACFRQSITVVTIYSSLGEGALCHSLNETEVTTVICGRKELKKLLDISGQLDTVKHVIYVNEEGVSSEVSLAQKCTSWRVESFEEVERLGLETPVEAKLPLPSDTAVIMYTSGSTGMPKGVMMSHRNVLAVVSAVMTIVPALGKKDVYLAYLPLAHILELAAETVMSAVGASIGYGSPLTLTDTSNKIKKGTQGDASALKPTLMTAVPAILDRVRDGVRKNVDAKGGAAKKLFDIAYSRRLAAINGSWFGAWGLEKHLWDMLVFQXGGAPLSGDTQRFINICLGAPIGQGYGLTETCAGGTFSEYDDNSVGRVGAPLPCSYIKLIDWAEGGYLTNDSPMPRGEIVIGGPNVTKGYFKNEAKTNEVYKDDERGMRWFYSGDIGRLHPDGCLEIIDRKKDIVKLQHGEYVSLGKVEAALSVCPYVDNIMIHADPFHNYCVALVVVAHSELKSWASQQGITYSDVSDLCEKQETVKEVLQCLAKAAKQARLEKFEIPAKVKLVPEPWTPESGLVTAALKLKREAIKKAYEDDLAALYS

SEQ ID NO: 198141 - protein, 71 aa, Oryza sativa
  Clone ID: PAT_MRT4530_93830C.1.pep
QCSLQSCTTLPLTDLYTKSLYEPMNEQPPSSSSSTSDMTMCSTAAGLSSPSAGFYLPGDERDVAFSEAIIK

SEQ ID NO: 198142 - protein, 156 aa, Oryza sativa
  unsure (1)..(156): unsure at all Xaa locations
  Clone ID: PAT_MRT4530_93831C.1.pep
SREKEKTSGEHSSGMAVGSRGTAAGAWTRDGGGGLDGGWTRGGXRGGLEGDDGERTDXAAAVAGRAAAGRGWTRRARGGQWRADGRAAAGGWMRDAGGRLDAQRRRQPRLATTTASWMRDGDDGGGLDGRRRRQPRLATTTAGWMGDGDDDGGLDG

SEQ ID NO: 198143 - protein, 82 aa, Oryza sativa
  Clone ID: PAT_MRT4530_93832C.1.pep
SLHHNQQWVHMESSLEHLEAHHNSSYNIKLHIWHHQHQPSKLTRNISTNKQRNSGLCPFRFSDEISQTTDANCTKLGKNDGL

SEQ ID NO: 198144 - protein, 91 aa, Oryza sativa
  unsure (1)..(91): unsure at all Xaa locations
  Clone ID: PAT_MRT4530_93833C.1.pep
GRTNYRKRKERKAAGRKTTIRAGCADRRQAAVRPVAXGRSDRQRLQARQASSGGRTDRSTPVRPTTSGRSDRWIIFGRLRWLRLRRQLRTV

SEQ ID NO: 198145 - protein, 188 aa, Oryza sativa
  unsure (1)..(188): unsure at all Xaa locations
  Clone ID: PAT_MRT4530_93834C.1.pep
MGGRVFLSFTVSREKEKTSGEHSSGMAVGSRGTAAGAWTRDGGGGLDGGWSGGGGGTRGGWKGLDAAGSRGTVAGGXDARRQAAGCATPAAGWMHNGGGWMRDGDDGGGLDGRRRRQPRLATTTAGWMGDGDDDGDDDGRLDGRRRRPXWMHGGGGDLYWRRRRRAGWARTKRCFFCPIIPLLNQRLD

SEQ ID NO: 198146 - protein, 368 aa, Oryza sativa
  Clone ID: PAT_MRT4530_93835C.1.pep
MNSNVPIVSYFHMHLKERMLRPFKQDQGDCKDDEPQFWGQEFQHRIPAIHRNTWSPPPKGWIKLNFHGTGCSKNRSAGMGGVFHNDEGALSYFIGSLGNVDQTVASIQALEHGLEIMLEHHEPVKKLIVEGDDLTVIRWCNKISCPPARAHDSFLHSYWYMDLMPCEGAGVLAGSSKETNNESDSSSQDASPVKPLNDCSSENDKDEYDGSLQDASPSEPPNDSNCESGKYENSDSLQDASPAELSEVCYNGNGSLQDASPAELSEVSNNGNGSLQDASSSELSEVCNNENGQDEDGCSSSSEFVIPPGWAQREYIAWRVEEEANQTAIGLARLGTALPDHGIMVHLSTKCDCEHGREMKKGRPDITW

SEQ ID NO: 198147 - protein, 273 aa, Oryza sativa
  Clone ID: PAT_MRT4530_93836C.1.pep
MWVWGLGFSTKFDQRRSWVPAYFSDIPLSGLLRTTSRSESANSFFSRLIGRKLALVEFWLRFDAALEEQRHKELEEDNITLHTIRNLKTEWVIEKHAILRSAQLSELPRYYLLERFRKDCKKTHVFDADGILLEENTSNSNDPVMQKMLSEACNQMEKLILQAKQSAAAMQLLRDELVVLGDKLNEMVPEKELSQIEEFESYLGCSIPSQIEIHPPNDTRSRGRIKRIKGHNDKEKKQNKKIKKKERVPQRCKKCKQVVLHDSRNCPNKEPQQ

SEQ ID NO: 198148 - protein, 38 aa, Oryza sativa
  Clone ID: PAT_MRT4530_93837C.1.pep
SYTRAPQYLETAQCVYVLSALCVCIVSRHVTHEEAAGI

SEQ ID NO: 198149 - protein, 35 aa, Oryza sativa
  Clone ID: PAT_MRT4530_93838C.1.pep
MVMAAPEEGIVQAVRSSMVPSEIPSGPCRSAVVEE

SEQ ID NO: 198150 - protein, 97 aa, Oryza sativa
  Clone ID: PAT_MRT4530_93839C.1.pep
MTTRRGRRGCAGGAGVAAVWGASGGCAQSAAGSRQLAATPCWDSVGCGLRQRRVGRGRLQAPRQLHVKQRSSQHRHVGATSAKPPSKTAQGVKLCRF

SEQ ID NO: 198151 - protein, 368 aa, Oryza sativa
  Clone ID: PAT_MRT4530_9383C.1.pep
MGLITSGPLVPLSVGARSSPRWLSGSGCDTAAAAAPGPSGEERTGRRSGEEEEEEEHAGMDAPVAVAVPPQPQPQQPPAPAAAPPYRWSRAVARSPAAWMRLGVGGLLVGSIIFAFYEWGLPLLSEKVLLPIMRWEARSFGRHLLAIVLIASLAIFPVVLLPSSPSMWLTGIIFGYGFGFLIIMVGTAIGMSIPYFIGSLFRERLHEWLEKKWPREIALVKLASKGSWFKQFRVIVLLRISPFPYSMLNYTVTVTQIKYGPYICGSVVGMVPDALVNIYSGRLILTLAGLKYHNHRLTTVEIVYNVISITVAFLVAIGFTVYAKRALDEMERSEGTCPEPAGIAHGSTELRAHHQECSNSSSVPIDVV

SEQ ID NO: 198152 - protein, 398 aa, Oryza sativa
  unsure (1)..(398): unsure at all Xaa locations
  Clone ID: PAT_MRT4530_93840C.1.pep
MWVWGLGFSTKFDQRRSWVPAYFSDIPLSGLLRTTSRSESANSFFSRLIGRKLALVEFWLRFDAALEEQRHKELEEDNITLHTIRNLKTEWVIEKHAILRSAQLSELPRYYLLERFRKDCKKTHVFDADGILLEENTSNSNDPVMQKMLSEACNQMEKLILQAKQSAAAMQLLRDELVVLGDKLNEMVPEKELSQIEEFESYLGCSIPSQIXIHPPNDTRSXVLRSAQLSELPRYYLLERFRKDCKKTHVFDADGILLEENTSNSNDPVMQKMLSEACNQMEKLILQAKQSAAAMQLLRDELVVLGDKLNEMVPEKELSQIEEFESYLGCSIPSQIEIHPPNDTRSRGRIKRIKGHNDKEKKQNKKIKKKERVPQRCKKCKQVVLHDSRNCPNKEPQQ

SEQ ID NO: 198153 - protein, 58 aa, Oryza sativa
  unsure (1)..(58): unsure at all Xaa locations
  Clone ID: PAT_MRT4530_93841C.1.pep
KKKKKKKKKKKKKKKKKKKKKKKKKKKKKKKKKKXXGXXVKKTKINAPFQSKGMGFIR

SEQ ID NO: 198154 - protein, 309 aa, Oryza sativa
  Clone ID: PAT_MRT4530_93842C.1.pep
AITAPGRLPSPPGRRAPPRAACRIQAPGAPMATARTLAAAAAAARAFSLTATSGGGVSMVQGASRGIGLEFVRQLLKRSDEGRVVATCRAPDSAVELQKLRQEHEQRLAVLPLDVTDESTIEAAAASIGETHGSLNLLINATGILSIPNVIHPETTFSKVQKSSLLLAYEVNAVGPILVIKHMWPFLKAGGCSETGRGFSLVANMSARVGSIGDNGLGGWHSYRASKTALNQLTKTVSVELGKKDNIACILLHPGTVDTDLSRPFQKNVPKDKLFTREFSVQKLLSIIDNVKKSDNGKFFAWDGQEIPW

SEQ ID NO: 198155 - protein, 151 aa, Oryza sativa
  Clone ID: PAT_MRT4530_93843C.1.pep
MSVWERGTDIGRSSRRAELANDDADDTAGDLQQRARASPHSRERGGGRACNHRHHLVQPLNHTEVRIPILHSNGSEAAAATEGDDRRAQSDDNDGCPDDRDLREVMVYGGGRWRDGEREERAERGTAQYGGRTTGEEGAGWAGWEGGASVG

SEQ ID NO: 198156 - protein, 127 aa, Oryza sativa
  Clone ID: PAT_MRT4530_93844C.1.pep
GDATAAHGARNDGDGAGREAARGRARGDGTGDATVERGSRRRVRGARRRVRGARRRDGCATRQRRQDATATGRDGDGARGGERAALRRNGRAAAGGDGDSARRLGARGARGRGGGRAREPRRALTTQ

SEQ ID NO: 198157 - protein, 266 aa, Oryza sativa
  Clone ID: PAT_MRT4530_93845C.1.pep
MMAVVAGASTSTLAGVWRGARPLLRVTGGVVGIISKCAGQFIIDHQAWNLSQGGRRSDAGEEEVRWPVMGDATVAATQEQVSSYLCCDVTITTMDITITHIIDQQEEIKIKGLFGIRLIYTSKINNPQRDVFSWQSSDMPKVPREVIEYKLMVRPDAKPVKQKLRRFKPNRKQAIREELHKLLKAGFIREVLHLEWLVLVLLNVIDRMRKWHGRYRCSTSPGSIPRYGSTAYPDREDFSVIEDCHRLYTHLKPTVGYKAIIGKLTT

SEQ ID NO: 198158 - protein, 58 aa, Oryza sativa
  Clone ID: PAT_MRT4530_93846C.1.pep
MEGQAGWVLPGFDRIRAQQASSFGLLTDSYIDGQNLSVMTVNTYLECSIPLTKNDDCL

SEQ ID NO: 198159 - protein, 164 aa, Oryza sativa
  Clone ID: PAT_MRT4530_93847C.1.pep
RRPLRPQRRPSAASSLPPASAASVAPASRLPPSPHRLLPPANRLPRRRLPISVARAPQRLHRRMGAAEDIDVAASGSSAPPAAHLTLPTACQPRRRRKKPRVFETPSTPRASGSSVVTPTDTPSAARLALPTARAGEGSISNAAASVASSLLARSSRGRRTRRC

SEQ ID NO: 198160 - protein, 60 aa, Oryza sativa
  Clone ID: PAT_MRT4530_93848C.1.pep
GIKKPAIRRLARRGGVKGISGLIYEETRGGVKIFFEKVIREAVTYTEQARGRTVTAMEVV

SEQ ID NO: 198161 - protein, 429 aa, Oryza sativa
  Clone ID: PAT_MRT4530_93849C.1.pep
MTGGSGVVVLDNGGGLLKAGFGGDMNPTAVVPNCMAKPPGSKKWLVADQLQAQDVDVTGMTLRRPIDRGYLINQEVQREVWERVIRNLLQVDPNNSSLLLVEPQFNPPALQHATDELVFEELGFKSLCVADAPSLVHLYEASRQPSLFRAQCSLVVDCGFSFTHASPVLQNFTLNYAVRRMDLGGKALTNYLKELISYRSLNVMDETLLIDDAKEKLCFVSLDVPGDLRLARLSSNDNPFRCSYILPDGITYKKGFVKDLDEACRYSSLPANGESVRKDSSDSDRSKFEDKKKPELSQNEFVLTNERFLVPEMLFHPIDLGMNQAGLAECIVRAIQACHPHLQPVLFERIILTGGSTLFPRFTERLEKELRPLVPDDYQVKIIAQEDPILGAWRGGSLLAHRPDFESMCITKSEYEEMGSMRCRRRFFH

SEQ ID NO: 198162 - protein, 241 aa, Oryza sativa
  unsure (1)..(241): unsure at all Xaa locations
  Clone ID: PAT_MRT4530_9384C.1.pep
RKXLVGWLRIXTTSSXKSYRXMYLVVKSICTASISHASSRKWRSSVNLTEKQFDPTRMAAEGMGGEGVEESLPGQAGADADLLPLLRRLTASFPMQTGGRGSSPLPLSASALAVAPAAAAVVAVDLEATRSVSASASGFSASSPHAPDASRPAMHVISPAAWEETTSRRRQRPADPPAVQAQLDLGVRDFESGTLHCTIDPWRRVVASPPSLAGFAASTLVCTVSNFKMKLLPDHCAQLNQ

SEQ ID NO: 198163 - protein, 83 aa, Oryza sativa
  unsure (1)..(83): unsure at all Xaa locations
  Clone ID: PAT_MRT4530_93850C.1.pep
LVCCCSLKHNSVLSCXTFCGKIEFVSPRLNDLLCXVMERVNGCLDLXACFVLLVMGFAHFISEISSWRLNXFPFITVSAVSVL

SEQ ID NO: 198164 - protein, 383 aa, Oryza sativa
  Clone ID: PAT_MRT4530_93851C.1.pep
MSFGRGRGHAVLRAAAADPRCALASSLAAHHVAPRDPARAAAFLAAAADNLGAATEYERAVFRALSALIGEERDEQVAIERHFELLKEFPRDLMSLKRAQLICFYMGRPDTSLKFVEQVLPENQDQNYIYGMLAFPLLELGRMDDAEKAARKGLAINKNDCWLTHNWWHVAVCYLEGEFPTSKVLEIYDHNFMTELEKSDCEAAEVYLNALGLLLRLHIRGQVDLAKDRLAALLDALTNEKIWHVEWLLDLLVLWALSSMGEITRADNLLESLRSRVSSMDTKKQQVMQKAIQLAEAVYEYGKGEHKKVFDILGPDFDALSCKELMQFGLYTAIEVLEKQIRKREGAPFLWRLLEKAYSLHGRAADASVASEKANALQAAYSR

SEQ ID NO: 198165 - protein, 423 aa, Oryza sativa
  unsure (1)..(423): unsure at all Xaa locations
  Clone ID: PAT_MRT4530_93852C.1.pep
MRTSGTCEDEEGVNLDLARTVFFGTGSKRGHWEELGTGGSLAASSSGGTSSFLLPSRTKVNSTNASPGAATEYERAVFRALSALIGEERDEQVAIERHFELLKEFPRDLMSLKRAQLICFYMGRPDTSLKFVEQVLPENQDQNYIYGMLAFPLLELGRMDDAEKAARKGLAINKNDCWAACSSFMLTHNWWHVAVCYLEGEFPTSKVLEIYDHNFMTELEKSDCEAAEVYLNALGLLLRLHIRGQVDLAKDRLAALLDALTNEKIWHVEWLLDLLVLWALSSMGEITRADNLLESLRSRVSSMDTKKQQVMQKAIQLAEAVYEYGKGEHKKVFDILGPDFDALSCKMIGASDEQVDVFNEVWXELMQFGLYTAIEVLEKQIRKREGAPFLWRLLEKAYSLHGRAADASVASEKANALQAAYSR

SEQ ID NO: 198166 - protein, 323 aa, Oryza sativa
  Clone ID: PAT_MRT4530_93853C.1.pep
PTRPPTRPQDQNYIYGMLAFPLLELGRMDDAEKAARKGLAINKNDCWSQHNLCHVFQQECHFKEATEFMKSCSPSWAACSSFMLTHNWWHVAVCYLEGEFPTSKVLEIYDHNFMTELEKSDCEAAEVYLNALGLLLRLHIRGQVDLAKDRLAALLDALTNEKIWHVEWLLDLLVLWALSSMGEITRADNLLESLRSRVSSMDTKKQQVMQKAIQLAEAVYEYGKGEHKKVFDILGPDFDALSCKMIGASDEQVDVFNEVWYTVLINTGESSRAIEVLEKQIRKREGAPFLWRLLEKAYSLHGRAADASVASEKANALQAAYSR

SEQ ID NO: 198167 - protein, 42 aa, Oryza sativa
  Clone ID: PAT_MRT4530_93854C.1.pep
MSETVRAPQINVKGFVWSVCAAVPTPNPPYNLHAVIIFGANL

SEQ ID NO: 198168 - protein, 111 aa, Oryza sativa
  Clone ID: PAT_MRT4530_93855C.1.pep
MAIWKARILMLLALGGAAGCCPAARAEEAAAAEEGGDAAAEAVLTLDAAGCDQAVGKHPFMGAEFYAPWCGHCKKTHSEYEKAAQELTKHEPPIGVAKDEANKEKNKPLAT

SEQ ID NO: 198169 - protein, 57 aa, Oryza sativa
  Clone ID: PAT_MRT4530_93856C.1.pep
SRGTLWFLPQESRVAPTPTQVTYTPNYFLPPFRNPTLKFFNMSHRTFEHLYKILNIG

SEQ ID NO: 198170 - protein, 86 aa, Oryza sativa
  Clone ID: PAT_MRT4530_93857C.1.pep
LRRRLPVPHLAATSSRPAEALSLLRARGLCGSLLHPRRLCSSVAPVAAAKPGAAGKPPGPAPPSPRMHGAEPLAYYAFDITIFMTC

SEQ ID NO: 198171 - protein, 305 aa, Oryza sativa
  Clone ID: PAT_MRT4530_93858C.1.pep
MYPGTWSLMPPNTGFGVNQQNYLMTPDITLPQRSLNAKFGGNGAFTSLRAHGIDQRSSGWLGHIEPSSHIDDASSSLIKPQPLVIDHNVQNAKGGSCMLFGISLDSPAKPELLISPPSVAFDGKLQQDALEEDECSDPSKTVKPLDGAQHDSAREKHQSCPDGTKNIQSKQQNGSSRSCKKVHKQGIALGRSIDLTKFTCYDELIAELDQMFDFNGELNSSSKNWMVVYTDNEGDMMLVGDDPWNEFCNMVHKIFIYTREEVQKMNPGALNSRSEDSRSTSVERGLVGEGLQGGLSTPSLNSENC

SEQ ID NO: 198172 - protein, 116 aa, Oryza sativa
  Clone ID: PAT_MRT4530_93859C.1.pep
MGCRMRSGSGLQDPFEGVREAGVDGGWGNLAGVDGLAGIWPPASVVRGGRRGRRRGRRRPGMTNSNAWPTQQGWILIRDDATMFRKSCTADVLACSLSDKPTIPGCIVLLVEPEDT

SEQ ID NO: 198173 - protein, 147 aa, Oryza sativa
  Clone ID: PAT_MRT4530_9385C.1.pep
RGGPAAGEAPRALARSCLPRHDTPRFILGGGEFGFWILGHRVNGGAAGVGGGGGAGVGGGVAARGVQPGDAPRRPGPRAALLRAAPPPRPPRRVPLHPLRPRPSHAPPPLPSPARPPAPPPPPPASGVRRSRTYVLPFPFLLLVLVG

SEQ ID NO: 198174 - protein, 82 aa, Oryza sativa
  Clone ID: PAT_MRT4530_93860C.1.pep
MESLASRRWLDPQHACQNHFMQHVKHHPRLLLLQAIDQWLTGKGGVGHGNGGGRRGRRGLISLSGAPLSGVLEGKWRGGRGD

SEQ ID NO: 198175 - protein, 166 aa, Oryza sativa
  unsure (1)..(166): unsure at all Xaa locations
  Clone ID: PAT_MRT4530_93861C.1.pep
GRVGERERAPPSLSPSSPLPAANKXDGRVRQQATVVSIPFSFPNLLPMPNIPSFDSILFHPLYQRKRXSPLEALEHARSAAAXTSPSFQPLWTKPSRATAPSSSPRPPLHLPSRTPDNGAPEREIKPLLPRRPPPLPWPTPPLPVSHWSIACSSSNLGWCFTCCMK

SEQ ID NO: 198176 - protein, 282 aa, Oryza sativa
  unsure (1)..(282): unsure at all Xaa locations
  Clone ID: PAT_MRT4530_93862C.1.pep
INIFFSRIFILCLDLLKIQTSFYIASFLYFSSLWSQFHLCRSLSTAQQPRENEREKESCACMLDACSLVXQRRSSPTPSXSSIAQLSSSLQCREHRXERAPPSLSPSSPLPAANKXDGRVRQQATVVSIPFSFPNLLPMPNIPSFDSILFHPLYQRKRGVAPGSSGARTERRRTTSPSFQPLWTKPSRATAPSSSPRPPLHLPSRTPDNGAPEREIKPLLPRRPPPLPWPTPPLPVSHWIEPSPXTPSSPSPPSRPASCCCRPSFASIVRPLDDCINGEEVN

SEQ ID NO: 198177 - protein, 190 aa, Oryza sativa
  unsure (1)..(190): unsure at all Xaa locations
  Clone ID: PAT_MRT4530_93863C.1.pep
CGQTTKFQRLLLVHLANFLPTWELTTHHYFAFTSLYLLQICKPSSSSVFFLPWAPHKCKLHXLAIQNKVXTSDRLATXDXPNGSICPLRXQTQEMALHLLAGCIYTRTXAALADWTTYGQLDPTQWQQASIVLEWXENTSSIKEAPKKGTTHTNTANCLRDXNERNRRTFPHKELLAPSLLAKIKEETKT

SEQ ID NO: 198178 - protein, 639 aa, Oryza sativa
  Clone ID: PAT_MRT4530_93864C.1.pep
MGTHFSPCGRFLVACVACLLPQTEVGEHFSPTSEHILLAYGRRHNSLLRGIFMDGKTTIPVYTVLEVYRVSDMELVRVIPSAEDEVNVACFHPSPGAGLVYGTKGGGSMECVRSGSGVLDPRCSPRFLGKKGGSLTSCGKATSTNLAICTKHEQNLHGNVKPSQLAASGSSYSVHRSPVLKQRQNLSARSTSADVYTTFDENVRAVSSHAAEEKVGVLLLNLGGPETLDDVQPFLFNLFADPDIIRLPRLFRFLQRPLAKLISTFRAPKSKEGYASIGGGSPLRKITDEQANALKVALKKKNLNANIYVGMRYWYPFTEEAIDQIKKDKITKLVVLPLYPQYSISTSGSSIRVLQNIVKEDSYFAGLPISIIESWYQRDGYVKSMADLIEKELSIFSNPEESVIGTCHFRMIHVNVMIFFSAHGVPLTYVTDAGDPYRDQMEDCIALIMGELKSRGILNSHTLAYQSRVGPVQWLKPYTDEVLVELGQQGVKSLLAVPVRFISLTIQEWLVQFAFFFPTSPCDYLLVLTNLSSISFVSEHIETLEEIDMEYKELALESGIENWGRVPALGCTSSFISDLADAVVEALPSASALVTKKVDESDSDMDLMHYLSKMFFGSILAFVLLLSPRLISAFRNTLL

SEQ ID NO: 198179 - protein, 49 aa, Oryza sativa
  Clone ID: PAT_MRT4530_93865C.1.pep
DHNIPKPVIQHKNLTYLYIKFIAEFFTSDATSYMYSPFILLINYLMMRH

SEQ ID NO: 198180 - protein, 62 aa, Oryza sativa
  Clone ID: PAT_MRT4530_93866C.1.pep
ISSDTVCPFEVLKMNSSSQHKPQCRMITRMDISASYPPMLSFNSSWYSGDQGRSTTAKKTMW

SEQ ID NO: 198181 - protein, 64 aa, Oryza sativa
  Clone ID: PAT_MRT4530_93867C.1.pep
YHGCPRCAIRPRDRSTMRTQVMKACTTEICTKLQAITCSSFKRIYRRSLILPDNRSEFLYTDNS

SEQ ID NO: 198182 - protein, 151 aa, Oryza sativa
  Clone ID: PAT_MRT4530_93868C.1.pep
MVVIVVAAVLRSWQQRMWYRGSATPVTGLTALMWVVVKCSAVEAIVVEVDPDEADPPDEAGLSRGARRRLTGRWLTTRGGASCRIRSTSAWAGGDDEERSPADGLEELGANDRCRFCYFADLGRARASLAATLRAFVRCGVQALRQRIWIL

SEQ ID NO: 198183 - protein, 172 aa, Oryza sativa
  Clone ID: PAT_MRT4530_93869C.1.pep
MGGPLLRRGESGSWTTGHPGRPNSITPSLATGLTSAKAGGGAGKQGPHVSGTKGGRSTMDRDHAGTARLGTKPAGRPWGATATGGGKRRRTVRKAAADGRSGGAAKDDDACAKGGGAHGREERKEERGFLTGEHGGRREGRRRQRRLASGGAATALAAAACGESGTVMGHGK

SEQ ID NO: 198184 - protein, 142 aa, Oryza sativa
  Clone ID: PAT_MRT4530_9386C.1.pep
MDTVGARLSRSSTRYGPVGNTASSFSGPVRKWRKAWVPIAAGGAGYAGMMGPMGVSRGNKVVLFRWAPVNGGAAGGGGGSGDGDESAAVAATRRRFVPASGVAQNSTKKSGSTELNLNLGLEDPDDDSDADLSAEEQRDSGK

SEQ ID NO: 198185 - protein, 174 aa, Oryza sativa
  Clone ID: PAT_MRT4530_93870C.1.pep
MVSATAVKIAAIFMVALTIGQLMAEASSSSSPQPRRLLEVDDDDDGEVVEAELDEATLLADELATIVQGCRSICHRHPKSWRHDGRVIGRPGGGVNWRHHHQATAIPEESTYRTPPHIPPPPADRRQLGILSATGGARGDVPCSRLGASNYKCRHGASTNPYHYGCSRISRCRG

SEQ ID NO: 198186 - protein, 408 aa, Oryza sativa
  Clone ID: PAT_MRT4530_93871C.1.pep
MGRHRRPTPTMDRPPAPAPAVALLLVVVVVAAAVMLAAVEGAGAEATGVFHVRRSLPAGGAGAAAEAYRAHDGSRGGRLLAAADIPLGGLGLPTDTGLYYTEIGIGTPTKRYYVQVDTGSDILWVNCISCDRCPRKSGLGLELTLYDPKDSSTGSKVSCDQGFCAATYGGLLPGCTTSLPCEYSVTYGDGSSTTGYFVSDLLQFDQVSGDGQTRPANSTVTFGCGSQQGGDLGSSNQALDGIIGFGQSNTSMLSQLSAAGKVKKIFAHCLDTINGGGIFAIGNVVQPKVKTTPLVPNMPHYNVNLKSIDVGGTALKLPSHMFDTGEKKGTIIDSGTTLTYLPEIVYKEIMLAVFAKHKDITFHNVQEFLCFQYVGRVDDDFPKITFHFENDLPLNVYPHDYFFENGVM

SEQ ID NO: 198187 - protein, 90 aa, Oryza sativa
  Clone ID: PAT_MRT4530_93872C.1.pep
KIFFPQGQKFWGKKEPAKPLNFLEGAFYRGSFFFFGQNFSEEGPSGPNLFSPPFLGASFPCLNWGGPPQQFFRPWGDRAFLVWGKNWSPL

SEQ ID NO: 198188 - protein, 104 aa, Oryza sativa
  Clone ID: PAT_MRT4530_93873C.1.pep
MAMGGEEREGAWALRAAMGDAAEGGGLCLHPLAACARSGGAEAMTTAMTAGRCGAVRRHGRQARAGADDGGDQAARQDSGAGRRRRDAGDDHAGACARTTRGER

SEQ ID NO: 198189 - protein, 461 aa, Oryza sativa
  Clone ID: PAT_MRT4530_93874C.1.pep
MHACGSRWVRKRRAHAQPHGSRWIARASGAEGNWRTGVSLTQSRPRWRLRGCHAGRREEDDDVGRNGRRTTAASSGAIYSDAGKGERTGRLRGTRGDEPTAWIRRRGPDGGGLRRRQPAAREGGNGDGATGDRFGVGLDGDTTREAGDVRVLRSTGADGGEHTASGGSGRSRSELALGGRSQNGDREDDAGGEKKEEKKEGKETCLLPLWEKKEGERERATRQWEEELCLQSLGACAAVAGPGHDDGDDGGGGLEGRDYRAAGADGGSDWSVGQHGARAREATARGIQNLGAGLAGERETGSGRARERESGERERWRSAWRRLTRTLPAAPSRAGPPRAPASAASPRLHGLSLGGAEDSARRMHLVLTIADPAIAGFAAVIDGAHGQEIGRWRGTRLVITLAGPAAVFSETREEIVDERADARHRSIATAGDARHDSLNRSRPRAVGEATVYAGKNTPPRG

SEQ ID NO: 198190 - protein, 80 aa, Oryza sativa
  Clone ID: PAT_MRT4530_93875C.1.pep
LPQLHVGIHAWLVHVSLIISLWRRNMLGRVSSVSRFPSLRFRPSRPFVVALAWYMPLLDDRVPPRSICVFIYTSVPYIDR

SEQ ID NO: 198191 - protein, 87 aa, Oryza sativa
  Clone ID: PAT_MRT4530_93876C.1.pep
WPGSSVCLDLLTVEKCSVAVHPETAISCAVSYVLFVLLYYCTLADSSLHGNSQEESCMILLLVASRRWRYSVIGCLLPLIDTHVVEF

SEQ ID NO: 198192 - protein, 148 aa, Oryza sativa
  Clone ID: PAT_MRT4530_93877C.1.pep
MTRGRLHGSDLSGLGLGKRKKTSARSPLPRPSTHRLLRHTRRRRSAIERQRGRQWRGRSRSELALGGRGQNGDWEDDAGGEKKEEKEGGKETCLLPLWEKKEGERGRRGSGKRSSASNPWEHARWWRGRVVTTAMTAGAVWKGAATGR

SEQ ID NO: 198193 - protein, 63 aa, Oryza sativa
  Clone ID: PAT_MRT4530_93878C.1.pep
ICTRKQVQPKRAVYAIPHVLMCMSVSRLPTASSHGATTPPTLRELCWGHCPRRTKRLARTLLM

SEQ ID NO: 198194 - protein, 157 aa, Oryza sativa
  Clone ID: PAT_MRT4530_93879C.1.pep
WRCRRPPSGGPAGRCGTRSTAAPTRRAAPAPAPPSAAPPAPPARRRSARAPTLLPPAPPAAAPAAAAAPRSGAAAPPSTCRRTSPSPPAAAPSPPPPPAPRTASPCLHFFKINPTQFFPCLFFFLDLGMMKSIAIEQNSFYSLPRLLGSWMMKSIAI

SEQ ID NO: 198195 - protein, 233 aa, Oryza sativa
  Clone ID: PAT_MRT4530_9387C.1.pep
MIVRRLHFTRLAAAIADVAAAVAAASFPSGRPMDTVGARLSRSSTRYGPVGNTASSFSGPVRKWRKAWVPIAAGGAGYAGMMGPMGVSRGNKVVLFRWAPVNGGAAGGGGGSGDGDESAAVAATRRRFVPISYQVKIFPSAFPSRNRVRSNPSRSCCGLELVTMDLPVFYGRFGFLASGVAQNSTKKSGSTELNLNLGLEDPDDDSDADLSAEEQRDSGSNQRSDNRLKRKAF

SEQ ID NO: 198196 - protein, 72 aa, Oryza sativa
  Clone ID: PAT_MRT4530_93880C.1.pep
GEKKVASELHGLLPNPGLGPGRIRGPPSPGPGFRNGGHNMKSMAGAPFVYPIKVQSERRPRDVPWVSDSVGG

SEQ ID NO: 198197 - protein, 181 aa, Oryza sativa
  Clone ID: PAT_MRT4530_93881C.1.pep
MYPSAPPDAYNKYSAGAPPTAPPPATYQLPTMNTPRTGGGLTRWSTGLFHCMDDPGNCLITCVCPCITFGQVADIVDKGTCPCLASGTAYALLCASGMGCLYSCFYRSKMRAQFDLDEGDCPDFLVHFCCEYCALCQEYRELKNRGFDLGIGWAANVDRQRRGVTGASVMGAPGVPVGMMR

SEQ ID NO: 198198 - protein, 58 aa, Oryza sativa
  Clone ID: PAT_MRT4530_93882C.1.pep
KAIAFITLEAKKTFGFITAAWLYTIQPRNNFADMKQEIIGKRKNLFHAGTAVTSANTR

SEQ ID NO: 198199 - protein, 48 aa, Oryza sativa
  Clone ID: PAT_MRT4530_93883C.1.pep
GFFYFLVFFFFFFFFFFFFFFFFFYKGKTNSIKIMPKKNFQGARPKHW

SEQ ID NO: 198200 - protein, 104 aa, Oryza sativa
  Clone ID: PAT_MRT4530_93884C.1.pep
MFNNNNNNNNNNNNNNNNNNNNNNNNNNNNNNNNNNNNNNNIKNRANENQDKKNIHNNTNTNIYGWNNLFSRSNSYCMIKRLFSKMCTILMFLIFLTSTIYNAN

SEQ ID NO: 198201 - protein, 115 aa, Oryza sativa
  Clone ID: PAT_MRT4530_93885C.1.pep
SIHHARARTGVYGHYYLEYSSTLAGDLQRILSTMRELDERAHGIMGQTKEQIKYLLGVPSHGFDRSNMDDDESASERMKKDIEASQDNALSLCTEKVLLARQAYDLIESHIKRLD

SEQ ID NO: 198202 - protein, 209 aa, Oryza sativa
  Clone ID: PAT_MRT4530_93886C.1.pep
MAEEEKNGIWVAEMICDYYEWGHIEVPKKLDQIGTIFRIGKKKSEPRGIKEVGDVVAGGLGPRGGRCWQRCGGGDIDANGGVDLMVTTVGGGFQVATRRNNSRSGVPRLKRTVMKLAVAPIDFLTFCGKMKPMSGHIELPAAKVAKNCRTGKFCSSCRNKLRRPRAQDWEWKRSPCLASYVESEDYRIGTPKVKEQSRESLGAAFKLKS

SEQ ID NO: 198203 - protein, 345 aa, Oryza sativa
  Clone ID: PAT_MRT4530_93887C.1.pep
MARSVGGGWWRSRKTLVGLGLGQLVSLLVTATGFASSELSRRGINVPTSQSLLNYVLLGVVYGSILLYRRKSLQMKWYYYLVLALVDVEANYLVVKAYQYTSLTSVMLLDCWAIPAVIFLTWMFLKTNYRFRKYSGVAICVSGLVLVVFSDVHAGDRAGGTSPVKGDILVIAGATLYAISNVSEEFLVKVGDRVELMGMLGLFGAIISACQISIFERNEIKSIQWSVGAVVPFIGFAVAMFMFYSLVPILLKISGSTMLNLSLLTSDMWAILIRLFAYHEKVDWMYYVAFGAVAIGLVIYSGDSNSDDGRRGQVAEATDVEGKLPDEEEAAVHPKCQGAASSFFR

SEQ ID NO: 198204 - protein, 826 aa, Oryza sativa
  Clone ID: PAT_MRT4530_93888C.1.pep
MTMITPSYLGDTIEYSSLHAEEAEEEDEDDAMDRDGNDTDVDGVHPQKHAKSPELAREFLLDAAAVIFKEQIVVLKPAASSRVDIGNIVFPVKVEKSLREATAQQNAHSVFVSLALKLLEERVHVACKEIITLEKQTKLLEEEEKEKREEEERRERRRTKEREKKLRRKERLKEKEKEKEKIPVQLKPYIGTSSSPLSNSATPINDQSPDIAHSKYSASDDEDKDSIVVTESFSPDTCVDQSLTRESDGQSNEFHCSTTLEFIPSDCNGSFMCEQSTSSRRKLRFRRDSLQEQTTGFWYEDCQDDTGGVGNIHWQSRERARNAGRGCNSLFSANNRTRERYEYNACSCGQQEDYGYFSPTARSSREMKMSRKTMVEKPWLQYRRCYPLDSFIVSKGSRVGSTPNKNAAPKQVWEPMDARKKASLGSSNGSSETVSGVDRSNQVGCSKDIVNCSQILGSEHEELAEASSDRSEEACKSITDQPCESSENNQAACNSEPPVVNKPDSCFTKDGGQTANMTSSDSSSCLSEGDRDSSMSSMTSLSAQNPESSSTSDSEGSSERNNSNPGNPPTKNGSRSLLEMCAGNGFREYQPQNIHPSDGNQFGFGVTPFQEQLLHQQKIHAAPYPSTLMGFHNHHMSVPTNGYLAYPQPGHFYPNAVGYGVAGNQCVDFPMQYSNVHPYAGPEFGYVPAQPVHKTPVNFNAMVPTAALFRNGAPEVINPVIVKPDRQHRHTLPPEPKRVDPDPQNGCSEDNKKPQDGSVPFSLFHFNLPISSPAQASSEDEVSGGCLASRSPTPSAQKAQPCSREETNIKEYNLFSARTGVEFPFF

SEQ ID NO: 198205 - protein, 1127 aa, Oryza sativa
  unsure (1)..(1127): unsure at all Xaa locations
  Clone ID: PAT_MRT4530_93889C.1.pep
MPPPMLADAAAAAPCSSSSCSSNSSSSSSSSAIWSRRRDEITFDRLDKFWSALSPQARHELLRIDKQTLIEHARRNLYCSRCNGLLLESFTQMVMHGKLLQQKGPGVVQDDSWGGLSTTKDGLLTLLDCFINTNSLHVLQNIFDNARAREREREMLYPDACGGGERGWISPVIANYGRGHGTRDTCALHTARLSCDALVGYWFDLCEETRSSLLRMREEDFIERLMHRFDSKRFCRDCRRNVIREFKELKELKRLRREHHCTSWFCITDTAFRCEVFEDAVLVDCRQSFLDQDKSYNRFEFAVGTEKGKSDILGFEAVGMNGQVHRKGLDLDQFEDYFVTLRAHYADNKNTDFYVKAHALKGQSCVHRRLIVGDGFVTITKGESIQSFFEHAEEAEEEDEDDAMDRDGNDTDVDGVHPQKHAKSPELAREFLLDAAAVIFKEQIVVLKPAASSRVDIGNIVFPVKVEKSLREATAQQNAHSVFVSLALKLLEERVHVACKEIITLEKQTKLLEEEEKENPRRDGRRTKSREKKLRRKERLKEKEKEKEKIPVQWKPYIGTSSSPLSNSATPINDQSPDIAHSKYSASDDEDKDMIQVTETRPLDTHVDQVLTHPSQGKKGKRNGSXECQSNICARPAAHYFIWRLINQDEPNRSVICISSSITIRDQHTIHVADRGCVCSASMFRSIGFLYQRNNYVTGQQNGMQFVYFCESIXKPSLQLVGFGKKKKKKNNLGSSNGSSETVSGVDRSNQVGCSKDIVNCSQILGSEHEELAEACKSITDQPCESSENNQAACNSEPPVVNKPDSCFTKDGGQTANMTSSDSSSCLSEGDRDSSMSSMTSLSAQNPESSSTSDSEGSSERNNSNPGNPPTKNGSRSLLEMCAGNGFREYQPQNIHPSDGNQFGFGVTPFQEQLLHQQKIHAAPYPSTLMGFHNHHMSVPTNGYLAYPQPGHFYPNAVGYGVAGNQCVDFPMQYSNVHPYAGPEFGYVPAQPVHKTPVNFNAMVPTAALFRNGAPEVINPVIVKPDRQHRHTLPPEPKRVDPDPQNGCSEDNKKPQDGSVPFSLFHFNLPISSPAQASSEDEVSGGCLASRSPTPSAQKAQPCSREETNIKEYNLFSARTGVEFPFF

SEQ ID NO: 198206 - protein, 244 aa, Oryza sativa
  Clone ID: PAT_MRT4530_9388C.1.pep
MEPQLPTVISMEWDSTTEPAKSSPPSQRYGYLERIRNLSVVSAEAGRWWWPCSSSSTARSSYYSSSMSSSVSGTGSQNQRDFDREPDHALERWFSELDVGWVLRSAAEKELAAKLGLDDLVQRWTRGYAVMVEALVATQQNMKFQDHTNMELEDDLRPLQVTRFVEATVSKMLAFADALAADNTWRPIDKLSRSRLMCLCTSINECGIRILSEIIVFEFDCIFSKMNGAFSAIYRMAKDAEAIT

SEQ ID NO: 198207 - protein, 226 aa, Oryza sativa
  Clone ID: PAT_MRT4530_93890C.1.pep
MDSEHWISRLAAAKRFYAAQLGHADRAGMEEVDMDEEVRPEFACPYCYEDHDVVSLCAHLEEEHPFEPHAAPCPICSDKIAKDMLNHITVQHGYLFKNRRRLRRFVIPGSQALSLLSRDLREAHLQVLLGGGGHRSNNSSNTTNISADPLLSSFGLSFPTSDTEETSKPPISIPDDASVIKETPAQPWDSSIDSSLTREEREQKRKQASVRATFVQDLLLTTLFGD

SEQ ID NO: 198208 - protein, 158 aa, Oryza sativa
  Clone ID: PAT_MRT4530_93891C.1.pep
MALSLGEVAMLVVDVAFVLCLIVAIMCCCEDDRRRPRSSSQRDAQVGGRVVMLRVVEAPPGQQRVAPAAAKAALPYFPYAQAQGRTSSSETQTLVCAVCLEELRHGELCSEVPACRHIFHRGCVGSWMKKSDSCPLCRVKISSWIAGPTESPTAADAV

SEQ ID NO: 198209 - protein, 214 aa, Oryza sativa
  unsure (1)..(214): unsure at all Xaa locations
  Clone ID: PAT_MRT4530_93892C.1.pep
TNCGWKNFLAAKNRAEQGRHCSAWCDEGGRXGCERAGKINLSGRRPRSNTYXRRIDLTAGGIGXRCVGANPSTTRGGGDGXNGRHSGDCKSWHDSPRVEANSNSAAXWIGVHGVERRFLAAEVVPASSSSRLVRRRWSEDVEWLTARQGSXGRANGPEANARWLGARXSRTPGNACKGEEKAKKTTALSGLWSPRTKPKLAATAVALREREREH

SEQ ID NO: 198210 - protein, 590 aa, Oryza sativa
  Clone ID: PAT_MRT4530_93893C.1.pep
MNSAAAAAACASAPAWVVGGGAGGGARSARGPCGIRVCGLGGEAVALRSLRISQGAAVRRAAVAARAAAENGVAGSGGFDYDLVIIGAGVGGHGAALHAVEEGLKTAIIEGDVVGGTCVNRGCVPSKALLAVSGRMRELHDEHHMKSLGLQVSSPGYDRQAVADHANNLASKIRSNLTNSMKALGVDILSGFGAIVGKQKVRYGKVGFPDKEITARNIIIATGSVPFVPKGIEVDGKTVFTSDHALKLESVPDWIAIVGSGYIGLEFSDVYTALGSEVTFVEALDQLMPGFDPEIAKLAQRVLINPRNIDYHTGVFASKITPAKDGKPVQIELIDAKTKEHKETLEVDAALIATGRAPFTKGLGLENINVVTQRGFIPVDERMRVMDADGNVVPNLYCIGDANGKLMLAHAASAQGISVVEQISGRDHILNHLSIPAACFTHPEISMVGLTEPQAREKADKEGFEISVVKTSFKANTKALAENEGDGLAKLIYRPDTGEILGVHILGLHAADLIHEASNAIALGTRLQDIKFAVHAHPTLSEVLDELFKAAKLQPREGPERKPKHPPQPLLKVLSFVTRLLTSQKRNRQP

SEQ ID NO: 198211 - protein, 195 aa, Oryza sativa
  unsure (1)..(195): unsure at all Xaa locations
  Clone ID: PAT_MRT4530_93894C.1.pep
CRRRRPTAALLVFGDSPPGPAGAQPGEQPGHDQDTDGRWLGSNDYINNNLLTSLYDSXLQLYSAEDYSDLLINHYSRQTLALYSVGLRKFLLDGVGPLGCLPSLRASGLGPQGQCVDQVNQMVGFFNQGLRSLVDKLNADHPDAMFIYGNTYDAVYNMINNPHKYGFRVMDSGCCVLGEDGTCEPYAEPCEICSS

SEQ ID NO: 198212 - protein, 118 aa, Oryza sativa
  Clone ID: PAT_MRT4530_93895C.1.pep
MPEKEAQAAAFCGEAVIAEFESLTRDAAAVQRDTLRRILADNACAEYLRCRGLAGRTDAASFRACVPLATHADIEPYIARIADGDTSPVLTAKPITSISLSSGTTQGKRKYLPFNQEL

SEQ ID NO: 198213 - protein, 239 aa, Oryza sativa
  Clone ID: PAT_MRT4530_93896C.1.pep
MEVEGIVKLRPLYASRRGRRGREWAPALRWTKGGDVGGHTCSRARRTRGGRWLAERVREMAGTASRRAYLRRQREVAVVVAMGWGRRGKQEKWNHLVEANSMARWFGLRSSGREGGGERRFWRRRERGTRRRQWREEEDVGADLCFLAATFAAACAVHGTRTRRRRRLGWASMESFAVDKNKDIADIIDEIAVAKLIMIDRSNRRESLPTTPVAAGLTAVCSPVGLPRCHRSDRRCAAG

SEQ ID NO: 198214 - protein, 34 aa, Oryza sativa
  Clone ID: PAT_MRT4530_93897C.1.pep
VPEHLEPSPSDHGLLLSVVLVGGQHFPDLKRIKL

SEQ ID NO: 198215 - protein, 146 aa, Oryza sativa
  Clone ID: PAT_MRT4530_93898C.1.pep
MRSGNGETASHSRRSIHVVACDVCPARWFDSADSSSWRRVSVHLDQALVYSSDRGHVYMVFDLKLRSSMEEHVEVVGEKTPEAKMKPVTHEVDSIALVDSRIAMPCGYEVPIISTLADQDIYDPTTYSACAVSHKRKTLHFAGSRP

SEQ ID NO: 198216 - protein, 278 aa, Oryza sativa
  unsure (1)..(278): unsure at all Xaa locations
  Clone ID: PAT_MRT4530_93899C.1.pep
LELRLAASAVEGPPPRGPRRHLRVGKPPRPRAAPSPPRPRATLPTPRGSGHRGCPSRRXATAPSPPRPRPTPMLSTLRPRAAXPPPPPPPQEEAHFARSTRGKLGGKCGIDCFGAKKMMESGPVVAADRVWRDAYGVSTEKWTTKVEIKVKNVSEHANHPSKMETLVSSFCDPQAYRFDAAKNEHYVCGFAKSVESIPRSIYLKLKYETVDVVCMKSFLVNLEARLYTEAEGDIGAEEPDPEMYEDPDVVREAFEMQARLQRIAAVVEEGKHAGGKKV

SEQ ID NO: 198217 - protein, 230 aa, Oryza sativa
  Clone ID: PAT_MRT4530_9389C.1.pep
MSAQHSGAGEAAVGMEREARRPGRRRRSATARPRRWLRGGAHAGRSGALRYTAPSDPPQAPTSRLRVTPAAEAPSTHIPLLVWLRPKQPCACPRAAPASPTPPPLHYAEPCGAACVRLDGIATLCMALFPAEAASCTALKQLHGRQDGPRMASGLRAAPASVQQATPHSPRTRPRPPRGAPPRPRCLRRLNTPAHASVYSAGRTGLGRGAASVGSAVENGGVVASFLEGG

SEQ ID NO: 198218 - protein, 59 aa, Oryza sativa
  Clone ID: PAT_MRT4530_938C.1.pep
SQSSREHKAHEARQEPTRGEEHRVTLPRHVEWSTTKYVHQELVEGGPKARPFKSNVIEN

SEQ ID NO: 198219 - protein, 156 aa, Oryza sativa
  unsure (1)..(156): unsure at all Xaa locations
  Clone ID: PAT_MRT4530_93900C.1.pep
ARAGSAGGNGAGAQAVXGHSARARGKQREGAADGAARLGHTRWLRGRAAAGAAGPRGRAATTRRGRGPRGRAREQRRAGAGLPGMGRRRARXEGGARRGGTRARAHGARAGRSGAEGSGGGAHRGGXEGRGRGEDGPSEIRPIDPGGGKIDFCGGI

SEQ ID NO: 198220 - protein, 39 aa, Oryza sativa
  Clone ID: PAT_MRT4530_93901C.1.pep
KKKKKKKKKKKKKNPKKKKKKKKKKKKKGRRSRSRTGRV

SEQ ID NO: 198221 - protein, 178 aa, Oryza sativa
  unsure (1)..(178): unsure at all Xaa locations
  Clone ID: PAT_MRT4530_93902C.1.pep
RIRTSSCRIRHXRPTAXLDEPRGRXMPXDSWXPXSXRXAXXXFNNFGXXNXMAXKXXSVXXXTXTGTFXPXXFIGNXSLSNQTXXPSSSHMGMXPPPXXQRHHLGXXQXXPLQXXTXLPQNFPVXLQNNXXGXPLQGAAXQIGPLXXXQSMGPGSFGXNMXSGPLPXXQPLINKILSL

SEQ ID NO: 198222 - protein, 211 aa, Oryza sativa
  Clone ID: PAT_MRT4530_93903C.1.pep
HEGESSVSELSKADCSAFWKFVATNWGQNMNKLLSGCIKVPVCTVRHVILSSKKDVFIPDDLLLRDLFSKLSQQAVFIWYPSSSLPSMSRARLNNIYSSIGVGTISKAVRKNDSFTLGSGSLKTVGLNMVIKAGLLQLVLAFLADPALDISTKERHKMVSWLLNVTVLETDEPITVAYSVSLSSGRALDMKASRMLRWERDNFKLYMQRSH

SEQ ID NO: 198223 - protein, 40 aa, Oryza sativa
  Clone ID: PAT_MRT4530_93904C.1.pep
CRSPSCPSPEGMHNMNISWFTFEHQGVAASSNSSCFPVTQ

SEQ ID NO: 198224 - protein, 938 aa, Oryza sativa
  Clone ID: PAT_MRT4530_93905C.1.pep
MAALFLLLLLHVSDAAINPGDLSVLHDLRRSLTNADAVLGWGDPNAADPCAAWPHISCDRAGRVNNIDLKNAGLAGTLPSTFAALDALQDLSLQNNNLSGDLPSFRGMASLRHAFLNNNSFRSIPADFFSGLTSLLVISLDQNPLNVSSGGWTIPADVAAAQQLQSLSLNGCNLTGAIPDFLGAMNSLQELKLAYNALSGPIPSTFNASGLQTLWLNNQHGVPKLSGTLDLIATMPNLEQAWLHGNDFSGPIPDSIADCKRLSDLCLNSNQLVGLVPPALESMAGLKSVQLDNNNLLGPVPAIKAPKYTYSQNGFCADKPGVACSPQVMALLHFLAEVDYPKRLVASWSGNNSCVDWLGISCVAGNVTMLNLPEYGLNGTISDSLGNLSELSDINLIGNNLTGHVPDSLTSLRLLQKLDLSGNDLTGPLPTFSPSVKVNVTGNLNFNGTAPGSAPSKDTPGSSSSRAPTLPGQGVLPENKKKRSAVVLATTIPVAVSVVALASVCAVLIFRKKRGSVPPNAASVVVHPRENSDPDNLVKIVMVNNDGNSSSTQGNTLSGSSSRASDVHMIDTGNFVIAVQVLRGATKNFTQDNVLGRGGFGVVYKGELHDGTMIAVKRMEAAVISNKALDEFQAEITILTKVRHRNLVSILGYSIEGNERLLVYEYMSNGALSKHLFQWKQFELEPLSWKKRLNIALDVARGMEYLHNLAHQCYIHRDLKSANILLGDDFRAKVSDFGLVKHAPDGNFSVATRLAGTFGYLAPEYAVTGKITTKADVFSFGVVLMELITGMTAIDESRLEEETRYLASWFCQIRKDEDRLRAAIDPTLDQSDETFESISVIAELAGHCTSREPTQRPDMGHAVNVLVPMVEKWKPVNDETEDYMGIDLHQPLLQMVKGWQDAEASMTDGSILSLEDSKGSIPARPAGFAESFTSADGR

SEQ ID NO: 198225 - protein, 846 aa, Oryza sativa
  Clone ID: PAT_MRT4530_93906C.1.pep
MSTSANPSAAPSAEYVEHLSNLVAIPSLSHENHYFLGPIGNLNPTDFITGETNRIPFRLANPNLNHWKNTFKSWPSLEKTSPEKSWITWFKRMSASKRVHWDEIGISQALDLTIANSAKDEPLMAAASYFWSNTINAFLFNQGPMTPTLIDIIMTTGLDVTSSANPMSLNTKNQYDFKTKSIGGWSGYVAAYMGKGPVTPREHVAFLLMWLEKFLFCGSSCGPTTNWQFVAEALEAKKQFPLGKILLGYLYQMLNNASAKLAGGSVVGASGPWWLLQTWLNLIVMKVVNRPSITEAEFPILEPIIEDDEERTHRRCMSYGEYASTPADAGAKLSAELLKDWFCSFYEGFQKDARVWFPYENSADLELPSDFRFEDINHERFQTSREIFTAAINPCILPVGIHQGRNIQASYEFYHPMSSARQLGMGQLPIGLFFADKIQCRGEISSTLMMDRLLNLPGPPLGSIENLELAMFRSKNFDRWWGEWKLHLFHQPASINSGRDITYAPGLIPNGRGPSPPVIGYDAPKTSALLQGLIREPVDAGRKRKTRSLAVDTSALAPKKKIKKKAKPADDLLVLDPSIEQALDEEEIGEDVDQAVAEKRKAAVKKKSTPMTSKPAPPVLADLFSFDIRDYLYEETEVDTTSKALAPLSDDVKKTLEDISHRLETSSLDSLVVDCGSIRTRLHEVQAQIPDELADILTPAVYLEQHQFKLEKAKLRLADRQERKYIEATIQANRQLVHEEKSKLDQLSEGPIKSNIDRLEARKIELLAQLQESNAEPDLENKKLADLPWSIEEQKAKLKSAIKNVADMTKSLKVIPRTDAQDAQAIEEVEQIRQRAISAILRYLSR

SEQ ID NO: 198226 - protein, 55 aa, Oryza sativa
  unsure (1)..(55): unsure at all Xaa locations
  Clone ID: PAT_MRT4530_93907C.1.pep
LMGADPNTXMRDISVVGGTGDFFMSRGVAXXRTDXFEGFTYFRLQMDIKLYECYV

SEQ ID NO: 198227 - protein, 68 aa, Oryza sativa
  Clone ID: PAT_MRT4530_93908C.1.pep
FPSPRHISLPSSSPTYPQGWRMTPPAPSPSRGASTRRPPMEASPSSQISTYQSQRSWMRLFSLLLLTP

SEQ ID NO: 198228 - protein, 461 aa, Oryza sativa
  unsure (1)..(461): unsure at all Xaa locations
  Clone ID: PAT_MRT4530_93909C.1.pep
MSMMEATAAARKNSFPARAPREAPKGTTGRSISKGIRLCDAAGHGNCGGCACSRPVNPCARRRSILTRRGGMRRRHGECGREGDAGEDARSRRCGGGASIAANRERERGGGGQPDTPADPTPSRPPSPPVPRKVSSYTSDQAVTHSLLCPGLTSARGAPTGGPRTSATQERGKGTGMWAPRAVAQSGGSGGAGRARLGLKADRPTKARRWRGTATDGGDGRKAAAHGRSSSVAXGARGMGRKGGGEXGLTGDTAAGVEDEGGDDHPVRGGADERRRGMDSSPAREGDGVPMGFRRREAAAAWRGGGSSGDGARPEAVVGGGASGEWRGRDRRHGRERRARKKEEGTPGRDFIGEGGENMAGRSWLAPATXGGGGEREGVGGFQVPHHLRARARGRCGEGGGGGWRGRKVRERXGGEGGRHEERWFRWRLAPGRGRLEVGDDLTGGPHLSASQRGEWGDGPD

SEQ ID NO: 198229 - protein, 117 aa, Oryza sativa
  Clone ID: PAT_MRT4530_9390C.1.pep
LTPPKQRNRRAQSTQKPRRARTSDGRRTTNVIEKTSSVRAHEKSRILVLELVHSATKPPQRVRIRHPAAGSRGSRPQRNSRFPPRPIRGCLRHRQARRDGPPTAHLQARNGRSWGGP

SEQ ID NO: 198230 - protein, 39 aa, Oryza sativa
  Clone ID: PAT_MRT4530_93910C.1.pep
MLILKRYLKKVAARSPFLEPVFSIRFLCSIATYGSKTNG

SEQ ID NO: 198231 - protein, 152 aa, Oryza sativa
  Clone ID: PAT_MRT4530_93911C.1.pep
ILMLNSYLTGDTQYRHSKQSCESIARPYSMLTNQKYEKSPRELTKRQRQITGIALTVWCGSFGGIGQPEGVVPFPLPGFIVGIRAQGVVGGDFQRLLPRRRPLHTWITETSPAARRAEGEAARRPEGEGRWLARRRLSPAAGTTRPCSPGIH

SEQ ID NO: 198232 - protein, 252 aa, Oryza sativa
  Clone ID: PAT_MRT4530_93912C.1.pep
MAQRVGHSADGVFVMIVDEDKSHANFARGMLSSLNFHVIVYSSPVNALVFLENNAQDVAVVLAAVDMKQLSGFQFLEAARVKRQDLQVIMMSAETTMSTMMRCVKLGARFLVKKPLNEETVGNLWQHVDLKVLKMEKIRELLQDENNEEEEVNSFEAKKADSVKVQSDEKGHDNAKISNTAAAEGSDEKVSSGDGHVVPKAYNNVNVEESIGSNNTSGEQVSDKIKSDARVGVILVDYPDFEDDETKKPTST

SEQ ID NO: 198233 - protein, 102 aa, Oryza sativa
  Clone ID: PAT_MRT4530_93913C.1.pep
FGTSRELPNSNENDMDAGSEEAKQEQHRVLAHKLFLLSHPDLNDLAKVALRSDALDAVKSDGMALLFESLAVNGVLEPDDALLVEMRVRIDEEVPQAIVVRA

SEQ ID NO: 198234 - protein, 273 aa, Oryza sativa
  Clone ID: PAT_MRT4530_93914C.1.pep
MAQRVGHSADGVFVMIVDEDKSHANFARGMLSSLNFHVIVYSSPVNALVFLENNAQDVAVVLAAVDMKQLSGFQFLEAARVKRQDLQVIMMSAETTMSTMMRCVKLGARFLVKKPLNEETVGNLWQHVDLKVLKMEKIRELLQDPGQETVITISYEEQFSGETEADENNEEEEVNSFEAKKADSVKVQSDEKGHDNAKISNTAAAEGSDEKVSSGDGHVVPKAYNNVNVEESIGSNNTSGEQVSDKIKSDARVVILVDYPDFEDDETKKPTST

SEQ ID NO: 198235 - protein, 83 aa, Oryza sativa
  Clone ID: PAT_MRT4530_93915C.1.pep
RMTDGTQNVRRTIASVRRRAARHIPSNNDGERFSSSYPSRSRSSRSGQSKAPVGGAFVIFEVVSSAGMMSVAAPMRGKAQPPQ

SEQ ID NO: 198236 - protein, 43 aa, Oryza sativa
  Clone ID: PAT_MRT4530_93916C.1.pep
MALAGQLDGALGATPGTAATPTTVVEVDMVAVALEKMAGRCAL

SEQ ID NO: 198237 - protein, 242 aa, Oryza sativa
  unsure (1)..(242): unsure at all Xaa locations
  Clone ID: PAT_MRT4530_93917C.1.pep
EQHIKTALSSIPTYHLTVLXQKWLIKKIDRIRRAFLWKGXDPENITPGHSLVNWATMEVPCDTINKEPFAAAATITLGDGSKATFWNDNWMSNGRKKDLVPGLFKLAKRTNNSILVEISDNXFLLRPLTTIEEINELVWIADLLAGVKLQPGIKNXSYMAKSAYLAQFTGSVSYSNFTSLWKANNEPKHQLFGWLLLHHKVLATKNLLKRHWPCNEICTLCTKXFFEDTNHLAKEYSFTTKV

SEQ ID NO: 198238 - protein, 93 aa, Oryza sativa
  unsure (1)..(93): unsure at all Xaa locations
  Clone ID: PAT_MRT4530_93918C.1.pep
MMLKAYKDSFKVLQADIHHANTLAXDVAREYHGPCLQMQVSYXHPRQHIFLLLGQRTDXNLAGALGLLTILDYKVYVYGTTTLSTHERKDTVR

SEQ ID NO: 198239 - protein, 555 aa, Oryza sativa
  Clone ID: PAT_MRT4530_93919C.1.pep
MAMATATASSCVDATWWAYALPALLGADTLCAHPALLAGAVLLAFATAAVLAWAASPGGPAWAHGRGRLGATPIEGPRGLPVFGSIFALSRGLPHRALDAMSRDAAAPRARELMAFSVGETPAVVSSCPATAREVLAHPSFADRPLKRSARELLFARAIGFAPSGEYWRLLRRIASTHLFSPRRVAAHEPGRQADATAMLSAMAAEQSATGAVVLRPHLQAAALNNIMGSVFGRRYDVSSSSGAAADEAEQLKSMVREGFELLGAFNWSDHLPWLAHLYDPNHVARRCAALVPRVQAFVRGVIRDHRLRRDSSSTAADNADFVDVLLSLEAHENLAEDDMVAVLWEMIFRGTDTTALVTEWCMAEVVRNPAVQARLRAEVDAAVGGDGCPSDGDVARMPYLQAVVKETLRAHPPGPLLSWARLATADVGLANGMVVPAGTTAMVNMWAITHDGEVWADPEAFAPERFIPSEGGADVDVRGGDLRLAPFGAGRRVCPGKNLGLATVTLWVARLVHAFDWFLPDGSPPVSLDEVLKLSLEMKTPLAAAATPRRRRAA

SEQ ID NO: 198240 - protein, 239 aa, Oryza sativa
  Clone ID: PAT_MRT4530_9391C.1.pep
MSAQHSGAGEAVVGMEREARRPGDDGAAEAMVARQRTRGPRVPDTSAAALCGAVRGRAGSCRAASPCRIASARTTPATCGTVATARPSWLPPPAGQQACMRLHEPTPTLACMRLASRHACVWMALPHYAWHCSRRRLPRAPPSSSRTAGRTGLGWPPVSVPQATAHSPRTRPRPPRGAPPRPRCLRRLNTPAHASVYSAGRTGLGCGAASVGSAEENGGVVASFLEGGEVVKKRWRRQS

SEQ ID NO: 198241 - protein, 122 aa, Oryza sativa
  unsure (1)..(122): unsure at all Xaa locations
  Clone ID: PAT_MRT4530_93920C.1.pep
SPYSTRCALLCDQVANADQTFCIFVHPFPTKFSTRKKMKKKNAPCFFCTNRIAGGGKGPGGWVDTLGGDLAGIGGCPATFFCPLLSLCYTWHGPPFXLQTAFSTQKFTLFSASFFCLRIRCR

SEQ ID NO: 198242 - protein, 185 aa, Oryza sativa
  Clone ID: PAT_MRT4530_93921C.1.pep
MARSIVFPRVEAAAVAVVDPSGCELRDRTVPHATSSAPSTAPSTRREACNATRNGKKNQQRRRISGDATGRFLEALALVRQLHPETDEEVLFYRRYGIAMLFCPDDFLSCLICMEASQCDDPRYIPKHKFGRHMSRHHSKATVKCKDCLLAFDTAAAAGKHHHYAHSLPSGFVGKVKLISNVLTS

SEQ ID NO: 198243 - protein, 131 aa, Oryza sativa
  unsure (1)..(131): unsure at all Xaa locations
  Clone ID: PAT_MRT4530_93922C.1.pep
MGINMYTRSHCNLSIYRSIILSAHRHPLPXGFYLSSGGTWXHLTQGCIGFRSPAKGXVLRFVGPGNCLIYISVVQGCISTSXTSWIALVWLIYLPTYLHWTYSRLLKPYRYWLVSASAIIDYRLELLHRLV

SEQ ID NO: 198244 - protein, 63 aa, Oryza sativa
  Clone ID: PAT_MRT4530_93923C.1.pep
MAYPRARGYFLYDLRKPFTKSIDGKKSFSDKNWGPPEKGIDHRISESTQSKKPEPARSQVAES

SEQ ID NO: 198245 - protein, 122 aa, Oryza sativa
  unsure (1)..(122): unsure at all Xaa locations
  Clone ID: PAT_MRT4530_93924C.1.pep
RGEGGRGGGGVPLGSGRFFLVRQRLVSPXGINMYTRGHCNLSIYRSIILSAHRHPLPXGFYLSSGRTWXHLTQGCIGFQSPAKGXSYVLSGPGESVGYVGVVQGCIDSISWIALVWLIYLPT

SEQ ID NO: 198246 - protein, 428 aa, Oryza sativa
  Clone ID: PAT_MRT4530_93925C.1.pep
MASLLRRHRHPHPLPAAHLLRRFSALPDVDHPPPPASTPTTPASTRSPILDLQLAVRGEADPARIHSLVATALSRPDDYPRLHGSRPLFSLAASRLARLRRPDLAASLLRALLDSAPASPGLLARAISLFPGPDDALRAFSDSAPAARSDVSLSALLSALFRAGRVDDVKSTLASAETSFGVAPGRASHNVLLHALVKNSELAAARKLLGEMAKKLKHRPAPDIVSYNTVLAGYSAQGDEEGFEKLLKEISAKKLEPNVVTYNCRIQWFAKKGETFKGEELLDAMESKDVAPNYLTYNALVQGYCKEGNVGSAMRVFKRMKVMKRREGRSDLGVSAHSQTYVVLFRSLVEKERLDDALWICKSCFAMKAAPPFEAVKGLVEGLVKGGKSAEAKDVVAKMNLLVKGDAKVAWEKIAGELSLEGTPSSNP

SEQ ID NO: 198247 - protein, 73 aa, Oryza sativa
  Clone ID: PAT_MRT4530_93926C.1.pep
RTNGEPKKPEPPYLRRPPRRASPASPPPAQQLHRSPPPPPPQAPPPSLSSAAVTTPPPPPPEATTTAKGSRCH

SEQ ID NO: 198248 - protein, 92 aa, Oryza sativa
  Clone ID: PAT_MRT4530_93927C.1.pep
SHSPPLSFLPSPNPAKGKGIGGATARGEHGSWREHGSGSALLPFLPSSDPAEGRGVGSGAAGGERRCWRQAPRRSAGGQTAAWRLPSTTMRV

SEQ ID NO: 198249 - protein, 141 aa, Oryza sativa
  Clone ID: PAT_MRT4530_93928C.1.pep
MQSAPKPNPRRAPVPACRFRPRLLFPPSIFHIVSFPSRARTGSAAHTQTQYRARGRVARRRDVPFVAWLCAPLSARHVCAASDSRLLEYDLFSFSYPQAQAATGAQRGKFAARVDDWMVNKNTKRHARRWAVECVMRSALR

SEQ ID NO: 198250 - protein, 151 aa, Oryza sativa
  unsure (1)..(151): unsure at all Xaa locations
  Clone ID: PAT_MRT4530_93929C.1.pep
IWSPGXXRMVYPXGGEHAHXRQXLPXXPMXFXEGEXDXSRXAVQXTGSLSXGMRXIKNXNTSFAGXXQHPWYSGSRXRSCDXXXXRXYRXXXFXAXVXPXXXXGRXXXXXXXXDWLCXSCCXCXCXXHTLXXGPXQLPXVVLMXEAXXXVE

SEQ ID NO: 198251 - protein, 91 aa, Oryza sativa
  unsure (1)..(91): unsure at all Xaa locations
  Clone ID: PAT_MRT4530_9392C.1.pep
SIIYFCYAAFLAAPSVLVFRPACVSSLVGLVTAPAPSAYSARRPACVLTPRRLVISLAYRLAPXSRGAPGARLSCFNVSSAVPRVRPRRLN

SEQ ID NO: 198252 - protein, 99 aa, Oryza sativa
  Clone ID: PAT_MRT4530_93930C.1.pep
YSVLGAIRSITFLSMGQVALMNQDMVLTESSSYLKDSVLDGRIPFNKAYGMTALENHGTNARFTRGFNEGQNNHSANTNKELLDLYTGCDTACTGVQVG

SEQ ID NO: 198253 - protein, 373 aa, Oryza sativa
  Clone ID: PAT_MRT4530_93931C.1.pep
MGCCGGMSSTSRAPRGIREETLLRVPGASVHLLDGAEGPVELARGDLAVVRIAKDGVAVATVARVGRGLGWPITRDEPVVRLDRLHYLFTLPDSTGGGGGGGGGALFLNYGVSFAAPDDALLASLDAFLKANACFSTPSSPAPSRSSATTTTRPAPTTTATADGYWNDFAPRMDSYNNVLAKAIAAGTGQLVRGIFMCSEAYATQILIQPRVQVQRGADLIRPQATGSVTKRSGGAGVRKLSEMTEKMSQSLLDTVIAVTGSMAAPLLRSKQGKAFLATVPGEVILASLDAINKVMDAVEAAERRSLAATSNVVSGAVSRRYGESAGEATEDAFATAGHAVGTAWNLFKIRKAVTPSSSLPGNMVKSAVRNRK

SEQ ID NO: 198254 - protein, 195 aa, Oryza sativa
  unsure (1)..(195): unsure at all Xaa locations
  Clone ID: PAT_MRT4530_93932C.1.pep
MLPEDRILTQQYHANNFQKHSLLIHTLTQAERHNELSLKNAQQRPPGSAPLPEVHFNVQNNAENKKGFKGNSSNNPKNLTGKXRNNNRRKFKGRKKGKGXGCGSNTHVAKDRRIPKHLVLLYQKSLKDKKSSENPRFEAHFNLTNKERPEVASSHQAPIETESNLNVLPEDVAPLSVMDDMFIEYCSMDPLEDLQ

SEQ ID NO: 198255 - protein, 331 aa, Oryza sativa
  unsure (1)..(331): unsure at all Xaa locations
  Clone ID: PAT_MRT4530_93933C.1.pep
MATKEFNELVLDGTNYSIWASDIKINFASRGILSTIEEPNDGDLPIEHRKLNTALFVLRLYIHKDLKHEYMLETSPHTLWKALKERYDQQKELIWPEANYEWIHLRLQDFKTVAEYNHAVHNICSRLKFCEQEPTEAEKIEKTLSTMLPEDKILTQQYRANNFQKHSLLIHTLTQAERHHELSLKNAQQHPPGSAPLPEVHFNVQNNAENKKGFKGNSSNNPKNLTGKRKRNNNRRKFKGRKKGKGKDKAPQPRSNVNKHCNRCGSDTHVAKDCRIPKYLVLLYQKSLKDKKIFXNPRFEAYFNLTHEERPKVASSHQAPVEPESNLNVLP

SEQ ID NO: 198256 - protein, 55 aa, Oryza sativa
  Clone ID: PAT_MRT4530_93934C.1.pep
MAAGHSLSLVVSLERVTGQQNRVGEDLGARDGEEGGGRRGFLRDLLDLYPRSGRR

SEQ ID NO: 198257 - protein, 582 aa, Oryza sativa
  Clone ID: PAT_MRT4530_93935C.1.pep
MGLINRGVFFKILAFLCFIRSSQGRNHFTTLDLPPLLKASSFSRIQHEAYDYIIVGGGTAGCPLAATLSQKYKVLLLERGGSPYGNRNISHLENFHICLADDSPNSPSQGFISTDGVINARAKVLGGGTSVNAGFYSRADPSKNVIVKVIAEIPTISFVQDAGWDAELVNQSYPWIEERIVYWPNITPWQAALRDGLLEAGVSPYNGYSYDHLFGTKVGGTIFDEAGYRHTAADLLAAGNHNNLRVLLHASVTRIIFNTEQEHRKPRTIGVEFKDENGGQQHAFLTRNRDSEIIISAGAIGSPQLLLLSGIGPRKELKKHNISVVLRNEHVGKGMSDNPMNSIFIPTKDAPKQSLIQTVGITDGGAFIEASSGFSQSPDSIQCHHGIMSAEIGQLSTIPPKQRNLDAVKKYVHKKYNLPKEVFSGGFILSKIDGPLSTGNLVLVDTDINSNPTVTFNYFQHPKDLSRCVYGIKTIERILKTNHFTNFTLNGGGYPMEVVLNMSVTANINLIPKHTNDSTSMEQFCRDTVVTIWHYHGGCHVGKVVDQQYRVIGVSGLRVIDGSTLFRSPGTNPQATVMMMGR

SEQ ID NO: 198258 - protein, 633 aa, Oryza sativa
  Clone ID: PAT_MRT4530_93936C.1.pep
MAAVDRISELSDDLLLHILSSLHTKDAAATTVLSRRWRPLWRRTCVLNLYSEPFLPTHNAFFRFADGALAAVLRRGDDPALKKLSLAVDSAAARPVLSNFDSRIGAILSHRAAAGLQDLRVDCLPVAGAGDAGDTIGMYKLRLASLPCAATLRVLHLACCCCYSSPPSVVAAFPSLTDLAMTRCMLSLSKGGHLLQTIVDAAPRLAMLRLDRVHLLISAAKTKEETAVLRLRCPTVTTLVLVAVTSRIEALQLDAPSLVSFSYGGHPMAISLAPPPANLALVDVDISRPSFFTWKYEPVCRVLRSLGGGDTTTMRAMTLRVYCVDDILDDGGGGALPVFPNLAFLHLEAQYLHSRYQTPISLSAMAKLLQSCPAVSELRLRLTTKDDSHSHPVSEEQRFNRRISGNSIGRRIESSSSSSSKDEGDLELKRQRVSEPAIECLEKTVRKVTMEFTAKEMDSFPVHLTKFLVENAMVLEELHVDDTAQFFLDQKVEKWRADSFQRRNLPIVGRFEVKPMAAATCPTASCNGYGGDYLPTAIPIFLSGSRRSRDRRGAAATSPITSSGGDGDALPHRARRGGARSHPGVESSAFHDGGPIEEAPCISSRRPSCKQSGRVQGNKGLCFRVLQEGAPSS

SEQ ID NO: 198259 - protein, 83 aa, Oryza sativa
  Clone ID: PAT_MRT4530_93937C.1.pep
MSAWREMNGCGYGVRSPAAGGAQRLLWREEPSGRRSKAAAAPGGSVYQPSLQNRAAQPYQRVAAAGGGLRRQLREDPGGGRQR

SEQ ID NO: 198260 - protein, 531 aa, Oryza sativa
  Clone ID: PAT_MRT4530_93938C.1.pep
MAATTHAASLSFLLSHPHPTSPNPNPNPNLPLRRAPHRVRCATDAAATRHRRAADENIREEAARHRAPNHNFSAWYAPFPPAPNGDPDERYSLDEIVYRSSSGGLLDVRHDMDALARFPGSYWRDLFDSRVGRTTWPFGSGVWSKKEFVLPEIDPDHIVSLFEGNSNLFWAERLGRDHLAGMNDLWVKHCGISHTGSFKDLGMTVLVSQVNRLRRAPLSRPIAGVGCASTGDTSAALSAYCAAAGIPAIVFLPANRISLEQLIQPIANGATVLSLDTDFDGCMRLIREVTAELPIYLANSLNSLRLEGQKTAAIEILQQFDWEVPDWVIVPGGNLGNIYAFYKGFEMCRVLGLVDRVPRLVCAQAANANPLYRYYKSGWTEFTPQVAEPTFASAIQIGDPVSVDRAVVALKATDGIVEEATEEELMNAMSLADRTGMFACPHTGVALAALFKLRDQRIIGPNDRTVVVSTAHGLKFSQSKIDYHDSNIEDMPCQYANPPVSVKADFAAVMDVLQNRLKVDELGVSHHVVGT

SEQ ID NO: 198261 - protein, 60 aa, Oryza sativa
  Clone ID: PAT_MRT4530_93939C.1.pep
SESTGGDIRGQHRALREGSLLDGQPFRLPYLYRMLPRNELKICVIISWHQARLSATSSVS

SEQ ID NO: 198262 - protein, 274 aa, Oryza sativa
  Clone ID: PAT_MRT4530_9393C.1.pep
MANIVEAAVGVLTRALCGEGRRRHGGAGWGEGMMQSRRVHMLPNIRTCHQSIILLVSTMPSSGGIRRSAETQWVMCRGEACRRRLHPSLHTPPPEPSPLPTTLPSSCVLSPLPTVCELAIGSHMSQTLCAVTFTYRLRAGHWLPHESNTCRCPNDVGRCHCPTRTRENEKDLRGERECLLAVTPSKTLSPRCQVAGSKRGGTTRTGGASGARGRRGVGASQGAGSQPLATRRGAGATAAATACKMSGAATGCRTSGVAGYQPGRAPEPPEQPAG

SEQ ID NO: 198263 - protein, 85 aa, Oryza sativa
  Clone ID: PAT_MRT4530_93940C.1.pep
MEETVGEGHGFMRFLVSCRKHNRVALQNVWRRDHLSEETSWEKLSLHPALLPAPSQTIHRRGQLPMLRTRVFKTTSEEESLTDGD

SEQ ID NO: 198264 - protein, 133 aa, Oryza sativa
  Clone ID: PAT_MRT4530_93941C.1.pep
DAWAAGQGLGHGARFMSKQGRAMYEKPPELEPKPKPKPKPHPKHESKPEPKPEPKPEPKPYPEPKPETKPELKPEPKPNPEPKPEPKPEPKPEPKPYPEPKPKPNTEPKSEPKPEHKPEPKPVPEPKPYPKPK

SEQ ID NO: 198265 - protein, 121 aa, Oryza sativa
  unsure (1)..(121): unsure at all Xaa locations
  Clone ID: PAT_MRT4530_93942C.1.pep
SAAGDIDVRCLGPLTRRARLQTARHVALTLCDLSVADVDAQDDLDTPKIEKLVLVTAPMRVYHVMNAPDLYIKGMEERRKQYXAVWKGKRITAYIPFKEELHFIGLGQDKRDRIFEQICKD

SEQ ID NO: 198266 - protein, 120 aa, Oryza sativa
  Clone ID: PAT_MRT4530_93943C.1.pep
MGRGEENDGEHRDFVVLAVGHRTKSLLRERTIGCPLSSGSVCGLLGGGCGGLLDGGGKARSTCSLLSGGDARGGAKSAAYSVAAAGGGRGPRQLQRAGGLVPDEHPLLQRVLLLPQRDDL

SEQ ID NO: 198267 - protein, 147 aa, Oryza sativa
  Clone ID: PAT_MRT4530_93944C.1.pep
MLSEFTPPLTSKRRLKYNDIGRRLTYVHTNVGGRGRRPTAVEYWNGGSIIYDRWLPGWLVGEVASQRNATIAWASAGVIIEHRPRRRVDRLERTVLEEADDRWGMAYGDRRLPPRSVRSAEDGTACVLCGGGGESAMASSPACAPEG

SEQ ID NO: 198268 - protein, 137 aa, Oryza sativa
  Clone ID: PAT_MRT4530_93945C.1.pep
MDRRGKALEMEKRTVQDRQVWSHVAGLSDTHTHGHLAIQLLHAYWYTQAMDRLTEWMDCSFDMTLQTAKICSTGVMTDNLGVPHGKQSRVERGMVSTKENFGPFDWLEDLCVRLLDPALATRIVATLLPREYRACSL

SEQ ID NO: 198269 - protein, 118 aa, Oryza sativa
  unsure (1)..(118): unsure at all Xaa locations
  Clone ID: PAT_MRT4530_93946C.1.pep
MAERSSACIVWPIEGIKKFXTLSYCXLTVEDLLKHIXYLLPSXWXPCLEFSKVXGFXYXXXHRSPGYYXSXYWDHVXKXPXFGCTXPXXVLNELQGGARYPIPPYESYYNSTGPSLLQ

SEQ ID NO: 198270 - protein, 62 aa, Oryza sativa
  unsure (1)..(62): unsure at all Xaa locations
  Clone ID: PAT_MRT4530_93947C.1.pep
HFVLSLFLDVLAMAPGGGGGRGAGSLXGPAEGEEDGRVEDEAVAGLAEALLLAMQRRDGGLH

SEQ ID NO: 198271 - protein, 494 aa, Oryza sativa
  Clone ID: PAT_MRT4530_93948C.1.pep
MEDWREERWESRSDQRKGRRMGEWRTRLSQASRRRCFLPCSVAMAASTCAGRRHRHQRWFRAQGRCRGGGGELLHNLHRHRFFVRPGVEDASRRRKGCGRAALFTGMRRENCRALAANQSMRRDVDTDMGFYFWTKLPLANVIDLQYNFLTGPVPESFNNFSSLTVLQLSSLESLLVGHTNFSGTIPSSISNLKSFKELGLDASGFFGDLPSSIDLSFNMFEGPIPLPRDSGTVLDYSNNHFSSILPNISTQLRGTTYFKASRNNLSGTLKEEWFTRLKSMITDFGNETSVMEYEGDQKQIYQVTTVLTNKGSTIMMEKILRTFVFLDVSDNAFHGSIPKSMGELVLLHTLNMSHNSLTGPIPSQLGRLKQMEALDLSSNELSGVIPQELPSLDFLGMLNLSYNRLEGKIPESLHFSLFANSSFLGNDALCGPPLSKGCSNMTLPNVIPSEKKSVDVMLFLFSGIGFGLGFAIAIVGAWGIPIRRRSPARQRAL

SEQ ID NO: 198272 - protein, 44 aa, Oryza sativa
  unsure (1)..(44): unsure at all Xaa locations
  Clone ID: PAT_MRT4530_93949C.1.pep
KAQREGCAYIAFKTNPNCMVSHIAGKSSIFRAXANDVLAKAYSI

SEQ ID NO: 198273 - protein, 79 aa, Oryza sativa
  Clone ID: PAT_MRT4530_9394C.1.pep
TNLSKAIAPSSNGCMTENFSGGFTRALMVSTSVVKARDPIAPMVDPPPLARDVCCETAKASYAGGPICHFFLCILLLER

SEQ ID NO: 198274 - protein, 270 aa, Oryza sativa
  Clone ID: PAT_MRT4530_93950C.1.pep
MTGVVSKPLRAHLKSTMSSPASPSATGEAAVALGEGEARGGGNAWGRDSLRRRRQSLTRQRHLDPHDMEAIDSVSSERLTRDDNGRARREGGGMALRPLAELVAVLQGAVMLRNGRQAPPPPAKASGSRRPYGTGPRRKPPPNPTQHTGVRTRLGDPPTQPPPFIAARCGASPGTHAHPAKAPAPKREKKTRKSASPFSCSAAGEMCCCPSKACCICTLIVLVLVAVGIVFGFGVYTRGFHKLTSSIHDASSTAAGSLRAHQFFAPPPPY

SEQ ID NO: 198275 - protein, 398 aa, Oryza sativa
  Clone ID: PAT_MRT4530_93951C.1.pep
WTEYFAAAVSDGSKQMRCMEVKCTAICDEAVVRLLLHGKHPGAAARLDRRLLEACVEASDAVRWCPSAPHCGRAIRVDGGGGGEERYAEVSCPCGAVFCFRCGGGAHSPCPCPMWDKWGAMRGGGEVDNLKWIVANTKSCPKCSKPIEKNGGCNHVTCTCGQHLCYACGAATGTLYMHICNRYKEEGGGGGVKVEMTAGGRQRLRFMHYYERFEIHTESYKEEQGKLGPAIDALARRLEADATLPWSGTRDARWPSAAHRRLLRCRQVLPRSYVLAYYMFGGGAATRREREEAAAQNRFEDLQGQLEHHVEVLSRTLAAAARPADAAEVVKAKRDADNLARVVEGLCAGMYRCVQDELLPLLVEPMNIAAYHPDGPAMAKEFPPATSVTGGAPPATRH

SEQ ID NO: 198276 - protein, 45 aa, Oryza sativa
  Clone ID: PAT_MRT4530_93952C.1.pep
NNLQTGFPNVFQAMPGFASVCMEAFESVYNFKSSDRILDSKRLLT

SEQ ID NO: 198277 - protein, 133 aa, Oryza sativa
  unsure (1)..(133): unsure at all Xaa locations
  Clone ID: PAT_MRT4530_93953C.1.pep
MKWTVCFTRGALYMLLVMAMGLACAYSYCYRSRLRQQYGLQEKPCGDRCXCCVHWCYEPCALCHQHPALAHRALDLDLGYRDPDELQGNTVGSSPPRPPFVVASVPSSHPRRRSAAVSSTPPRPSSHPPSCRC

SEQ ID NO: 198278 - protein, 1188 aa, Oryza sativa
  Clone ID: PAT_MRT4530_93954C.1.pep
MEAAFDAYFRAADLDRDGRISGQEAVAFFKASALPQPVLAQIWTYADKNRTGFLGREDFYNALRLVTVAQSGRELTPDIVRSALYGPAAAKIPAPRINVSTPLPNATSVTSPLQPTQAPRPAQQSLAIQGSQGPLSTSLNPQVLQPGNVVRPPQASIANTPAQAIAPRAPAGGVPNHTVPATTGLSTDWFNGKKSASPLGVTSQTPTRGVSPQVNLATAGIPTQSSTPIAGYGSHTPASTTSVKANSADLNLLSSPPAANDSKALVPLGNGLSSASTFGVDPFAATPQAKQDSSSPPVVSNSLPSANALGPSAGPHHPPKPLQTGPMQGVASLPSQPAPKQNQFNSMPSAPAPMGSFPGGQIPSNTNQSQAPWPKITQADVRKYMIVFIKVDRDRDGKITGEEARNLFLSWRLPRELLRKVWDLSDQDKDGMLSFREFCTAVYLMERHREQRPLPDVLPDGIWAEGISLPSTGQFAENPTGPAPHPSAGFTSRAMPGQHHGMPPSSMKPPPQRPLSLDADDAVRTEKQKPKIPVLEEHLTGQLSKEERSALDAKFKEASDADKKVQELEKEILDSREKTEFYRTKMQELILYKSRCDNRFNEVSERMSADKREVQSLAAKYDERCKKVGDVASKLSMDEATFREIQEKKLEIYNAIVKLQKGDGNDEKLQERANQIQSDLEELVKSLNEQCKRYGLRAKPTTLVELPFGWQPGIQETAAVWDEEWDKFGDDGFSTIKELTVEMEPPVVQKDQPTVEDSKVSTNGPSAPTSTEKEDSRGDKSAAASEQTVEPDATPSDSKTVAAKSPPVSPVKNTKDGHSDERDKKQSGTNDTSSRAIESVSNNGGADSPVHGEKRDDSHYWGPSFDNGDDNDSLWNFNRKDGENGDSDLFFGPQGLPPIRTGGSSTAGSVYGKEQKPFFDSVPGTPVEKPFFDSVPGTPLQKSVFDYSVPSTPMQKSVFDYSVPSTPLQKSLFDSVPSTPMQKSVFDSVPSTPMQNSLFDSFPSTPMQRSLFDSGPSRAESPTASSIYGKEQRGFFDSSVPSTPMYNSSFSPRYSEAGDDSSFDTFSQMDSFGMNYSNSFGQRDSFSRFDSFRSNADQGSNDTFGRFDSFRSNADQGGGNSFTRYDSMNSSSDHDRTDAFARFDSMKSTDYNSRGYSFDEDDPFGTGPFKSSDTSSPTKHGTDRWSAF

SEQ ID NO: 198279 - protein, 40 aa, Oryza sativa
  Clone ID: PAT_MRT4530_93955C.1.pep
AMAIMTIRRFGVYMLVHMSPAMLPPCSNCSPNLIRMVPSS

SEQ ID NO: 198280 - protein, 919 aa, Oryza sativa
  Clone ID: PAT_MRT4530_93956C.1.pep
MAAGGHAAAEHRIQIPAAPASQSGPADHKAVAAAPEKWLNYFLRLLAVIESVGNAFGTLAFTWATVVLLGGYPTVLKRDFGIATAIIFLEATRMFTRNNRLDYQLFFRTRGAFRPLGWNGLMFLCAGVLGLRLRINSRLRRQMSLWSPMVAILLLASCICRSSLLAIWIVYGVLLVVVLLVTISRLQFPIIINRVHGALGRKYVFWRPFILYSCMLAAIVLPMFMIDKLYRYAIIVLDISALVIVSFGNLQIPAALVRVVLAALGFDQEDYDGHGDTTNLPQSLTIFYGMVLGQGLLYIIAAVLEVFSFIPRIHLVRRGGFTGRWGAESVDMYYAYAYDKYMEGGLFAPKRISLSNFAMDSLNSDLSKNQLYGVQMMHIFLQNGLTKARLLEKLTTSTQTMARLISMLDWSSRHHRATIRLYAAKVTAELAKNLRVETVPGTLQLVSTLLDADGKPKRGHPLLDADDDQDHFVDIADRQDKRHDIAGNQGQRREPIGDTNNLLETPTRSTHINDQRYIPRIWQRILEYWSIPKEQPLTDDDLLPALGMSIIYSLAGCDQNNCVEIDRVTDLIPNIIGFTSFRSAMVNSEAQQKVLLKSSLKVLQRLTSIEGEIGITLRYKISKHPFLLRNLAEILRDNSSNKQELRKLVVGILRNLAIDRHTRQEMGQMQMLITTLIKAFLDFKGLFSSDVDCLLPKVAGQALVMLSSENSHNCFVMLKEPDFIHKLKNMILIHGDKYIYVAASLLRNMCLYAQHELTESDQKELSHTLREVLERIMDTEGAELEILIGLSSQICKLIPEEFSQELEHGQIKRRFIKRLVDTLNANMNPSSHCPGIRRVVLEQSIHMMEYNSRYANYFNEYQMMDALSFVELTPSRAENYMVFLGDAGFMECNTPLSALVDRAKELMGRQWLQGISSAN

SEQ ID NO: 198281 - protein, 219 aa, Oryza sativa
  Clone ID: PAT_MRT4530_93957C.1.pep
LTKEHQLDFIVLSETVKKEFSTSALNNLCVSKDFLWHCKSPRGRSGGLLLGINLLNFDIGLIDEGDFYIKFHLRNKADNFKWALVLVYGPAQNELKDQFLEELVNMCSHETIPILIGGDFNILRSPNDKSNNNYDDRWPFLFNAVIDGLCLREIQLSGRNFTWANNLANPTYEKLDRVLVSTEWEQKYPLSSVVALNRDLSDHVPLLLKTKSSYFSDAQ

SEQ ID NO: 198282 - protein, 265 aa, Oryza sativa
  Clone ID: PAT_MRT4530_93958C.1.pep
MNSESQQKVLLKSSLKVLQRLTRIEGEIGITLRYKISKHPFLFRNLAEILGDSSSNQELRKLVAGILRNLAIDRDTRQEIGQMQMLITMLMKAFLDSSRSFSSNVDCLLPKVAGQALVLERIMDAEGAELEILIGLSSQICKLIPEEFSQELEHGQIKRRFIKRLVDTLNANMNPSSHCPGIRRVVLEQSIYMMEYNSHYANCFNEYQMMDALSIVELTPSRAENYMVFLGDTGFMECNTPLSALADRAKELMGRQWLQGINSAN

SEQ ID NO: 198283 - protein, 761 aa, Oryza sativa
  Clone ID: PAT_MRT4530_93959C.1.pep
MMAAGGHAAAEHRIQIPAAPASQSGPADHKAVAAAPEKWLNYFLRLLAVIESVGNAFGTLAFTWATVVLLGGYPTVLKRDFGIATAIIFLEATRMLTRNNRLDYQLFFRTRGAFRPLGWNGLMVIVFFSVSMVSTVVWDARRPRIVFPIMVVLFAVGQFLCAGVLGLRLRINSRLRRQMSLWSPMVAILLLASCICRSSLLAIWIVYGVLLVVVLLVTISRLQFPIIINRVHGALGRKYVFWRPFILYSCMLAAIVLPMFMIDKLYRYAIIVLDISALVIVSFGNLQIPAALVRVVLAALGFDQEDYDGHGDTTNLPQSLTIFYGMVLGQGLLYIIAAVLEVFSFIPRIHLVRRGGFTGRWGAESVDMYYAYAYDKYMEGGLFAPKRISLSNFAMDSLNSDLSKNQLYGVQMMHIFLQNGLTKARLLEKLTTSTQTMARLISMLDWSSRHHRATIRLYAAKVTAELAKNLRVETVPGTLQLVSTLLDADGKPKRGHPLLDADDDQDHFVDIADRQDKRHDIAGNQGQRREPIGDTNNLLETPTRSTHINDQRYIPRIWQRILEYWSIPKEQPLTDDDLLPALGMSIIYSLAGCDQNNCVEIDRVTDLIPNIIGFTSFRSAMVNSEAQQKVLLKSSLKVLQRLTSIEGEIGITLRYKISKHPFLLRNLAEILRDNSSNKQELRKLVVGILRNLAIDRHTRQEMGQMQMLITTLIKAFLDFKGLFSSDVDCLLPKVAGQALVMLSSENSHNCFVMLKEPDFIH

SEQ ID NO: 198284 - protein, 87 aa, Oryza sativa
  Clone ID: PAT_MRT4530_9395C.1.pep
MEFHLKGTILRSKGGICQTIKIAQINVWFNEFDSSDNSIRMEHGIHLLTKKSNTLAWEIFLAPVQVQILVRCGRASQFDPTTDKICK

SEQ ID NO: 198285 - protein, 280 aa, Oryza sativa
  unsure (1)..(280): unsure at all Xaa locations
  Clone ID: PAT_MRT4530_93960C.1.pep
MEKDKGLVSNLMHGVAGGGHAYPYPPQQGYYPPPPTAYPPPAGYAAPYQGXMEVAMVEEGTWLRCLERVQPSPPRRTVHTSFLPMAAMEATVTVTAVTMAVAASLAAITMATAAITANTMEAITDTTTTMAASMAVITDTTATTAASMAVTTAVTMVATINTALSFSPCLLNNDTQGSPAVGMSGSLPAERHRSGVAEAMCRLASGVRMVVLDWEIYHGGRVVRVPSESLAQCFIGPTVATVSGVWKKLLRSDEESTLMVLTQRMKEMVARLKPTRTGVG

SEQ ID NO: 198286 - protein, 42 aa, Oryza sativa
  Clone ID: PAT_MRT4530_93961C.1.pep
MAIFMVTTTARVQRRHVGIRSHIFTCGSAGRLENYSLSQTPT

SEQ ID NO: 198287 - protein, 147 aa, Oryza sativa
  Clone ID: PAT_MRT4530_93962C.1.pep
MEKDKGLVSNLMHGVAGGGHAYPYPPQQGYYPPPPTAYPPPAGYAAPYQGMYSIVMEVAMVEEGTWLRCLERVQPSPPRRTVHTSFLPMAAMEATVTVTAVTMAVAASLAAITMATAAITANTMEAITDTTTTMAASMAVITDTTAT

SEQ ID NO: 198288 - protein, 142 aa, Oryza sativa
  Clone ID: PAT_MRT4530_93963C.1.pep
MANTSIVYQQAATSVMVSHGEQLCRKPNDAQRNLERGILVTIFSSAVLMDYFVDGPPWTEGSNGGLVFTATLLLAFATFICGSALMLVGLAGRLFSGGRRVAVVSMCLVVALSAQTLLGLLISAFPYVQDLTSLCRLCIPER

SEQ ID NO: 198289 - protein, 479 aa, Oryza sativa
  Clone ID: PAT_MRT4530_93964C.1.pep
MRSKGRKRRKCVSRAIAIGRLSLKYILFYLKIKLGSRARAKPVEKLEHFIGSARACIELEPRQTSSLELNSSTALMTREIADIMPNKKKRSAEDAALYVESLLFGDDPSDSEADVDKYDASDLKGAINKDGSSDEEDFTEEGLSAKEVALSISKSIVSLISSVDGKVLFTCSGTMVDHVGSATWILTSATLVRKCDNDYDAYQEGDVKIEVLLHNKTITEGFLAMCSLQYNIAVVTIEPQFDLPLVKLHDVPVCYSMLCRPVIAVARNFKSKTLLVRCGEMTRERSELDCDELLVCTCPVSKVFIGGLVMDLERRILGITFYDKDTVPFLPIEIAVRCLEHFKNFRTLKQPSLCIRGQAIHKLEICNLEKICYMYPELSSGSGIVVEKISEVLPENCSSIEAGDIICSVDDIVLYSLSQLTSIFLDKMAAAMPTQDKVTVQAEIRRPRDNTKFVAKLNIGIASGEHNNCFNNRFSFETL

SEQ ID NO: 198290 - protein, 52 aa, Oryza sativa
  Clone ID: PAT_MRT4530_93965C.1.pep
MFFFWNLHLVSANYVRCILPMLLPYATGASYPPTATAALLKFESYGVISADF

SEQ ID NO: 198291 - protein, 409 aa, Oryza sativa
  Clone ID: PAT_MRT4530_93966C.1.pep
MSRYQDDPDAAAEPPPEDPGSGFLVVEDEVAVARATRWWGLWADRQVYGLPFPQSRQLEVEYTASIGAGRNRLTYTHRDDVVFVPVVGQPLSSGRYYAARATGRHAGKVSACSREEDMVTCCGLWSLVNDVPPRPFDRGDVYQQVEVLRLPPRGRGFTAVAVAPDGIPPGYLRREAWKVHTSASTSYDLADAAHGTDWPLRRRMPDLDSFDVGVGGSPPVVVGRWYCPFMFINDGGEQRLKDQVKRCMFYEMTLEQRWEEIYTRDNAHRGRRSTSSKDNEVEVSATVRRSTALLGGTDAVRGGGPQMVDGVMWFRPAAPPTNSGTAGGVGLDMVVWEKMKWELERGGWVAGNGDVESIERGERREARPGQWDKFGCYLLLESFVLRRMDGSVALTCGFRHTGKIRTKWV

SEQ ID NO: 198292 - protein, 123 aa, Oryza sativa
  Clone ID: PAT_MRT4530_93967C.1.pep
FGPPDPKNGGGFRKRNKPSKLTQVRGRTRTPTRGGPPRSAFPPRRGPGPPRQGPLARGGAPGGPPNQGERGARGAPLHVGAGKSPPGAHSWAGPEGQEPQEPPPGHPRAPGKPLRPGPPGGGA

SEQ ID NO: 198293 - protein, 62 aa, Oryza sativa
  Clone ID: PAT_MRT4530_93968C.1.pep
KYHSFKLIMLHSFVQTYPPVVDTNKVKKKNLVNKLGKGKPIQGGPILILKVSKTEINKGVFF

SEQ ID NO: 198294 - protein, 82 aa, Oryza sativa
  Clone ID: PAT_MRT4530_93969C.1.pep
LPRRRRRAALAPPPRRLRAAAPCVVRRPEGAADPGEGQDPQDLEQGKSSLFLEHVDPNCEIILFINKIACNDEHPTCDYAMP

SEQ ID NO: 198295 - protein, 377 aa, Oryza sativa
  Clone ID: PAT_MRT4530_9396C.1.pep
MADGEDIQPLVCDNGTGMVKAGFAGDDAPRAVFPSIVGRPRHTGVMVGMGQKDAYVGDEAQSKRGILTLKYPIEHGIVSNWDDMEKIWHHTFYNELRVAPEEHPVLLTEAPLNPKANREKMTQIMFETFNVPAMYVAIQAVLSLYASGRTTGIVLDSGDGVSHTVPIYEGYALPHAILRLDLAGRDLTDSLMKILTERGYSFTTSAEREIVRDIKEKLAYVALDYEQELETAKNSSSVEKSYELPDGQVITIGAERFRCPEVLFQPSMIGMEAAGIHETTYNSIMKCDVDIRKDLYGNIVLSGGTTMFPGIADRMSKEITALAPSSMKIKVVAPPERKYSVWIGGSILASLSTFQQMWISKDEYDESGPAIVHRKCF

SEQ ID NO: 198296 - protein, 231 aa, Oryza sativa
  unsure (1)..(231): unsure at all Xaa locations
  Clone ID: PAT_MRT4530_93970C.1.pep
VHQGAGATAGAEAEAEAGARARARARAGVAAGAGAEAEALGEKGCVLFCQSPRLDPPQPPRDLICKNCRRPGHFARDCQSTATCNRCNLPGHFAAECTSETVCWNCKQSGHIATECKNDALCHTCSKTGHLARDCPSSXLPGHIARECTNEPVCNLCNVSGHLARNCQKTTISSEIQGGPFRDITCRLCGKPGHISRNCMTTMICGTCGGRGHMSYECPSARMFDRGLRRF

SEQ ID NO: 198297 - protein, 111 aa, Oryza sativa
  unsure (1)..(111): unsure at all Xaa locations
  Clone ID: PAT_MRT4530_93971C.1.pep
TPKEKINLTPPPPKHGGGKGPPPVLKVPPPETPKPXPPPRESAGGPPPGPGGGKTSRKPGPPPPGPPRPPKPXGGAPALFWPGGKPPGKRFQKPPGGLFGGIHAAPGGGPP

SEQ ID NO: 198298 - protein, 41 aa, Oryza sativa
  Clone ID: PAT_MRT4530_93972C.1.pep
KARTADKPSKLIILYAANPGEGTCPHPYIENSRSNTLGVKY

SEQ ID NO: 198299 - protein, 134 aa, Oryza sativa
  unsure (1)..(134): unsure at all Xaa locations
  Clone ID: PAT_MRT4530_93973C.1.pep
FWNXNAPSLVFFVQGPARVQVVNHPRKXVFKGVLRPGQMCFFPHPLVXKKPEHEGCPSFSFKANAISXVPPLQGKTQLFRPPPGDVILKASPLSRGQAPTLKNNRGKKPGPLPPRYQHQPSPGFSNESENEPLK

SEQ ID NO: 198300 - protein, 190 aa, Oryza sativa
  Clone ID: PAT_MRT4530_93974C.1.pep
MAAAATVFVGAASGASYTVGEPGGGWDTQTNLTAWASTVDLRRGDQLVFRYDASAYDVVEVTRAGYLSCSAASPVSAALRTGNDVVRLDSAAGWRYFIYGVEGRCAAGMKLQVRVTDAGAGCNNTLPSPSLAPAPPGAPSPGITICSGGPPTVIMTPGVISYGAASRSSANLSSSLLVAMVSLLLGIIVV

SEQ ID NO: 198301 - protein, 816 aa, Oryza sativa
  Clone ID: PAT_MRT4530_93975C.1.pep
MALLIFVVLLFALSIPASSATIDTISIGTALAKNDKLVSENRRYALGFFETQRKASQKTSKWYLGIWFNQVPKLNPAWVANRDKPIDDPTSVELTIFHDGNLAILNQSTKSIVWSTQANITANNTVATLLNSGNLILTNLSNSLEVFWQSFDYPTDTFFPGAKLGWDKVTGLNRQIISWKNSIDPATGSYCKELDPSGVDQYLLLPLNSSTPYWSTGAWNGDYFSSILEMKSHTIFNSSFVDNDQEKYFRYDLLDERTVSRQILDIGGQEKMFLWLQDSKDWTLIYAQPKAPCDVYAICGPFTVCIDNELPHCNCIKGFTVTSLEDWELEDRTDGCSRNTPIDCINNKTTTHSTDMFYSMPCVRLPPNAHNVESVKSSSECMQVCLTNCSCTAYSFINGGCSIWHNELLNIRKDQCSENSNTDGEALYLRLATKEFYSAGVDSRGMVIGLAIFASFALLCLLPLILLLVRRSKTKFSGDRLKDSQFCNGIISFEYIDLQRATTNFMERLGGGSFGSVFRGSLSDSTTIAVKRLDHACQIPQGDKQFRAEVSSIGTIQHINLVKLIGFCCEGGRRLLVYEHMSNRSLDLQLFQSNTTISWNTRYQIAIGIARGLSYLHESCQDCIIHCDIKPENILLDDLFIPKIADFGMAKLLGRDFSRVLTTVRGTAGYLAPEWISGVPITPKVDVYSYGMVLLEIISGRRNSYTSSPCVGDHDDYFPVLVVRKLLDGDICGLVDYRLHGDINIKEAETACKVACWCIQDNEFNRPTMDEVVHILEGLVEIDIPPMPRLLEAIVAGSSNPTCTSSSFFGSIRESL

SEQ ID NO: 198302 - protein, 285 aa, Oryza sativa
  Clone ID: PAT_MRT4530_93976C.1.pep
MATGRRFLQFQSLLAQQALRLRAAPRPKPQPNPPHRFLHAPSSPAAASPSRLPLWRSTGSLLPVSAAAAAAAAAAARAAAARWLMAAREAGSLELFSLQRRRTKWLPSADGAVLMLVGANVGVFMLWHLADPSFMRRHFMISLDNFKSGRLHTLLTNAFSHAESGHLISNMIGLYFFGSSISNMFGPAFLLKLYVAGALAGSAFFLLEKAFLAPRRQFYGGWDNSRTPALGASAAANAIILLDIFLYPKKLVYLYFFIPIPAAIMGAILIGADLLRVKNVLAFPG

SEQ ID NO: 198303 - protein, 125 aa, Oryza sativa
  unsure (1)..(125): unsure at all Xaa locations
  Clone ID: PAT_MRT4530_93977C.1.pep
GEKGKSNYAYLQTILGPFLKGDPRGGGAHPVGVEPKXKIWXQSLGAKKKGGGAPEKTREKGGGVERGKPRGGAKGACTPGRGLIDPPRVGPDKIQKGPQGFGISPVFEKGPQGQVFPFFLLGENK

SEQ ID NO: 198304 - protein, 96 aa, Oryza sativa
  Clone ID: PAT_MRT4530_93978C.1.pep
MGEVARVWEIGLGWGGGGDDDSGDSGSVAAKPSAHAEAVDKSEIGGGAEDTGEAVLRSALHSTWLICKTTRGFNLQCKCFSSENRVIVYNNRDEFS

SEQ ID NO: 198305 - protein, 95 aa, Oryza sativa
  unsure (1)..(95): unsure at all Xaa locations
  Clone ID: PAT_MRT4530_93979C.1.pep
MAASAADSTADDGRSFWRGRRGDRGWRPCWRRGPRXKEEKWLPVTKLXRLAKEGRVSRIEEIYLHSLPAKEHQIADTFAPTLKDEAITITPAQKE

SEQ ID NO: 198306 - protein, 47 aa, Oryza sativa
  unsure (1)..(47): unsure at all Xaa locations
  Clone ID: PAT_MRT4530_9397C.1.pep
ALTRLITADQDYWHGWTMLEILRYMPEHNWSXYEEALKVYLVLAKMM

SEQ ID NO: 198307 - protein, 254 aa, Oryza sativa
  unsure (1)..(254): unsure at all Xaa locations
  Clone ID: PAT_MRT4530_93980C.1.pep
MFKVQNYIDGKFQDALSGKWLDNYEPATGKVYSHVADSDETDLQLAYQAAKKAFATWSKLTKETRASYLNKIADGIEKRFDEFAAAEAKDTGKPLTLAKNMDISRAIANFRFFAGAVLHHEEMSTEMDGVAINYTVRQPVGVVGLISPWNLPLYLLSWKVAPAISVGNTVICKPSEMTSVTAWLMCQVMQEVGLPQGVVNVVNGYGHKAGQAMVVHEDIRLMSFTGGTXTAESIIKSRAPFLQKLSVELGGKNP

SEQ ID NO: 198308 - protein, 132 aa, Oryza sativa
  Clone ID: PAT_MRT4530_93981C.1.pep
MEEEEEEEEAEGWQEKEVVVVMKDISGAHREIRLCLLDEYESEELGTSHCANPVENLEALCLVTLPASMTKSAIKAMAEDDLREKMGSSSWTTGAPCHQPPIVTASSRGKAHRSLLLIPSAFFEARQGAACN

SEQ ID NO: 198309 - protein, 153 aa, Oryza sativa
  unsure (1)..(153): unsure at all Xaa locations
  Clone ID: PAT_MRT4530_93982C.1.pep
DFDRKIKFGRKCRPHIGIFGHTLTFSWVIRPESKGLPDPTQPFEVNGVDPLMTPKKGKPILPNFIGFSFPVCFRASSXCLSFRHXKRLPSLSXGXXLCPIGXFGXXPSPFCFQRXXPGRXPRFPFSXKXFCTPPPSPXFSGPIXFXPXPXPXX

SEQ ID NO: 198310 - protein, 79 aa, Oryza sativa
  Clone ID: PAT_MRT4530_93983C.1.pep
MWLQRDRFVVNITITSIAQHTSWCYNSCKLCSRTSRPFDFTYRYTHCSYIGIAVPRYKVVLTAADSTGEATFILFGKTA

SEQ ID NO: 198311 - protein, 51 aa, Oryza sativa
  Clone ID: PAT_MRT4530_93984C.1.pep
HRKAIRTGSASYTIHTTPRSSVHPPIHHKSHRPISRQDPPLLLTQTNPRVR

SEQ ID NO: 198312 - protein, 47 aa, Oryza sativa
  Clone ID: PAT_MRT4530_93985C.1.pep
MGDAIRRPATATTQTSQVPNPYEERPPGVGLNRRRRREDLQDWGEAN

SEQ ID NO: 198313 - protein, 136 aa, Oryza sativa
  Clone ID: PAT_MRT4530_93986C.1.pep
MVEAVEEVHGSGRYWSPTAPTTERGRTEKPRATSAYPCSCYGWRNWNGVGGVLGRWWWRCCAASSPLPPLELHLRVSYAEPEYARWMLSRSPSSVVHRPPGAATAGEHLASAGIALSSKMLAMPCLAGEKRKRDGG

SEQ ID NO: 198314 - protein, 646 aa, Oryza sativa
  Clone ID: PAT_MRT4530_93987C.1.pep
MEMMRQTILNLNRAISLPAGAALHVQVSHIIYPVTNEVLHQVYDIYGAEELHILVADAWRVEALVWFRARGGAEKARGATHGHHIYDGGCLLEAQHVQPCSKDGAVLTPTKCSMLVPSCAITKSDAESTPTTLEHVFPATMSQSMPSAALAAAAPPVSLTATKEDEADMDKSEMKPEETFQELCAKMIAMLNNMLVTCCDIKVESTASVDITRVVAVTSTNTELVPNTWSCLDRSSEYTASSPPVPPWRAVIPWNQAEMTFGSRPLPWPDPQLSQGSEGVEQGQLLRKQGKKNPRSALFEAGDKTDVGAFFSLGRTSSKVQWLFLFGPWDSLQNVQWLTYMGKLIAKSNFDVRGCSVNLRELHMQSYLAETLHLQYILLVGIIWDPGEFGLQGLSVQRKSNAVLDLFVIMEYWFMQQLMLTMHTEKHWQFIFHPHHLDGLHVRKDMQQPQLRPLQIVFPVSLRADLEPLLQIMASMTKLIKLRSWPALGRWGDQELNQVHDLCKCCQDQSLFQFTFSIATAFHEAQVQEYAMSRPWDPGGIASVGKLNCISSEGSMTSANMDKQMCIVKMVMHLNFIGVMLQVTMGSSYISMLISGARDWTVKGLSKYVNSWLYFSSSTRAQWYGASYFTKIWTNCYLNYMKARIF

SEQ ID NO: 198315 - protein, 2068 aa, Oryza sativa
  Clone ID: PAT_MRT4530_93988C.1.pep
MDPPPPFDHPLHRRHYSDHHHFPPGGSGGSGGAASAAARSRYEYGGGGYESHSHHQYHLPDHHHHHHHHHPPPRVQHHHHHHHQQLPAPTPPPPPPPPLPQHRLEPPPPHYGFPPRGHPDAYSPPPYHDPSPHHHYHRHGGDDFLPADEIRRVGGGHHHHHHHPQLQQLLPWEEAEEERRRYGGATQQLRLSPSGPRKRQRCAVHDADVESTSSSGPPPRRQRQQPHPDYALDDSFVDRNNAHPGYMVHEGFSIHSDSKVSRKIQMPTQMALPGSPHGTSAGYARRAPQKVAPSRVSVWHRIEENPAMYEPSSPPPHMPKEVHVSPCKSNNVAPASKELASVISVDCRGKSADGNDGDSNTGTKKNPVKKNEKVLASVLVKPPMEPKEKEVAAKKMLKKPDKVQKNAVHSNIRSLVSTPCPGAGAKKVKKIVIKKIVRKINGKGNQNSTPVVSEKRDGIDANACEKEEGEITTSSFEKDVISAHDPIAVSDTAGFGNAVNDQKQKNTDFTNPSGRNAASANGSMEIPDPPNGSGSAHPGKEEVLSPKNPVDNSNASLVVEPIEVLEKSGTEHPRKEHDMSSIGSGVNDAFADANNHTQKEVGEMNVAVAINSVRVSDAREVPRCDDSSMEESKVPKDVDANIAVCMDGVASNCDTTEVCGNEDARRECGKKLIGINDEKAFLLNNSARSSSTSDTCMTAVEGAQKKEGIILTGSSEKSIGFLGDSVGTHRTTEFGASKDAPNEGDDMPSHPSEKDFMSLNSCGGLNYTEVSEKEDIQEKEDRVPMESIVACTSSGNEDIQVNEGRKPMELSEANAFSGSGDSQGKECRIPMGSSETNTSSVNHVNASNEKDFSLSEDTQKKESHRPIESCENTTFEIMHHEEAPSTEEVITGVSLGRKVAEGPTRSNERCSGARGNSATTLKFGLACATEDNQMEDLLNNRTALNETDDPLDAEDSPVFVPPSSRNVESTYASPLYDPMEDSTSDGILNIGLGRNTTSKAAELLDLHRDHISSENDSLIHSRGTSSVSGNREQSVPTALTLGSNIYFSSAETDDRPEERHELVVEGQQGLTVETTSKLDSPGKIEVLNGAGFISTGIQNWLSLPPSINSMEMSGQFLNNGFTVSKGRLGLDQSMDDATSVSQDHDIAQDMDQRGSEDAFFSQDHSIRLCGSNLPHSHLLAPKESSMNGEDQSGIVLTGLHPSSSVNVLGHYGYQTDDIPVDNLNKLPSALESSDAMDADQVSSQVCVNPDHTNDSNTENAGVESNAKQDLLSSWIEAIVSEAKKEHPPCKSTPLTVGLPDKLLEPKDSDRKTLLETVVPSAVKSPQINFASSTLQKVAPKQVTLPSSSREPTRANQNARHRTWHRGNIASSSSSLHASQPLGLPPKLPPKKNDKAQNSYIRKGNALIRNPSNGNHPHSSTGHDTQNKLNKPVVRRSMNFVRKADTKDLANSNISVERPKTPPLPLHTKSSCPTTLLEPLSQTLQKQHGHEAEKEDLTGQPKSGVDNSSIKSAQKSEPSDPSKVVYVRPKSNQLVAAQRQHPIDLVNSPTDKILSLQAPIAYDLYLKKRKNQIVLSSCSPSDGLSTKETLPAENSNSEEKKDLMIACSISGIPGVKDRPQKALQTTNNVGRFSHVWTLNGQQPQRKGFMGSSHMNAFPRILPWKRKIFCKNFRSSHMSNVSSIRIVRKLLQTRKRDMIYTVSTDGFSLRKSGVLSVGGSSLKWSRSLEKRSQKVNKEATLALAEVERRKREKRKRQSLHDKGDHQFESVTGNQLRNSRQSSSDLRKPSTCNEYVRVSKGNQLVRNPKNVIRMLASDKVRWSLHTVRSRLAKKQQYCQFFTRFGECKKPRGKCPYIHDRAKVTICTKFLKGLCSNTSCKLTHKVLPERMPDCSYFLRGLCTNIACPYRHVKVNLNAPVCEDFLKGYCAYGDECHKKHSYVCPVFEATGECPQGSRCKLHHPKSKVKSKSRRPDFLQNSSWGRYFDASIDHQDETRKVSLDEDEREKPQRVFTDGDLGFISLDDDADEDVTALDASDDIPLMELDSGDLSVQTDNLDALIKPLRIMRTARV

SEQ ID NO: 198316 - protein, 626 aa, Oryza sativa
  Clone ID: PAT_MRT4530_93989C.1.pep
MEVKRDRNNMVSELSVHGIPCQETRWLTHGCSYDFQILNPSIGGSCTGGARQVFDAMPSWLGAGAGAALHVQVSHIIYPVTNKVLYQVYDIYGAEELHILVVDAWRVEVLVWFRARGDAKKARGATHGRNIYDGGCLLEAQHAQPCSKDGAVPTPTKCSTPVPSCAITKSDAESTPTTLEHVFPATMSQSMPSAASAAAAPPVSLTATKEDEADMDKSEIKPEETFQELCAKMIAMLNNMLVTCESTASVDITRVVAVTSTNTESVPNTLEVRKEANSISLVDTNESCMATPTKCLTKGNEQMINDDDDDMATEDLVEHTEVNSKFTLRQTSFNNPWFGHQAISVVYLTCYSCLDRSSEYTARSPLVPRWRAVIPWNQAEMTFGSRPLPRPDPQLSQGSEARGGEVSMELATSQANCKGDRVEHQPQPWPNPQLNESSGDVVYLLQRWSLPDLSLRIGVAIVQEQGQLLRKQDKKNPRSALFEAGDKTDVGAFLSLGRTLSKVQWLFLFRPWDSLQTVEWLTYMGKLIAKSNFVVRGCSVNLWEVHKQSYLAETLNLQYILLVGIIWDPGEFGLQGLSVQRKSNAVLDSFVIMEYWFMQQLMLTMHTERHWEFLFHQHHLDGLHVR

SEQ ID NO: 198317 - protein, 48 aa, Oryza sativa
  Clone ID: PAT_MRT4530_9398C.1.pep
MEKSGRLGHRRDVARGASRRNGGAGVVVRVLVVDLEFVTRSCSWNHRH

SEQ ID NO: 198318 - protein, 157 aa, Oryza sativa
  Clone ID: PAT_MRT4530_93990C.1.pep
MAEWLIQQSFLNELTPLSWDHLDAAARGTFFSSTVRCQPIEKMLSNMGWSEERLQTRQCGMYTIKWMEMLAAQLDLLMNRVDNNEKESKQGTVNALGSHTTSEVYGNAGHSGTDGPKTRKDVMLMNNSNGNRPQGDQGWSIAPWGRSRTDRSTRRSK

SEQ ID NO: 198319 - protein, 327 aa, Oryza sativa
  Clone ID: PAT_MRT4530_93991C.1.pep
MASSDVSVDVRPEFNSFDHLRSMRYIATDRPWLTLYGIRVQPVTPFSSLSSRPDLALIHQCLPDELLFEIFARMSPYSLGRAACVCRKWKYTVRNPTLWRNACLKTWQRTGMEANYQMVQSLYDSSWRKMWMLRPRIQFDGLYVSRNTYIHTGTAEWQFTKTVNVVCYYRYLRFFPSGKFLYKISPQKIKDVVKCMHFRASKGDCVFKGDYVLSEDGQIELALLYPGRRYTLVRMRLRLRGTTLGANNRLDVLKILTTGVNATELRNWKGSVLELVETWDEDETHDPEVPAVTHSRGLTPFVFVPFEEADTSVMNLPVEKMDYFVPG

SEQ ID NO: 198320 - protein, 149 aa, Oryza sativa
  Clone ID: PAT_MRT4530_93992C.1.pep
MEGGGDDGHGLPRTLSHRELQAMCKRNDGHANMTNATMTDALQLLPSVDGIHKIDTTALCLPTPSRLTMKSALKAASAVGEEEQQQHGSPLPRGRRVSVKSLEAIQMDFEEGEDEMKRDREERNLGVALRSTSRRARATPTPIPTPCDH

SEQ ID NO: 198321 - protein, 63 aa, Oryza sativa
  Clone ID: PAT_MRT4530_93993C.1.pep
MMPRDMWIQRGGAGENPRVSWHNVAVLHGLGDPVAKEDDVDTADEEFFQEQVGYDELIWSVTG

SEQ ID NO: 198322 - protein, 72 aa, Oryza sativa
  unsure (1)..(72): unsure at all Xaa locations
  Clone ID: PAT_MRT4530_93994C.1.pep
KPNIAHKXFLQXSFLXXGFQEXYTXYCFIVQSLVXLXLTXXKXXLFQXLLFGXTCXQXSLNFRCTLLLLXVL

SEQ ID NO: 198323 - protein, 80 aa, Oryza sativa
  Clone ID: PAT_MRT4530_93995C.1.pep
MGRVDNCARWLRERGSARWGVARWFCGVFATGACAVRGACCWCCCCCCCWCCCCCCCWLAAAAAAAAAGCCCCCCCCCCC

SEQ ID NO: 198324 - protein, 356 aa, Oryza sativa
  unsure (1)..(356): unsure at all Xaa locations
  Clone ID: PAT_MRT4530_93996C.1.pep
SPARRTPSQSPPRLPPPPQPRHPPPPPPPSQHRRRSPPRPRSRPHRTPATASQVTPPPPPPPPWHPARPPHQAWGPCRRHCSSRSPWPHLAPAPPPQTXSKPQETNRDPETSQNPSPHNPPNPNPTPPPPPTNPPPPLGPTHPPGPTMLTSGPSKPFGKNLSRPFSIASIARSPPPCPPLRKLRSIPTQPDPXPWPPPPPATGPXPPPRPPPXDAAGDAASQPDAPPPXPSPRSPGPPPTPPWTPRTSPASSTAPAPPSPASSPPXPLRAPPPPGIPAAAPPRPPRPHAAVASRCRQLRELPLIPPPARARRAPPPRPPPPPXPPPTPTSSTPSSPRPTPPCLPPPTWLPPSPPPT

SEQ ID NO: 198325 - protein, 169 aa, Oryza sativa
  Clone ID: PAT_MRT4530_93997C.1.pep
FPFLLCGWPVIQAAPQNHTGGGENTKKPPQWKKAPQWANKSKKKNKKPKRGKKQTKRNRGKGGPQGEKGKGKEKGPLLGGAPAQKGGPPGGEQGTHGQPPQRKPGQIPPPQRAPPRGGVSYRAVGEHGNGEQKPCAEPLPWKKKTPWRGGIHCADPEPFSEPNAGAESL

SEQ ID NO: 198326 - protein, 387 aa, Oryza sativa
  Clone ID: PAT_MRT4530_93998C.1.pep
MKGGGGAAAASAAPGDYVYFKSVVPLHKISIGPKLWRYYDFGPKTVPPLVCIPGIAGTADVYYKQIMSLSMKGYRVMSIDVPQVWNHQEWIHSFEKFLDSMNIHHVHIYGTSLGGFLAQIFAQHRPRRVKSLVLSNTFLETHKFAAATPWSPVVNWTPSFLLKRYLLTGIRDGPHEPFIADSVDFVVSQVETLSRDDLSSRLMLNVNVASVGSLMLPDSLITIMDTNDYSAVPQQLKDQVNERYPGARRAVLKTGGDFPFLSRPDEVNLYLQLHLRRVGVEPRPDLVQGFTRNGSAGSSKDQKDGGNNFDNHPGDNGGPGSGGHDHETQNSGSESHDSDESIPTSTMLANTILGTVSSTLQASLCVLLIHHYYESALYISSRQPLDV

SEQ ID NO: 198327 - protein, 105 aa, Oryza sativa
  Clone ID: PAT_MRT4530_93999C.1.pep
MGIHIPTDRPASVATDWCLCLHGWPIMPPLLGVYDFTAGLPSLPPTGVLTYTVGWSHHRSWVSTSSPIGLPLPPPTSVFASTVGGHTTIDGHLFINTAGRLSCLH

SEQ ID NO: 198328 - protein, 38 aa, Oryza sativa
  Clone ID: PAT_MRT4530_9399C.1.pep
LGPFKAARGVYQHLYVAIDKFTKWRKSYCNTQDGDEDH

SEQ ID NO: 198329 - protein, 411 aa, Oryza sativa
  Clone ID: PAT_MRT4530_939C.1.pep
MYYCLAAPPAAAAPAAPAARRASSFLFVVSVPPPTLWGRVTGGAVSAQRLVRRRCSSAGEPRAAGDGGLSRLDDCGCSSESELLKAEVQAVKKGFIAAAAASPLSPAPVAVATAAAMSGRKKTREPKEENVTLGPTVREGEYVFGVAHIFASFNDTFIHVTDLSGRETLVRITGGMKVKADRDESSPYAAMLASQDVAQRCKELGITALHIKLRATGGNKTKTPGPGAQSALRALARSGMKIGRIATAILTLSGAAHADVQGTCKAAAGIDSRISYKFCVSKLSNHHLSPDADTRGLALIAASLGISNAEDTVFDIKGLVAKPGTGAKAKPLLARCQELYNEMSFVFAEGYDCINAQSYAAGKEKVGEAIPLARQCDDAFAKAAVPSPLVQRSWCSVQMSIICTAITNLIK

SEQ ID NO: 198330 - protein, 130 aa, Oryza sativa
  Clone ID: PAT_MRT4530_93C.1.pep
MAAAAAGGGRGGGAQAAVAEQIAQAVQSTSNLLQLMEESSPAQAHLAKLPKKLLAKASLAKNTGQVLHQLPSVISSLDAYMDASLQSASQIKTVTQLLSNMENNQLRSILPASRLEKAQKKTETGELRIE

SEQ ID NO: 198331 - protein, 58 aa, Oryza sativa
  unsure (1)..(58): unsure at all Xaa locations
  Clone ID: PAT_MRT4530_94000C.1.pep
RGFGPQPTESTPPRIEIRKSEQXAPXSSRETLVSYSLAGSHXYLNVDWVWPFAGLCSH

SEQ ID NO: 198332 - protein, 301 aa, Oryza sativa
  unsure (1)..(301): unsure at all Xaa locations
  Clone ID: PAT_MRT4530_94001C.1.pep
AASFPAACLLRRRRARLLRRTSPPLASSAAPAAVEDERRRVKHFMVAARPVKDFCPXGDDGWGNALLTYPAIRNTTVLAVEANPWKGINFSVPFPSHLHPTSNAHVLRWQDRMRRRDRRWLWAFTGSPRLRSTKTVRARIIEXFTVSPSCTHFGSSPWQYNLPGRIMVXELLESAEFCIQQRGDSYTRKSTFDLILVGCIPVFLHPASTYTQYTWHLPRCGARGGVLRRHVHSSGGRRRLRTRGGTPRTPAGRPARPRSGAAWRRGTTPAAAPRSPRRRAPPCCRPLPPGGTTPTTTCPPA

SEQ ID NO: 198333 - protein, 631 aa, Oryza sativa
  Clone ID: PAT_MRT4530_94002C.1.pep
MDPRLGRSAFINFSNPNAYVGKFPVISTVSHPTASSQIDVLAHCSSYNLPRGTKRKFDGLSLGLGNSSSSESSKQSMGTGCTISSAKGSDDGSSIDLDLNHFTLGNEGTSRLDKRACDSRRALDKPELNLELSLSSQSAITGADFTAATEYNSPSLQPYYMDLVPTVDEGSTSARRPSGCQVLSFLNKTAKMSEFSPREVFPGSSNQSQGPAPMPTLLQLPKSPVACTSGLSRPQQRSSSTKNCTYPGCMKGARGSSGRCIAHGGGRRCQKDGCDKGAEGKTIFCKAHGGGRRCEHLGCTKSAEGRTDFCIAHGGGRRCSHEGCKRAARGKSGRCIKHGGGKRCQHAGCTKSAEGRSGLCIAHGGGRRCQQDGCGKGAQGSTNFCKAHGGGKRCTHPDCKKGAEGSTAFCKGHGGGKRCSAEGCTKSVHGGTLCCVAHGGGKRCVVEGCTKSARGRTDRCVGHGGGKRCQSSGCDKSAQGSTNFCKAHGGGKRCLWGHEGSDHGAGDTPCERLARGKNGLCVYHNPQVDENRVHGGFSVVSDALSQGDRPSNTETSRCSIFSHPMEAPRRVAAPADEGRVHGGNILSMFANGMSLGKHPANQAEASTSAPRNSKSTNGMVTGNSAVRGSWL

SEQ ID NO: 198334 - protein, 133 aa, Oryza sativa
  Clone ID: PAT_MRT4530_94003C.1.pep
PGGHGPPPQVHLGGGLVPLPRRFVHNYSHGQGGVVDFKIGGEIKDFADRSLGSLLSFAKGRAPLLENLGRKETAQNMCVKKGVFKKPPRFYRFSRYLTWGWGVAKGQLINGEGGVNVIRQIFQKAPCYGWFYP

SEQ ID NO: 198335 - protein, 185 aa, Oryza sativa
  Clone ID: PAT_MRT4530_94004C.1.pep
MWKPAWLEALNTQKFFIACSFHEHAKKNEKNICCLDCCTSICPHCVAAHRVHRLLQVRRYVYHDVVRLEDLEKLIDCSSVQVEYILRQKKDLSAYLRPCKTLQLGPDFFIPHDADDETTHSTLVDVDEPMGSSDSENLSAPCPNFVRKKRSGPYICARSANRVSDDDMATNMSRRKGVPHRSPLC

SEQ ID NO: 198336 - protein, 666 aa, Oryza sativa
  Clone ID: PAT_MRT4530_94005C.1.pep
MGTEAGDVDGRNHRPGRGSSASSRHLHGVGGASAAEVNLSGRRPFAEKLWSDLAETFFPDDPFRGFGALPPARRAWCAVKYFVPALDWVPRYGLDKFKFDLLAGITIASLAIPQGISYARLANLPPIIGLYSSFVPPLMYAVFGSSNNLAVGTVAAASLLLASIIETEVAADENPQLYLQLFYTAAFFTGLFQTALGVFRLGLIVDFLSRSTITGFMGGTAMIIILQQFKGLLGMKHFTTKTDIISVLHSTYHYRHEWKWQSAVLGICFLLFLMSSKHLRKKLPKLFWVSAIAPFMVVVIGGIFAFLVKGDEHGIPIVGNLNKGINPLSIAQLTFQSRHMKTAVKAGLLSGILALAEGIAVGRSLAMVKNEQIDGNKEMIAFGIMNIAGSFTSCYLTTGPFSKSAVNFHAGCKTPMSNVVMSVCIMLVLLFLAPLFKYTPLVALSSIIVVAMIGLVKVKEFCHLYKVDKFDFCICMVAFLGVVFFTMVAGLSASVGLSVVRALLYVARPATCKLGNIAGSETFRDVKQYPQAKSIPGILVLQLGSPIYFVNAGYLRERILRWVEDEDNLCKSVGHDLQYLVLDLGGVTSVDNSGVGMLLEVHKSLERRGITIALTNPRLEVTEKLVLSGYVRDILGDEWVFLTVKDAITACRYALQISRNKGEDEV

SEQ ID NO: 198337 - protein, 545 aa, Oryza sativa
  Clone ID: PAT_MRT4530_94006C.1.pep
MDSDACSGGVIIINLLYCDIYYRKIELITLNARSHAHVLVKNNGEFLVVDVVGLISEMRLFCHHPLYDETITHDMICLPLLEISLPTFDASFTPTVEVPTSHIIEVVGRGGEVDIWEERNIFGSHGQSLKEDYSRRFKEFKSKSRNSSGELLEKVISCYKHMLNAHVDDDTLMRKCQNALSFVDNLSNEYENNSILGEDIFTRRFCIIPFSISVLMHCRSLDTSFSKNFPGVVGMSIRHLSCIFQIYDCSNGSGFVEELQEQHNILRDSIEQFKTSELLRGNLISCLKEALHEQEFKMERARSQIKEVQSRYKKADDLCQKLGIHVERQEQPNHGPKNSGSEMHGSFGPDSANASSFEKGQSSAVMYSQENGGEHEIPNGVFSSRATKDNIEQKLEEHSTNKRQKLQNDVYVSRPQSPPPPLPSDAFEQPPPPPEHPPPPESTSPPPPPTSDPPPVPPPPPTTGSFMPIPSAPFAGLPVPAGPMTAVPYNSYPVFPPMNYPMVNIPPPFPSAPNTPPGFQGLAGPFYGPPYPAPPPPPPPPMNRK

SEQ ID NO: 198338 - protein, 53 aa, Oryza sativa
  Clone ID: PAT_MRT4530_94007C.1.pep
MAGIRVLNRLWNSKTEQAIDARESTEQAIDARENTEQSIGGREDSGEPVRNRR

SEQ ID NO: 198339 - protein, 60 aa, Oryza sativa
  Clone ID: PAT_MRT4530_94008C.1.pep
FFFFFFFFFFFFFFFFFFFFFFFFPPKKKKISLWGKKKWPNHQKSGEGFGPPGLIFPSEK

SEQ ID NO: 198340 - protein, 49 aa, Oryza sativa
  unsure (1)..(49): unsure at all Xaa locations
  Clone ID: PAT_MRT4530_94009C.1.pep
MPLHAVLLPDVGLQLGEEVAGPCXGEQSGGALEDGDEDGGSRSRGFFRS

SEQ ID NO: 198341 - protein, 46 aa, Oryza sativa
  Clone ID: PAT_MRT4530_9400C.1.pep
TIPFYLSLATNFLQQTPYSLVLGVTDQRTQRLDNPYLYYYYYYLPN

SEQ ID NO: 198342 - protein, 67 aa, Oryza sativa
  unsure (1)..(67): unsure at all Xaa locations
  Clone ID: PAT_MRT4530_94010C.1.pep
MVTDAAAMAVVKAARPAXRGAHDGVAFAXNVAFLXAGYXLCAVGPAALNDPPAXSEEEVGIXGWNNG

SEQ ID NO: 198343 - protein, 71 aa, Oryza sativa
  Clone ID: PAT_MRT4530_94011C.1.pep
ETIHPGDEVCELSNNCCCKTHSFLSLVITKFELYSSYLRYDDVPLNVLYKCHDVKHTDQYFPRHMVKFSPT

SEQ ID NO: 198344 - protein, 71 aa, Oryza sativa
  Clone ID: PAT_MRT4530_94012C.1.pep
HEGASGYAKCTTSSRSRPPEAPTSPRRPQCRPSMSCWRARERRCDSGRPPVTGDRRPVGINFFFCLAICHV

SEQ ID NO: 198345 - protein, 78 aa, Oryza sativa
  Clone ID: PAT_MRT4530_94013C.1.pep
MRMRMRIDACGCGCGYGIGLTKATAASAKPKQVQETDITAFCERRTRSAAVAPLHDPVGGHAIADAGQVHLQLQRKED

SEQ ID NO: 198346 - protein, 116 aa, Oryza sativa
  Clone ID: PAT_MRT4530_94014C.1.pep
YHYYSSLEICYSNFFLPCKKKPKPYLQSNTHTGHKGLERTEQTRQTWTTTTRQATTPRLFGDTEGGGNRGRNGGDDQTLGLLAFLEMAKRMDLGGCIGFPGGVLVGLLARTLAVGG

SEQ ID NO: 198347 - protein, 455 aa, Oryza sativa
  Clone ID: PAT_MRT4530_94015C.1.pep
MVLHSPIPTAVGFGELGVDRLSSSGAAAEAADCESARPPSLLARILHCEFQAICCSRCSLDARRLFDGMPPGEAPPPTGGDRIGGLPDGVLQHILGFLPPHEAVRTCVLARRWRHLWKSVAALRITNWDWRKVVPMEEFRYFVHHLLLRRGRAPIDEFELDLAELSDRDTLRVNRWFRHAVMCQARVLRLDIRVSRGSELELENLPVVSRHLQKLDLYGVKLMHNFLDFSSCPVLQHLEIAGCDLSDSNARKISSLSIKHLNISGCNFSDTFHTHIYAPNLLSLGLVNYMNQSPVFEGIPSGSFITGQEVGVVSSGTRCMLCTYAFSCTASTCAFLDHMFTFNFEMYWQRCPTFSKLKTLLISACASAVLDFEAVSCILRHSPVLENLTLQFHRMGHGPDRVEMKGSYSRMDRSSAISEYLKIVVVRFDEIDDLVIKVLKFLSAFSIPFVCMKES

SEQ ID NO: 198348 - protein, 250 aa, Oryza sativa
  Clone ID: PAT_MRT4530_94016C.1.pep
HTVRDEDGGWVWMAISGSAPRRPSHALLPPSAAGGDGFVAPKRRQIHSPAGSSSVLPSTAITSPPPSSPLPSPMSVGREEAPDLLLAVSCPAPLLPRAAIAPFPELPPSPYRRCHPAASHVIKEVDPASLVVAVARSGLPRRRSGPRRRGGGHAPPPLPRPSPLADAVVEATTAGGGEVTTATGDGGEGREERREGLEERWRDREGREAERPRDKGARLNAAAAQGGDWRRPAGGGGRRHHGDADGDSGG

SEQ ID NO: 198349 - protein, 727 aa, Oryza sativa
  Clone ID: PAT_MRT4530_94017C.1.pep
MAAAAAAKGRTEMEVGADGVAVITICNPPVNSLSIDVLLSLKENYAEALRRNDVKAIVVTGKGGKFSGGFDISSFGSVQGGKVEQPKVGYISIDIITDTLEAATKPSVAAIDGLALGGGLEVAMACHARISTPTAQLGLPELQLGVIPGFGGTQRLPRLVGLTKALEMMLLSKPIKGAEAHQLGLVDSLVSADDLVNTARRWALDICELKRPWIKSLYKTDKLEPLGEAREILKFARAQARRQAANLEHPLVCIDVIEEGIVSGPRAGLWKEANAFQGLLFADTCKNLVHVFFSQRATSKVPGATDLGLMPRKVTKVAILGGGLMGSGIATAMILSNYPVILKEVNEKFLNAGIDRIKANLQSRVRKGKMTEERYEKAMSLVTGVLDYERFKDVDLVIEAVIENVKLKQQIFSDLEKYCPSHCVLATNTSTIDLNLIGEKTRSKDRIVGAHFFSPAHVMPLLEIVRTQHTSPQVVVDLLDVGKKIKKTPIVVGNCTGFAVNRMFFPYTQSALLFVDLGMDVYKIDRACTKFGMPMGPFRLADLVGFGVAAATGMQYLENFPERVYKSMLIPLMMEDKRTGEASRKGFYKYEDKRKATPDPEIMKYIEKSRSMAGVTPDTELMKLSEKDIVEMVFFPVINEACRVLDEGIAVKASDLDIASIFGMGFPPYRGGIMFWADSIGAKYIHDKLEVWAKRYSDIFKPCSYLAERAANGVPLSAPAKQVKARL

SEQ ID NO: 198350 - protein, 27 aa, Oryza sativa
  Clone ID: PAT_MRT4530_94018C.1.pep
FCQALISLVISTACVHACPSKILPGCP

SEQ ID NO: 198351 - protein, 114 aa, Oryza sativa
  Clone ID: PAT_MRT4530_94019C.1.pep
MSGMLGRWGARRGEVGEDIRLAGDAAAAAASSTMREMGERHRLTAHATSRSGHQRGPGGGGEDAKARDSGPSSPDDGGEAEKGRRGEEGSMKKMRSVVLREAMAGLPEHGDSCV

SEQ ID NO: 198352 - protein, 1226 aa, Oryza sativa
  Clone ID: PAT_MRT4530_9401C.1.pep
SRYKCETVSHVASVEICCEYEPFRKRPGSFGHGEPQSSNLYVGNLTPREDESFLMRTFGRFGPIASVKIMWPRTEEERRRQRNCGFVAFMNRADGQAAKDEMEGVVVYDYELKLGWGKSVALPSQALPAPPPGHMAIRNKEGGTVILSGPGGPPLASVKPQTSELVLTPNVPDIVVAPPDDAHVRHVIDTMALHVLDGGCAFEQAVMERGRGNSLFSFLFDLKSKEHTYYVWRLYSFAQGSGDSILLEVNCDSKEGDTLQRWRTEPFIMITGSGRWVPPALPSSRSPEREKESTFAAGRSRRVEVERTLTDSQRDEFEDMLRALTLERSQIKEAMGFALDNADAAGEIVEVLTESLTLKETPIPTKVARLMLVSDILHNSSAPVKNASAFRTKFEAALPDVIESFNDLYRSITGRITAEALKERVLKVLQVWADWFLFSDAYLNGLRATFLRSSHLGVIPFHSLCGDTPEIEKKASSEDGSDGFRLNEDGALATGKAAATRELLGLPLAELERRCRHNGLSLCGGKEMMVARLLSLEEAEKERVYEKDAGIKYGQGESHRTGRDDIAVNARNASRPGEGTDSGESDMLGLSHYAMEAGYKRSNESTPAEPVPSKKPKVDPVLPASKWSREDDVSDDEDRKGGRGLGLSYSSGSDIAGDSGKADATEVSTDHSNHHQDTILDEEHRKKLRQIEIAVMQYRESLEEKGLRNTEEIEKKVASHRRRLQSEYGLSFSNDGANSRRSSERTSSERRDRHDDSSRKRHRSLSRSRSPPRRSLERDREHNRNRDTDRSHGNDAGRERDRVREKSASRGRDDHYDRSRDREKDRRKGRLKVHYSHPLRLYNCILPVWSGLKCAKEKWMLRLETVSFCVLHGSSTDTCVMSVRFLFLFFSILLHQHWCFAYLLINMGIYLSTPKTDKFSEDGENDKLKLGLSSMQGWRANMEDAHSALLNLDNETSFFGVFDGHGGRVVAKFCAKYLHSQVLRSEAYSAGDLGTAVHRAFFRMDEMMRGQRGWRELSALGDKINKIGGMIEGLIWSPRGSDSNNGQDDWSFEEAYNLSRDHKPELEAERDRIVKAGGFIHMGRINGSLNLTRAIGDMEFKQNKFLPPEKQIVTANPDINVVELCDDDDFLVLACDGIWDCMSSQQLVDFIHEHIQKESSLSAVCERVLDRCLAPSTIGGEGCDNMTMVLVQFKKPITQNKKADVGEQSVKGVEEAEINAAEENGS

SEQ ID NO: 198353 - protein, 225 aa, Oryza sativa
  Clone ID: PAT_MRT4530_94020C.1.pep
MASLVPVKVTPLDEVGGGEHGVASRRAPLKSPRSTRSAHASGEERRWWDHRGRAKGELEGNGGGEVEEEDAAPTKLPFRAREERKTETATAGGKWGWRRRGGSWPADALSPPPPPLSFRPLLIREAVPNKPPLRPSSPVPAPWQPEFFGEGITVNGKAWPFLIVYRRRYRLRILNAINARYFNVSLSNSFPIHVFGSDASYLSALDTVTNLLSLAEIFDVIIDFS

SEQ ID NO: 198354 - protein, 46 aa, Oryza sativa
  Clone ID: PAT_MRT4530_94021C.1.pep
SAIDGACTTTIAVAPGAATTLYFSILRCPAVDCSLREDVTPLTLCP

SEQ ID NO: 198355 - protein, 380 aa, Oryza sativa
  Clone ID: PAT_MRT4530_94022C.1.pep
MAGLDAVARKRAAEEEERMPGGWGARRGEVGEDIRRAGDAAAAAAASTMREKGERHRLTARATSGSGRQRGPGGGGEDAKARDSGWWRRHTTRCGRQFGTNIRGAEKIRARPSSPDDGGEAEEGRRGEEGSTKKMRSVVLREAMAGLPEHGDSRRQQQASAAADGERRRRRLRATRPHRRRRLRVGAPRRRLLVACHGAGTGEDGRSGGSLGTASRKSNGRKDNGGDNTSAGQLPPRRLHPYFPPAVAVSVFRSSLAPDGSFVGAASSSSTSPLPFPSSSPFALPLWSRHRRSSPLACADLVDRGDFNGARRDGTLCSPPPTSSSGVTSTGTREAMAMPDRGMLLCTSDRARARRTVLPRRPGCSSPATAHGEGRREEVS

SEQ ID NO: 198356 - protein, 62 aa, Oryza sativa
  Clone ID: PAT_MRT4530_94023C.1.pep
MTTAQSVGQAVAVVAKKTIKAKLGGTEPHPAPCGGHGGMVDIGTAGDELGAATAGLDDGVGG

SEQ ID NO: 198357 - protein, 906 aa, Oryza sativa
  Clone ID: PAT_MRT4530_94024C.1.pep
MFPRRRGDAACLLLLAIACILSCVAVADARPMPPPPTLRHHGGVVSRYAFWTGKPRWTRHGRPMVLTYAVSHTDAVGYLPGDAVLAVFRSAFARWAEVIPVSFAEITTEDDAAAAEADIRVGFYGAGEHGDGHPFDGPLNVYAHATGPEDGRIDFDAAERWAVDLAADASPAAVDLETVATHEIGHALGLDHSTSESSVMYPYVGTRERKVRLTVDDVEGIQELYGVNPSFSFLDYFKPDHDTPRSRFWRLALIANHRLIRLKRSGDVARLTATQPALAQTTMTTTLQPRPEDNNNDSGAGPFTFFPGKPRWTRPDRVLTYAVSPTATADHLPPSAVRAALRSAFARWADVIPMRFLEAERYDAADIKVGFYLYTDGRCDGCACIDSDDDDDDGDDCEGVLAHSSMPEKSGQIHLHAAHRWTVNLAADTAPLAVDLESVAAHEIGHVLGLDHSSSRSSMMYPFISCRERKVRLTTDDVHGIQELYGANPHFSFGAYFKQDILSRIQQMKKEKKKKARGSSFWQRGLALTCALVNKDSMIGYISELYSSIKELDMMNKINYVYFLDYVGNRTVEKKDPNMHQLRESIRILTVEIKRWMRFAQIHWVELMPTLENLNPCIARYVTTINTLVLQLTGGTYTYTMFLLCGCGTGSQPTRLRSQDNNGGGGAAAFTFLWGRPRWNRPDMRLTYAVSPLATADHLPRDAVREAFRSALARWAEVTPLRFAEAARYEEADIRVGFYLHTADGKCDACGCVCKGGGEEALAHAHPPQDGRIHLHAARKWAVTNVAGAGGDAPPLAVDLESVAVHEIGHALGLGHSSSESSMMYRHYRGKVSLTDDDVKGVQELYGAKPPRVDLTADSKPKRVETIREIEQHIQQKKETAKKKPFFWRLVRLPLYPPCLACAVNS

SEQ ID NO: 198358 - protein, 49 aa, Oryza sativa
  Clone ID: PAT_MRT4530_94025C.1.pep
KCIALLSICVASQCFSAEHSFYRCLPSEGHVLVCTLRKRYSAICSSCHN

SEQ ID NO: 198359 - protein, 62 aa, Oryza sativa
  Clone ID: PAT_MRT4530_94026C.1.pep
LLQVDTGCRRPSRRRKVAGRSGDDGDAEAEGEDEGSSRFCPPWGDDSPAHTRPTRESSNPCI

SEQ ID NO: 198360 - protein, 817 aa, Oryza sativa
  Clone ID: PAT_MRT4530_94027C.1.pep
MARSYYICSHIDPLALSPIPGIALDTLFLVAIQALAVILVSKFFHLFLRRYNQPSVISQILAGVVVGGMGLRSAIVHVDVDNVEDMYGGYISAARILYMFLVGLDMDIAALRHATHRCVAFTYATVAASLLLAAVVSSGMYGSMMHSPVKTPELLAATLMLALTNTSSIAVARIAAELKLTVTENGRLVVAAGIATNLICILGDGVLSSTTRAKGKIEGVARGEHQIRKGFLALAVAAGAVWMVRPAVTRINKRNVGQHHVGVRDLAVMLLAIWFVGNIPQFLGFDGMPTSFALGLAFPREGAAARSVADALAPPVKGIMLPFYFATIGMRMNFNSMSGAIIVPGVLITLLGLFGKAIGAAAVASYLSMPLSDALRFSVLLNIKGHVDTMNMKFAKSEGVWAEQALYAMIIGNLISTLVAGPVVAVVRRKEEEAYRTRHQAMESLGAEQELHMLACVHSAHAAPGMLSLVELLVSEPQEQPAVHVLHLFDVGEERVVRIPYHQRIRDDDDGGGRDERGGGRDAVTRMNTIVDLFSRATGIWFRQIDVVCRGGAALDDAGAVCRAAEGVHARLLLAPCHKEQRYDGKMWCRLGGRRELNHGVLSRAPCTVGLLVDRPYRNSGTSFNVPSSVAAEAAATSGGGRTLLHPCSDRAVTHVVAAVFFGGADDREAVSLASRLAEHPSIGLTVFRFVKRSTYDSVTSAKVDELDMAFQEGDVDERFLWRFYERYAATEMAMYVEKVVERPADVEETLAGMAGMFSLVIVGRGGRQPPELLAGLERWADAGGEMGPAAEILASNDSLEMGSVLVMQQHTVVIKQ

SEQ ID NO: 198361 - protein, 111 aa, Oryza sativa
  Clone ID: PAT_MRT4530_94028C.1.pep
RAPPSSQPASAPSPATAATVVGSTIDAKVAVRYRRLRGRRCQMPTSSAPSPDPSRVHPSLRSLPEARFYRHHHLPLTPTPKRPYTSYVHPARACHNMMECTLTRQFKHHKP

SEQ ID NO: 198362 - protein, 62 aa, Oryza sativa
  unsure (1)..(62): unsure at all Xaa locations
  Clone ID: PAT_MRT4530_94029C.1.pep
PSTIHVIANIITFSFHVFHVIFSNPNHSLPFTVSSHPQXXIVLGRPQIXKNQNKKKKKRATL

SEQ ID NO: 198363 - protein, 278 aa, Oryza sativa
  unsure (1)..(278): unsure at all Xaa locations
  Clone ID: PAT_MRT4530_9402C.1.pep
MGIYLSTPKTDKFSEDGENDKLKLGLSSMQGWRANMEDAHSALLNLDNETSFFGVLDALEGRVVAKFCAXLHSQVLRSEAYSAGDLGTAVHRAFFRMDEMMRGQRGWRELSALGDKINKIGGMIEGLIWSPRGSDSNNGQDDWSFEEGPHSDFAGPTCGCTACVALIRNNQLVVANAGDSRCVISRAGQAYNLSRDHKPELEAERDRIVKAGGFIHMGRINGSLNLTRAIGDMEFKQNKFLPSEKQIVTANPDINVVELCDDHHFLVLACDGIXWDCM

SEQ ID NO: 198364 - protein, 285 aa, Oryza sativa
  Clone ID: PAT_MRT4530_94030C.1.pep
MAMAARTLALAFPLPLCAVSSPRRATPLALPRRGAARPLASLAQCPARGHSPSPRRAAGRALAPCAAMRGSGGGGGGGEFASDDGGGARALLRATLWGAEAAYILWLFLLPYAPIMQGDPVWGISQATISDLIGLSLNFFLILPLLNSAFLIPYMAIRLNDPDKDKSPPQTSKLGSVMVRGAPIVGLTGGLVCILSIAWALFGRADASFGGIAERWQYVQSYVFSERLAYAFLWDILLYSIFQPWLIADNIQNVKASATEFVNSVRFLPVIGLVAYLFCLEDRDD

SEQ ID NO: 198365 - protein, 82 aa, Oryza sativa
  unsure (1)..(82): unsure at all Xaa locations
  Clone ID: PAT_MRT4530_94031C.1.pep
LLLGYRSFGGGWVKFRIRXYYMFRIVFVVFNVEIVFFIALGNKIXLEGRRLVFMKVLILVFLXVVGLVFEWGNFIFKRGRNF

SEQ ID NO: 198366 - protein, 33 aa, Oryza sativa
  Clone ID: PAT_MRT4530_94032C.1.pep
MEVVVREIAAYWCENQFQLHGARFVGGDKPSSV

SEQ ID NO: 198367 - protein, 50 aa, Oryza sativa
  Clone ID: PAT_MRT4530_94033C.1.pep
SKNQKGALLLTSNLKTKLIFQTFFKDNEIQKMFYSEFEKPELFLFGFKLQ

SEQ ID NO: 198368 - protein, 50 aa, Oryza sativa
  Clone ID: PAT_MRT4530_94034C.1.pep
YKDERMLYMRAILISQEKGNTYTLSFSTKDQQTKYTNQNAYYMNETTTHS

SEQ ID NO: 198369 - protein, 165 aa, Oryza sativa
  Clone ID: PAT_MRT4530_94035C.1.pep
MTEEMLKYLNVAENVLWNMDPYQKSDLYCIALHALVKAKDELYNTAIEALQVLSVRMISEEADVLKEKGVIVEDLILSEEPDAELKIMKTFEATEHLATALLNLRWGIGGGGGPMALGAVFHGAQLMLDLAVAGLSLVVALGLFAVVTAVLCSAAFLHHSKPVAS

SEQ ID NO: 198370 - protein, 874 aa, Oryza sativa
  Clone ID: PAT_MRT4530_94036C.1.pep
MWLVEFTPERPQLVQTVLGFTPFRCTVMFSLWKAITVVSNLVTQFYACKLYMNEYDEFKWMTSLATRSIQADIVGALRRGDRQQASLLLSNLQQTNRALTSEDFSHILEYCATAPDPLFVTEALELMEENAVHMSQRVYRSVTRALSKGGYSKEAIHWLTLLVEKESSHNYLPIFNIFLSGCGSTTKQSDIEGCLEKMETYFLGKSEITYCELLKLAVSQRNLSAVHDIWKDCTRNYNPSIILQRKFVRALTTLGDLRSAYRIMQHMVVLAGRNTDHLRGKGRYQRSRLDIPVPALTELEDLKILLGCDLPSSFQGKVEESEKCSTDTQPELSQEENISFENLQLKGYAEFISTGDNLSDKSVLDNGRMARPLRLVPATVKKFLLWSFNDIVHACVQLNNCQIAEQLLLEMQRIGLQPSKFTYDGFIKAVMVGKGVAYAIKVIEAMERRGIEPYNDTLAALSVGSSRSLQLNLAEDFLARISKPQPKYIHAFNALLAGCDMMNEPERAVRVLAEMRHLNLKPNLRTYELLFSLFGNVNVPYEEGNVLSHADVSKRISIIETDMLNNEIQHSFVCMKNLIRAFGAEGMTEEMLKYLNVAENVLWNMDPYQKSDLYCIALHALVKAKDTHKAIKTFMTIRSYGLPANVAIYNIMIECCKLLPCVKSASAVLSLMLRDGFYPTILTFTSLVKVVLAREDFEGALDLLDACIIEGIQPDIEIFNTVLLEAFEKGQIHVVEYIVECIHRAKIRPDQSTLWYTFCAYVDQELYNTAIEALQVLSVRMISEEADVLKEKGVIVEDLILSEEPDAELKIMKTFEATEHLATALLNLRWCATMGSTISWSPEDSLWARRLASSYDGNRRPHIFTSIVPKQFVV

SEQ ID NO: 198371 - protein, 123 aa, Oryza sativa
  unsure (1)..(123): unsure at all Xaa locations
  Clone ID: PAT_MRT4530_94037C.1.pep
MEASRRARPTKEPPRWPHGGYQSHASGRSVGDREWHLHFRGQRENGGHSGGKGRPKTVDRTAKIEXRCWRSSRASWHXGQDGAPRRRCSRHGAQCSLPHQDKGESKERRHHVGGLWHVESGTR

SEQ ID NO: 198372 - protein, 125 aa, Oryza sativa
  Clone ID: PAT_MRT4530_94038C.1.pep
DATGLEWWRKAAEQSTAVTTAKRPSATTSDSPATARSSISCAPWNTAPNAIGPPPSSSSDPPRRPRRCLYRRQRRERKEGGGGVRREGGGGATRGAASAGEEAASRPPGRALVPSHGGQAVGPGR

SEQ ID NO: 198373 - protein, 155 aa, Oryza sativa
  Clone ID: PAT_MRT4530_94039C.1.pep
MASVGSGSCGAALGRVGSTSLGSGCGYGDGGRAARVLDPAAPTSGGGKGRPKTVDRTAKIECEMLEEQQGKLAHGQDGAPRRRCSRHGAQCSLPHQDKGESKVALPAREKAKGGGGKGALPPSILGGGAGETCRSGVTTLVACGMWSRGRGDNGG

SEQ ID NO: 198374 - protein, 123 aa, Oryza sativa
  Clone ID: PAT_MRT4530_9403C.1.pep
TRPRCYPSPQLRPGRLIRQRLRCGRTKAVHLPVGEHLLGDGGASLTRRSIGGDGSRTMTFYNENKKQCVVCHRCICAWSCMSVCRWMQRFAKVRMCRVCVYGGSFVLGMGGARRAALGPAMVA

SEQ ID NO: 198375 - protein, 141 aa, Oryza sativa
  Clone ID: PAT_MRT4530_94040C.1.pep
GPRFRGRLGVRAPREVARPRAQGSQDTHRPPGGPRCRTPGGVAAARVQGPRVRPARGNTRRNQWGSPTIRGGARGFPGRGPSQPVWRSRRRTGTSVPPTAASGRQQCAGPAGGGGRATADARARSPNAPAQRRGAGGTSRG

SEQ ID NO: 198376 - protein, 114 aa, Oryza sativa
  unsure (1)..(114): unsure at all Xaa locations
  Clone ID: PAT_MRT4530_94041C.1.pep
RPSGSKKGPYFNHGGKPLYPKQKDFFLTGKKKNPQKXRVKFKNGPKKKLRGLTLKHLKKVFGVKTKGQSKSQFQNAQKEKIARFKPGLIFFNPNAFSRKIWTPKKFQKKIVWFF

SEQ ID NO: 198377 - protein, 519 aa, Oryza sativa
  Clone ID: PAT_MRT4530_94042C.1.pep
MANGVAEYLLMDPWLVLWLVLASMAFALLHLRRRARRGAPPLPPGPRPLPIIGNMLMMDQLTHRGLAAMAARYGGLLHLRLGRVHMVVVSSPEHAREVLQVQDGDFSNRPASIAIAYLTYGRADMAFSHYGHFWRQVRKLSAVRLFSRRRAQSWRAVRDESAKLVGAIARRAGEAVDLGELIFGLTKDVIFRAAFGTRDGGGHGELEVLLQEFSKLFGAFNVGDFIPWLAWLDPHGINRRLRAARAALDSVIDRIIDEHVSNPAGDEDADMVDDMLAFLDEAGRDQTGGGGELQGTLRLTRDNIKAIIMDFVFGGTETVASAIEWAMAELLHSPGDLRRLQAELADVVGLGRGVEEGDLEKLPFLRCVAMETLRLHPPIPLLLHEAAADCVVGGYSVPRGARVVVNVWSVGRDAGAWKGDAGAFRPARFMAGGEAAGMDLRGGCFELLPFGSGRRACPAIVLGMYELELVVARLVHAFGWAPPGGVAPEELDMADGFGLTAPRAARLRAVPTPRLTCPM

SEQ ID NO: 198378 - protein, 137 aa, Oryza sativa
  Clone ID: PAT_MRT4530_94043C.1.pep
MLIQFAHAPARMRMAVAIGKEIPNDIPKHHYTFYKRTTRKLAVGRALQEPGVQAPLHVGNEAPQPQHGEFQRRHKDGCHGEPLQPEAGAGGEQAVRGAPPPEHRRRRPQLRSTRAGRAPHGEELHSTGAMCSPGSRV

SEQ ID NO: 198379 - protein, 194 aa, Oryza sativa
  Clone ID: PAT_MRT4530_94044C.1.pep
SRPLAGELERRMELELGLRLALPSPSPSPATATAAGSELDLLNSAPGSCRKRGFEEALGGFKTDDDNDDGNGRGGDGDSDGEMGNKRRKLVGWPPVKCLHRRRDGGCGGGYVKVKMEGLAIGRKLDLSILGSYAELLDTLHLMFPSTNQEDGHDRRRRHPYAVTYEDGEGDWMQVGDVPWEAFAKSVKRLKILV

SEQ ID NO: 198380 - protein, 194 aa, Oryza sativa
  unsure (1)..(194): unsure at all Xaa locations
  Clone ID: PAT_MRT4530_94045C.1.pep
NATLSYGDTDTATLDPSLPPGTVAIASVTSPSRPTLADRLSRDPLRNCAGVAAIAALRALDVKSHAVSIHLTKGLPLGSGLGSSAASAAAAAXAVDALFGSLLHQDDLVLAGLESEKAVPGFHADNIAPAILGGFVLVRSYDPFHLIPLSSPPALRLHFVLVTPDFEAPTSKMRAALPKQVAVHQHVRNFSQAA

SEQ ID NO: 198381 - protein, 191 aa, Oryza sativa
  Clone ID: PAT_MRT4530_94046C.1.pep
AGGGVFKNDKGLKCQIPGANLNDIANQADDLLESMESRPTIPDRKLLARLVIVREEARNMMGGGLLDERNDRGFTTLPEAEVNFLSKLVALKPGKALERMIKDVMQGKAEGADNIENANAGPDSKLNHLTGISGRGSVTGLKPRPVRPGMFLETVSKVLGGIYANNTSGITAQHLEWVHQTTLKILQEMAF

SEQ ID NO: 198382 - protein, 148 aa, Oryza sativa
  Clone ID: PAT_MRT4530_94047C.1.pep
SVIQSNYFLGHATLVGYRKIFQVRSTDEPRKSFWFMPTGLMNKILDHTGAGDIGNEGGVMALYLHTLPPPAAAFPPSRSVNSRCRTIPSPPANCPTSQRSRTTSVVIEIRQVSSTSSASRSLSPCGSCICPACGVYVRQEAGIGARVG

SEQ ID NO: 198383 - protein, 1082 aa, Oryza sativa
  Clone ID: PAT_MRT4530_94048C.1.pep
MATPPLTSVSSHLRAPPPWPPPKNSSPRTRVRCDVLAASGHILEAASAPRGAKNSRSRAPRTDVDVQIERLCRAGELEEALRLLGSDGVDARSYGAVVQLCSDLRSLEAGKRAHFLVRASGVGKDGMDSVLGRKLVLMYVKCGDLENARKVFDEMPQVSDVRVWTSLMSGYAKAGEFQDGVLLFRQMHCSGVRPDAHAISCVLKCIAGLGSIADGEVVHGYLEKLGLGVQCAVGNALIALYSRCGHVDGSLQVFDGMPHRDVISWNSVISGCFSNGWHGKSIELFAKMWSEGLEINPVTMLGVLPACAELGYNLVGRVLHGYSVKTGLLWEFESLENGIDENLGSKLVFMYVKCGELGYARKVFDAMSSKSNLHAWNLMMGGYAKLGKFQESLLLFEKMHDCGITPDEHTISCLLKCITGLSGVMDGLVVHGYLVKYGFGAQCAVCNALISFYAKSNRIEDALMVFDEMPQRDIISWNSIIGGCASNGLYDKAVELFVRMWLEGQELDSTTLLSVMPACVQSHYSFIGGVVHGYSVRTGLISETSLGNALLDMYSNCSDWRSTNKIFRNMEQKNVVSWTAMITSYTRAGHFDKVAGLFQEMGLEGIRPDVFAITSALDAFAGNESLKHGKSVHGYAIRNGIEEVLPVANALMEMYVKCGYMEEARFIFDHVTKKDTISWNTLIGGYSRSNLANEAFTLFNEMLLQLRPNAVTMACILPAAASLSSLERGREMHAYAVRRGYLEDNFVANALVDMYVKCGALLLARRLFDMLTNKNLISWTIMIAGYGMHGRGRDAIALFEQMKGSGIQPDAGSFSAILYACSHSGLRDEGWRFFNAMRNEHRIEPKLKHYACMVDLLCHTGNLKEAYEFIETMPIEPDSSIWVSLLRGCRIHRNVKLAEKVAEMVFELEPENTGYYVLLANIYAEAERWEAVRKLKNKVGGRGLRENTGCSWIEVRGKAHIFFAENRNHPQGMRIAEFLDDVARRMQEEGHDPKKKYALMGADDAVHDEALCGHSSKLAVAFGVLNLSQGRPIRVTKNSRVCSHCHEAAKFISKMCGREIILRDSNRFHHFEEGRCSCRGYW

SEQ ID NO: 198384 - protein, 37 aa, Oryza sativa
  Clone ID: PAT_MRT4530_94049C.1.pep
MAAAVSLLNLLLPCRCSFPLPFSWGLPYRIGKEAQVS

SEQ ID NO: 198385 - protein, 101 aa, Oryza sativa
  unsure (1)..(101): unsure at all Xaa locations
  Clone ID: PAT_MRT4530_9404C.1.pep
MLGLSHYAMEAGYRSNESTPAEPVPSKKPKVDPVLPASKWSREDDVSDDEDRKGGRGLGLSYSSGSDIAGDSXKADATEVSTDHSNHHQDTILDEEHSIVN

SEQ ID NO: 198386 - protein, 76 aa, Oryza sativa
  Clone ID: PAT_MRT4530_94050C.1.pep
MAPARLRMTGWAAGGGLLSFLFHPKEQQRSWREKKDKMGQEICSAIPPDLQDYDRNFNIGREQTTKRKGQLFHLDY

SEQ ID NO: 198387 - protein, 213 aa, Oryza sativa
  unsure (1)..(213): unsure at all Xaa locations
  Clone ID: PAT_MRT4530_94051C.1.pep
VSCDFYDVXGVILVRYQMIPTRYQELGXRRRHRRPRPPPSTVHTEPEPRRWQPHPSPSTVHIGACRRRLRPPSGARHXRPRPSSMPQHAAAFSTPELVAGAAAITTQDPPPSTPHIGARRRRRLYHHAGSSAVHATMPHAGACRWPRSPRRSSSAAAASSTPELVIGAAGACCRXADVSSSTLAAPTVARALVSQGGGEGAIPLGQYPNGIPG

SEQ ID NO: 198388 - protein, 157 aa, Oryza sativa
  Clone ID: PAT_MRT4530_94052C.1.pep
RSSAWPPPPPTSRPSCAAAPPPRPCNRMTPPPTLVHHHGSKNEERAKARAKSYLGESGGAAEGEDEGGPVVGCRRQGGKGHRHICCRYLSLPHTHTHSLCAPLSLSLLSAACLRPLSFNVLCFCLLLGWSVSLSLCPASLVVAPWAVCKLMRARLQA

SEQ ID NO: 198389 - protein, 425 aa, Oryza sativa
  Clone ID: PAT_MRT4530_94053C.1.pep
MAARSSLFLLCLATATAGVLQARAQPDSKGFISVDCGLPGKTSYIDDKTKISYASDDGFTDGGKHYNVSPEYIKPAVTARYYNVRSFPDGARNCYTLRSLVAGLKYLIRATFMYGNYDGLNKLPVSFDLHIGVNFWTVVNITDPIQPVNREAIVVVPDDSVQVCLVNTGAGTPFISGLDLRPLMNKLYPQVNATQGLLQLARLNFGPSDETSIRYPDDPHDRVWFPWFDAAKWNEISTTNRVQNIDNDLFEAPTAVMQTAVTPINASNNIDFFWNSQPQPNDPAPGYIAIFHFSELENLPNNATRQFYININGILFDDGFTPSFLYAEASYSSKPFVRHPQYNITINATANSTMPPLINAVEVYSVISTANIGTDSQDVSAIMTIKAKYQVKKNWMGDPCLPRNLAWDNLTCSYAISNPARITSL

SEQ ID NO: 198390 - protein, 62 aa, Oryza sativa
  unsure (1)..(62): unsure at all Xaa locations
  Clone ID: PAT_MRT4530_94054C.1.pep
QHFVSSDFLWRFSFHQNKNNNMHYAXIKMACTIVICLRQXVKIVVFTYTVYCFLCLSLDRQW

SEQ ID NO: 198391 - protein, 64 aa, Oryza sativa
  Clone ID: PAT_MRT4530_94055C.1.pep
APRNFWSASYQSQILSPLMQASTLVISSCAWPKRKFAPGQPIYMMSRGAHHNMLWLTFIIPGGD

SEQ ID NO: 198392 - protein, 434 aa, Oryza sativa
  Clone ID: PAT_MRT4530_94056C.1.pep
MGRMKGVSEGLIIGITVGVVIGVLLAVGILLCLRYRRSQAQIRSSSSRRASTIPIRANGVNACTILSNSTTGQESPREVEDRGASMWLEGPGRKSVISASGIPKYAYKELQKATSNFTTLLGQGAFGPVYKADLSSGETLAVKVLANNSKQGEKEFQTEVLLLGRLHHRNLVNLVGYCAEKGQHMLLYAFMPNGSLASHLYGENIAHLRWDLRVNIALDVARGLEYLHDGAVPPVVHRDIKSPNILLDQSMHARVADFGLSREEMVTRNGANIRGTYGYLDPEYVSSRSFTKKSDVYSYGVLLFEMIAGRNPQQGLMEYVELAAINADGKTGWEEIADSRLEGAFDVEELNDMAAVAYRCVSRVSRKRPAMRDVVQALIRVAKHSQSKKHHKRRPPPGRADDESVDLEASEVQSSLSGHQRQESVGSVSDLADV

SEQ ID NO: 198393 - protein, 366 aa, Oryza sativa
  Clone ID: PAT_MRT4530_94057C.1.pep
MSAKVPRRLEANSVGMADWAGLQTDILGVIVKKLAVPDYLRFRAVCTSWNHLCRDVFNCPRIDPWLMLPTNALNDSKFLCVPERKNQTIRLPSTVTIFGSTWIPVGSSHGWLIFYSPSHGTMQLVNPISGMQFNLPPIGRRAFSKAMLLDMNDTNFTVAVILRDQKGYKVTRKGSNSWSSVESKHDLVDIFKHRRQLYTVDIYGTVQLWAEPPRSWPDEDAPQVNDPYHNLIHYPHQHGKLNCLVESPAGDLMRVKRQSNDKFFVVWILDKGTFSWEKVDNIGDFALFVSYYSSVCYRAKDHLNLKSNCVYFIDSYSNLCAFNLENRTKELVEALEPAHAHGHPEPHAVRRRPEGQRYMWLIPSLR

SEQ ID NO: 198394 - protein, 495 aa, Oryza sativa
  unsure (1)..(495): unsure at all Xaa locations
  Clone ID: PAT_MRT4530_94058C.1.pep
MMILEFLIRSLRHPRRTHNVSDLDDMISNGASTGSVVLGPSEKMMLDSLHSLVDAKTRPKSPSFFHSGTKMRKARSKSHIITQSEILKLISPETWEISSPGVSPLKKSTAELSMHEKMVSSDTPSMSSNQPVLSSCPSSLSAGLLQCIWKDGLPHFELSLDNPMAVYTANPTKAHDNDKPLDYVYLFHSGEQGRKDWLGNSSSVSRLVGKMKVSSSLVLNPDKSTSMETEFVLYGSPDDYLRQMQSSYGVTKGKGLAKRVADIMKPSNLNSSPKHVWKFGKSSSQQIDEMTEIPEGEQCSAKESVLKNLVADDLPTNQEIAAIVVRKQRRERRKSPVLGGWGLKFLENAGAARPGGTGGGAVERRRNNAGSVRPVFPRGXAIGGAASKNGSPASLIGRWRSGGRCDCGGWDIGCPIRVLQNDGCGTSPQAESQSQDRKSVELSVKGAKKGPMFRLVNITDDLHIIYFDSSLSPLQCFSAGIAIIHSQAPHLYPKL

SEQ ID NO: 198395 - protein, 248 aa, Oryza sativa
  Clone ID: PAT_MRT4530_94059C.1.pep
MAARADVRTEARESCLVSYARGTITALSRSMRRLASAPASSEVEQRDLLEAVVTSVPTDKCSGRVVTAKFLFAQLWTAHILLALDAALGQKAATQLEHATLEDVLIPSYSGGMKTLYDVDCVERVVRHVLAEEEHGEAGESTSAAAITEEKRGGGGGEGASDGGEPAGAVECRRGGGGGAGGSPVIRLGGLRRARSHGGARRPPPPDAGVLMVVGQRSRRLPHLLPHRRPAVGAPRPDDLLPTACRPA

SEQ ID NO: 198396 - protein, 504 aa, Oryza sativa
  Clone ID: PAT_MRT4530_9405C.1.pep
MATAGSRKGGRGRKALTAVLDNDANISAGKADVAAAAGILSPPQKAKRATSKSSKGKAAAAAAAEEQASVVDAVSELQGMLEELRLEKEKAEEMVRERDEVIRRKEEEQGRLQAELKKVQRAKEFKPTVSIPLVKALIEKDQEGEKKKGKGKAGHERKKPCPAYVLWCKDQWNEIKKESPDADFKEVSNALGAKWKALGAEEKQPYEERYRQEKEAYLQVVGQEKREAEAMKLLEEEQMQRTAKELLEQYLKFRQEADDDGDGGDNKKASKKGKKKKKEKDPSKPKQPMSAYFVYTQQRRAALVAEKKNVPEIGRITGEEWKAMSEAEKAPFEAAARKQREEYQVEMAAYRQRKQEEAACQEKEEEEQKKIMKQEALQLLKKKEKTDNIIKKTKEEQRKKKVGGAAAAADPNRPKKPASSFLLFSKEARRQLAEERPGVASSTLTALVSVKWKELGEAEKQAWNGKAAEAMAAYKRDMEEYTKAAASGGGGGDASPCTSSSASS

SEQ ID NO: 198397 - protein, 89 aa, Oryza sativa
  Clone ID: PAT_MRT4530_94060C.1.pep
NHHVQPGWGQILHHSHVAHPSCVQREEASRRAIAERAIMVQASRLSGPGGRSGQIRAASSPLRSRALTPRCSCHNTECPQCSGLRKWRR

SEQ ID NO: 198398 - protein, 124 aa, Oryza sativa
  Clone ID: PAT_MRT4530_94061C.1.pep
MRGNPNPRGAMQRRCGAAVVECRSMRHGGKVFFKCEENEQDVPNCCKFFKWIESYRKMVEGMSEHVVDEGPSDVALVDGSIEMKRSSVDDGKIDKLINLIEVLVMINIGLLVLGFIGVFVMILK

SEQ ID NO: 198399 - protein, 50 aa, Oryza sativa
  unsure (1)..(50): unsure at all Xaa locations
  Clone ID: PAT_MRT4530_94062C.1.pep
ADRQTTCACLKQQTSAMGGLRXDLVXGIPSKCDVNIPYGISPSTDCSRVH

SEQ ID NO: 198400 - protein, 2280 aa, Oryza sativa
  Clone ID: PAT_MRT4530_94063C.1.pep
MWSDIKQWLPDAWGWVVHHTLGALNLIIDVVQGTVIQVKMILAKGDEYISNFIASAIKATQSLPGMSDFGADVLKEQENIVKSSRDNYDQLASELDAINARVEKGEMGYVEAMKQRRTLEKQYSEETKEAIRKEAEEIEKRNRERNKQSKIVRSPTEQFDKELISLKAQLKVLQEHKEIGQKLSAQRKALFTTEATIAVLREASSKRQLSAEEKALLASQEKVIELAKQKAEIGDQIVKQQQLNALTDKSLKFVNEMTAATEQLNASRGLSTREMERQAELAKITTDYINSGGSEGDEKLQNMIKAQNDYYAAEDAKRADWLAGAESAFADYGDSAMDMYGNVNEIASSALNGMTDMMVQFLTTGKANFADFAKNIISMIIKMIAQMVIFNTISGMMGGKTWSFAGGASSGASAASQATPAPAASVFRSVSSGGAAVSLAAAAGSVATSGFNASNSAPKVVNHSGGGTVVDVSGMEVRVDNGSDPRGISQGVEMMFKKMIRESCSQGGEVQGGGGSLTTTNNDRSIQFGNGYMQLASSGFNTTRREYSVVYAGEDFIAVYDFCDSHRIKPFAWTPPDGKQEEKSMSENKKLYDEESGKSLFHNCLQSLYPGEIITLIEVDGSKFGAQVYRFHGENIQYTPEEIMQAQQTGTLPPKEITFRGEKYGARPFGISGISFDSSGKATKPQLTVANIDSRVSAMIRAYNGLMQAKVTIWITQRELINSDGSIADGAYRKLVYYIERPNYVDKSVARFDLTSPYDMDGIMIPSRFTQSVCYWAQRGWYKTGKGCGYNGQNVQYACIEDDADSTTIAIVHSHTGDGATTLPSAHDTCMCNEMEVTWIIVSVPEGDMRFVKPEKLPLIGRPWSLGSFDCYGLVMAWHKEHGVELRDRRLNFEWWKPEYGINLYQDYYKQDGFVEIPDQNNPSLGDMVIMQIGQNVPVWNHAGIYLGDNQILHHAFGSQTMNDVKLIKLSGSLGRRFGVFHRFAVDSYPEAIRALSSQVDGFKEYMQSEIGSRSKFAIFVDGVNVGHHEEEKFKCAKEIRIVPIPTGSKTGGLFQVVLGAAIMVAAFYTGGASLALMGTMSSSLFMMGGAMVLGGVMQMISPQPGGANFEVQSSKNKPSYAFGGAVNTTAAGYPLPVPYGYRAGGGATFSAGGSQKPHNPVEMEDNLISINKIKILLAVSDGEIDETFSLKQLMFNSVPVQNEDGSFNFEGVKAEFRPGTQTQEYIKGMEDSSSEVTVNREVTTDNPYTISVTNKTLSAIRIKMFMPRGVRIESNGDKNGVRVEYEVQQAVDGGSFETVLTDVIEGKTMSGYDRSRRVNLPNFNNQVIFRVVRKTPDSNDSNVVDAIQVRSYAEVIDAKFRYPLTGLLFVEFDSKMFPNQLPTISIRKRWKIVNVPSNYDPESRTYNGNWDGTFKKAWTNNPAWVLYDLMINQRYGLDQKELGISVDKWALYEAAQYCDQMVPDGKGGTEPRYLCDVIIQSQTDAYKVVRDICSIFRGMSFWNGESISVIIDRPREPAYIFTNDNVVNGDFSYTFASEKSMYTTCNVMFDDEQNMYQQDVEPVFDREATLRFGNNVTSITAIGCTRRSEANRRGRWILKTNLRSTTVNFATGLEGMIPTIGDVVAISDNFWSSNLTMNLSGRLLEVSGSQIFLPFRVDARAGDFIIVNKPDGKPVKRTISSVSADGKTIEINIGFGFPVKPNTVFAIDRTDLALQQYVVTKIDKGDDDEEFTYKITAVEYDPNKYDEIDYGVNIDDRPTSIVEPDQIPKPENVKVSSESRIVQGMSVETMIVSWDKVPYAVFYDVQWRKDNGNWQNVPQTANKEVYVEGIYAGNYQVRVRSVAGSGTTSGWSNIVAATLTGKQGEPGRPINLTATDDVVFGIRTKWGFSDGSGDTAYTELQQSPDGTVDNASLLSLIPYPQHEYYHSPMPGGNIVWYRVRTVDRIGNVSQWTDFVRGMASTNVDDIIGEISVDIENSPGYEWLVDNATDNASQNAANAEAAIENALANDKDAIYMKKENGKRKAEYTKSLKLIADETEARVTAVEQLRASFGDQISASNSELREVIATETGALSREIDQLKAEIGDDIQASLTDIREAIANETEARTQADLSLSARLGNNEAALSQKLDSWSNADSTGAMYGVKLGLKYNGQEYSAGMAMSLIGSGAAVKAQILFEASRFAIMTGMNGQTQYPFVVENGQVILSSAIIKDGFITNAMIGNAIQSNNYVFNQSGWRLDKGGTLENYGSDVEGAMKQTNTTISVRDASGRLRVQIGRLTGS

SEQ ID NO: 198401 - protein, 82 aa, Oryza sativa
  Clone ID: PAT_MRT4530_94064C.1.pep
RGTTSRRRGRRRRQRRRRDGAHAGSGDGVGDDVGAGLWTRSGARKERPGRGGMGGFGGGCRRLEEEDGADRHPRRYERSLLL

SEQ ID NO: 198402 - protein, 112 aa, Oryza sativa
  unsure (1)..(112): unsure at all Xaa locations
  Clone ID: PAT_MRT4530_94065C.1.pep
TPNPTPPYPKPKPQEGREIPMSAQPXPAGSCDLGCMLRRPMRRXRKDQNMFYGAMVSYPGLITSHIACLQCLYYLPLGLLMSLLICTRVPRLTLLYLLDCATLTPFPITGWG

SEQ ID NO: 198403 - protein, 777 aa, Oryza sativa
  Clone ID: PAT_MRT4530_94066C.1.pep
MALRQHANAVYCQSRFPPIGIHRRLQVGCGGFRRERQKRNKNKEKERNSFSRLDRRDAKRICEFLPFFFLGLRLFSSAVDPRDQFILNAPEVVAAETERFEAMENGSWQRHISINRQVSSSSVTAQGLRAKVASYYAKRCSCGFFLAKLLLMGFALVLYSAAVASVVLAALRLSKQDYVDPADQGSSDHKSIKGSLNLFYGLVLVQGASDLLAQAMFTVADIQLVLKITEAYQLGPLGKQMVSHYMLVTYLRCSGGNVREAMNMDLVSFAMELVRSNSIADRLVGVGVLDSILRVPKYRALALMRLRASADTVGGVVSMLGLTNNTRKEVNTRGHAAGVILELSRDLLLESFPAMLPIVSSLIVAADNSGNDVTVSMEFTWFGVKILNKIMDNPDNCNKVADADGQVIASIVNLTAVTGDDRSLSIVSSSAVRDEEIILEAVQVLHKLVSAAGDSGRVLRCKVSDNVYVLRNISKILQHPRSQVKLLVEAIGVLACLALDETGREEIASSPQIIRKLVSFLVPRSQMISEISADRRQLAKPNAEALVMLAMDNQSIVWKIQEELKPQDMQKLVEMLSADSTGFKTNVAKLSGILHANSRAEHAHLQKTIINTALPTLLKAIKSEVEKLEDPVLYAGEHANNFQEWRTKQGALLESFVGLSVQICTSIHASDFNEALRSANVTVYMVMQKLRKILDLYKSPAIEFPGIRRVAVELIIWMKQCSSHCNEVFFQCEMDKALKEVAGTEERLEMFKIFYYGVGIVKHSEPISSLVNLALGL

SEQ ID NO: 198404 - protein, 57 aa, Oryza sativa
  Clone ID: PAT_MRT4530_94067C.1.pep
RVFDSEAVRCCLSNDQYFHLLNSLILFSIVAPSESRYQVHRPQIFFSIDVPGTFEIF

SEQ ID NO: 198405 - protein, 61 aa, Oryza sativa
  Clone ID: PAT_MRT4530_94068C.1.pep
MHRQPHSLQSLLLARNNLEGTIPESLARSSSLIELNLSRNNLSGEIPPSFFNGSSKLVTVD

SEQ ID NO: 198406 - protein, 508 aa, Oryza sativa
  Clone ID: PAT_MRT4530_94069C.1.pep
PAGRVTLITQTQAPSPGRRGGVWHVTCPTPLPTHPPRHPPISKSMAGDTLLWLLLWATSMGLLVQLLAARVGVATGRHLAELCRDEYPSWARRALWLMAEVAMVGADIQEVIGSAIAIKILSRGFLPLWAGVVITALDCFIFLSLENYGVRKLEAVFAILIATMAVSFAWMFTDTKPNMKNLFIALVQSRKIDPNKEHQVREALRYYSIESTIALAVSFMINLFVTTVFAKGFYGTKEAGNIGLENAGQYLQEKFGGGAGACIVKLGHGEHAAAALEELTGIVQQHLGIEGSLLCLVSCGRKASSFGGVATTSADGFGPASLPIPGKPSLSAEPTRGRRPWCQGLCPHRRCDAPLIGPLRSPPLPVPGPSPMPSSVSASASALAAATTTTTSSKHRRPEVLSVLPRHPLRLLSPRCRRRHRPKVLPILPRQRSMRTSRTRSRSTSARRQRLVHDRGAAATKMTVVADGGLDDDTATGGGPDVGSALMGRDGQGKGGGWDEVRGGSSLN

SEQ ID NO: 198407 - protein, 34 aa, Oryza sativa
  Clone ID: PAT_MRT4530_9406C.1.pep
WLITSYHNITMTLTNGTHYAGFDFLFDSNLESMR

SEQ ID NO: 198408 - protein, 176 aa, Oryza sativa
  Clone ID: PAT_MRT4530_94070C.1.pep
MKEKYAVPINLQELVKKLGDGHIVSVLNVQSKSSSHLHSQSPGDDEGTSTWHWGSGCSHVCKSHIYHPILPWLNSDGSINSTVYECLSHRIIGYVMQYPGIMEEDVINWLDVLNPQTCRTLLGKLTIDKHLYVRVFDEPVPTAPTTLQNILRQGHNREPSKCGRRYFANPMSTFML

SEQ ID NO: 198409 - protein, 242 aa, Oryza sativa
  Clone ID: PAT_MRT4530_94071C.1.pep
MAGLRKGIREHRLLHLRRDMMTSPRDAYEEENSLLEKKEDEAPGMTKDSLQGKLNGVEINKVGRNQRNKVLRHLSWAFGHVTSSRTPAQVGPMWGAPQPGIGLICTGKINNSWRGVSIAKTQHNVSGWRGNLAVFSPAPTTNGGPSEVATKRENEEGTTAKPSVVISHDMVDGIALAASSSDVALQEMAWIVGNGDVAHGGAPDAGNAVKRDTSNPMSSKELASNVNLIVLIYGENFHVQVE

SEQ ID NO: 198410 - protein, 881 aa, Oryza sativa
  Clone ID: PAT_MRT4530_94072C.1.pep
MAPLLLTLLLLLCLASPPLAAAAAACGTNTSLVGYEADLWMSQHQLRGRVEVLDGCSFRVAALDLLAGSASARWWRAEGPDLDSLARGAPAAGDPLNRTFLSESLVFRLLPGVSWPLVPVLAAFDPLTSSLFGFVRLSNDSSADSEAPTMFDSCAQLSPRLRVRWTLHGTSDSIDIGLEAAVGSEYYIAFGWAAPGAPEPSMIGADVAVTGFTEDGLPFADDYYVTKYSECTVRADGAVEGVCPDTIYEQGNDTAAGAVNNTRLVYGHRRDGVSFVRFSRPLVSPDKKYDVPVNATANMTVIWAIGLLRPPDSLQPYYLPLGHGAPAGTAFGFATLNVSASGGCVGPLDAEDKEDQDRITAERNTPLVVTAGPSLHYPNPPNPDKVLYINKKEAPLLKVERGVPVTFSVEAGHDAPLYITSDAVGGNATSRNATEVVFAGGARAEGVPAAPAELVWLPDRNTPDVVYYQSLYDPKMGWKIQVVDGGLSDMYNNSVLLDDQQVTFFWTLSGDSINIAARGERKSGYLAVGFGSAMVNSYAYVGWIDGNGTGHVASYFIDGEDGAGVHETSENLTHTRCRSENGAIVFELTRPLSPSCSGRVECRNIVDPTTPLRVIWAMGSQWSSGQLTVSNMHSITSNRPVRVLLLAGTAEAEEELRPVLAVHGFMMFVAWGFLVPGGIMAARYLKHLKSGDLWFQAHTYLQSSAMAVMFLGLLFAIAELRGFSFKSTHAKIGTAAFVLACLQPINAYLRPHLLAENGEILPMKNRVIWEYLHIITGRSAVVVGAIALFTGLQHLGDRYGSKNIKGLTCGLILWVVGVTLVVVYLEFMAARRRRGGGADDLSGKWVLGNTDEDDSVDLLQSTKMESDSIEPMEVQLEPLKG

SEQ ID NO: 198411 - protein, 133 aa, Oryza sativa
  Clone ID: PAT_MRT4530_94073C.1.pep
PRVRHEVSRLTAFPASGAPPWPSTGGIERKSPKSRDRTLLLQVRPLAIIVDYSLPARRPEGADAVALLFPPPPGRSTLRRRRPSFVSASTNSIATSEGPPFVVGAGENTARLPRQPLLCSPPLRLADVWVQLD

SEQ ID NO: 198412 - protein, 50 aa, Oryza sativa
  Clone ID: PAT_MRT4530_94074C.1.pep
AVAASVASVSDDELLIRQVRLWRCAVSTVHPQRRHALGAVSHLNSLERGD

SEQ ID NO: 198413 - protein, 185 aa, Oryza sativa
  unsure (1)..(185): unsure at all Xaa locations
  Clone ID: PAT_MRT4530_94075C.1.pep
EAKPLSTRKAPXHSMGGANRRLSLGGATMQPPKTDILHSKSVRAAKKTEEIGTLSPSSRGLDIAGLPIKKLSFNASTLRETETPRKPFAQITPGNSVSSTPVRPITNNTEDDENRTPKTFTALNPKTPMTVTAPMQMAMTPSLANKVSATPVSLVYDKPEVTLQEDIDYSFEERRLAIYLARQMV

SEQ ID NO: 198414 - protein, 160 aa, Oryza sativa
  unsure (1)..(160): unsure at all Xaa locations
  Clone ID: PAT_MRT4530_94076C.1.pep
MGPAAADDAAAGEDQALSDLREKHRIDLERLTLTSQPLRTLALFALAIGQSIKSTCLCVLKDSARLKFLVLXVASACTPLLLTNGPHEKHVQELLWYIRFGLWWVILGVASSIGLGSGLHTFVLYLGPHIALFTIKAVHCGRTDLKSAPYDTILLKMRPS

SEQ ID NO: 198415 - protein, 358 aa, Oryza sativa
  Clone ID: PAT_MRT4530_94077C.1.pep
MGGARLGRWVEGMSADNVKGLLLALSSSLFIGASFIVKKKGLKKAGASGVRAGVGGYSYLLEPLWWAGMTAMIVGEIANFAAYAFAPAILVTPLGALSIIISAVLAHIILREKLHIFGILGCILCVVGSTSIVLHAPPERQIESVAEVWDLATEPAFLLYAAIVLAAAFVLIFHFVPQYGQTHIMVYIGVCSLVGSLSVMSVKALGIALKLTFSGMNQLVYPQMWVFLLFVVACIVTQMNYLNKALDTFNTAVVSPIYYTMFTSLTILASVIMFKDWDRQDPTQIVTEMCGFVTILSGTFLLHKTKDMVDGLPPNLPIRLPKHAEEDGYAAEGIPLRSAADGIPLRSPRATESFRATL

SEQ ID NO: 198416 - protein, 110 aa, Oryza sativa
  Clone ID: PAT_MRT4530_94078C.1.pep
MVIRDGNGEFTVGGHIRVPVPTHSAAGRETVAADSILATKGVGDGRFERHDGYKRAPASTTGTEGAGDGWQTNSATMTAGSGRGDGGDGFEQRLRAMRRLQTCARVDSWG

SEQ ID NO: 198417 - protein, 74 aa, Oryza sativa
  Clone ID: PAT_MRT4530_94079C.1.pep
LLCMVNFSVFETTLDLAVTIISWDDSNPTQTAGLVNPAAYPSTPPITYFPPPQLRFCLALQTPSINRLSKPSYL

SEQ ID NO: 198418 - protein, 47 aa, Oryza sativa
  Clone ID: PAT_MRT4530_9407C.1.pep
APRCHLLDRPPPPPLPWFSLPAQAKTEDGLASVLLAGQTTAPIAATV

SEQ ID NO: 198419 - protein, 134 aa, Oryza sativa
  Clone ID: PAT_MRT4530_94080C.1.pep
MALLPRSTEQPRVARIRKKKKKKKKKDKKKKKKKKKGKKKKKKKKKKKKKKEKKKKKKKKKKKKKKKKKKKKKKKKKKKKKKKKGGGRFKKTKFYLPWLENFIFFFGAPKKKLRGRFLKTWDWKKPGFPKIKSF

SEQ ID NO: 198420 - protein, 111 aa, Oryza sativa
  unsure (1)..(111): unsure at all Xaa locations
  Clone ID: PAT_MRT4530_94081C.1.pep
STIPLKYYLSFPAQSNRYIGPLCSRSVIQTHNDEKWVGWEQIYFSGAPIIHGWKWXLWGWPRPEGAFGXLQWLXSFHHNHPSWLIINCNCIKTTWSFRGRGIKWIGRDPIA

SEQ ID NO: 198421 - protein, 104 aa, Oryza sativa
  unsure (1)..(104): unsure at all Xaa locations
  Clone ID: PAT_MRT4530_94082C.1.pep
HNAKMYKERXKRWHYKRIKAKEFVAGDKVFLLNSRVKLFEHGKLRSKWLGPYTVIDTSFHGAVTLQDDESNIFKAYGHRLKIFLEPIEGLGQDLDLVELVDFGA

SEQ ID NO: 198422 - protein, 540 aa, Oryza sativa
  Clone ID: PAT_MRT4530_94083C.1.pep
TQASVPPQAAQMDPSVHAAPLFGAVSGSSYIPPAAFGVGNVTEAFPVDANTPFNVTERSKKPPVPNWLREELLKKKSTSVSASVQHSTEFHSKGSEDAEKTLKSSDQADSRSVDSAKSTDDDEEDEDEIEAARMAAMNQEIKRVLTEVLLKVTDDLFDEIATKVLNEDDPSAEPNEPTRVSSVKGPGLGESKPKVSAKVVVPAKPTNVSSADHSDGTGLSSPKGALLGLASYDSDDEDDEGDNEDKVPVSNLSSETKAGAARPGEGEDRKFNDEMSHRNSSAELKQELRVHDTHSREFPSDAKISSQPKDVAPTLDEKAHGYSQNGKVPPSGNNVENFSNMESSQGHLGKSSNEEDFVKEPKAVRRKESESSSKRYNDDDKSSMYGNIDKKGSFKEEKGSDRSVRHGADTREPRSRGNSKQDDAKGERKDYQKDCLKDTAFAYLLWYLLSEETSGSYISYPFTYPFSYVSSLDEFRGLHIASILTAGIRLIHLRKGIGQEEAFQIQNSSQKKIEDTFDFKMPRHPCEAMCGISLHLLLIH

SEQ ID NO: 198423 - protein, 67 aa, Oryza sativa
  Clone ID: PAT_MRT4530_94084C.1.pep
KNWQRIILWLGPPLSTKVMLEYYKLLVGCSISSPFFIEWLMDPVKRSNWPNKFFGEFVAHLCIFVCG

SEQ ID NO: 198424 - protein, 176 aa, Oryza sativa
  Clone ID: PAT_MRT4530_94085C.1.pep
MATSSAYPPPPPYYRLYKDYEKDPSSAPEPPPPVDGPYQLFGATYTTDVVLPSLEDQGVRQLYPKSPDIDFKKELRTLNRELQLHILELADILVERPSQYARRVEDISLIFKNLHHLLNSLRPHQARATLIHMLENQIQRRKQAIEDIKQRREEAQKLLGESLLILDGNQPSLPAM

SEQ ID NO: 198425 - protein, 928 aa, Oryza sativa
  Clone ID: PAT_MRT4530_94086C.1.pep
MPMQPPPPAAGNPWPPHHAAAQPPPPSYPPPPPGQGWANHSWAQSHGYAAHNTMHRDKCLLNVHAFQEFWGVMPYPQIGQKFIITVTRISISNQLVCPQNLYARQSLSQDSTGKQTICQFQSGAEDNIADGGPLAPPAKNFGSFPSAYEQEVSYNYPSTPGVGNAMIQYPSSQTQLPPTASAMQDGFPQAPSSMHIAPSLEQPHFGHDGQSSKIAVDPSDQPLEFNSRKAPDMAVHRTANFNSNIPAAPIAASDHDAHSAPAQSWIPSTTVLFPQASVPPQAAQMDPSVHAAPLFGAVSGSSYIPPAAFGVGNVTEAFPVDANTPFNVTERSKKPPVPNWLREELLKKKSTSVSASVQHSTEFHSKGSEDAEKTLKSSDQADSRSVDSAKSTDDDEEDEDEIEAARMAAMNQEIKRVLTEVLLKVTDDLFDEIATKVLNEDDPSAEPNEPTRVSSVKGPGLGESKPKVSAKVVVPAKPTNVSSADHSDGTGLSSPKGALLGLASYDSDDEDDEGDNEDKVPVSNLSSETKAGAARPGEGEKATDGEQHGNHNERNSVVQNASLGEDRKFNDEMSHRNSSAELKQELRVHDTHSREFPSDAKISSQPKDVAPTLDEKAHGYSQNGKVPPSGNNVENFSNMESSQGHLGKSSNEEDFVKEPKAVRRKESESSSKRYNDDDKSSMYGNIDKKGSFKEEKGSDRSVRHGADTREPRSRGNSKQDDAKGERKDYQKDVREKSRDSADRREKGKHEKEDRSRQTTKGSSSHSSRRSRSPSARSRTKKESSSHRESVSSDEPSDNSKRRKLHSCKSSMSPSPPKSRNRQCLKDTAFAYLLWYLLSEETSGSYISYPFTYPFSYVSSLDEFRGLHIASILTAGIRLIHLRKGIGQEEAFQIQNSSQKKIEDTFDFKMPRHPCEAMCGISLHLLLIH

SEQ ID NO: 198426 - protein, 101 aa, Oryza sativa
  unsure (1)..(101): unsure at all Xaa locations
  Clone ID: PAT_MRT4530_94087C.1.pep
TCHSLPPAPQVQPLWPPFFPTSPPHPASSXPPSCRPRRRPSLPPRAFLPIKRSSSPTPPXPSQIPSPSPPHTHSSLSPYRPPPPTPSSPYPPPPPTPPISR

SEQ ID NO: 198427 - protein, 182 aa, Oryza sativa
  unsure (1)..(182): unsure at all Xaa locations
  Clone ID: PAT_MRT4530_94088C.1.pep
PGLQESARGNDKSGSDENYDGGLLFSWAMHQISNHLTTLQVMLPNITEGGSLSFFLXICMYCAMGLGLVGLDFRGLLPPIFEKAVLNLFSKNMGTAVENFQVVLDSHRWVPMPSVGFVANGVVDETSDDVTPPSVLMEHPPLAVFVNGVSAAMNELRPCAPLSLKNVLAEEVVKGLQAVSDS

SEQ ID NO: 198428 - protein, 500 aa, Oryza sativa
  Clone ID: PAT_MRT4530_94089C.1.pep
MGTPAKLPSPPSLPIARQCCCHLLQLGRRGGAGVARASAKKKNPWLDPFDDGPDDEFDYRGAFSGGKQEEDPRPPEDPANPYGFLRFPAGYNPELDSLASKVRRDVRRACCVVSGGVYENVLFFPVVQLLRDRYPGVVVDVVASARGKQVYEMCKNVRYADVYDPDDDWPEPAEYTHQLGVLKNRYYDLIISTKLAGIGHALFLFMSSARDKVGYVYPNVNSAGAGLFLTEMFRPPTTNLADSGYNMYQDMLEWIGRPAKGVPEHPVPPLRVSISKKLRAFVEDKYSRAGVEKGKFVVVHGIASDSFANMRSRGDDDCLLPLEHWAEIAKEIRFFTSPHSLTQARLLLHLHFQLGTDCEKVELKPKKWWCLGSSEDNGLKPLFVIPHQKHREEVEETVGKDTNILFITTPGQLTCLINDSVGVVATNTAAVQLANARDKPCVALFSSKEKARLFLPYLEEKKGCTVVASETGKLIDIDVEAVKKAVKEFKAAPSVALAQT

SEQ ID NO: 198429 - protein, 176 aa, Oryza sativa
  Clone ID: PAT_MRT4530_9408C.1.pep
MSMASSGGYYSYYNGHQPAPYYYGYAQPARVAGGGGVGGSQRPSAHALLLVATLLLVAVTTLYARCEEAVESLLDQLRVLLILSPLLLIVAVQVWAPSAAAAAADRRGAGGGLMYLLAQLMGMGDGGGSPYGRWHGGGGGASSSPWGVALVLVLVLFLVSYQSSFQSWWFPLLSRR

SEQ ID NO: 198430 - protein, 40 aa, Oryza sativa
  Clone ID: PAT_MRT4530_94090C.1.pep
LLVMDLVTTGHCGRLKLCCCSKSYVILKFYNSMRRQPLVA

SEQ ID NO: 198431 - protein, 98 aa, Oryza sativa
  Clone ID: PAT_MRT4530_94091C.1.pep
MKVVRCSNSPCFGLSEEIDRSLSRQCLIRECGGMARGQGVEQEKQTSSFTWEWGAVPGRVTWAKATRRNGATRGQHVSGAVRADGAAFRCDAARHVVS

SEQ ID NO: 198432 - protein, 36 aa, Oryza sativa
  Clone ID: PAT_MRT4530_94092C.1.pep
MAEQLLYGCDVAFAPYGEHNLQTALVPDSITSWAKA

SEQ ID NO: 198433 - protein, 123 aa, Oryza sativa
  Clone ID: PAT_MRT4530_94093C.1.pep
MVAGHVIARGTMVLVDVYSMQRDPRVWEDPDKFIPERFKGFKVDGSGWMMPFGMGRRKCPGEGLALRTVGMALGVMIQCFQWERVGKKKVDMSEGSGLTMPMAVPLMAMCLPRVEMESVLKSL

SEQ ID NO: 198434 - protein, 86 aa, Oryza sativa
  Clone ID: PAT_MRT4530_94094C.1.pep
LKPSKTTTPPFSVFSSKFTPILFNPPAFFFSNPFQARVISQVKPNHPFELAPLFDPAQVPQPFQEETPLLGLSLSVFFLSLFSPPP

SEQ ID NO: 198435 - protein, 195 aa, Oryza sativa
  Clone ID: PAT_MRT4530_94095C.1.pep
MTIGKGDRWIWPSARHDSACPSTKSSGVVELKRWVPPLLHSSTSPNSSVIAAAVFQVASSTGLLLPPSPSQAMTVVAFFSVELPTATLSSSIPMVAARAQGHAGRGHLGDDDRGELAGQLTCRAVDKGRPCYVDAFPGKYCGKSKIIPNPSRQEIAPPIHPAHFASPSLGHRREPTGRRAAAATEEAPGHWARRE

SEQ ID NO: 198436 - protein, 104 aa, Oryza sativa
  Clone ID: PAT_MRT4530_94096C.1.pep
HKPRYIDSMQQQSMFTYNLGTDFNCRRLSYYSIFQMLNLFFFKGAHNPMNPSQSDPTQMDTLQFLESIGQPGGDLCDGEEQSEPLNPWHPQAACKHTHICIILD

SEQ ID NO: 198437 - protein, 479 aa, Oryza sativa
  unsure (1)..(479): unsure at all Xaa locations
  Clone ID: PAT_MRT4530_94097C.1.pep
MAELKPEAIRCPTAQVIEVLGTNVGSTSVRVDSILRRREYYIPLCAASLSHPEEPSSIAAWSPTDWVMMSPPALEGRCREPRLSAFAEERLPTVVPESFAIEGPIMENIEASTLASIPCVYQLSCRFMSRLRGPRMVSTRILIGVDWRQLWRMFSRFFCSLGMRPLGAPLGFFLFERGCPVFGSCVAAXLSALLWFVVLSRYPWKVRVTEIPILERCSLFICLASVGSYTQILAAGGAYKHSPEVTQINCRTDRANLISSAPWFVSAYFPIEFVISLMCQGLAPGLRSLFHYNGAHQLSVPVNPLGIGILLDGLFGTGTGSTVSVENVGLLGSTRIGSRRVIQISAGFMIFFSMLAAVGLSFLQFTNMNSMRNLFIVGVSIFLGLSVPEYFFRYSMAAQRGPAHTKAGWFNDYINTIFSSPPTVGLIVAVFLDNTLEVKNAAKDRGMPWWVPFRSFKGDARSEEFYSLPFNLNRFFPPS

SEQ ID NO: 198438 - protein, 97 aa, Oryza sativa
  unsure (1)..(97): unsure at all Xaa locations
  Clone ID: PAT_MRT4530_94098C.1.pep
QCRENVGLLGSTRIGSRRVIQISAGFMIFFSMPAPSDASKXPLFLFLSHTFALFXLSAAVGLSFLQFTNMNSMRNLFIVGVSIFLGLSVPEYFFRYS

SEQ ID NO: 198439 - protein, 70 aa, Oryza sativa
  Clone ID: PAT_MRT4530_94099C.1.pep
MDAPRPSVVCVALRGGSLNRSAVSELGQEQTIADEFDPYHASCRPRFGACCHRQTKSTPSTFSMSKSKKQ

SEQ ID NO: 198440 - protein, 65 aa, Oryza sativa
  Clone ID: PAT_MRT4530_9409C.1.pep
HVPPIPCKYLLGFCLKFFSKCFFQDVLALGLTLAIWGKMYAAHKSLIFLALCFFISFLQASISPV

SEQ ID NO: 198441 - protein, 43 aa, Oryza sativa
  Clone ID: PAT_MRT4530_940C.1.pep
LCALSWNLASTMTVGIMIEIELTHIQHYIMHSGNYLQAIRLSF

SEQ ID NO: 198442 - protein, 84 aa, Oryza sativa
  Clone ID: PAT_MRT4530_94100C.1.pep
MATTDTTIAHIMDEQEDIEIKNKVDLHRQDQQPTESLDERLVTVDEVRVALAHCLQTALEVGAPRSTKPRMVRKAGASLISGAI

SEQ ID NO: 198443 - protein, 166 aa, Oryza sativa
  Clone ID: PAT_MRT4530_94101C.1.pep
MAGVHTHRAFLLCNYLLLGAASGCIFLTLSLRLLPSPCGLLLVFLHALTAVLAAAACSGSFTAPGGGGGTHTAHTASAVLTAIFQGAAALLAFTRTGDFLAELRSYVREEDGEVILELVGGLGAAIFVLEWAALALAFALRLGDDGADGDEHDGGYAKSWQSGYHV

SEQ ID NO: 198444 - protein, 97 aa, Oryza sativa
  Clone ID: PAT_MRT4530_94102C.1.pep
ACNNLVISTGCLQVVAFEEPSISCVVSSIHRSSAPSIHMYLYPDMKYSDDQVIDHDRLHHQCTSEISRVYSSHRMISSSIYMYVVHVESASSGEFVN

SEQ ID NO: 198445 - protein, 475 aa, Oryza sativa
  Clone ID: PAT_MRT4530_94103C.1.pep
MDEVWCSLDSMPADIAAGIHQPPPPDLHDPSFWPAFADCAASFIAGGGGDNACFDELMAGGSSGDTRMVAMDDGDDGSGFLVGDAEAEHLMLSSSSPSSLSSGRSLSIDSAGSMSSFSLDAAAALAMSTLAVPHPYPPPVAHGMFASGDGGGGGGGAVDDHEDAIMRAMMAVISSASASPSSSGGSASSPTPFSRDSGAHHQPAGQPAMAAPQQPRGGNGGHVVVKSSSSSGGLAVPMDQKPGGGGRGRQQEEAAAASATNSSQLYHMMSERKRREKLNDSFHTLRSLLPPCSKLYTVFEWLPGNNLFHGNGSDNKDKTTVLINAAKYLKSLETEITELEGTNTKLEKHIAGGGGAADAAMRARRAQQRAKVQISKAADSQSQQLVSLTVMVMVECDVVELVLHILECLRWMKEISVLSVYADTYSPQLLLKAIANIKLQIVGGDWNEASFHEAMTKAANDATISCAPLAITAAQ

SEQ ID NO: 198446 - protein, 98 aa, Oryza sativa
  Clone ID: PAT_MRT4530_94104C.1.pep
GCFQLRGVPHPHPLIHTHLVLIVPPPSQGSPSRDSALETATKISDDRRQHPDKVLEHAMLYSIWVKIHNSKLQTRSVWRPWMKRQCPTRLHILRLTAR

SEQ ID NO: 198447 - protein, 133 aa, Oryza sativa
  Clone ID: PAT_MRT4530_94105C.1.pep
QRSIICTTNTYQFTTTNLEEWANSNSIMNTKAHVSPFAFVGGFSFVRLSAQEQTLGAQKGNSTGRAVILFFFVFLEEIKSSSRTPPGIQVDNRSIGRRRKQGKKTGYKFTTGILNRKNSGDSRADKNLLTIGS

SEQ ID NO: 198448 - protein, 84 aa, Oryza sativa
  Clone ID: PAT_MRT4530_94106C.1.pep
MVAAAVGRSSCRPLEKQQPLSGEAAAARWRSSSRCCRNSHRRCRCCSGKVPTPLLGGGVAAPTARVAAASARCHRTITAKCRYI

SEQ ID NO: 198449 - protein, 56 aa, Oryza sativa
  Clone ID: PAT_MRT4530_94107C.1.pep
LTTTKRIFFVRSKSFFSMRRSCPSTPYTLVSVKINISACGQPNRTEKIIFTCGQFK

SEQ ID NO: 198450 - protein, 754 aa, Oryza sativa
  Clone ID: PAT_MRT4530_94108C.1.pep
MATGAASLLPQPARGAAARLLLPASGAARGAAARLPLPEPPCTRLLLPEQPWGAAARLPLSEPSWGTAALPPEPPWGAAAHPPASHWGAGPSRPALPSSKLVPRVLERRTRKLKSSIYLHLENYKISNLTGQGDSMEWIDEHTTIVCQLFAQQVVKGNRPNTHLNSVGYDEVIQLFRQITGIELSKRQLRNKWDKMKPDFVAWQKLMRQQTGTGWDHSRGVIVMDDEWWRKAKKDIPGCGKFRKKPLQNVDDLNIMFSDIINDASDHWNPMSENPIIPEHMTEEVQEDNLVVDDEEVQETPMEEMNDEAQECHEVSPSIGIGKRRSRAVLDKGKKSKIGTALVIQEQITKIAESASSFTSKKSNEVTDSESESGAQIAQVYADMYLHKNPPRTSILSGMGWLLETLRTPGECHSQLRMNTDLFLDLNDLLVQRYGLEPSLHMSTHEMLAMFLFTCGGNESNRRAQNRFKHSGETISRKFDEVLNSLMAMAKDYIRPKDPNFRSVHKRIRDDRRTFPHFKDCIGALDGTHIRVSLSPDEQVRYIGKTGIPTQNVLAVCDFDMRFTYVATGQPGAMHDTSVLYNALRVDEKFFPHPPQGKYYVVDAGYPNRPGYLAPYKGERYHLPEWHRGMEPNTPMEKFNRVHSSIRNVIERSFGLLKMKWQILYKMPCYPMYKQKMIVVAAMVLHNYIREHGGEDPDFARFDRDPNFIPTIPERYNKYAVPRTASDESTPERSAGTMDLFRDELATALSISWR

SEQ ID NO: 198451 - protein, 177 aa, Oryza sativa
  Clone ID: PAT_MRT4530_94109C.1.pep
METDGRASTWPPAAAAAVAAALEADERGGKGGCGKGVHNSMSMRRVTKGSRPEPKSTMTPMPVSARVVKLSRSSPLQRRGAGVVLPERDLRMGVDVVPHAHHPVPCSLINVSTSPEEIVCANSPKPVMWNNVTMTGNDGLPLQLRWLGGWRRSNTVKPSCFEGKETRIWGEMLESRH

SEQ ID NO: 198452 - protein, 156 aa, Oryza sativa
  unsure (1)..(156): unsure at all Xaa locations
  Clone ID: PAT_MRT4530_9410C.1.pep
MPTVSRAGGNGRHLILDVDDIPRIIEAFFLTSTSRPGPVFIDIPKDIXPPADNLLNEVICLVGDAKKPVLYIXGGCSASGDELRCFVELTGIPLTTTLMGIGNFPSDGPLSLRMLGMHGTVYANYAVDNTDLLLAFGVRFDDRXTGKIEAFARRGN

SEQ ID NO: 198453 - protein, 271 aa, Oryza sativa
  unsure (1)..(271): unsure at all Xaa locations
  Clone ID: PAT_MRT4530_94110C.1.pep
GVMTVVENAKNKLIPQRIVMGWRMCLDYRKLSKATRKDHSPSPSIDEMLERLTNNFFCLLDDYSGYHQSPIHLDDQSKTTFAYRRMLFGLCNTPISFQRCMMFIFSEMTNEIMDDFSVYGKIFDHXLENLDKALQWCKEKNLMLNWRKKMSFHGQEGIVLGQRISERGIEVERAKIEVMKQLSSLNNVKGIHSFLGHTRFYRCIKXFSQIAKPLTYLLARYAPFEFNDEWLKSFNLLKEXILAPIIQPPDWLLAFKIMCEFSNYVVGVIRG

SEQ ID NO: 198454 - protein, 212 aa, Oryza sativa
  Clone ID: PAT_MRT4530_94111C.1.pep
GAARGRAARLPLPEPPCTRLPLPEQPWGTAARLPLSEPSWGTAALPPEPPWGAAAHPPAPHWGAGPSRPALPSSKLVPRVLDDRRAFPHFKGCIGALDETHIRYPNRPGYLAPYKGERYHLPEWHRGMEPNTPMEKFNRVHSSIRNVIERSFGLLKMKWQILYKMPCYPMYKQKMIVEAAMVLHNYIREHGGEDPDFARFDRDPNFIPTIPE

SEQ ID NO: 198455 - protein, 78 aa, Oryza sativa
  Clone ID: PAT_MRT4530_94112C.1.pep
MAISPAGPGPLRGPAPTGAGAGPIFNPWVRRGRGPAFRRGGDGELISPAGDPRVTRGAPGARRGGNTGSKGTAGGTQG

SEQ ID NO: 198456 - protein, 516 aa, Oryza sativa
  Clone ID: PAT_MRT4530_94113C.1.pep
MFSDIINDASDHWNPMSENPIIPEHMTEEVQEDNLVVDDEEVQETPMEEMNDEAQECHEVSPSIGIGKRRSRAVLDKGKKPKIGTALVIQEQITKIAESASSFTSKKSNEVTDGESESESGDSTDGDQFWKLVLGGAQIAQVYADIYLHKNPPRTSILSGMGWLLETLRTPGECHSQLRMNTDLFLDLNDLLVQRYGLEPSLHMSTHEMLAMFLFTCGGNESNRRAQNRFKHSGETISRKFDEVLNSLMAMAKDYIRPKDPNFRSVHKRIRDDRRAFPHFKGCIGALDETHIRVSLSPDEQIRYIGKTGIPTQNVLAVCDFDMRFTYVATGQPGAMHDTSVLYNALRVDEKFFPHPPQGKYYVVDAGYPNRPGYLAPYKGERYHLPEWHRGMEPNTPMEKFNRVHSSIRNVIERSFGLLKMKWQILYKMPCYPMYKQKMIVEAAMVLHNYIREHGGEDPDFARFDRDPNFIPTIPERYNKYAVPRTASDESTPERSAGTMDLFRDELATALSISWR

SEQ ID NO: 198457 - protein, 904 aa, Oryza sativa
  Clone ID: PAT_MRT4530_94114C.1.pep
MGGYGQSFFSISYARSQPPPPSAAPPPSPPRVSAWDFFNPFESFESYYHQDQPSPAPPAYTPSRSSNGAREEDDNGIPEVEHDEVDKVDNHQDANGMPLPAKDVSEEQHRKSKSSEASSSTSSSMISDLHVVQKSVIEEQLRHSDAAGPPAIPRKVYNDDVEVVEEIRSQFEHAAKSAFDVSKVLEVGKMPYYQKSSGLKVSSMMICGLSSVGEEFLQFEEDKAMECGNLSSTLQKLYMWEKKLLEEVKTEEKMRVLYNQKREELKVLYGRGAEAHKLEATETHIRKLSTKISIAIQIVNTISKNINNLRDDELWPQTCELIQGHLVITGEQGFPYHRGRGYRAPAVSTVTARLMQMWHAMSKCHQIQCHAISQARNLDSKLDSARFSEAHMDLIKRLELQLLELISSFATWVNAQKSFVGTLNEWLKRGIDYVPEVTDDGTPPFSPGRLGAPPIFIICNNWAIGTGRISEKEVVDKMQAFASSVLHLWEKHRLEWRQGMMANKDMDRDLRVMERDELSMRKALDAQSKKLVLVSNQSGVSLSAQVVHDSGPTAEVGLQSCMNKVFEAMESFTAACANAYSDLHLRSEEEKTRLGQNNGRVPSFISDLAAMEEQQLCRLRQNVASSSSSSSAAAAMAGALEGVARVYEHVGPLVRFACAEQVEEELEASVALLDACAAARDSLRAMRACALDLEVAVRRGDAAGAQSAASAYARLARKARADVKKQQRRLTNSRRRERPTRDGDDAQSLQEARRLAVDVLDRVVAAAAAGGATGPSRWSTCVARAFRNRTRVACEDAEEIAAASPPALAHLYCSSLPSKDLHDGGETAARVQKQLRTLGDTIQRLEDGLELLFRRLVHCRVFLLNIVPGIRQHLKGITLSAAALAMQSKSRWESRAVEIPAVSA

SEQ ID NO: 198458 - protein, 271 aa, Oryza sativa
  unsure (1)..(271): unsure at all Xaa locations
  Clone ID: PAT_MRT4530_94115C.1.pep
MWPLGFFSERLFKVAGEWDSGVGADDSPPAPDGRVPLARRSYYVDVPHVQQAFTWDCGXLACVLMVLRTLGMDCCDGIADLEKLCRTTIIWTVDLAXLLNRFSVCFSFFTVTLGANPQYSXETFYREQLQEDIDRVDELFGRALEAGISIQCRSISAYDIAFLLLSGHCIAIALVDKTKLNSSWSNDLQDMQQFSEDSDYMGHYVVICGYDADACEFEIRDPASSRQRERVSMKSLDQARKSFGTDEDIILVSLTGKIGMKLSRKLLVGSL

SEQ ID NO: 198459 - protein, 52 aa, Oryza sativa
  Clone ID: PAT_MRT4530_94116C.1.pep
PPLSFPPKIRFYPFEFDANLDSFSSLSLHQTLGFPGAIPCVPSPITLSRDYK

SEQ ID NO: 198460 - protein, 79 aa, Oryza sativa
  Clone ID: PAT_MRT4530_94117C.1.pep
RAASGRGPFANQNGLLFGRAIGEGPWVITPPGEKGRGPQAIKLGNARGFSGREVVKKRGSEFNLEDYYKPPPPLEKKAY

SEQ ID NO: 198461 - protein, 342 aa, Oryza sativa
  unsure (1)..(342): unsure at all Xaa locations
  Clone ID: PAT_MRT4530_94118C.1.pep
AGDGGGGGGLGMYLGGHFPTIGIRARFRAWTRDHALEVALMPRRRSLSPTERTPAGSGGCAMGSGGNDRGLVIHRMVKEAGGASNYPXLTKTNYNEWSLLMKIKLQARCLWGIIDSGGGMVELHEDRKALDAVPVEMISTLVTKETAKAAWDCIKTMRVGNDRIRKASAQKLRSEFEALAFRDRELVEDFTMRHNTIVMQLSTLGDXPEPDDKVVEKYLRVARPKFSQLVLSIETLLDISTLSLEEVTRRLKTAEDSSQSSSLSSPGGGGKLYLTEEEWLERHKKKDLLATGGVTGVETKRNGQRGPRAPARCCCRGGFGKKHFSQGQLPAGFSENWPTSPT

SEQ ID NO: 198462 - protein, 1086 aa, Oryza sativa
  Clone ID: PAT_MRT4530_94119C.1.pep
MASCAMLFLCLLPRDGAPHRQFRALHHPWLGPWWWPATTIGRDSKVPRFEVRAPPKRHSTSTTVGTGSIAAEGFFGEFGSAIGDLSPPFPPMVSPFLHFATAASTLHLLLHHHAAVVGSNCERHQKLQQARRAFSKPSSPPLPCIPALSATPPLASGQKGPGWERKEIPTIVPLPPPPLSVIVPVPCYCQSPDGNVIDCVPPHLQPAFDHSKKLRGQKPEVEPEPEERPKVDGASAAQGEAAEEEETDVIAVGSGWASQRARPSRRGSRHCIRSSSGNGSGLEEGEIADSVTKLAYDSNGSELSEKNIGCDYDHMWRIEGSTAAAAKGRCTCGCAGCRSKFRFHLRMDENSGSWKGKEGHEASDPVMREHHSIRLKAFFLLNATAFVMSLLTIMLLLDKRLIIPLLHDKVPSTTRPVRTIVLKAYISIALVGLAGAYATGSSRESDTTIYVGSLVFAVLACIIVLKTIIFHQSDSSDRSSNGTRRRNGEAQANPSSRREQTGTSHGGAKLPTSNGVPPTTRNVGVQTDTSNGGADTNTSNADILEKAQSLVVLLSTLVATVTYQAGLVPPGGVWQDNWNGHEAGDPILLSMQPERYKVFFYCNSMAFAASLVIIILVQYKPMLKRRILQFAMILDLFGLIGAYSAGSCRDVTTSIYVIALAGAVLVYVIIHVLFVTLEDEDIGKKGGDKDRKLEDKRRKRLLLFAVLGATLTYQAGLTPPGGFRLKDDEFGHNAGDPVIFYNYPSRYKAFFYCNSVSFMSSIALIILLVNPILYRPAIRSYALSVCTAVGMFALMCAYAAGSTQHLKTSIYIFGLVALVLFIMILVLICFYHRDVNTGSMSTNEEDLETGSGVKTPVKQEAFTETKSVDEIKEDNTAAKSPKTKEDDSTVESSEIKYEGESKQNTTNKSIEQNRTDTDSLRTEEDSKKKHATRKYLMLLAVLAASVTYQAGLNPPGGVWQGNSNGHAAGDPVMHDNRRYRYLIFFYSNSFSFMASIVVIILLLPEKLLRENRSFKVMHLTMVMNLLGLLLAYMAGSRMRSESSGYFMEFVITTLCFAALHKILSSEKEQQNDQPSQVDQQGDSQVS

SEQ ID NO: 198463 - protein, 59 aa, Oryza sativa
  unsure (1)..(59): unsure at all Xaa locations
  Clone ID: PAT_MRT4530_9411C.1.pep
RALFMVCVVVLVRIRPHLPLPGSVFVFSDFXCRALSGLRASKNLDACIWECAVGALPRC

SEQ ID NO: 198464 - protein, 234 aa, Oryza sativa
  Clone ID: PAT_MRT4530_94120C.1.pep
MSYYGSSSSGGRGGQRVEYGRTYVVRPKGRHQATIVWLHGLGDNGASWSQLLDSLSLPNIKWICPTAATQPVTAFGGFPCTAWFDVEDTSVDGRDDIEGLDASAAHIANLLSSEPPDVKLGIGGFSMGAAASLYSAACYAHGKFASGIPYPITLSAVISLSGWLPCSRTLRGKMESSHIAARRAASLPILLSHGRADEVVSYRNAERLGHYTIPEEMDDVGKWLSSRLGLDRSR

SEQ ID NO: 198465 - protein, 173 aa, Oryza sativa
  unsure (1)..(173): unsure at all Xaa locations
  Clone ID: PAT_MRT4530_94121C.1.pep
YEDVGESLAVPLAGSTTTAPVGAVFLLGGVVMAXFFHIPHKSPGENLVPASDERRRRSYDVVSSLGVSLRRSSNASMTVDGPFRFKIFHTLCSARPSPSWGPLHSCGGRHALRLFLLMSRSFSLMGLGNDNTSSTIWELLCRFCVXPSSDVLRLGSAVVVRSVAVGFSRFSFN

SEQ ID NO: 198466 - protein, 180 aa, Oryza sativa
  Clone ID: PAT_MRT4530_94122C.1.pep
MIMADQHCHCRCTTATEGLENMEDVDLEEQLAPPPPSPLPSSAEPLHGLCRKPGAGSHRALVATPVRALWMVVLMVGLLFTVHLLVHDVRTFVLLVAESFCIFFVMSGVAACERRQHDASGGACRGFSTVAEVALWSFAMALTVTMTFWVAAGMSLPAVAALYLLSLLVVSACFAVLLGA

SEQ ID NO: 198467 - protein, 382 aa, Oryza sativa
  Clone ID: PAT_MRT4530_94123C.1.pep
MRGGGGGDAGTSSRGGGSGGAPARPRRFPEAAQPEIMRAAEKDDGYAAHVTEACRDAFRHLFGTRVAVAYQNEIKLLGQSLYYLLTTGSGQQTLGEEYCDISQVATSHGLPPTPARRILFILYQTTVPYLAERISSRIVARGIALEDSQLDDHSESDSSSIGTAAQPSPIRNSPSRSLSFSHLSRLRGRVHTLWEWVLRKWPSMLPFAQDFIQLTIRTNLMFFYFEGLYYHLPKRAAGIRYVFIGKPLNQRPRYQILGIFLLIQLCILGAERLRRSRGVPVLNEDGNIISDIRHGKTADLATSSELLRLSVSSTSCYATEFYLKKKATKHPVVRANAPFVSVPVRIPLPQPVAMSSAGVALWSGVMRSLNAPYAELRLHIRV

SEQ ID NO: 198468 - protein, 2175 aa, Oryza sativa
  Clone ID: PAT_MRT4530_94124C.1.pep
MAYGGRKSGSNGYAIWASIDGTCAILGVSLSSRHPATTAPIRSTALIRIEIEAEGEAVKHAADLLGEMQRYAGAGNNSGFSGGGGAGGGGRDSSRLDGSPYSANNYPLSSRRQQQLAPYKLKCDKEPLNNKLGPPDYYPQTPNCPEETLTKEYVQSGYKETVEGIEEAREIVLSQIPYFCKTDIVVKCKEALKKRLRAINDSRAQKRKALSQPNKRLRSLSEHVPHGYRRKSLLDVLTRYNVPLLRATWFVKVTYLNQPQVRSTSVSTSAGGSDNHRSNQWTNDVVEYLQQLLDEFCLKEVPPSFREQSSPGLIAGVTQVKMKSEAPPAVGDIDEPLVHFKWWYMVRLIQWHLAEELLVPSVLIEWLFNQFQERVAVEALELLMPVALGMIDIITLSQTYVRMFVEILVRRLSDGPVVDNPKRAHISSVIAEVLRYMVLAVPDTFVSLDCFPLPSFVVPDVYSRGALLKITAGGGIAGSKRQDGYRYLSCGYAVCSIQKRSYDLATVANPNFQARGAAKVVQALDKALVTGNLTMAYLSLFNDLSDALMEERWIKEVSPCLQSSLMWIGTVESSLICSVFFLCEWATCDYRDCRTSLLRNVKFTGRRDLSQVHLAVSILKNKMDEINNLSRSKSSSRIAVNNTAKGSSLNNTSLAATVSDSSGLRNNAKSVDEKDKKDIFESPGPLHDIIVCWLDQHEVNSAVGFKRVDVLIIELIRSGIFYPQAYVRQLIISGITDKNDTLLDVERKRRHRRILKQLPGSSLFEILEEDRITEEQHLYEMMSTYSSERRLVLSELSTGQAFDANSRGEYASSSCVPKASDLFLASGGDKHGRVPEQVEDVKALVSSMLRFINPHSVEEEHCQIKTNPQGSSASTVTQIDTVDVKHDCEDCARTKRQKLDERASPLQGFPLIQSDEEDIWWVRKGTKLHESLKAEPAQKPIKQNSRGRAKVVRKTQSLAQLASSRIEGSQGASTSHLCESKVGCSHHKPSIDVDNVKDVDHMKIVDLSEVGKSLKRLRLLERRSVSVWLLKSSDDKTLLKWRLGDEELLSILYILDICCDLVSGARFLVWLLTKVRGGMATSGQTGRSATHIKNRENQVCQIGEALVFSSLLRYENILLATDLLPEVLSASMSRNFVLATARQPASGAFAYTRYFLKKYRDVPSVARWEKSFRTTCDQRLLAELDNGRSVDGDLVSSSGVSAGEEIDEQIRQKMNVRNSRIVPNMKDIIQRQTEEKKGITAPKSPSVDREDSYQIAHDIVLGLLECIRQNGGASLDGDPSIVASAVSAIVLNAGHTIAKHLDLSADALGDRFSRVFEIALAVEASSAITATFAPPKMQRNQFQPSPETHDVYGNHTNDLSNTGKGFVGRTTKVAAAISALVVGSVIHGVVNIERMVAVLKIKDGLDILHLLRGLRSSTNGVSRSTGTFKMENSVEVLVHWFRILLGNCRTVYDGLIADILGESYVLALSRLQRMLPLSMVLPPAYSIFAMVLWKRYTFSREDVQLYQSLSNAINDITMHQPFRDICFRNTHQLYDLLAADVGDSEFAAMLEMHNPDKGSKAMAFIPLRARLFLNSLVDCKTAGAILGDGSCASESGEAKESELKLSDRLIQLLDTLQPAKFHWQWVELRFLLDEQALLEKVAAGNTSVAEAIQSLSPNAESFALSDSEKGFTEIILSRLLARPDAAPLYSELVHLLGKLQESLVVDVKWLLQGQDALLGRKSTRQQLVHIAQRKGLSTKTQVWKPWGWASLLSDVIASKSTKRKLEVTSIEEGEVVDDSADAKRPSKANPHNVDRSFEGIRSINKYLTEKALSELMLPCIDRSSAEFRSIFAGDLVKQMGTISEHIKAIARNGTKQSGLVPSGTEAASNKSSSRKGIRGGSPNIGRRAPVGNDPTPPSASALRATVWLRLQFIIRLLPLIMADRSMRHTLASAILGLLSARIIYEDADLPLPPTNTTVLRRDVDSLLEPPLDVLLDRPGESLFERLICVFHALLGNGKPSWLKSKSVSKSTTRTPRDFPAFDSEAAEGLQSALDHLEMPGIIRRRIQAAMPVLPPSRHPCISCQPPQLSLAALSPLQSGTSTSGPQQKGNSTSWVPTNVSIRNKAAFATQDPEMEVDPWTLLEDGTSCPSMSSGSNSSSGMAGDHGNLKACSWLKGAVRVRRTELTYIGSLDDDS

SEQ ID NO: 198469 - protein, 146 aa, Oryza sativa
  unsure (1)..(146): unsure at all Xaa locations
  Clone ID: PAT_MRT4530_94125C.1.pep
IGKPLNQRPXYQILGIFLXVQVCILGAERLPRSNLSTIASSINQISSGGYPSSTRPGVPVLNEDGNIISDIRHGKTADLATSSEASSGKSKCTLCLSTRQNPTATTCGHVFCWSCIMEWCNEKPECPLCRTPITHSSLICIYHSDF

SEQ ID NO: 198470 - protein, 132 aa, Oryza sativa
  unsure (1)..(132): unsure at all Xaa locations
  Clone ID: PAT_MRT4530_94126C.1.pep
QLDDHSESDSSSIGXAAQPSPIRNSPSRSLSFSHLSRLRGRVHTLWEWVLRKWPXGLYYHLPKRAAGIRYVFIGKPMIQRPRYQILGIFLLIQLCILGAERLRRSNLSTIASSINQISSGSYPSSRGGTFFF

SEQ ID NO: 198471 - protein, 64 aa, Oryza sativa
  Clone ID: PAT_MRT4530_94127C.1.pep
TSAAVHLHRPRLSQERKTQLETEHEYVRVRPLRAAGNSGRPYQNDSASTRCAFSCFFIHIILQW

SEQ ID NO: 198472 - protein, 35 aa, Oryza sativa
  Clone ID: PAT_MRT4530_94128C.1.pep
MEGTPNDTMIGRVIPTSTPPVTEVTWGHGHPFNRM

SEQ ID NO: 198473 - protein, 246 aa, Oryza sativa
  unsure (1)..(246): unsure at all Xaa locations
  Clone ID: PAT_MRT4530_94129C.1.pep
MMDVGANHDDGINVTAQSKKSLTVRSEFTTIVLKILCAGXFFWHCKPPKGRSCLRELHMAHRIYTWANNLDVPTFEKLNRILVSTKWEEKYPLSLXRDISDHTSFLLNSSSNFNPNLKFILVACYERGFFDMIKEVWSSVHVGNSPMERWQVKFHKLRQRLRGWPKILVDLIKDXKKELLDKFDILDKKEEVTLLSQEELYINQFMNNRLAILLGEEEIKLYXRAKVKDLLEGXSNMKYFQLVANS

SEQ ID NO: 198474 - protein, 911 aa, Oryza sativa
  Clone ID: PAT_MRT4530_9412C.1.pep
MASASSGAINSLLSKLAALMGEEYGKLRGVRKEVASLEDELRSMRALLEKLAAMDELDGQAKEWRDQVREMSYDIEDCIDDFLHQLDKNNGSNGFVHKTVKFLKEIRARHQIGNSIQEIKNLVKEVSERRMRYKIDEYTPNSRHVPVDPRVVAIYSEAAGLVGIDAPRDELLKLLMGEEQGLKVASIVGFGGVGKTTLAKEVYRKLERKFDCGAFVSVSQKPDIPKLLNRILLEVRGQCSVHNTNLDGILNDIINSLRDKRYFIVVDDLWDSFEWNIIRCAFPENKYGSRVLTTTRILSVATTCCSNSQAYIYKMKSLTDQNSRNLFYSRIFGSHEAFPNKFEEVTTNILKKCDGLPLAIISIASLLSGQPYITWEYVNNSMRSMFEGNPTLGGMRQILELSYNNLPHHLKTCLLYVSMYPEDYIIKKNDLVRQWIAEGFVSKISGLDVDDVAGSYFNELINRSMVQPIYTDYNDEVLSCRIHDIMLEIIRSKSAEENFFSVIDDRTVAPGLHTKIRRVSFHYADEEDGVIPASNNRSLSQVRSAAFFKNSFRPSSLEFKYVRVLLLEFPRRWRGKRVDLTGICGFSLLRYLKISHDVKLVLPSQLGGMWHLETIELHTSEELSIPSDIVSLPHLSQLFIPANTVLPNGIGDLKSLRNLEWFDLIKNSMSNIECLGELTNLRDLKLDCSSSEPLEDVTSRIEALRCSLERLSRSSGSLRNIVLLKHFPSWLQVDGLSTLSPPPRHLWKLHLERCLFSRIPSWIVQLRDLHSLKLTIRKALPMDDGVTILACLPSLVHLDLRLLVCPEERVIFSGTGMAFRALKHLLFRCHKPFLDFKACSMPSGTCLPVGIDHLPACLREIHINRDYGADRRDIETAKSALSSLFATHHPGAGLIFGGAPWNYPSNDPDQW

SEQ ID NO: 198475 - protein, 555 aa, Oryza sativa
  Clone ID: PAT_MRT4530_94130C.1.pep
MRVLVAVFVSPSLHIYEHLMGDIWSAHLLVSFPVLFNCSTFWYVASLAYRPSLATDQSLDIERANVHVAYQGSPGTAIEEMVFKAFPDCIAVPCKKFVAAFEAVDSSLADIVVLPIENSSTGSFHQNYDLLLRHKLHIVQEVQVEIELCLWALPGVQKNDLRTIFSHPEEFAQCEHSLSSLRVIKKNVDHCAAGAEIISMQNLGDAGVIGNAQAAELYGLNIVECNFQDASPNLTRYLVLAKTADIPKEYGQYKTSIVFGLEEGPGILFKALSAFWMRDINLSKNSAAPTSTSGKLSSVRYAGNLVSLTISTPLDPLTLTMPRSKLIATSTVGSSAQSPTKSSTAQDLWIAINNLFQAKKEPCAIFLHHEFHPMTQGDHSISDYCQSMKTTVDALRIVGHPVTESQLVSISCVASILASPAPWTTAPVLPSLASTRNTLVLKELRIANEVKVQSETALIAANATTFACALGSCPSDSGRGQQQNHNGGGNKHKNGGRNNNRNSTSGRNGGGGNGGHPGEQNNDGSGFSNSGISFTTPRLAGSWVCFSPWAGQQPA

SEQ ID NO: 198476 - protein, 351 aa, Oryza sativa
  Clone ID: PAT_MRT4530_94131C.1.pep
MGGDKENLDLSDLNASLPAAAAALSAEDRAGLVNALKDKLQSLAGQHTDVLEALSPNVRKRVEYLREIQGQHDEIELKFFEERAALEAKYQKLYEPLYTKRYNIVNRKLLRCYGWQCNKSCLLYFVDAVFCVELPRKLLVGCARVSFRCLVYVTRGFIGGSCEACLGTSILEYYYVLVICNRFIKRKQLGLKIEWYPGKNLTQKILKKKPKKGSKNAKPITKTEVCESFFNFFSPPQVPDDDEDIDEDTADELQGQMEHDYDIGTTIRDKIIPHAVSWFTGEAVQAEDFDDMEDDEEDDEDDDEDEEEEEEDEDEDEDDEEEKSKPKKKSAGKPKYFALNCPGNYWLVVHG

SEQ ID NO: 198477 - protein, 69 aa, Oryza sativa
  Clone ID: PAT_MRT4530_94132C.1.pep
EDFDDMEDDEEDDEDDDEDEEEEEEDEDEDEDDEEEKSKPKKKSAGKPKLPSKGGAQGGADQPADCKQQ

SEQ ID NO: 198478 - protein, 277 aa, Oryza sativa
  Clone ID: PAT_MRT4530_94133C.1.pep
MWWPCWAPHTPPPTATGHGERNFRRGTARTAGAGARREGDAAQVQARRRRWKLVERRGDDEERRALARRFPRRARGVARERLCGWAPRAPRGQELEGTGPGASAAGAGRLSFLLFYLRVLTTTTITKPCQKPPDAQVQHHPAVPLPYLIKACTALHQPASGPTAAVLSVASLNADTSPRRPLLHLQKHALLSTPAPACIAVLDPTSRDHPSPVCLSHAEKAALDLQGAVSSRVKRSLKRKPPMVEESDDDLRGTSQTIDPIRSDASPALGLARVSVR

SEQ ID NO: 198479 - protein, 411 aa, Oryza sativa
  Clone ID: PAT_MRT4530_94134C.1.pep
MAVAAEGEEMTPEHEEEVIIVGAGQSGLAAAACLSVRGVASCLVLERDDCVASLWRHRAYDRLRLHLPKRHCALPRAPHAAAAPDYLPRDDFAAYLDAYASRFGVRTRLRREVRSARHDAARARWLVEAVDLATGKAERYAARHLVAAAGENDERVVPEVPGMDTFPGKVVHSADYRSAGAFKGRSVLVVGCGNSGFEIAYDLAAGGAAAVSIAVRGEVHLVSREVWSVGMALQRYLPTWAVDKVVLLMCAVVFGGDTARYGLRRPAVGPFSMKMTTPAYPVFDVGTFAKIRSGEIRVVPAGIKSVRGGDVEFADGRRHAFDAIVFATGYRSTTKQWLKSDDGLIGDDGMAGRSYPDHWKGENGLYCAGMVRRGIYGSGEDAELIADDISKQMKRWSSEPVYNGHISNGSP

SEQ ID NO: 198480 - protein, 245 aa, Oryza sativa
  Clone ID: PAT_MRT4530_94135C.1.pep
MAMHAHSILLGFGSDRFVQTALGVLYSKCGQLPVARKLFDAIRYRSVVAWNAMISGEMQVAQVVPDSATFVATLYSPKFDSLLVAGPRKLAHARLIVASHGSLLPLVTKLATLTVAAGAVHYAHLLAASHHACDFFFLSLLTCAAAHRNLPGASIAAGRFVEVVGASGGELGGDGVADDAAAAAAAHLAERAAGAPHRPPPLLSASLRRSRSEREKGEKRGRRNVLRWHPDMWGPRGSYADSAAT

SEQ ID NO: 198481 - protein, 584 aa, Oryza sativa
  Clone ID: PAT_MRT4530_94136C.1.pep
MAAVVAAAAACLSPVCAAAASVPRARVCFVSPPGSWSCLAASNGRGLLRGGNGMRLRWRAPVRAKVDEDKEAGLGFREPERRRMRLRLRPRLRLLWWRLRRLSPRDLPGDAAAALRRAARRVPPAAAAPIVLAVLLLAARLALPKNAAKEVAYSDLLAGLRAGAVTAVAFEEDSRRIYFRRAADDGGGSDDAGAGAGEARRGAAAAARWPCYARRVPHDEGFLLGLMRDGGVDYRSAPRPAGRLLVDMLSTLLTLWVSLLPMMWFIQRQMSAGGGAEKRRRPRKQRVGFDDVQGVDEAKEELVEISRLIIEVVSCLHGSLNYKKLGAKLPRGVLLVGPPGTGKTLLARAVAGEAGIPFFSVSASEFVEVFVGRGAARVRDLFKEAKEAAPSIIFIDELDAVGGSRGRSFNDERDQTLNQLLTEMDGFDSDMKVIVMAATNRPKALDPALCRPGRFSRKVLVGVPDLEGRRNILAVHLRDVPLEEDPEIICDLVASLTPGLVGADLANIVNEAALLAARRGGNTVAREDIMDAIEREKYGVNGRQENADSERQGLTKLFPWLPKPGNRPTNPDDIGGVMGYHTLS

SEQ ID NO: 198482 - protein, 45 aa, Oryza sativa
  Clone ID: PAT_MRT4530_94137C.1.pep
LAAFLLDGLISHEHGHESLGAPPQAGTMAWYSLVLMTSLLFPLLV

SEQ ID NO: 198483 - protein, 1016 aa, Oryza sativa
  unsure (1)..(1016): unsure at all Xaa locations
  Clone ID: PAT_MRT4530_94138C.1.pep
MVKLADVAAAEDQPIPEVIQQVIHKYQEIFEEPKGLPPRRNCDHKIPLMEGAQPVNIRPYRYNPELKTEIEKQVQEMLVSGVIQPSQSAWSSPALLVRKKDGSWRLCVDYRHLNALTIKSKYHVPIIEELLDELYGSKWFTKLDLRAGYHQVRMSPGEEPKTAFQTHYGHFEYKVMSFGFTGAPATFQAAMNKTLASVLRRCALVFFDDILIYSPDLKTHVAHVSQVLQLLKQDQWQVKLSKCSFAQQQVSYLGHVIGVQGVATDPGKINDVVNWAVPTTIKKLRGFLGLAGYYRKFVRNFGVLCKPLTQLLRKGVSYKWTEETQEAFLAIKQALVSAPVLALPDFSKTFTVETDASDYGIGVVPSQEGHPVAYLSKALGPRSRGLSTYEKECMVVLLAVERWRPYLQHQEFVILTDHHSLVYLSDQRLHTPWQQRAFTKLLGLQYKICYRKGSTKSAANALSRKENDEEVQLLAISVGVPVWIQEVIKGYVSDPFSSQLLTELTVNREARNHFSLQDGLLRYKGRVWVGNNSDLRSKLMEEMHSQPLGGHSGFPVTYRRLKHLFAWQGMKQQVKQYVXNCQICIQAKPERVKYPRLLQPLHVPEGAWQVISMDFIEGLPTSERYNCIMVVVDKFSKFAHFLPLSHPYTAASVADIFMRNIYKLHGMPKVIISNRDRIFTSHFWDYLFTKAGTKLHMSSSYHPQSDGQTERVNQCLEIFLRCFIHSVPRKWATWLYLAEFWYNTSYHSVVHKTPFEVTYGYQPTHFGVSMEDCSVPDLAEWMRDRRSMHQLIQQHLNRAQQQMKAYADKNRSFREFTVGDWVYLKIQPYVQSLVAKRANHKLAFRYFGPFQILQKVGTIAYKLDLPEDCLFHPVVHVSQLKAAKGFTPSVHHTLPSELGKLQVPMAFLDYRLFKKGNSVLSQVLTQWSGGAAEDATWEDQEDLRARFPHAPAWGQAGSQGRENVRAPDDQLVDEGDGGNNLEEEEQSEGGQEKGVTLKAKRNRVANTKYSGPEWLV

SEQ ID NO: 198484 - protein, 164 aa, Oryza sativa
  Clone ID: PAT_MRT4530_94139C.1.pep
MAISKLQLALLAAAMAAAAISPTASGAYTGCATPRKVTIQNLSGRDLPLSETPLANSGALFGAGYVLRHGTHAEFTTCLWTGRVAAPGAAVVEFHVGPDGGAWYQVDNRQAGSPVKVTVTPHGRPLQGHCPAAGCRGGGQCFADAVPGGNCHAVDELKIIYYSP

SEQ ID NO: 198485 - protein, 59 aa, Oryza sativa
  unsure (1)..(59): unsure at all Xaa locations
  Clone ID: PAT_MRT4530_9413C.1.pep
KCVCLSSSLLTVHLILGSKAEEPSASGDPLASKSGAVLMVCRTCGKXGDHWTSKCPYKD

SEQ ID NO: 198486 - protein, 127 aa, Oryza sativa
  Clone ID: PAT_MRT4530_94140C.1.pep
MIVRVSQGHGCIDHKLKCNLIEPAQVVSGNRAGNQKGCRISKTMRRFVLTEIMGRRIHGQCAQCLQPPAATILYPGTVRSGGQNLGLLQSLYGYRYAFVTVPQGQPSHGLGHQPNTPKFKASGIITV

SEQ ID NO: 198487 - protein, 89 aa, Oryza sativa
  Clone ID: PAT_MRT4530_94141C.1.pep
MAATIVFVKARQIFYSRGNPTVQVHVCCSHGTFARAAVPSGASTGVYEALELRDGGSDYLGKGGSKAGDNGNSVIGPALIGKDPTSQAG

SEQ ID NO: 198488 - protein, 66 aa, Oryza sativa
  Clone ID: PAT_MRT4530_94142C.1.pep
SVIVLILKRYENMTGFDRGTNGTSGTINQWRKNRSILKRISTHNACHAHIRDKTSNAGTDDESFRR

SEQ ID NO: 198489 - protein, 84 aa, Oryza sativa
  Clone ID: PAT_MRT4530_94143C.1.pep
LLRPRTGVNLHRLLKIAKWCSPRCTSTTPSSPAGRSSTTSIMFSSSSSSSNSLLLPPPEDHANPSSVLATARLGVGSGKGEENH

SEQ ID NO: 198490 - protein, 79 aa, Oryza sativa
  unsure (1)..(79): unsure at all Xaa locations
  Clone ID: PAT_MRT4530_94144C.1.pep
MASTIMASSSIVLAAMTPFVRYPRPSNAALRYIRGCGTGRITMSTGLRFGPXRVKSLGACSAQTPADMRGESPGDYGWD

SEQ ID NO: 198491 - protein, 89 aa, Oryza sativa
  unsure (1)..(89): unsure at all Xaa locations
  Clone ID: PAT_MRT4530_94145C.1.pep
PSRRPPPSTTPVSSXAAGADLHPASRGGAGVLLLPPHHRSPVSILIHPVRPRISVSSPAACAEPPQSGEQRSAPVVLLQSCFRRIVARL

SEQ ID NO: 198492 - protein, 49 aa, Oryza sativa
  Clone ID: PAT_MRT4530_94146C.1.pep
TGGRRGRAGGGRRAWQAGPTWGARRQCAHVRGTGGEQLGQGAPRLGPGG

SEQ ID NO: 198493 - protein, 123 aa, Oryza sativa
  Clone ID: PAT_MRT4530_94147C.1.pep
GWGGWQNSTSTVYTTRERRHSCGDHTSLTPYSQTYADRRLHHLLLPFPGGFSVSRRMTMFFPHLFASKAFPRERFRVLSKQRLCLRVLGWGGGVLFVLAMRPPRDDLSLVLLCCCSLPFGLGL

SEQ ID NO: 198494 - protein, 191 aa, Oryza sativa
  unsure (1)..(191): unsure at all Xaa locations
  Clone ID: PAT_MRT4530_94148C.1.pep
SNPGHLGRGREREREGSGRGERGARAGVVDVAQRRRRRGRGGGCGRGIGRRWGKDPTGGPHLSATPGEEXAGRPGWASASPPFPLDPAEGRVPPPPSPPFPLDPTEGRASPLPTASLPAGREGVAACRLPWLHGEKEEARGREALLRLCPSCDNLGPPQLLAALCVVALHSSSLFLAITGGAPLTVLPPAA

SEQ ID NO: 198495 - protein, 47 aa, Oryza sativa
  Clone ID: PAT_MRT4530_94149C.1.pep
KSLCYLFLARSRWSCIQSTWYKIRLEQQSEESDGEPGMKEEGGGRWS

SEQ ID NO: 198496 - protein, 50 aa, Oryza sativa
  Clone ID: PAT_MRT4530_9414C.1.pep
IHTHERYHSGYHSLRAWAYFVLSGGRIIYALVVQLLEQKHGMRMNDSMDV

SEQ ID NO: 198497 - protein, 197 aa, Oryza sativa
  Clone ID: PAT_MRT4530_94150C.1.pep
MAVPPKNDAEAFDQPDPNDERLPEEKLNTMAVRIAFFYRVMNGCGALAFAWATVVLLGGYATLIKQKDFWFVTIIVFMEATWYVYILIIRSILISSNTRYSAKFIEGLPCRFVTNSLSAGFPTGRLHGTDQDRLPSRASNVLRKVRIQSAGFLRKHNENTFVMLASGCCCAAAATDLSSTEDGTAEIEHDVHPRRQQ

SEQ ID NO: 198498 - protein, 330 aa, Oryza sativa
  Clone ID: PAT_MRT4530_94151C.1.pep
MSACSITSSTTPAPSPPTRPPQPPSLSLLPAYVTKAADDEECEEWQAYEEESETWPRHHHQIHHHLDEKTTGLLRRGDDDMVVVDLAVLEGHGLEEEGDAELLVLRSGEWTVTRAPVAHFVGRADKPPSWITDMAIPVSERRMCWADLYRGIILCDDVFDQNPQLRFVPLPPEALTDETDDGYKRDYAITDRRVCATDGGAALKFIYIISRCCCGLPGTTFCDNSKEAFIIKTWILRMDDDDDMVWTMDAMVDATELWSLHACAGLPQAKPIFPVASMDDPHLICFMVQEREFEGRRRRYCHIKRTWMVMFDTRSKKLLSVCSCRDSWLI

SEQ ID NO: 198499 - protein, 147 aa, Oryza sativa
  Clone ID: PAT_MRT4530_94152C.1.pep
MAAHGAGAGRWERREPLLTAHTLVTSYPKGFIEEMRELEKLRTETMMKSCQSTTSRAGAIRCPVPRKSGRSYKEYDLTQDLSDFIMSKASPPYFTGSPPVRASNPLVHDTQFCAWKLQNVDQSLSIPIPTKGCNVRYCVREGSITKA

SEQ ID NO: 198500 - protein, 70 aa, Oryza sativa
  Clone ID: PAT_MRT4530_94153C.1.pep
MEEVEKDGHYKYRGRMVATAHGGRAWQPAGRAWKEELVSQPQRVWGGDHQPSVEFCGPVATMDVEVVVLW

SEQ ID NO: 198501 - protein, 181 aa, Oryza sativa
  Clone ID: PAT_MRT4530_94154C.1.pep
MEILVSALLLLLVPPLSALLAVAAPSLAWPSGSSSVRKLIAKKVAPEQAARDELLRVARYSSASAAAAASAVQQPGGGESSRPAAAAADDGGRPDQCAVCLSDIEEGDEVRELRCRHLFHRGCLDRWWLSARPPATCPLCRCRLLQSPSAAADDGDGDGEEDSDSDMVMFMAYLRSSSTWL

SEQ ID NO: 198502 - protein, 86 aa, Oryza sativa
  Clone ID: PAT_MRT4530_94155C.1.pep
RAVSFILFFGRPSFFGVFIKKGGYNIMYNPQPTPTYHIVAHWVGPDLLIQIDWTKTDVYLSITNIHLQHTSGKNYKGPCGGENRNC

SEQ ID NO: 198503 - protein, 46 aa, Oryza sativa
  Clone ID: PAT_MRT4530_94156C.1.pep
GDLITPKSVPGFVNSPLWVYLFTAPPFGPPLNNCLPEEINDYSGMI

SEQ ID NO: 198504 - protein, 100 aa, Oryza sativa
  Clone ID: PAT_MRT4530_94157C.1.pep
LCPISSTGQQLGLTRPLKKHISYSSVPPPPLARFSGHRAPINLGLTNRRRHRRRFLAQLRLAGRCPSASVFREEADELIANIRREIIYIYIYLQFDNEVE

SEQ ID NO: 198505 - protein, 122 aa, Oryza sativa
  Clone ID: PAT_MRT4530_94158C.1.pep
MAEGRPPALRRCRFVRCGAPAVTVVDAVATERRSGGGSSGGPSCSFTAESSRRLQDHVHLGCLLPALCLRSHRRDLLLPAAGFATTANYSGHLAGWVAAAATAAAVSRPLPPRQVAVVAWTG

SEQ ID NO: 198506 - protein, 46 aa, Oryza sativa
  Clone ID: PAT_MRT4530_94159C.1.pep
MAVLVRGRPWQGFKDGANKRQSSIRLQGLPPSSAFLASPELCCLDI

SEQ ID NO: 198507 - protein, 49 aa, Oryza sativa
  Clone ID: PAT_MRT4530_9415C.1.pep
MATSGRTHCRAELQWPPRSPAGLTVSPLVMACREKPADSSRFRLPNLRS

SEQ ID NO: 198508 - protein, 579 aa, Oryza sativa
  Clone ID: PAT_MRT4530_94160C.1.pep
MRAFARNLAAIIPLARCNATATTAAAPSSLVLKVGDTLRERRRFTDGEVEAYAAVSGDRNPVHLDDAFARQPGAVYARQSLKFAAPVYVGDKVLVQVQALHIRASTKHMNTILKYHKLKASLVCHCPNWQILIGGFAIFGPLNLSFSMAGATTTSSPLRRMESVCRHLLPASPPILYQNPLGAIRLESSPVIIGGMVLDIHAKPSMQPHPGTTVPGMVKYVSGGVARNIAECICKLETRPFMISVVGNDMAGDFLLKYWRSAGLCTDGILQIDDVTTPIVSNVFDGSGELIAGVASVGAVEKFLSPSWICQFRLHISTAPLLMLDANLSPDSLEAACKIAHESGVPVFFEPVSLAKGSRIAPIAKYITYTSPNEIELVAMANSLSPPEKYTFVKMEQSKNKAKAVEYLFEMLSPAMFFLLEKGIKFLLVTLGSNGVFVCCKESTSLMDQRKSEMMSFSTPLLQKLERCFPSNMLVDLPREGSSRTCVFHFPAVSASVVSLTGAGDCFVGGVISALCGGLGMMQSVAVGIAIAKSSVESEANIPDKFSAATIAGITPCISISHADDARRTLLSAKMMWCK

SEQ ID NO: 198509 - protein, 206 aa, Oryza sativa
  Clone ID: PAT_MRT4530_94161C.1.pep
MGHSGGVEAACRVLPIIDEESESEMDEGSPERKVVDDRRKAIVSRMRELLRRAAAQSSAQSKLRSTVLVSAKKWKRVVVSLQNSRRKQEQQQQQLTTTSRQSDGGMSSSPVSSKSDSFSWDIATAESCSSSPAQSPLWPAALRQFSPSPATKHGMRLRRDSSGSAADDDRMSSMSCSGSPDDDDYGGSSRLCQWITTDSDFVVLEL

SEQ ID NO: 198510 - protein, 211 aa, Oryza sativa
  unsure (1)..(211): unsure at all Xaa locations
  Clone ID: PAT_MRT4530_94162C.1.pep
IATGCVQDVHTNGPVLDETILANPDISDVIENEEVSKXYNAERAVCGQVAXGVIAKKFTGSAXGQSFGCFLTPGILCKLREANDYVGKNLQGMGGGEMVVAPVECTXSTGFVPDFLXEATIAGNACLCXATSEQVFVTGKTGETLLVNQWLXGQGTGDHCCEYMIGGCVVGKSSLFHNVSHFSISHIYIDVNESRYIVGNVRMTYVVKRGK

SEQ ID NO: 198511 - protein, 85 aa, Oryza sativa
  Clone ID: PAT_MRT4530_94163C.1.pep
VRDSLHAQSIEAIAQIMQPMGASNCAGGLLFFCLFIFYFWPYGLLMARNTYMRCLFLKLQGSTSEDVTLALTPLKVRALLSNTHG

SEQ ID NO: 198512 - protein, 633 aa, Oryza sativa
  unsure (1)..(633): unsure at all Xaa locations
  Clone ID: PAT_MRT4530_94164C.1.pep
TGEYRANNPEMSKLPRKAVHEKKKGDNAYTMYQHLQTVLSMLVMLNPYFDVANPXDPSATSIVELFCTGGIPXSLGAISRXTNEAIAIAMNRTGGXSGEGGEDPIRXSPLADVVDEYSPILAHLKSLQNGDAATSSIKQVGHQNFNSLPKHLIGXKFMDFRALKSVPWKCLHCGTNFECWKYLYFGMEGVEWPQNFSSVAHDGLFQKISXNEDTELIYKLNGCTKHYSLLRMKLXIAAFNXIIYENLYLKYLYFCHTSDYDGGTGARPISLIKHSAGPWELGLSEAHQTLMQNXIVREDGRVDGGFRSCQYVLMASVMGVDEYGFGSVAMXIATGCVQDVHTNGPVLDETILANPDVMFSIPFSVTLTSLVTDLXIVNQSNPSFCYLVSLKPEINFXIDALNCSLKRSVQLYTCILLNDAALFIYSILQISDVIENEEVSKIXYNVERAVCGQVAGVIAKKYADTGFAGQLNITFTGSAXGQSFGCFLTPGILCKLREANDYVGKGMGGGEMVVAPVECTXSTGFVPXLPDEATIAGNACLCXATSEQVFVTGKTGETLLVNQWLXQGTGDHCCEYMIGGCVVAIGRVRRNVAAGMTGGLAYVQLQSATSVPKKDKPWFPCSTFDRPSYLKKL

SEQ ID NO: 198513 - protein, 56 aa, Oryza sativa
  unsure (1)..(56): unsure at all Xaa locations
  Clone ID: PAT_MRT4530_94165C.1.pep
MADQXTXDQIAEFKEXFSLFDKXGDGXITTKGLGTVMRSXGQNPTXAELXXIDCRW

SEQ ID NO: 198514 - protein, 79 aa, Oryza sativa
  unsure (1)..(79): unsure at all Xaa locations
  Clone ID: PAT_MRT4530_94166C.1.pep
CXTKSQIXESXCDKEKGGLYPLVNAWERALMVNTCHVKIHEVIRKTHRLTRSVYFLVPFLCTRSQEHMFPALLHDKYVF

SEQ ID NO: 198515 - protein, 122 aa, Oryza sativa
  unsure (1)..(122): unsure at all Xaa locations
  Clone ID: PAT_MRT4530_94167C.1.pep
MFTTVIGPYHKVQWRSQDFKVGYSRLSAEALAXAPRGHRPPNRPDRPRLAEWRASATARHGNGLPLRDSTVQLPLPVAASPRRRLGFGNGERREGXAEPGRDGSRRESKRGPSRRVVDKWVN

SEQ ID NO: 198516 - protein, 51 aa, Oryza sativa
  unsure (1)..(51): unsure at all Xaa locations
  Clone ID: PAT_MRT4530_94168C.1.pep
KKKKKKKGXQKKKNQENKKKAKKKKKKKKGGTENKRGQAHKHTKCNTRKIQ

SEQ ID NO: 198517 - protein, 115 aa, Oryza sativa
  unsure (1)..(115): unsure at all Xaa locations
  Clone ID: PAT_MRT4530_94169C.1.pep
MVHLRVYGRSLYTLRKFITKFTSGRVPTRIGLGCHCIVQGPISPSPTXRPPDLXYKRDPRXGPKAXNLIAKTITTAYEARVYKSQVAGXSSRTNSTTISSIIQHTTKSTTRFVKF

SEQ ID NO: 198518 - protein, 85 aa, Oryza sativa
  Clone ID: PAT_MRT4530_9416C.1.pep
MLIVLHRTTEQKRPSENQAREYNIINPLEVLMLESIAHGVLVVAWPHFSDQFLNERLVVDVLGVGVTTPVLLLGDEAMAVTCHPG

SEQ ID NO: 198519 - protein, 107 aa, Oryza sativa
  Clone ID: PAT_MRT4530_94170C.1.pep
MAVRGCVARLRFPPPHEAMTLLFLLSTSYAFVHGARRRNSIDTEPLSRGQSVPTAAAIQFAAFRLGECEGRRGPVVHSGFRRGNGEAERSGRLCRGEARLPVKERRS

SEQ ID NO: 198520 - protein, 166 aa, Oryza sativa
  Clone ID: PAT_MRT4530_94171C.1.pep
SENAMATRKGGRRRDREAVTPTAVAAAVAQERAAREPRISSGRPVQSPKSWRGTKLTNDRPAQHRRAKLTPDRSGLSPVRGTRGPGHCLEFVRKEGEARIKQKVACFFWWGAGIPLRAQGAAAAASFRAHGDLMAPWHKRRADICGRRYRPLPSNGPPVRPAAALL

SEQ ID NO: 198521 - protein, 326 aa, Oryza sativa
  unsure (1)..(326): unsure at all Xaa locations
  Clone ID: PAT_MRT4530_94172C.1.pep
SSTPERVDGDLDVALGVVAPVAERVGAVHALAPDAVAVVDGRRVEVFVEEEVLDIVVVVVAXTWTAATVCLVPMTVMQRRSQAVTRLRQRWCVARWWTSRHWLRPLEIGLGFVGWSGGGDLPRVLXAVPSSTSLYMAQGDGGPPAIGLGAPNQGAGAHTGLTPVVHWALGLHHSECLQVVEIVCLAXYHLLVQNRETLVQPGDSNHTCVIGNLDSMISLIFRSVTXNLVPQLKTHQAHAMMIPLYTLQNTLNPFHTPEIYPISYVHPKDKFVIFIEIRQSTDERDMDGIKIKFYRYRSDMINRSIVRPIQXLRFLEREVSLRTCTW

SEQ ID NO: 198522 - protein, 75 aa, Oryza sativa
  Clone ID: PAT_MRT4530_94173C.1.pep
NSPNSVAVAMDRDAGGGGDPGTGGPAEFPGEAKITLGPDFLLLPAGPLPAGGKKSKRYGFQQRILFQEDQRESKP

SEQ ID NO: 198523 - protein, 288 aa, Oryza sativa
  unsure (1)..(288): unsure at all Xaa locations
  Clone ID: PAT_MRT4530_94174C.1.pep
CSNLFSVSAPKPTFKHIPKNGMLTFETAQXEGILKKLSEFNATLSSNLEQKELSLSEIELSRLAAIAKVLKETSFYHTSKLADADMTLLLKMLKSWPTQMMFPVIDFLRMFVLHPDGATLLLKAIESGNDVLAETFHKVVTPPVQPPNVLTTLKAVTNLFDKPCLHQWLRIHGMEIIDSVSSCKTTFSKNAHLAYSTLLLNYAVLSIESKDEQSQAQILSAALEIAEDDTQVADSKYRALVAIGSLMLNGLVKSIALDLDVKSVANTARASKDSKIAEVGADIELLTR

SEQ ID NO: 198524 - protein, 273 aa, Oryza sativa
  unsure (1)..(273): unsure at all Xaa locations
  Clone ID: PAT_MRT4530_94175C.1.pep
MGAREVRRKGFGCAWLRSGAPATRAGGRRKKGRPRWTADGGRVHRSKRNGFGLRGAHRSDEGVEKERANGSDSQEGVRRWWNSTAAAGGERKGKSPRGDEDSIKGDWSISGVQGTHFRGRMGLSGAVEVRRREAASGGXGEQEGGTTEPGRRGDEQPTARKRALRRRAGEGEEDGRPESRVTRPRTHWLPRXWGMSVLGGRKPTSWAVKEGRSRRTWRQGVXEKGGRREDSASGSWTHAAWNGRARVAGGCGAERRRRGRAAWAAAWRRLPGL

SEQ ID NO: 198525 - protein, 419 aa, Oryza sativa
  unsure (1)..(419): unsure at all Xaa locations
  Clone ID: PAT_MRT4530_94176C.1.pep
MSGFEGFTNLFPKFSTNNGGKGFINPLDKKRKEGWDLDFFGRLGYGPRDKHGAAEPMGRARARGGGPWPGKARPKRAGRAGGERGMGPRVSDSAHGGXGFMRRRALGFCGRGSRRGARVDQEVEGPRAASWRTVDRAREGGGGRRRLTGSARSKPRWRRRGAFVAATLAGGGKKKEAGREEEEGGAAEWTADGGRVHRSKRDGFGLRGAHRSDEGIEKERANGSDSPEEVRRRWNSTAAAGGERKGKSPRGDEDSIKGGGSISGVQGTHFRGRMGLSGAVEVRRREAASGGGRQWRWGHAGWRRSLGRRLRAFGRVTELPRKLEGTRVSREGELEGGTTEPGRRGDEQPTARKRVLRRRAGEGEEDGRPESRVTRPRTHRLPRCSATDDGGASRAEATLARWRRERKRERLGDGAPRVL

SEQ ID NO: 198526 - protein, 131 aa, Oryza sativa
  unsure (1)..(131): unsure at all Xaa locations
  Clone ID: PAT_MRT4530_94177C.1.pep
MARVVAAAAGGKGGAGKKKGSVTFDIDCAKPDDDTDRGDRXLEKLLQERIMVDGGIAVTLSEYVTVSRDKTKVTVASDSPFFKEDLECLTNKYLKKHNGRDWLLVIASNXDRIVYELRDLNISENEGEEED

SEQ ID NO: 198527 - protein, 135 aa, Oryza sativa
  Clone ID: PAT_MRT4530_94178C.1.pep
LVDPRAAGSLMILLGSRLALPRHCAKRHLEGHGVGLRRDLVPVLLCLSRQRPCKDLPGRLLLRTSSLTSASSCSAMAASRRTDQLPASVATRRRIFVGEAVLGHCRPSMTPSAASVEVELKAKQSIVDATIFSPT

SEQ ID NO: 198528 - protein, 72 aa, Oryza sativa
  Clone ID: PAT_MRT4530_94179C.1.pep
MSESKDVPGGAAGWPLALAPKGADTLGREPQQQYTQQVDTDRGGSPRGGGGLGVQKAEEDSDDGSNPMGAKA

SEQ ID NO: 198529 - protein, 97 aa, Oryza sativa
  unsure (1)..(97): unsure at all Xaa locations
  Clone ID: PAT_MRT4530_9417C.1.pep
MSDVVPGATVGDMGPGGQPGGLGVPHHAPRAPALTRPEALAQLPFGSDQSVTGLSSVTSDWTGGRAPTSPLYPAEXGLSPVSGGGRHRVTLKGGPLF

SEQ ID NO: 198530 - protein, 504 aa, Oryza sativa
  Clone ID: PAT_MRT4530_94180C.1.pep
MELLPPHQAVVMALLLLHQATAVTLLPSVHEPPPWSRRGGRSFSSPPYYLLLENSSKQKRDQGIKGFLYRSLEERSFLSAGIQGIAGVLFSCAKSVTSMRRVRVSSHQSPVHKLGDSQMKLTPKFRLATTSALPSSMPASDLEQASWETPLIPGLPDDAALNCLLRLPVETHEACRLVCRRWHHLLADKARFFMQRKVMGFRSPLLFTLAFHRCTGKIQWKVLDLNYLTWHTIPAMPCRDRACPRGFGCVAIPSDGTLLVCGGLVSDMDCPLHLVLKYDVYKNRWTVMTRMLAARSFFAGGVIDGRVYVAGGYSTDQFELNSAEVLDPVKGVWQPVASMGMNMASSDSAVISGRLYVTEGCAWPFFSSPRGQVYDPKIDRWEVMPVGMREGWTGLSVVIDKHLFVISEYERMKVKVYDPETDSWDSVKGPPMPERIMKPFSVSCLENKIVVVGRGLHVAIGHVKKQPGSHPDSRSSSYLIQWQDVDVPREFGDLTPSNSQILYA

SEQ ID NO: 198531 - protein, 71 aa, Oryza sativa
  Clone ID: PAT_MRT4530_94181C.1.pep
NKVYIYNNVSSIYCIFLLLSSHTPLYMYISISITWYHTPRFTDTWAIPLSAKHTDARFFSLKNTLFHPSQK

SEQ ID NO: 198532 - protein, 108 aa, Oryza sativa
  Clone ID: PAT_MRT4530_94182C.1.pep
SVPPLFIPACMHLPSLTHHGLADVAADDDRLQIRKTRQIFVTLDGGTLGFSSVTSAWPAAVFVGIGTNWRANAEGSRACCWLLRTSRIARLNSKYLAEGEPIFACVVN

SEQ ID NO: 198533 - protein, 80 aa, Oryza sativa
  unsure (1)..(80): unsure at all Xaa locations
  Clone ID: PAT_MRT4530_94183C.1.pep
MERVLLRQRLGLYHIVRGPISPSPTWRSTDPRYKRDPXAGPKASNLTANTPTTAYEAGAHRSQVAGRSSWTYSTTVSSVS

SEQ ID NO: 198534 - protein, 829 aa, Oryza sativa
  Clone ID: PAT_MRT4530_94184C.1.pep
VGGEADGFVAYLPHDEVVAAGLGGPDAQESQAVVDLLNDALAALLRAKPREFWRQVAQNTSLHEFLDSYLQFRHRWYDLPHRAPKGTVAGLVVGELELCRRVFMVLYRISSNKDPGAFRGESLSMKEHAALLQEKRLLDLPKLLDICAIYGHDNCKLTSSLVENAINVQPNILDGINIVLPQFLGIFHTMQERCMKSLQVLDFVNDAIVTLDAFVDAYQPAALLFCTSFETSYGVEELLNTLPRLYDSLLPSLLHGFQVMSSSQSNGETASDIILSDIVLGIRMLSRRTVSFGWRLLEFCYLNNQLVERDVEACTKMFPAKVEDPMIRGDIIIQTLKDINREATFSQDHPGKTFLQALEKEFKLMNRIGDIRKKGWIHMDDEQFQFIARLCGSTLTSWNSVPDLPVSSYGGELQHKNEDTAITESKITQIRDLFPDYGKGFLAACLEAYNQNPEEVIQRILDGTLHQDLLALDTSLEEMPQLKPAATVGKDKGKGILVETEPQIMNKPHKVNTEMHRYVEHSSSSSVPSASQGPSSSVPSVPQGRFTRKTNDDVPDSATLDSQKAKDAVRSAVLESQYEYDDEYDDSFDDLGFSVVESSYEETDGANDAESSSQGPRWSSQKKTQFYVKDGKNYSYKVAGSVAVSSAREAAVLRNVQKDTIHGLGRGGNVPLGVPNRQQHRDMEEEEGSNANNFGRGGSNIGRGGSYPRGDHGRRGGRDHGDPPPEGENPNGPPGFGRGGRRGGRNHGNQPEANENPNGQRGFGRGATRGGRNHDHPAEDHEDPDAAQGFARGGPAPRGGRGGRRGGGRDNHHRRDRAMKKHMQGLTGL

SEQ ID NO: 198535 - protein, 493 aa, Oryza sativa
  Clone ID: PAT_MRT4530_94185C.1.pep
PHDEVVAAGLGGPDAQESQAVVDLLNDALAALLRDKPREFWRQVAQNTSLHEFLDSYLQFRHRWYDLPHRAPKGTVAGLVVGELELCRRVFMVLYRISSNKDPGAFRGESLSMKEHAALLQEKRLLDLPKLLDICAIYGHDNCKLTSSLVLDFVNDAIVTLDAFVDAYQPAALLFCTSFETSYGVEELLNTLPRLYDSFVPSLLHGFQVMSSSQSNGETASDIILSDIVLGIRMLSRRTRSHIFTRSSWKTFLQALEKEFKLMNRIGDIRKKGWIHMDDEQFQFIARLCGSTLTSWNSVPDLPVSSYGGELQHKNEDTAITESKITQIRDLFPDYGKGFLAACLEAYNQNPEEVIQRILDGTLHQDLLALDTSLEEMPQLKPAATVGKDKGKGILVETEPQIMNKPHKVNTEMHRYVEHSSSSSVPSASQGPSSSVPSVPQGRFTRKTNDDVPDSATLDSQKAKDAVRSAVLESQYEYDDEYDDSFDDLGFSV

SEQ ID NO: 198536 - protein, 104 aa, Oryza sativa
  Clone ID: PAT_MRT4530_94186C.1.pep
FFFFFFYEGNNIWEIYHSRRGNWANYSVVPKIFWDRHKRNQRVFHPEFGTSPTIPHRGIPWYPMGSNHNKQGLNNPPWCGDWVEDPQAWELLSIQLNQRLDFGY

SEQ ID NO: 198537 - protein, 81 aa, Oryza sativa
  Clone ID: PAT_MRT4530_94187C.1.pep
TCTETHYTITGDITTLDLRETTASSNKRRDRLYYCYSQLTSLYECASRRICTTLTYIGQDETYLKPTDTLQHWRPYRALED

SEQ ID NO: 198538 - protein, 447 aa, Oryza sativa
  unsure (1)..(447): unsure at all Xaa locations
  Clone ID: PAT_MRT4530_94188C.1.pep
FETNTFIFMTSCSNVSSASKKSSLSSPATGHGGAKARAGXRGGDRSAKPRCLGAGAFVAYLPHDEVVAAGLGGPDAQESQAVVDLLNDALAALLRAKPREFWRQVAQNTSLHEFLDSYLQFRHRWYDLPHRAPKGTVAGLVVGELELCRRVFMVLYRISSNKDPGAFRGESLSMKEHAGETLLQEKRLLDLPKLLDICAIYGHDNCKLTSSLVENAINVQPNILDGINIVLPQFLGIFHTMQERCMKSLQVILSAVLSSDFSILLXSNFLQVLDFVNDAIVTLDAFVDAYQPAALLFCTSFETSCAAAHPPHSLPRLYDSLLPSLLHGFQVMSSSQSNGETASDIILSDIVLGIRMLSRRTVSFGWRLLEFCYLNNQLVERDVEACTKMFPAKVEDPMIRGDIIIQTLKDINREATFSQDHPGKTFLQALEKEFKLMNRIGDIRKKG

SEQ ID NO: 198539 - protein, 563 aa, Oryza sativa
  Clone ID: PAT_MRT4530_94189C.1.pep
MASGPPSSPSSKAFSRKSHAHASGPNSSKAAAAGGGGGGVAAAFDAHNGTHVRTVTFSLSSSPAARRELRRRLTAELAQVRATCKRLSSLPAPAPSSALSATDPSTPLPPHPPVSKHKSKKGNPSSNPGLSAEARRKLYAPVFKSCGALLARLMKHKHSWVFNTPVDASALGLHDYHTIITKPMDLGTVKSRLAAGHYKSPREFAGDVRLTFQNAMRYNPKGQDVHFMAEQLLNMFEEKWPEIEAEVAQLSPQPPTPSSAAPRKPKEIDNSKVLERSDSTVHAAGMEATPKQNTGRPPVLKKPKAREPNKREMTFWEKQRLSNNLQELPPEKLDNVVQIIKKRNLSLSQHDDEIEVDIDSFDVETLWELDRFVTNYKKSISKNKRKAENPVAGQDEMNHDIELEKTEHARLDEVEQDQMPPVQETLHNPEPESIDIEPPKENTADDNERYVGSSSPVHLEDQKGENAGRSSSSGSSSSDSGSSSSGKCSHPLQKFILAAFLFAINSIKDIFIYICITYEIYREKHMQIQTQIVHQQMALMLHSHPERNIYRPGDGFGTVYLVF

SEQ ID NO: 198540 - protein, 65 aa, Oryza sativa
  unsure (1)..(65): unsure at all Xaa locations
  Clone ID: PAT_MRT4530_9418C.1.pep
PEYIPDHIHNHSNXRVHVAVHVSLKASETHAAEMTALLLVLSCIDRWNAISITVSVHENSKQNAS

SEQ ID NO: 198541 - protein, 127 aa, Oryza sativa
  Clone ID: PAT_MRT4530_94190C.1.pep
MMPGQHRYQQGLFERELRLLPHEQQQAHVRHRMGLCHGVPGYDELHHCRSVSHHEEGPLRRLRMPEQPSRREGGHQGRHEEPMRDGHPGLDRPSRATRQMEPKGDKKIKAMDTKKHADVNEHPYTTK

SEQ ID NO: 198542 - protein, 84 aa, Oryza sativa
  Clone ID: PAT_MRT4530_94191C.1.pep
GIGLFLTPPKNFPPGKRWGTKEGEKKKLFKGGGFPPFLGDKASPKKSAGLWLPPFFSFSKRKSRDQKIFRRNQPPGGFMLSRPF

SEQ ID NO: 198543 - protein, 59 aa, Oryza sativa
  unsure (1)..(59): unsure at all Xaa locations
  Clone ID: PAT_MRT4530_94192C.1.pep
DNRCLNHLVRNPSPPHYPTLKIYQDSLTSLTWSGLKLISMSARSSGKLTSLLSGWPXXC

SEQ ID NO: 198544 - protein, 123 aa, Oryza sativa
  unsure (1)..(123): unsure at all Xaa locations
  Clone ID: PAT_MRT4530_94193C.1.pep
WRRSARPARRSATAVSTRRRRRSIRCCPRRSRPPPPRSAAATRGAEENTSLLPKQRRRPPPXPSPRTASPTPLPAGCRRPPPPPLPVEPLPAHPAAGGREGVGAVATVRSSGTGAGRWWLEGG

SEQ ID NO: 198545 - protein, 67 aa, Oryza sativa
  unsure (1)..(67): unsure at all Xaa locations
  Clone ID: PAT_MRT4530_94194C.1.pep
SPIGLNVHDRSIPDDLPVLDPSIEQALDEEDIDDDVDQVLKSKQLSLIXPPPPPSPHVQQSSSDRTP

SEQ ID NO: 198546 - protein, 182 aa, Oryza sativa
  unsure (1)..(182): unsure at all Xaa locations
  Clone ID: PAT_MRT4530_94195C.1.pep
HSSGIRRPRNPKQPSRDSSDPPPSLRPLPRHPNSRRPPPPAPAXRAPPPGPHASFLPHPLPSPPPPLPTCPATTVFVQPPPRTXSPIPLSPPSTPPSIDAAPTSGFVAPSPPSYKRPRHLRHPSRPRPPVPHPPSPVTPPPRNHRSRLSSSREPGRIGGTSHPLRCLPSLLSLHCCGWIAGT

SEQ ID NO: 198547 - protein, 155 aa, Oryza sativa
  Clone ID: PAT_MRT4530_94196C.1.pep
MQPKDANLYRDVLVTSLAEFPGLVLAALLVDRIGRKVSLGIMLLLSCAFLAPLAVHLGQGSVTTLLFCARTCIMGGFAVLYVYTPEIYPASSRNTGVGITSSFGRIGSIVSPVVTVSLSENCRQKEAVFFMDLMLFLAAVACALIPLETKGRQIQ

SEQ ID NO: 198548 - protein, 132 aa, Oryza sativa
  unsure (1)..(132): unsure at all Xaa locations
  Clone ID: PAT_MRT4530_94197C.1.pep
AAYQRLAAARAPRRRRRPAATTPGERGMARRLWSSYADREIQQVXKXVLWDMVEPYRPPRSFAPLIGTYVAAFYTGPVASAITEQLYKEKYWEDHPGEAVPLMPPKFYWGPWRVMNGEVPRFMQTPEEAKPA

SEQ ID NO: 198549 - protein, 73 aa, Oryza sativa
  Clone ID: PAT_MRT4530_94198C.1.pep
MGAHSPWSGCRNVRMTEKPGRDESHVLGLGPCVGQVTECGIKGVHPLHCRYDERGYKTECEGKPDLARLGEGG

SEQ ID NO: 198550 - protein, 117 aa, Oryza sativa
  Clone ID: PAT_MRT4530_94199C.1.pep
MARRLWRWYADRQFNRWEKTVLWDMVEPYRPPRSFAPLIGTYVAAFYTGVVASAITEQLYKLLLPDCDRILEQEKYWEDHPGEAVPLMPPKFYWGPWRVMNGEVPRFMQTPEEAKPA

SEQ ID NO: 198551 - protein, 146 aa, Oryza sativa
  Clone ID: PAT_MRT4530_9419C.1.pep
MAMSLSLARVALPPLLQQQGGAPRKLHPGALAFPAKSFFGAPLAAVAVSPASAAAASPLRRRPSSASAVVAAGKGYKMKTHKASAKRFRVTGRGKIVRRRAGKQHLLSKKNTKRRKRLSKMIQVNKSDYNNVTGALPYLKVNRNAE

SEQ ID NO: 198552 - protein, 1205 aa, Oryza sativa
  Clone ID: PAT_MRT4530_941C.1.pep
TPEDSKEEEKIAARFAQIWNLIITSFREEDLIDNREKDLLLVPYCKDRDMDIIQWPPFLLASKIPIALDMAADSEGKDRDLKKRVKSDPYFTYAIKECYASFKNIIYTLVVGAKERDVIQKIFTVVDDHIAQDTLIKELNMSNLPTLSKKFIELLELLQKNNKEDQGQVIILFQDMLEVVTRDIMDEQLSGLLESVHGGNNRRYEGITPLDQQDQLFTKAIDFPVKESHAWTEKIKRLHLLLTVKESAMDVPTNLDARRRISFFANSLFMDMPNEWKHFLQRVDCNTEEELRETEQLEDELRLWASYRGQTLTRTVRGMMYYRQALVLQAFLDMARDEDLREGFRAADLLNDESPLLTQCKAIADMKFTYVVSCQQYGIQKRSGDHRAQDILRLMTTYPSLRVAYIDEVEEPSKDRNKKIEKVYYSALVKAAVTKPDDPGQKLDQMTVWTVYVFLYGRLYLVLSGLDEALATGKRFIHNEPLQVALASQSFVQLGFLMALPMMMEIGLERGFRTALSDFVLMQLQLASVFFTFSLGTKTHYYGTTLLHGGAEYRATGRGFVVFHAKFAENYRLYSRSHFVKGIELLILLIVYEIFGQSYRGAIAYIFITFSMWFMVVTWLFAPFLFNPSGFEWQKIVDDWTDWNKWISNRGGIGVPPEKSWESWWEKEQEPIKYSGKRGIVLEIVLALRFFIYQYGLVYHLNITKHTKSVLVYCLSWVVIFVILLVMKTVSVGRRKFSADFQLVFRLIKGLIFITFISIIIILIAIPHMTVQDIFVCILAFMPTGWGLLLVAQAIKPVIVRIGLWGSIKALARGYEIIMGLLLFTPIAFLAWFPFVSEFQTRMLFNQAFSRAASMDPNQMMGRSFPMWAAADDPSAQPPPFLPPPNRGWKRKNPSTAAGGYQPPALGDLQVQNRAKARRWFKNQSGGGGGGGGPRKHFFPRPKAAAPRNTTSFIIRAKRAGGIASLVSPSPVTPAVLPTPRLSPSREGLSDMAQAQWGVDGYGSMKGLIRLRTSPHPANPSDDDDDANSSGSDVEEHVEVERRLDHDLSRFEMVYPARGDGVFFEEEDDYEYDQEAHVARLEEENLTLKERLFLMEQELGDMRRRLEALESRFAGTDGMPIENSDAVAVDHDKEMAHPILVQRDDLRTEIAADAAGSDKASAQDNAEEVADAAVSEKIVQDNADVVVAGSERTGEEIGVDASEMD

SEQ ID NO: 198553 - protein, 278 aa, Oryza sativa
  Clone ID: PAT_MRT4530_94200C.1.pep
MGSSHAGGEMCMEGGGGGRARRAGGKKAAAAAAAEQQHKVAKQPQRGLGVAQLEKIRLHNQMVAALRSAAGGDAPYSPPPPQPQPFASPPFHLPPLQQDCYEAADHRRIAAGGGVQPYYEGMLPYGSGRLAAASPAFVAYEVKGDHHHGQYGSSEQQRQPQYYSWMSSSYDGYSGGRSSAGSSSEELDLELRLYRDGPRQRAAPSGGGSRRRTEAGGRDEPRRREALGGGRHLACCGGERRPAVAVTPCSSSCSCSSRASACCCVGMGGGWLCEPTIG

SEQ ID NO: 198554 - protein, 247 aa, Oryza sativa
  Clone ID: PAT_MRT4530_94201C.1.pep
MQVNRHQTQTGVKKSQQATAPVGTAGNGKEQQQATESKPPSKNSRSYEEQRQDIERHLNAIREEVLARSFIKTHQGVTRKPGPLPKVVFDKIGSPMAGLTAALTTGQTGLSIAGQADALEPLPAFNPTTNITPMPKTEIVSNPLPIAPIDFDNKKNRSGGSKVKNVKKVWVRKEAKTLEVITIKEEFQDVQVPLGDATKIIHVDKTKADVVTVNIGGLTKASGRSNRQPTAGLTEPSDRGSYNVFEP

SEQ ID NO: 198555 - protein, 27 aa, Oryza sativa
  Clone ID: PAT_MRT4530_94202C.1.pep
CIISVVKCGCMHVWPESSVWLARSRWL

SEQ ID NO: 198556 - protein, 548 aa, Oryza sativa
  Clone ID: PAT_MRT4530_94203C.1.pep
MEHMLKLKEQGLQGEQITRHFINSQLAPIKERSRTVFEFDGKTDPNREDPKSLEFKIMKEKMYKIFSNAIVVCYSHLLPVVPYNTFNPPPSSGSQKRKLILCDDEGDNVGKAGSKEVTGKQPRQANPKKKTSSRPIPKIRKSSRKPFDIDSSGKDPEPTDKETDPTTTTETGLTVENRPTGSQPATDNVEAGNEPPTGNQSAEAEAGANQEPPTGNESGTEQNKDIPETEARASSPPPKNTNTDPESNSSDKVQGPARPQPKIITVFKGPMIGDEEDVLRIQSAEDSRPPILVKWWDDEMQPQGIIINKQKEDEEVSLLAKTLNQATHLVNRIHLRNEAKTTTLEKLVPHLETLEATRAQLHETRELARKTEQDLRDQITELQDSNFELSGSSKVEYITVQAAKITELEKQIKALEKDKGELTKKRDSALKDVEDRKIKSQAQFEVLVNKIKKLEGARDEVANAATPLIQAMFFNNNGPSSFDAVEIFDKLRAAPDTYFKNIKEAGCMGASMALAMTKSLYPKIDIDAVDGFANGTSEEDALDLINNA

SEQ ID NO: 198557 - protein, 184 aa, Oryza sativa
  Clone ID: PAT_MRT4530_94204C.1.pep
MCESGSRVTWEGCSVLLDINDGDRLVFARLSPSAKLKIGNKNCSLQPLIGRPFGTAFQVDGPYLSPAQVNGNNAEELRDVQVSVKSRDKVEDNYPEEERDVQANVDSRDNRELVDNNTAQRLTGEDIEAMRRQGAGGNEIIEALIANSVTFEKKTSFSQEKYRLKKQKKYAPKVLMRRPGARSI

SEQ ID NO: 198558 - protein, 66 aa, Oryza sativa
  unsure (1)..(66): unsure at all Xaa locations
  Clone ID: PAT_MRT4530_94205C.1.pep
SSLAKLSLPITTMLNTLDEVRDATGAGSTIWVVCTRXWTGEEIRRGDLFKKLMLCTARVEMIHTEK

SEQ ID NO: 198559 - protein, 241 aa, Oryza sativa
  Clone ID: PAT_MRT4530_94206C.1.pep
FTIVPLSEWIRTQAHSFAELSCVEAATGNGFGVLGDGGGSDMRGEGGNRRDGVDSSVRGSSVRKRQSQASISLARQWQATVVELPAWRWPVRPWGFRRGEADGNGASGTRSRQSSRVPTRALNMGKPLNHLSKLQVPEAQPYMPHPLVFIGEGNSRWHAIVIIPRASLPSSPNLPASHQVILFRLLTSSTSLGKQLWRDPTVCRLQPSQSSGFTPSLTATDHLASPANVVADRPTHSITPN

SEQ ID NO: 198560 - protein, 497 aa, Oryza sativa
  Clone ID: PAT_MRT4530_94207C.1.pep
MAMQVSKKSRLAAPSALLLLLVVAALLPPPRAEAGHDGAGGDDEPPPTPCSPADRAALLGFKAGVTVDTTGILATWDGGNDCCGAWEGVSCDAATGRVVALQLEAPPLPPPRRSYMEGALSASLGGLEFLETLVIRDMARIGGAIPASLSRLSRLKQLYLEGSMLAGGVPGSVLSGMASLQYLSLAGNRFEGKLPPELGSLPGLVQINLAGNRLSGEVPPSYKNLSRLAYLDLSNNLLSGAIPAFFGQQLKSLAMLDLSNNGFSGEIPASLNLLVGSIPESLFGLQKLWNLNLSRNGLSGSLPPGIRHGLPSLVSMDLSHNHLVGGIDHFFRSISPARRLTKNASSDMSVIFLPRQLQHLDLSKNSITGALPEFGAGASLRWLDVSGNAIGGQIPSSVWRLVGLQRLDISRNKIRGTIPASVASMASLRWLDISGNALVGRIPDSFARMARLRHASFRGNKLCGKIPQARPFNLLPAAAYAGNLCLCGKPLPPCRQI

SEQ ID NO: 198561 - protein, 82 aa, Oryza sativa
  Clone ID: PAT_MRT4530_94208C.1.pep
GKEKSQKLLKLFREQRQRDGAQPVPQQAQQQQQQQQQQAGKTGNGTMVCRRDSKQLCKSKSRKLGRTLSSLWKNRSFSLYQC

SEQ ID NO: 198562 - protein, 534 aa, Oryza sativa
  Clone ID: PAT_MRT4530_94209C.1.pep
MAMQVSKKSRLAAPSALLLLLVVAALLPPPRAEAGHDGAGGDDEPPPTPCSPADRAALLGFKAGVTVDTTGILATWDGGDDCCGAWEGVSCDAATGRVVALQLEAPPLPPPRRSYMEGALSASLGGLEFLETLVIRDMARIGGAIPASLSRLSRLKQLYLEGSMLAGGVPGSVLSGMASLQYLSLAGNRFEGKLPPELGSLPGLVQINLAGNRLSGEVPPSYKNLSRLAYLDLSNNLLSGAIPAFFGQQLKSLAMLDLSNNGFSGEIPASLCGLRNLTDLSLRHNKLTGVIPSQIGSISSLNSLSIDSNLLVGSIPESLFGLQKLWNLNLSRNGLSGSLPPGIRHGLPSLVSMDLSHNHLVGGIDHFFRSISPARRLTKNASSDMSVIFLPRQLQHLDLSKNSITGALPEFGAGASLRWLDVSGNAIGGQIPSSVWRLVGLQRLDISRNKIRGTIPASVASMASLRWLDISGNALVGRIPDSFARMARLRHASFRGNKLCGKIPQARPFNLLPAAAYAGNLCLCGKPLPPCRQI

SEQ ID NO: 198563 - protein, 88 aa, Oryza sativa
  Clone ID: PAT_MRT4530_9420C.1.pep
PPRWVPPWNHFLCWPFFFPPPLPEFPFQINLFRLAPPILPSPCFFFFFYGGACVCSPPPSGNRNFFPPRGGFFVIYPYVVEKTPPVFF

SEQ ID NO: 198564 - protein, 96 aa, Oryza sativa
  Clone ID: PAT_MRT4530_94210C.1.pep
GKKIWELNKGFFFTNPGPNTQCLGPEFTGLALQKGVSPPLGNFFFLPHPGRLDYLHWTKVFKKKGTPRALHKWWGGTKIWNPSVQDVMKSQRALSL

SEQ ID NO: 198565 - protein, 68 aa, Oryza sativa
  Clone ID: PAT_MRT4530_94211C.1.pep
EKRFLQSIPGCRNGENRPIPTFPRPKIIFIITPGPKKFIKIVQESFHLLQNFFKNAPLEGGLARQRRG

SEQ ID NO: 198566 - protein, 118 aa, Oryza sativa
  Clone ID: PAT_MRT4530_94212C.1.pep
IMDTGGTNEADKSYTLNAEGCKRIVPPCEPSSNDIQRTEPRKDILSTEASRKDLQPPNKSIANLVSTSKPRLASNYECRRQLCALAAMSLKVLRRTLGKDESIGGMRVAVLESVFVFF

SEQ ID NO: 198567 - protein, 426 aa, Oryza sativa
  Clone ID: PAT_MRT4530_94213C.1.pep
MAAPLFLLLLLLLVSSASAGYEEEALLRRAEEERDWMVGVRRRIHAHPELAFREHHTSALVRDELERLGLTARAVAGTGVVADVGSGLPPVVALRADMDALPVQELVEWEHKSKVDGVMHACGHDVHTAMLLGAAKLLSERKEQIKGTVRLLFQPAEEGGAGASYMIKDGVLDGVEAIFGMHVDYRMPTGVIAAHAGPTQAAVCFYEAKIEGKTGKAETPHLNVDPIVAASFVILSLHQRIPGLQDPLHSQVLSVTYVKGGNTIDATPPVIEFGGTLRSLTTEGLYRLQKRVKEVVEGQAAVHRCKGVVQIKRDDYPMYPAVFNDEKLHHHVETVGRRLLGPDKVKPGEKIMAGEDFAFYQQLVPGVMFGIGIRNGEVGSVHTVHNPKFFVDEDVIPIGAALHTALAEMYLTERSTEGEDGSQHSH

SEQ ID NO: 198568 - protein, 126 aa, Oryza sativa
  unsure (1)..(126): unsure at all Xaa locations
  Clone ID: PAT_MRT4530_94214C.1.pep
APPYIALDPAFYSLSSGQTSSSVPLRESIANKGASPPRNDIVNEEVDQRQNKPRRXLRDELQSVKHHVRXIASEXAAYGYIFKPLVISCFDLEHFGWLLVLSYVXVINACLCWCHFTADSGVAFVA

SEQ ID NO: 198569 - protein, 59 aa, Oryza sativa
  Clone ID: PAT_MRT4530_94215C.1.pep
SSYDGIFIIAYMDNAASHLIHAGHIDVLYTIHELLISGCKGLTISCHWSYLEVIIEVEK

SEQ ID NO: 198570 - protein, 500 aa, Oryza sativa
  Clone ID: PAT_MRT4530_94216C.1.pep
MKTRSSGRGGGEPRRRLRNAAVMALMLSSLVALSLVRARFSPIASDGGEALKLKADESKLVVTTNHAVVNTESGDSSSSSSSAAAEEEEEVAAPAKPAAAGGGGARPVCYETSRRSDTCEAAGDVRVVGGSQTVYADTLDREWKTKPYCRKHDAFALSHVKEWTLRPLPSGDGGGGGAAVAPRCTTNSTATAFVLSTGGFTGNPFHDYTDVLIPAFITAHRFGGEVQFLVSSYKSWWMNKYIQIFQQMSRHDVVDVDADGDEVRCYRSAVVGPEFHRELGVDPTKTPSGYSVLDFRKMLRGAFGLDRATATPSGDRWDIRRRPRLLIISRRAARGRAFMNERAMADMAASLGFDVRVGEPDASTDTSKFARLVNSCDVMVGVHGAGLTNMVFLPAGAVLVQVVPYGKLEWLARNTFAEPSSAMEIHYLEYAVQLDETTLSEQYPADHPVLRDPMAIHKQGWEALKTTYLDKQNVRPHLGRLKNTFLQALKLLPHDKETMN

SEQ ID NO: 198571 - protein, 163 aa, Oryza sativa
  unsure (1)..(163): unsure at all Xaa locations
  Clone ID: PAT_MRT4530_94217C.1.pep
WRSRRGTVVSGRNRGQAGVEVDASTPEEETTTSAGALARQPERLEAAQWRXRHWTSTRTPKVVATSAGAQARRHRRLEAAGGTGERKKGGGERWCGHGGAREEAKTRERKEEAPFYSGRERSGHGRGGERRRDLGPTAMEGGREWRGCSGRLRARSKGEIRGN

SEQ ID NO: 198572 - protein, 63 aa, Oryza sativa
  Clone ID: PAT_MRT4530_94218C.1.pep
ALRKKRRVGYLSTVALDVLDTFLLRSIYCGGSLSRYRFRRLVHRHYEGHGMWDQRVNNSPPRV

SEQ ID NO: 198573 - protein, 108 aa, Oryza sativa
  unsure (1)..(108): unsure at all Xaa locations
  Clone ID: PAT_MRT4530_94219C.1.pep
MAPKKDKAPPPLFKPAQSGGGPPKKKKWAQGNPKEKVSPSGLFVPAPFAKLLSRGPQYKQFPPPVFFXRLRVTGSLACWAPHFFFPRGLIPRVSVPPSPPFFPRAPPP

SEQ ID NO: 198574 - protein, 225 aa, Oryza sativa
  Clone ID: PAT_MRT4530_9421C.1.pep
MGKYLRSSCKQQQQPSSPAAVASVAAAAVSSYSYLTLRSGRRVPAAAAAAGGSACRRRHRRGGRRGCAKNGAGSARACGARSPTSSASSGQRRRCEAVECSHGGGRAELSRSPPLGNSVVVVSGDVVSGERKSLKPNSCSREVAAEHAGEHKHNPAAAAAAGRRPPLSPPEAEIEAFFAAAELAERRRFAEKYNYDIALDRPLQGRYEWEPTVPNFDVAKDVTDM

SEQ ID NO: 198575 - protein, 189 aa, Oryza sativa
  Clone ID: PAT_MRT4530_94220C.1.pep
MTGFNLPENFKENPEDFFRSVRPRVVVPQKTLPTDKPAIPAPPTFKTMADKTFREFVAPSAENVAIGPQINIGDVDFDLKSSLITMAHASPFYGKPNEDANTHLQQFLEICSTYTIKGVSQEAVRLRLFPFSLLGRAKQWFYANRAAVNIWDKCSTTFLLKFFPIGKTNAHRGRISSFQQTRDESIPEA

SEQ ID NO: 198576 - protein, 51 aa, Oryza sativa
  Clone ID: PAT_MRT4530_94221C.1.pep
TARQRWIILTSSLHMRPAGCRLGSSNLLSCWRPPTTEGTTRLPKARLAPDT

SEQ ID NO: 198577 - protein, 186 aa, Oryza sativa
  Clone ID: PAT_MRT4530_94222C.1.pep
PRVRPFVTELMLAEYLYLQNDDSEKPMYLYINSTGTTKNGEKLGYETEAFAIYDAMRYVKVAIFTLCVGNAWGEAALLLAAGAKGNRAALPSSTIMIKQPIGRFQGQATDVDIARKEIRNVKIEMIKLLSRHIGKSGEEIAQDIKRPKYFSPSEAVDYGIIDKVLYNEKSQEDGGVVSELKRSNLI

SEQ ID NO: 198578 - protein, 173 aa, Oryza sativa
  Clone ID: PAT_MRT4530_94223C.1.pep
FVVVVFLGLINKINTQCPGLCEDANTNICASGFVQGLCPGASNFECCEMSTPNCNGQCQDNSLPCGGIYIAGDCPGPNNVQCCSSSGPTPPPPPPSGSCASFANSQWDCTTPSCSTIVPAGTAQPDYECAEFVSRSLASAGLIPLDPMADQSEFSSFSANGKTYDLLWVSSKN

SEQ ID NO: 198579 - protein, 70 aa, Oryza sativa
  Clone ID: PAT_MRT4530_94224C.1.pep
LNNPWGGVPIKTLEPRPSGRSKTHHAHFFWGAPAIAQPGRIIGRLIRGLLIKVRGELINPGRWPNTGGGP

SEQ ID NO: 198580 - protein, 105 aa, Oryza sativa
  Clone ID: PAT_MRT4530_94225C.1.pep
MRKMQSGRSRKLRVVKAIAFHWNRSEGCEARGQQPRDSGGTRILSCGAMRTGAAAQATRRSADGKRLTHGSTAHKRRWRGAAHSVTSSATRRRRVGRSRRKGNRE

SEQ ID NO: 198581 - protein, 107 aa, Oryza sativa
  Clone ID: PAT_MRT4530_94226C.1.pep
CRRLSAVLLQKKKKKKKKKKKKKKKKKKKKKPKKKKKKKKKKKKKKKKKKKKKKKKKKKKKKKKKGGPLLKNQIFPPGGGNNKIFFWGTKIKFNGRGFKKRGMGKTR

SEQ ID NO: 198582 - protein, 108 aa, Oryza sativa
  Clone ID: PAT_MRT4530_94227C.1.pep
NGPPAPGGESPRGGGNHRGPPPIWGGPPINPGQKKPGPGGAKTRGKTGEKGPPQNLPAFSKTSRGGPAPGKKSLKFFGPRRLYPKKRAPGNPGPQGPGRIPPRGGGNG

SEQ ID NO: 198583 - protein, 209 aa, Oryza sativa
  Clone ID: PAT_MRT4530_94228C.1.pep
MLHSENATVGVLSAGRAVGLEHGLPLPERTSSLLLQSCYFALAGTKLVVNNFNLPFTYIRLLENLLLLIEPIDLVHSLALAKFELVKPKGTMMMVCGPKEALGLMAAKGVHMARYHITMAGIFFFVCTNESGSTTPVSEDLLPIVSFYYDHRIIYKRIDTVVAFTQEYARETPAYSTMIYPNMNDYKGRTWLSPPAAYLYASWCSWYQR

SEQ ID NO: 198584 - protein, 89 aa, Oryza sativa
  Clone ID: PAT_MRT4530_94229C.1.pep
VRGGFNTVGPGVSDGGLNGVYALPESMVAAGSNSSEDTVHGSDYTRRGFFSGDSNRRRDDKIKRVFKDDFEVLGEMSLFDGHRFLRVGH

SEQ ID NO: 198585 - protein, 2127 aa, Oryza sativa
  Clone ID: PAT_MRT4530_9422C.1.pep
MDTDGKLDVLLKLVEGNEKKRVEADECTRAEYQELKKTVESRIPVVEKKVERTVKEEVPQGKVADPKPTTPSGMRDLHLFSSASTFGNNSRKSDQGGEIPMDISANGPPMVCPQFNGDNPQMWKSNCEQYFEVYGTHPINWVKIATLNFVGNAAFWMQSVRSQLQGITWVGLCELRPQDLDSACAIALLQEEALEGVKASHYRRSDPGVMLKTNRTGPIVGVTQHTKNNLNQSEDRRGTESARAKDDKVAALRAYRRSKGLCFVCGERWGKEHKCATTVQLHVVEQLLAVLQPEIDSDSDNIELGTSPEQHGTLLTISQQALWGTESNQSIKVNGWVQGMELIMLIDSGSTHSFVDEQIALKLMGARRLQQPLTVRIADGGVMQCTREIADCRWWMQGQSFCSNFRLLPLGNYDAILGMDWLTMHSPMKVDWVQKWMEFQYLGRDVRIQGITNQPAQCSHITHNQLSGMNRKGSLLYFIQLQNMAIQENSTISDSVKPMLLEFADLFEEPTELPPRRACDHSINLIPGAKPINLRPYRHNPALKDEIERQIAEMLKSGVIQPSQSPFSSPAILVKKKDHTWRLVIDYRKLNAITVKTKYLVPVMEELLDELSGSKWFTKLDLRSGYHQIRMAEGEEHKTAFQTHSGHYEYKVMSFGLTGAPATFLGAMNDTLKYVLRKFVLVFFDDILIYSPDFESHLTHVRQVLQLLQQYQWKSQLSYLGHIIGANGVATDPQKVQDILNWEIPTNVKKLRGFLGLAGYYRKFVQGFGLKSKPLTNLLRKGVPFVWSTEADSAFQALKTSLASAPVLALPNFQKTFVVETDASDYGIGAVLSQEKHPIAYISKALGPRTRGLSTYEKECLAMIMAVDHWRSYLQHVEFIILTDHHSLMHLSDQRLHTPWQHKAFTKLLGLQYKICYRKGSTNAAADALSRKPQQSEEEFNAISQCVPQWLMEVLQSYDTDPHATQLVAALTLNPNSKPHFSLQHGVLRYKGNIWIGNSPDLQLKIINEMHASPVGGHSGFPVTYRRIKQLFAWNGMKSQIKETLANCQICAQAKPDRSRYPRLLQPLPVPKGAWQTISLDFIEGLPRSSHYNCILVVVDKFSKYSHFIPLRHPFTAIDVAKAFMSNVYKLHGLPQIIISDRDKIFTSQLWEQLFLRSGTKLHYSSAYHPQSDGQTERGNQCLEIYLKCFVQSAPSKWPSWLHLAEYWYNNSYHSTIDRTPFEALYGYPPRHFGISIRDCDNSELITWMQDRKLMQQLVQQHLHRAQQQMKLFADKKRSFRQFQVGEWVYLKLQPYVQSSVAPRANHKLAFKYFGPFQILEKLGTVAYKLQLPATSSIHPVFHVSLLKEAKGFQPSVHTPLSPTYSAVQYPIALLDHRLTKKAQATWEDLHDLKARFPNALAWGQAKTQGEGIVRSSSDSAEEDTEEELSLEAEQDDDEKMQAEAEDAEQGGVMDHQPVLRRTSRTVKPNPLYHGPQLDPNIFFLSVFCDDLYSPALVVVALTFNHTNFGPDEQTNIRLEGDAAFSADVSFSGDGGGWVDISANRLDGNIDHSRGRVSYALPVAAGDDRFVAMEFDTFNDTIVHDPDATYDHLGVDVNSVVSKRILTLPSFTLVGNMTAVVEYDNVSSILAMRLHLGYGLSGPRHRPDYNLSYKVDLKSVLPEQVAVGFSAATSTSVELHQLRSWYFSSSLEPKATPPPVAPPSPSPPPTSGSGSGGVVAGAIVGAALFVVLLFAMVAVVVLVRRRHQRKKMREAEEANDDDDDTEGDPIMEIENGMGPRRFAYHVLVNATKSFAAEEKLGQGGFGAVYRGYLREQGLAVAIKRFIKDSSNQGRREYKSEIKVISRLRHRNLVQLIGWFHGRNELLLVYELVPNRSLDVHLYGNGTFLTWPMRINIVIGLGSALLYLHEEWEQCVVHRDIKPSNVMLDESFNTKLGDFGLARLIDHADGVQTMTHPSGTPGYIDPECVITGKASAESDVYSFGVVLLEVVCARRPMSLLDDQNNGLFRLVEWVWDLYGQGAIHNAADKRLNNDYDVVEMERVIAVGLWCAHPDRCQRPSIRAAMMVLQSSGPMPMLPAKMPVATYAPPVASSEGQLSSSTAPPAHRLTQELGFWVAGKDMRGKDEGN

SEQ ID NO: 198586 - protein, 208 aa, Oryza sativa
  Clone ID: PAT_MRT4530_94230C.1.pep
MSSSPAPVESPWLTMRAMRRVGGADGGGGQRSALMVASYPVLLLLVVLAAFVKYVWIALALYSALLLLFSCASRRLALAERLPSPLGGGGGGGGVPAVTAAEELQGAAARGGVSGETLASIPAFAYDASAHGGGGEAAAQCAVCLEALRGGETARRLPSCAHTFHVACIDMWLGSHATCPVCRRRVERKHKGGVLPPMPPEPETEPPV

SEQ ID NO: 198587 - protein, 82 aa, Oryza sativa
  Clone ID: PAT_MRT4530_94231C.1.pep
MSAPGAAAAAPGAAAAAAVPGDGAPGAGAAANVNVNGGSSASQSSGGIFSGYIFLLLLTHSLIPLLVVLVAILLRSWGGSTH

SEQ ID NO: 198588 - protein, 41 aa, Oryza sativa
  Clone ID: PAT_MRT4530_94232C.1.pep
PCLGHQASCKLFRYNFVRCNLGIVVLLILELFEQLALHVLV

SEQ ID NO: 198589 - protein, 216 aa, Oryza sativa
  Clone ID: PAT_MRT4530_94233C.1.pep
MSKLQSDALREAISQITSESREKQRKFVETIELQIGLKNYDPQKDKRFSGSVKLPHIPRPKMKVCMLGDAQHVEEAEKMGLDYMDVEALKKMNKNKKLVKKLAKKYHAFLASEAIIKQIPRLLGPGLNKAGKFPTLVTHQESLESKVNETKATVKFQLKKVLCMGVAVGNCAMEEKQIFQNVQMSVNFLVSLLKKNWQNVRCLYLKSTMGKVIRVF

SEQ ID NO: 198590 - protein, 281 aa, Oryza sativa
  Clone ID: PAT_MRT4530_94234C.1.pep
MPLQPSSSISQSDSMRSAPALNRSGLFGWTPAPGFPPATSPSASPPPRRLPRTSSRICARTTGGAMSKLQSDALREAISQIANDSREKQRKFVETIELQIGLKNYDPQKDKRFSGSVKLPHIPRPKLKVCMLGDAQHVEEAEKMGLDYMDVEALKKMNKNKKLVKKLAKKYHAFLASEAIIKQIPRLLGPGLNKAGKFPTLVTHQESLESKVNETKATVKFQLKKVLCMGVAVGNCAMEEKQIFQNVQMSVNFLVSLLKKNWQNVRCLYLKSTMGKVYRVF

SEQ ID NO: 198591 - protein, 105 aa, Oryza sativa
  Clone ID: PAT_MRT4530_94235C.1.pep
MTAWIWRRRRDLGVWRPVPVRIRRLYLPLASPSTSSPSPAARRRRGSSGGGVTSAWIRRRRRDLAWIRQRRRIPAWIWQRRDDNIDLTAAARPHADPAPTMTDDG

SEQ ID NO: 198592 - protein, 238 aa, Oryza sativa
  Clone ID: PAT_MRT4530_94236C.1.pep
MSKLQSDALREAISQITSESREKQRKFVETIELQIGLKNYDPQKDKRFSGSVKLPHIPRPKMKVCMLGDAQHVEEAEKMGLDYMDVEALKKMNKNKKLVKKLAKKYHAFLASEAIIKQIPRLLGPGLNKAGKILLVYGRSILKSSYIIVSKRGKFPTLVTHQESLESKVNETKATVKFQLKKVLCMGVAVGNCAMEEKQIFQNVQMSVNFLVSLLKKNWQNVRCLYLKSTMGKVIRVF

SEQ ID NO: 198593 - protein, 277 aa, Oryza sativa
  Clone ID: PAT_MRT4530_94237C.1.pep
MANKRQREARKRFREANPGLFPANPTPPADGTKKKKNNKKSMFKKTSKAGGGGAGRSKHPLRVPGMRPGERCFICKAADHVAKVCPEKSLWEKNKICLLCRQRGHSLKNCPDKNDENLKKFCYNCGESGHSLSKCPKPIENGGTKFASCFVCKQQGHLSKNCPENKHGIYPKGGCCKICGEVTHLAKHCPNRGRQDLISSGDDAFNTEEHHLEDNAVLRGGDDLDDDFIEEEETRHTKAKKAKQSSSKSTTETGDGDKNTNTKAKVKQAPKVVKFFG

SEQ ID NO: 198594 - protein, 559 aa, Oryza sativa
  unsure (1)..(559): unsure at all Xaa locations
  Clone ID: PAT_MRT4530_94238C.1.pep
MPPPPPESGEPAGDDVLQKAECLRLLDALPAAAAASPAFRRHWPSISASLAALSASLSHPAFPPSAPRLLAPLASALSALVSVAGNDAASSLGHLHTVSLLSSSAAELSQLAADARLLVSPGNGGGEGVAAGVDGLIPRLRLGSAASRAAALDALVDSVGSLPPSAAAVAVSAVAAMLDSGEILPASREKAVSVLAAFASSDATCRLLAQEAGAVVPHLCRALESGGAGAEQACVALRPLTADSRDAAAAVAARGGVSALLGACAAGTPPAQASAAGVLRNLAAFPDLLPTFREEGALPSLIQLVSLGTPRAQELALGCLQNLTSGDGDECQRLKVEAFQDGALGCVKDFLESCVGDEPGLAPALXLLRNMASFRYIAEIAVPARLVHHGLGVVGSDKAATRXLSAMALAELCNVTSHGKTRRDVGDAIPRLIWMLEAKPAAERDAAARALAALVAASGYRKLFKKEVEGIVNAGQQLDRSTAPGGVDARFPVSVLLAVSPSRRCRKQMVAAGACGFLQALLAAEVDGAKKLADCLARGKMLRRVPTVMTKKTAIATDR

SEQ ID NO: 198595 - protein, 84 aa, Oryza sativa
  unsure (1)..(84): unsure at all Xaa locations
  Clone ID: PAT_MRT4530_94239C.1.pep
THHQKGGQVPSLFAQNHYLPXSSASQVLFLHNSICSNPXSSLLPGQIFPSSPLISSCILEVLGCHFQFVFLILLSGISSKISPG

SEQ ID NO: 198596 - protein, 430 aa, Oryza sativa
  Clone ID: PAT_MRT4530_9423C.1.pep
MRLHLGYGLSGPRHRPDYNLSYKVDLKSVLPEQVAVGFSAATSTSVELHQLRSWYFSSSLEPKATPPPVAPPSPSPPPTSGSGSGGVVAGAIVGAALFVVLLLAMVAVVVLVRRRHQRKKMREAEEANDDDDDTEGDPIMEIENGMGPRRFAYHVLVNATKSFAAEEKLGQGGFGAVYRGYLREQGLDVAIKRFIKDSSNQGRREYKSEIKVISRLRHRNLVQLIGWFHGRNELLLVYELVPNRSLDVHLYGNGTFLTWPMRINIVIGLGSALLYLHEEWEQCVVHRDIKPSNVMLDESFNTKLGDFGLARLIDHADGVQTMTHPSGTPGYIDPECVITVEWVWDLYGQGAIHNAADKRLNNDYDVVEMERVIAVGLWCAHPDRCQRPSIRAAMMVLQSSGPMPMLPAKMPVATYAPPVASSEGQLSSST

SEQ ID NO: 198597 - protein, 203 aa, Oryza sativa
  unsure (1)..(203): unsure at all Xaa locations
  Clone ID: PAT_MRT4530_94240C.1.pep
VEGAGLLQGVRGEASKLPGGRRRGGGGDAVGGALHRQHGHQRLPRELLRHGARPSGGVLHGGGVRRLPPRHRRIAESSVAAGGVRGGERRQQHRAHAGQPAAAHLCHLLRHVRPRXPFLRRARGRKAVLENGHRRPRQGGSGGGGGNMRRRRRQARQATRRGQRQPXVIELTRKRHVKCHVGATSAKTTIKLPRDLICTGFNS

SEQ ID NO: 198598 - protein, 256 aa, Oryza sativa
  Clone ID: PAT_MRT4530_94241C.1.pep
MWKELDYFKEYAARLQSFREDEDAAAATLSEALYVVSMGTNDFLENYYAMAHAQAAEYSTAVAYGDYLLGIGASPSRTHSSASCTHSDMIARLNDELGDDEMIVYGDVYRPVAAGGDEIDGVLPQSHYNCIASVPGPLLLGRRWRRARRPFLRRARGRKAVLENSHRRPRQGGSGGGGGNMRRRRRQARQATRRGQRQPAVGPWGREWRRPRLDAVRISAVIELPRKRHIKCHVGATSAKTTIKPSRDLICTDFNS

SEQ ID NO: 198599 - protein, 273 aa, Oryza sativa
  Clone ID: PAT_MRT4530_94242C.1.pep
MDASLRTLPPASFPGEVRSAVSSLLLSPGGSALDTVFSHLPPPVTIPPLGSSVYYRQSELLRHFAASQAAQAQSATAAASSSSAAAAGLDDGAPRKLYRGVRQRQWGKWVAEIRLPQNRVRVWLGTYDSPETAAHAYDRAAFKLRGEYARLNFPGVMDGRDCPDNLRQLRDAVDAKIQAIRVRMARKRARARRQREESKKSQRAEDAKAATPSRPVASERAASETTTTTTTTSSSYGSPDGVLSMSAASVDGDCPLERMPSFDPELIWEMLNF

SEQ ID NO: 198600 - protein, 27 aa, Oryza sativa
  Clone ID: PAT_MRT4530_94243C.1.pep
APTRVSTRSLTRWQSREGRIAYTLVIT

SEQ ID NO: 198601 - protein, 151 aa, Oryza sativa
  Clone ID: PAT_MRT4530_94244C.1.pep
MGCLPLERATGSGDACTDEYNAVAERFKAGLQHRGECRQQHRAHAGQPAAAHLRHLLRHVRPRRDEVRGDRFLRRVRGRKAVLENGHRRPRQGGSSGGGGNIQRRRRQARRATRRGQRPPAVGPWGREWRRPRLDAVRISAGERREERGEI

SEQ ID NO: 198602 - protein, 113 aa, Oryza sativa
  Clone ID: PAT_MRT4530_94245C.1.pep
IGLLILCSGERTRLLSPPRTARRQSAATARTAERTTSSTTAKGEQHDTPRGTHADEWEHHTPRTIGCVITATPTALPFTNSEFTCTATCTSLLRRRQHRVLGVRLRTTETHAD

SEQ ID NO: 198603 - protein, 132 aa, Oryza sativa
  Clone ID: PAT_MRT4530_94246C.1.pep
MVRTKDEVELGAVLAEDAVERRRWRWVLVEGEVSSTRKISLDVGPGRFQVGLGGVEDGTSGDRDRCREVAHAEGKIKLREAPAEDAVELGRWHRQRREVELGATPDGGHCGAKEVVWAKNVDELGWRQFVGH

SEQ ID NO: 198604 - protein, 44 aa, Oryza sativa
  Clone ID: PAT_MRT4530_94247C.1.pep
CDNTLSPTLSMCPSSRHAGIAAVVDYSLGASQEASAMAVTASEG

SEQ ID NO: 198605 - protein, 115 aa, Oryza sativa
  Clone ID: PAT_MRT4530_94248C.1.pep
QISRLKTILEEYWPSLYCGSFSTPWASSPPPTRTGPPLRRTAAVITVSSPSPPLVTAMQTLFDTSREVFQDSLPGFVPPPSLALHWHCRSRRRGRVCCSTGRRSWRAKNRMPSPS

SEQ ID NO: 198606 - protein, 534 aa, Oryza sativa
  Clone ID: PAT_MRT4530_94249C.1.pep
MLRAALLRSGSGLRRPPMAAPLSTAAAASWLSDSASSPPRVRLLIGGEFVESRADEHVDVTNPATQEVVSRIPLTTADEFRAAVDAARTAFPGWRNTPVTTRQRIMLKYQELIRANMDKLAENITTEQGKTLKDAWGDVFRGLEVVEHACGMGTLQMGEYVSNVSNGIDTFSIREPLGVCAGICPFNFPAMIPLWMFPIAVTCGNTFVLKPSEKDPGAAMMLAELAMEAGLPKGVLNIVHGTHDVVNNICDDEDIKAVSFVGSNIAGMHIYSRASAKGKRVQSNMGAKNHAIILPDADRDATLNALIAAGFGAAGQRCMALSTAVFVGGSEPWEDELVKRASSLVVNSGMASDADLGPVISKQAKERICKLIQSGADNGARVLLDGRDIVVPNFENGNFVGPTLLADVKSEMECYKEEIFGPVLLLMKAESLDDAIQIVNRNKYGNGASIFTTSGVSARKFQTDIEAGQVGINVPIPVPLPFFSFTGSKASFAGDLNFYGKAGVQFFTQIKTVTQQWKESPAQRVSLSMPTSQK

SEQ ID NO: 198607 - protein, 131 aa, Oryza sativa
  Clone ID: PAT_MRT4530_9424C.1.pep
PSTTPTSARTSRRTSGWKATPPSAPTSPSAATAAGGSTSAPTGTAASKTAVAGCRTPFRSLSGTPPPARLPASPPASPSSSTRPNRTAASTTRAPAWPSSSPASRRGSPAPTPTTSASPTRPRPASPSSGT

SEQ ID NO: 198608 - protein, 146 aa, Oryza sativa
  Clone ID: PAT_MRT4530_94250C.1.pep
MENPGVERIPAHASIGVRLSRGEILSRPTPVFSPRHRPGNIQLLWWRGKNPLDAATQREGALRRGRLHGAVRLRRDGDGTLSPPAVDSSGGHLLPGEFLPFPLASSSSVRVSCARGLVLLRRCTTVAGMAGDAAASHPLTMAPLKL

SEQ ID NO: 198609 - protein, 153 aa, Oryza sativa
  Clone ID: PAT_MRT4530_94251C.1.pep
MTATNPRASIPAVTSSAVEAPEKPEGPLRLNRHIADSVWRTGVCKLSSASAPDGLKLYGQTLTVIPCDVATAVSACYSTKVLKILFLCQKFPEDFNKIRTPHTADEQSREVKPRGVLVFCSATTTSAVPASSWNQAFAIQVGAKNTTNVNACL

SEQ ID NO: 198610 - protein, 464 aa, Oryza sativa
  unsure (1)..(464): unsure at all Xaa locations
  Clone ID: PAT_MRT4530_94252C.1.pep
MAALNWRPQCPTSINFHRSYDCHVLPRRCVRFRYPRSLTATTDLHATQRNAARLHDCSCTVRPGLRAPRAARRAPTTSRDANQCVPYERGDLWAAGDPQVQSSRYELKETRCPRRPSARAYYCCSLARPAGRRAAWPRRAVSRRAQYVSEGRPSSWLYFGGASHLHARRSGGHARDPPRFLRLRQRPRKAAARVVVLLSAARHPAFPQLRIASPQLSMEVVASAPGKVLVAGGYLVLERPNAGLVLSTSARFYAIVRPLRDELSHDSWAWAWTDVKVTSPQLSREATYKLSLKKSTLQLTSSRQVIDHLLXIVAAALAQSAHCIAQGKIGSGFDVSAAVYGSQRYTRFSPEILSSAQVTGGHCMADVVAXGEPGTGGSSTPSMVGSVKQWQKSDPQKSKETWSKLGIANSVLENQLRNLNKLAEDHWEAYESVLRSCSRLTCSKPKLGAQLVFSLFLFEKIPEH

SEQ ID NO: 198611 - protein, 476 aa, Oryza sativa
  Clone ID: PAT_MRT4530_94253C.1.pep
MEVVASAPGKVLVAGGYLVLERPNAGLVLSTSARFYAIVRPLRDELSHDSWAWAVQFSVAAAKVTVTDKEGKEALDKLLLQGLHITILGCNDFYSYRKQIEARGLPLTPEVLLSLPPFCSITFNSEVANGTMTGENCKPEVAKTGLGSSAAMTTSVVAALLHYLGTVNLSCLGQSSGGNAAGRDLDLLHAIAQSAHCIAQGKIGSGFDVSAAVYGSQRYTRFSPEILSSAQVTGGHCMADVVADIVTQSWDHEKVKFSLPPLMSLGDCVLFVDWEPGTGGSSTPSMVGSVKQWQKSDPQKSKETWSKLGIANSVLENQLRNLNKLAEDHWEAYESVLRSCSRLTCSKWTEVATNQHQELIVRSLLAARDAFLEIRLHMREMGIAAGVPIEPESQTQLLDATMNMEGVLLAGVPGAGGFDAVFSVILGEASDAVAKAWSSAGVLPLLVREDPRGVSLEAGDPRTREVSTAVSSIQIN

SEQ ID NO: 198612 - protein, 149 aa, Oryza sativa
  Clone ID: PAT_MRT4530_94254C.1.pep
PTRLFFLSATAPFCPPGGFVPPPVWFRRPFPSSRPFVFFLVFSPVLRPPFFQRLCLFARRSPPPFFCPFPALVLRVLPPPFPRSPLVFPPLGVLGFLFPPLLGPLRNISSLPPFFLSLFPRRWSLVFYCSRFVFQKKKIKSCIIDVKQE

SEQ ID NO: 198613 - protein, 91 aa, Oryza sativa
  Clone ID: PAT_MRT4530_94255C.1.pep
MNLDRIYLNGGNARKFYNMKRGGYLILSIKKPTVFNTALRIFRGGIKLFQGPGQKNVLHLTLQPYFNYLQPSKGLHFHFRKKLLKKEDAHG

SEQ ID NO: 198614 - protein, 806 aa, Oryza sativa
  Clone ID: PAT_MRT4530_94256C.1.pep
MRKIKLREEQAIGMADEGERVSIIVDEMEREDSDNEQAEDDASSDEEGDVMATDWTNENFSGLVISEGDHVPWEYKENEVPPMAFAFVESENTESWYWFLERMHIAVVRMRPNICLIHDRHAGDEPPIPLGALHDDPPTMRRRSGSSIRNFTQWIENEPKEKWSLLFDTDGSWYDIMTTNLAEVYNWVMRGVRVLPLVAIVEFILHGTQAYFRDRYKKIGPSMADNNIVFGNVVTKYMEDKIRKARRHRVVAQCTQVHRCIRNDMDESEAGGRTLRCSKCDLRGHTYKKCSKNAEVPSGADADPSGQASDGRRPPGMTYDTPALLNHGIDRNHRSFLSAIQGAQPGSFLGTRMFNFTLRAAGLLPLCRLVEAGAHDRDLAKRWDADWSLLAALVDRWRPETHTFHLPCREMAPTLQDVSYLLRLPLAGAPVGPVDGVVGWKEDITARFKHVMRLPHLGVPNTLPPYSTVGPSKADHLHPDANDYSVRCALETYLLWLFGWVMFTSTHGHAVDFRLVHYARSITDAEPQDVPQWSWGSAVLAATYRGLYEACTKTDAGAIFAGCPMLLQLWAAERFAIGRPVVDTAPYGVGRSVQWPEDGPTMGTYWCRRGRRYAHVQAYWLTILLMVFDTFVEPHWPQRMMRQFGLRQVFLGNVEPTVLPADHSLTRWGQQAGALWAPRVQQYIDDWVLATEEVINELFPHTEENYHDYLRWYLPRTRARVTFTPDAPELHVAAVTDAYPTHRDRDYFMGADAAQDISADITAVQVRLNRETYAQFKIALLQGGKGAACKIPGPLATHLQATPRTV

SEQ ID NO: 198615 - protein, 157 aa, Oryza sativa
  unsure (1)..(157): unsure at all Xaa locations
  Clone ID: PAT_MRT4530_94257C.1.pep
KTTFIKKPGFWPRPPREKPGGGGFPLGKKKKQGVPPPPKKKKPPRGFPRGNKMGASQKGPPGGKKPPPLGNPGPAPXNLFQTNFLKFFQGPQGKNPLGAPGTQPPLGTKKRPPRPPKTPKKTPPFPRGATQSFKESLGKLKTAPPPGKGGKPRPKFN

SEQ ID NO: 198616 - protein, 1669 aa, Oryza sativa
  Clone ID: PAT_MRT4530_94259C.1.pep
MSNKVTFQIVHGEGNIRFGPDGVDLSDFVMTSKGIDRPAERTFQSIYSWLLRGFRIDQEVYTLSVSVVVSRATEGYFWELMPMDSTAAWRRYVEMAFERSWPLVIFVSVQEKDINVSMQTEDVEGPINAGDVVGPSMQNEEDQPREEQAMGMADEGERVGIIVDEMEREDSDNEEADDDASSDEEGDVMATDWANEDFSGLVISEGDHVPWEYKENEVIEGARYAHKDEMKEAVKHWAVSLQREFRVVKSTNYVYEVRCMKEDCPWRVHAYKGKWNDYWKVSIVIEHKCYLQGVEKYHRNITSAFVASEMYSSVVGNIGFEPKSIIRHIENKFKYTISYAKAWRAKQKIIEMRYGTFEASYDNLPRLLATIAQRNNNTYYDLHTFTSVDDRTKSVLQRAFFSLGACINAFVHCRPVLCIDGTFMTGKYRGQILTAIGCDGNNQVLPMAFAFVESENIESWYWFLERVHIAVVRMRPNVCLIHDRHAGMLRAIDYLQNGWDEKGLPAKWPDVRSRWCMRHMGANFYKQFKNKHLMELFKRLCAQNQEKKFNELWDKLDELTTKQTDEQSRRPQVEGDEPPIPLGALHDDPPTMSRRSGSSIRNFTQWIENEPKEKWSLLFDTDGSRYGIMTTNLAEVYNWVMRGVRVLPLVAIVEFILHGTQAYFRDRYKKIGPSMADNNIVFGNVVTKYMEDKIKKARRHRVVAQGTQVHRYEIMCVDRSRRGIYRKQAVQECVLKADGGCTCSCMNPKLHHLPCSHVLAAAGDCGISPNVYVSNYFRKEAIFHTWSEEIYGFGISGSYTTPSAQVFYIPDPSKLRVKKGRRQTRRIRNDMDESEAGGRTLRCSKCDLRGHTYKKCPKNAEVPSGADASPSGQASDGMAYDTPALLNRGIDRNHRSFLSAVEGAQLGTFRPRTSREWLRVDPRHVPWLRAAGLLPLCRLVEAAADDRDPTKRWDADRSLLAALVDRWRPETHTFHLPCGEMAPTLQDVSYLLGLPLAGAPVGPVDGVFGWKEDITARFEQVMRLPHLGPANTLPPYSTVGPSKAWLLQFTAYLLWLFGWVMFTSTHGHAVDFRLVHYARSIADAQPQDVPQWSWGSAVLAATYRALCEACTKTDAGAIIAGCPMLLQLWAAERFAIGRPVVDSAPYGVGRSAQWPEDGPTMGTYWCRRGRRYAHVQVRRGYPDFVFEFDRLQPSDVIWEPYTEEAVAARAPLGLSSLCTRDQAYWLTILPMVFDIFVEPHCPQRVMRQFGLRQVFPGNVQPTVLPADHSLTRRGQLAGALWAPRVQQYVDDWVLATEEVINELFPHTEENYRDYLHWYLPRTRARVTFTPDAPEPHVAAVTDAYPTHRDRDYFVGADAARDISADITAVQVRLNRGLHLTDVEQRVTFDRMQEKMRAVMRVFSCRSAMDVVPPAGPVQPRPRAPTVGAGPRPTAPVSHGPRLPSSAFAGTTGASASSAGAFATSSGAFASSSSHGASIPRPHAGFAAGIFGTGASSSHPGRTGPTSQFYDDDLHGVLHHDVLGSSQLGGAPEAHTQEQPEVTPVQAGRVGRAVPPDRLTYSQGHIRAQGRRDRGNLFISSFALAHNTRKWKRHSLSVSTGEAILLLVGFHHGVTVLCQVIRMCGFTRWIDNVTPSYHGQKITESETQVEYQRLKDHENAMHSDRPRRGR

SEQ ID NO: 198617 - protein, 261 aa, Oryza sativa
  Clone ID: PAT_MRT4530_9425C.1.pep
MKNAEPNIAIGSSLDFAGLDPHIRVPYSSSTSELSSAVVQRGGATPLLADFGSGKVRCPYKKCSAAFSAASTWGSSWASSVSSLPLVLGLARRPLIDGGWGNISGSGPRELLAQGHKVVSLAQRHNKRPPAATGLRLDFDDGGSEHVSTTTTSSALSLLSDELATQFDRYKNEMARMFQDHVRIVDVVDRVDSLLAAGAIMSEFDIFSSPWRSRRTSTKSPKTTLIFVVVLAALLLWLSPGGPAWALSRCRGTTPPPPSCP

SEQ ID NO: 198618 - protein, 132 aa, Oryza sativa
  Clone ID: PAT_MRT4530_94260C.1.pep
MAQAACSSIPSELPSRTDHDVEFSVHVQFGQFTTKLDDGTCVEVARKWLEWVVDYHQCTLESLEKDLAARVNEVAMGEVVIGRQGDAQECSSCIDWDSLEIAPILHNQVPQLAIDWDAFEIEPIPQHQLGGK

SEQ ID NO: 198619 - protein, 1158 aa, Oryza sativa
  unsure (1)..(1158): unsure at all Xaa locations
  Clone ID: PAT_MRT4530_94261C.1.pep
MSSKVTFQIVHGEGNIRFGPDGVDLSDFVMTSKGIDRPAERTFQSIYSWLLRGFRIDQEVYTMSVSVVVSRAIEGYFWELMPMDSTAAWRRYVEMAFERSWPLVIFVSVQEKDTNVSMQTEDVEGPSNAGDVVGPSMQNEENQPREEQAMGMADEGERVGIIVDEMEREDSDNEQAEDDASSDEEGDVMATDWANEDFSGLVISEGDHVPWEYKEYEVIEGARYAHKDEMKEAVKHWAVSLQREFRVVKSTNYVYEVRCMKEDCPWRVHAYKGKWNDYWKVSIVTEHKCYLQGVEKYHRNITSAFVASEMYSSVVGNIGFEPKSIIRHIENKFKYTISYAKAWRAKQKIIEMRYGTFEASYDNLPRLLATIAQRNNNTYYDLHTFTSVEDRTKXSVLQRAFFSLGACINAFVHCRPVLCIDGTFMTXNNQVLPMAFAFVESENTESWYWFLERVHIAVVRMRPNVCLIHDRHAGMLRAIDYLQNGWDEKGLPAKWPDVRSRWCMRHMGANFYKQFKNKHLMELFKRLCAQNQEKKFNELWDKLDELTTKQTDEQSRRPQVEGDEPPIPLGALHDDPPTMRRRSGSAIRNFSQWIENEPKEKWALLFDTDGSRYGIMTTNLAEVYNWVMRGVRVLPLVAIVEFILHGTQAYFRDRYKKIGPSMADNNIVFGNVVTKYMEDKIKKARRHRVVAQGTQVHRYEIMCVDRSRRGIYRKQAVQECVLKADGGCTCSCMKPKLHHLPCSHVLAAAGDCGISPNVYVSNYFRKEAIFHTWSEEIYGFGISGSYTTLSAQVFYIPDPSKFRVKKGRRQTRRIRNDMDESEAGGRTLRCSKCDLRWYLPRTRARVTFTPDAPEPHVAAVTDAYPTHRDRDYFVAADAARDISADITAVQVRLNRGLHLTDVEQRSTFDRMQEKMRAVMRVFSCRSAVDVVPSAGPVHPRPRGPIVGAGPRLSSSAPSFGAVRPTAPVSHGPRMPSSAFAGTTGASASSAGAFATSSGAFASSSSHGASIPRPHAGFAAGIFGTGASSSHAGRTGPTSQFYDDDLHGADHQDVLGSSQLGGAPEAHTQEQPEVTPVQAGRVGRAVPPDRLTYSQGHIRAQGRRDRVLFIRMVLEQLMLTTTHFRRFTVVPYPVARTVHNSTHEKRQLELSLSTFGAAC

SEQ ID NO: 198620 - protein, 120 aa, Oryza sativa
  Clone ID: PAT_MRT4530_94262C.1.pep
MTITANIISGALVEILASRVSAAVVLHELASSGDCHALEAILKSHSMCGALVGLVRASSPRKATKASLFTAYYLRMSPVVGRRVGEVETPGGGMVPMDDGVEQRMAPADVDDSQRGAEGG

SEQ ID NO: 198621 - protein, 547 aa, Oryza sativa
  Clone ID: PAT_MRT4530_94263C.1.pep
MSSKVTFQIVHGEGNIRFGPDGVDLSDFVMTSKGIDRPAERTFQSIYSWLLRGFRIDQEVYTMSVSVVVSRATEGYFWELMPMDSTDAWRRYVEMAFERSWPLVIFVSVQQKDINVSMQTEDVEGSINAGDVVGPSMQNEENQPREEQAMGMADEGERVGIIVDEMEREDSEPHCPQRVMRQFGLRQVFPGNVQPTVLPADHSLTRRGQLAGALWAPRVQQYVDDWVLATEEVINELFPHTEENYRDYLRWYLPRTRARVTFTPDAPEPHVAAVTDAYPTHRDRDYFVAADAARDISADITAVQVRLNRGLHLTDVEQRVTFDRMQEKMRAVMRVFSCRSAVDVVPPAGPVQPRPRAPTVGAGPRPTAPISHAGFAAGIFGTGASSSHAGRTGPTSQFYDDDLHGADHHDVLGSSQLGGAPEAHTQEQPEVTPVQAGRVGRAVPPDRLTYSHGHIRAQGRRDRGGPPHSTKSPSRRAARGPPAKFHAPSPPICRRPPAQYKIALAEGGKGAACKIPCPPSPPICRRPPAQYKIALAEDGKGAACKFR

SEQ ID NO: 198622 - protein, 642 aa, Oryza sativa
  Clone ID: PAT_MRT4530_94264C.1.pep
MAFERSWPLVIFVSVQEKDINVSMQTEDVEGPINAGDVVGPSMQNEENQPREEQAMGMADEGERVGIIVDEMEREDSDNEEADDDASSDEEGDVMATDWANEDFSGLVISEGDHVPWEYKENENGWDEKGLPAKWPDVRSRWCMRHMGANFYKKFKNKHLMELFKRLCAQNQEKKFNELWDKLDELTTKQTDEQSRRPQVEGDEPPIPLGALHDDPPTMRRRSGSSIRNFTQWIENEPKEKWSLLFDTDGSRYGIMTTNLAEVYNWVMRGVWILPLVAIVEFILHGTKAYFRDRYKKIGPSMADNNIVFGNVVTKRGIYRKQAVQECVLKADGGCTCSCMKPKLHHLPCSHVLAAAGGRTLRCSKCDLRGHTYKKCPKNAEVPSGADASPSGQASDGFAAGIFGTGASSSHAEAHTQEQPEVTPVQAGRVGRAVPPDRLTYSQGHIRAQGRRDRGKVLGEWLRIEEPSSEGLKRSGDHPPREMTVDRGHVGPRPRWPLRRLPRIPDNRIPWTARAPEPGRDLEIAGRAPGGRNIRGLRSPRKHLELRNSEGFRSLAKELRRRPGTSELRRPPKLEMLPGANRASICPQRLKLGIRRLVGWNKCTLCAPTTSETVDDDQTEHDITRGMPLSRADPLASTSDSS

SEQ ID NO: 198623 - protein, 157 aa, Oryza sativa
  unsure (1)..(157): unsure at all Xaa locations
  Clone ID: PAT_MRT4530_94265C.1.pep
SRAALWPFEGGIPPPPPPXPPXPGYLVAPPXPLGSTGGGAPRSCIEAHAPPGSPSSARLAPPPSSSAPAAAQSQPHXXPPGXSXAPPRARGLAARAVRHATRASEHAAAAEEGIRVGHVGEGDGGRCGRWSGGGGGCKAARGVRRRVEQEQEQETLA

SEQ ID NO: 198624 - protein, 1243 aa, Oryza sativa
  unsure (1)..(1243): unsure at all Xaa locations
  Clone ID: PAT_MRT4530_94266C.1.pep
MAEGGGGGGAHPNARERGLRRRTSTEEGWTGWISATRTRRRRRRGLAATLTAASGGRSSGKGGGKGLHGAGAMGGSRECGEMGKKVIYKNYNFGLGGKLRGVTGCKREFRVVKSTNYVYEVRCMKEDCPWRVHAYKGKWNDYWKVSIVTEHKCYLQGVEKYHRNITSAFVASEMYNSVVGNIGFEPKSIIRHIENKFKYTISYAKAWRAKQKIIEMRYGTFEASYDNLPRLLATIAQRNNNTYYDLHTFTSVDDRTKSVLQRVFFSLGACINAFVHCRPVLCIDGTFMTESENTESWYWFLERVHIAVVRMRPNVCLIHNRHAGMLRAIDYLQNGWDEKGLPAKWPDVRSRWCMRHMGANFYKQFKNKHLMELFKRLCAQNQEKKFNELWDKLDELTTKQTDEQSRRPLVEGDEPPIPLGALHDDPPTMRRRSGSSIRNFTQWIENEPKEKWSLLFDTDGSRYGIMTTNLAEVYNWVMRGVRVLPLVAIVEFILHGTQAYFRDRYKKIGPSMADNNIVFGNVVTKYMEDKIKKARRHRVVAEGTQVHRYEIMCVDRSRRGIYRKQAMQECVLKADGGCTCSCMKPKLHHLPCSHVLVAAGDCGISPNVYVSNYFRKEAIFHTWSEEIYGFGISGSYTTLSAQVFYILDPSKLRVKKGRRQTRRIRNDMDESEAGGRTLRCSKCDLRGHTYKKCPKNAEVPSGADASQSGQASDGMAYDTPALLNRGIDRNHRSFLSAVEGAQLGTFRPRTSQWSWGSAVLAATYRALCEACTKTDAGAIIAGCPMLLQLWAAERFAIGRPVVDSAPYGVGRSAQWPEDGPTMGTYWCRRGRRYAHVQVRRGYPDFVFEFDRLQPSDVIWEPYTEEAVAARAPLGLSSLCTRDQAYWLTILPMVFDIFVEPHCPQRVMRQFGLRQVFPGNVQPTVLPADHSLTRRGQLAGALWAPRVQQYVDDWVLATEEVINELFPHTEENYRDYLRWYLPRTRARVTFTPDAPEPHVVAVTDAYPTHRDRDYFVAADAARDISADITAVQVRLNRGLHLTDVEQRVTFDRMQEKMRAVMRVFSCRSAVDVVPPAGPVQPRXSRAYRRSRTSTYGTCFARRICSRDLRYWGLFVSRRXTGPTSQFYDDDLHGAHHHDVLGSSQLGGAPEAHTQEQPEVTPVQAGRVGRAVPPDRLTYSQGHIRAQGRRDRVLFIHMVLEQLMLTTTHFRRFTVVSDPVARTVHNSTHEKRQLELSLSTFGAAC

SEQ ID NO: 198625 - protein, 52 aa, Oryza sativa
  unsure (1)..(52): unsure at all Xaa locations
  Clone ID: PAT_MRT4530_94267C.1.pep
PEFRFNHRRPGKHXKHMNEHLFGRMDNSFVPLLLXIIYKPGQASQMIPKTIP

SEQ ID NO: 198626 - protein, 893 aa, Oryza sativa
  unsure (1)..(893): unsure at all Xaa locations
  Clone ID: PAT_MRT4530_94268C.1.pep
MRGGASSGPQRWGSAGTTPRSLSTGSSPRGSDDRSSDDGEELVEVTLDLQDDDTIVLRSVEPAAAAAAGVGAGAGAASARGELTGGPSSSSSRSRSPSIRRSSSHRLLQFSQELKAEAMARARQFSQDLTKRFGRSHSRSEAQAPSGLESALAARAARRQRAQLDRTRSGAHKALRGLRFISSNKANNAWMEVQANFDRLARDGYLSRSDFAECIGMTESKEFALELFDTLSRRRQMKVDTINKDELREIWQQITDNSFDSRLQIFFEMVDKNADGRITEAEVKEMLDHVDSARVSPFTYAQIIMLSASANKLSRLKEQAEEYAALIMEELDPEGLGYIELVAAPFTKESFTMPEMFHHGSMALGRALLCLARVQGVLTKQRNGGSEVQGAAETVVDGQRRQNSGVDVAGSTQGANCNFESTGVLEMSHRGCMREESGGNSPELGVASVVRNGGRSGVGGLRKKSSIRKISTSLSYYFEDNWKRLWVLALWIGIMAGLFTWKFMQYRNRYVFDVMGYCVTTAKGAAETLKLNMAIILLPVCRNTITWLRSTRAARALPFDDNINFHKKNGERIXGVKPSSFTPLAPAPAPAPAAAAANSGVDHLDSLFAATTAAPTAVSNGGGGGXHPFSITSAPGDDYPSIHVRQLGDWTRELKRVFAAACEPPAGGKSGLLRADETTKKILPKLLIDGPYGSPAQDYSKYDVLLLVGLGIGATPFISILKDLLNNIIKMEEEEDASTDLYPPMGRNKPHVDLGTLMTITSRPKKILKTTNAYFYWVTREQGSFDWFKGVMNEIADLDQRNIIEMHNYLTSVYEEGDARSALITMLQALNHAKNGVDIVSGTKVRTHFARPNWRKVXVFYCGAPVLAQELSKLCHEFNGKCTTKFEFHKEHF

SEQ ID NO: 198627 - protein, 1861 aa, Oryza sativa
  Clone ID: PAT_MRT4530_94269C.1.pep
MSSKVTFQIVHGEGNIRFGPDGVDLSDFVMTSKGIDRPAERTFQSIYSWLLRGFRIDQEVYTMSVSVVVSRAIEGYFWELMPMDSTAAWRRYVEMAFERSWPLVIFVSVQEKDTNVLMRTEDVEGPSNAGDVVGPSMENEENQPREEQAMGMADEGERVGIIVDEMEREDSDNEQAEDDASSDEEGDVMATDWANEDFSGLVILEGDHVPWEYKENEVIEGARYAHKDEMKEAVKHWAVSLQREFRVVKSTNYVYEVRCMKEDCPWRVHAYKGKWNDYWKVSIVTEHKCYLQGVEKYHRNITSAFVASEMYSSVVGNIGFEPKSIIRHIENKFKYTISYAKAWRAKQKIIEMRYGTFEASYDNLPRLLATIAQRNNNTYYDLHTFTSVDDRTKSVLQRAFFSLGACINAFVHCRPVLCIDGTFMTGKYRGQILTAIGCDGNNQVLPMAFAFVESENTESWYWFLERVHIAVVRMRPNVCLIHDRHAGMLRAIDYLKNGWDEKGLPAKWPDVRSRWCMRHMGANFYKQFKNKHLMELFKRLCAQNQEKKFNELWDKLDELTTKQTDEQSRRPQVEGDEPPIPLGALHDDPPTMRRRSGSSIRNFSQWIENEPKEKWSLLFDTDGSRYGIMTTNLAEVYNWVMRGVRVLPLVAIVEFILHGTQAYFRDRYKKIGPSMADNNIVFGNVVTKYMEDKIKKARRHRVVAQGTQVHRYEIMCVDRSRRGIYRKQAVQECVLKADGGCTCSCMKPKLHHLPCSHVLAAAGDCGISPNVYVSNYFRKEAIFHTWSEEIYGFGISGSYTTLSAQVFYIPDPSKLRVKKGRRQTRRIRNDMDESEAGGRTLRCSKCDLRGHTYKKCPKNAERRYAHVQVRRGYPDFVFEFDRLQPSDVIWEPYTEEAVAARAPLGLSSLCTRDQAYWLTILPMVFDIFVEPHCPQRVMRQFGLRQLAGALWAPRVQQYVDDWVLATEEVINELFPHTEENYCDYLRWYLPRTRARVTFTPDAPEPHVAAVTDAYPTHRDRDYFVAADAARDISADITAVQVRLNRGLHLTDVEQRATFDRMQEKMRAVMRVFSCRSAVDVVPPAGPCLPSSAFAGMTGASASSAGAFATSSGAFASSSSHGASIPRPHAGYAAGIFGTGASSSHAGRTGPTSQFYDDDLHGADHQDVLGSSQLGGAPEAHTQEQPEVTPVQAGRVGRAVPPDRPTYSQGHIRAQGRRDRERGKGVTVQEIMAQVACSSIPSELPSRTDHDAEFSVCVQFGQFTAKLDDGTCVEVAHNGLNGLWTIMSAHWRAWKRILQQGKSDRKLIYFVDVEDKPIHLMTDSIVLEVNEVAMGEVVTGRQGDVQECSNCIDWDSLEIAPIPHNQVPQLAIDWDALEIEPIPQHQLGSSMPLMKEDEMYTFVGLRAEDKRAEQARIEAEMQRDSVPTSGSAHTEGDLILNEAEIAINDVIPSESEIFYDKDDPPMEVGSSYVSMNEFRLAVRQHAIKGQFQLGTEKSDKERFRGFCTADECPWAIMARLMPNEKSVRVTLNKFPHTCASTGRVKTKMASYKWVAEKAIPFLKKDPNIGAKKLMGDLETKYNVTLGYHAVYRGMVMAKDKIFGTWEESFAYLFNFKAEVELKMPGSVVEIDVQENADGVYFHRFFCAFKPAIDGFINGCRPYLSIDSTALNGSWNGQLASATSIDGHNWMFPVAFGFFQSETTNNWTWFMQQLHKAIGEQSHLAVSSNACKGLENAMKNVFSTAEHRECFWHLMQNFIKKFHGPVFGNMYPTTRSYMTDRYEYYMNKIHEANPDVKPYLETYHILLWMRSKFSEEIKYDFITNNLAKSWNKWIKDMKDIVLLQISQMASEQRQWIYLRDGGR

SEQ ID NO: 198628 - protein, 416 aa, Oryza sativa
  Clone ID: PAT_MRT4530_9426C.1.pep
MIRITTHLSPTLKPPPPLSLHPHLPLLRRHRHPSSRPISVSAAAPSDLLASVESVASAASVLAAIVLVHESGHFLAATSRGIHVSQFSVGFGPALARFRLGPVEYALRAIPLGGYVGFPDDDPDSGFPPDDPDLLRNRPVPDRLLVVSAGVAANLLFAFLIVYAQALTVGVPVQAQLPGVLVPEVIPGSAAARAGLLPGDVILSVPGLAPDPSVPVLVDLIKASPNKDVSVTVSRTGPGPGDRRSIDLTVVPDTSVDGTGRIGVQLSPYFRVTRVHPNNLAEATVLALREFTALSATVLDGLRQTFLNFSQTAEKVSGPVAIIAVGAEVARSSAEGLFQFAAVINLNLAAINLLPLPALDGGTLALILLEAARGGQKIPREIEQRIMSSGILVVLMVGMFLIVRDTLNLDFIKDIL

SEQ ID NO: 198629 - protein, 38 aa, Oryza sativa
  Clone ID: PAT_MRT4530_94270C.1.pep
TQPHKVGHAEELIVIKGTWSIWRCNLSLCLWQGCILYN

SEQ ID NO: 198630 - protein, 951 aa, Oryza sativa
  Clone ID: PAT_MRT4530_94271C.1.pep
MRAGIGSGSGGGTTPVRPRWGSGVTTPRSLSTGSSPRGSDRSSDDGEELVEVTLDLQEDDTIVLRSVEPAAGGAAVASSSGASPSAVAPPRRAEPPGGVASRSRSPAMRRTSSHRLLQFSQELKAEAMARARQFSQDLTKRFTRTQSTTTAPPGIESALAARAERRQRAQLDRTKSGAQRAIRGLRFISGPNKASNAWIEVQANFDRLARDGYLSRDDFPQCIGMTESKEFAMELFDTLSRRRQMQVDKINKEELREIWQQITDNSFDSRLQIFFDMVDKNADGHITEAEVKEIIMLSASANKLSRLKEQAEEYAALIMEELDPEQLGYIELWQLETLLLQKDTYVNYSQALSYTSQALSQNLAGLRKRSPIRKISTKLSYYLEDNWKRLWVLALWIGIMAGLFIWKFIQYRHRYVFNVMGYCVTTAKGAAETLKLNMAIILLPVCRNTITWLRNTRAARALPFDDNINFHKTIAAAIVVGVILHGGLHLVCDFPRLIGSSEEKYAPLGKYFGETKPTYLTLVKGVEGITGVIMLVCMIIAFTLATRWFRRSLVKLPKPFDKLTGFNAFWYSHHLFIIVYISLVIHGEWLYLIRIWYKRTTWMYLAVPVCLYVGERTLRFFRSGSYSVRLLKVAIYPGNVLTLQMSKPPTFRYKSGQYMFVQCPAVSPFEWHPFSITSAPGDDYLSIHVRQLGDWTRELKRVFSAACEPPVGGKSGLLRADETTKKALPKLLIDGPYGSPAQDYSKYDVLLLVGLGIGATPFISILKDLINSIIKMEEEEEASGDLYPPIGRNKAHVDLDTLMRITSKPKRVLKTTNAYFYWVTREQGSFDWFKGVMNEIAELDQRNIIEMHNYLTSVYEEGDARSALITMLQALNHAKNGVDIVSGTKVRTHFARPNFKKVLSKIASKHPYAKIGVFYCGAPVLAQELSDLCHDFNGRCTSKFEFHKEHF

SEQ ID NO: 198631 - protein, 110 aa, Oryza sativa
  Clone ID: PAT_MRT4530_94272C.1.pep
MEKTPPPPGPKRQTPPPPGFPHSLSPPPFLVSPLKTGPPPPPPSFKLPPPLGPPPFPLPPPGPPFLCTFNLIPHSPPKPLFPPKPPPPTPPPKRKPPPPPGTGPEIPGPT

SEQ ID NO: 198632 - protein, 745 aa, Oryza sativa
  Clone ID: PAT_MRT4530_94273C.1.pep
ARARDGYLSRSDFAECIGMTESKEFALELFDTLSRRRQMKVDTINKDELREIWQQITDNSFDSRLQIFFEMVDKNADGRITEAEVKEIIMLSASANKLSRLKEQAEEYAALIMEELDPEGLGYIELWQLETLLLQKDTYMNYSQALSYTSQALSQNLAGLRKKSSIRKISTSLSYYFEDNWKRLWVLALWIGIMAGLFTWKFMQYRNRYVFDVMGYCVTTAKGAAETLKLNMAIILLPVCRNTITWLRSTRAARALPFDDNINFHKTIAAAIVVGIILHAGNHLVCDFPRLIKSSDEKYAPLGQYFGEIKPTYFTLVKGVEGITGVIMVVCMIIAFTLATRWFRRSLVKLPRPFDKLTGFNAFWYSHHLFIIVYIALIVHGECLYLIHVWYRRTTWMYLSVPVCLYVGERILRFFRSGSYSVRLLKVAIYPGNVLTLQMSKPPTFRYKSGQYMFVQCPAVSPFEWHPFSITSAPGDDYLSIHVRQLGDWTRELKRVFAAACEPPAGGKSGLLRADETTKKSLPKLLIDGPYGSPAQDYSKYDVLLLVGLGIGATPFISILKDLLNNIIKMEEEEDASTDLYPPMGRNNPHVDLGTLMTITSRPKKILKTTNAYFYWVTREQGSFDWFKGVMNEIADLDQRNIIEMHNYLTSVYEEGDARSALITMLQALNHAKNGVDIVSGTKVRTHFARPNWRKVLSKISSKHPYAKIGVFYCGAPVLAQELSKLCHEFNGKCTTKFDFHKEHF

SEQ ID NO: 198633 - protein, 306 aa, Oryza sativa
  unsure (1)..(306): unsure at all Xaa locations
  Clone ID: PAT_MRT4530_94274C.1.pep
MPKWEEMEAGLIERGIELATSKWPDRSKLWFYAHGGKLKPVDGSLVFSNQIREAASRLTDAVEASSQGTFRPDREKDELTLALQTLEHPGRTRGKGVVPWKIGFMEDIHTYRSRMRSKRNTEAKIADLEYKVSNYELSMQEEVARKVDERMAAYRSQDPQPYIPPIMVSPSGNRSSCASTGQVGSQSMDAMQTQDETTCPIDEITPIPPRYSRVEVELVEAAYEDLKLDYLXETCYIILLGKQATSPAPSPSALPSPPPPPPRAPSPPQAPAPSPLARAPCPLAPSKSRSRQAPPPACTTATQKAK

SEQ ID NO: 198634 - protein, 976 aa, Oryza sativa
  unsure (1)..(976): unsure at all Xaa locations
  Clone ID: PAT_MRT4530_94275C.1.pep
MGERKREARAGGGRRMEIERIIVGSTEEEASGSQPSAGQKRACRKRGAVKKIESRHIITEVPXSDVARNYVRHSCWVVRDNVPISKVYXRRTRARRDYDXFVVDSEKEMLWTTMLETFTLPAGTENIVKQWTLSKMAEQFXSFKGDLYHKYILKGQTPNFNIFSKLRDHWDEFVAYKTGKQGQALMDRNKENAAKKKYHHHLGXGGYSVAMPKWEEMEAGLIERGIELATSKWPDRSKLWFYAHGGKLKPVDGSLVFSNQIREAASRLTDAVEASSQGTFRPDREKDELTLALQTLEHPGRTRGKGVVPWKIGFMEDIHTYRSRMRSKRNTEAKIADLEYKVSNYELSMQEEVARKVDERMAAYRSQDPQPYIPPIMVSPSGNRSSCASTGQVGSQSMDAMQTQDETTCPIDEITXRTPCELYIPFKNLSIKVASGMAIPTDPSGTXHCRPIPPRYSRVEVELVEAAYEDLKLDYLEGDGDMHLRDTSQTIILWRKCYIILLGKQATSPAPSPSALPSPPPPPPRAPSPPQAPAPSPLARAPCPLAPSKSRSRQAPPPACTTATQKAKVDAAENKEPPYDCTQEELDAYVAAEVKRQLKPRSPEKKIPVDPSVKNFFKKMLKLVKEVLKLIDYERTLKKAYYRKSKPVPQLGEQPNQEVEPLVTGQEIGIKEFISDTGLTRTQLLKGASIPTVEVKYXFELGKPLVKPEQLKSLLTHMYRFHEQXMEMIANGREVIGTRIRTSNFLQGEDVLWIPFDISLLSAWILIEIQRARWRGDFDTGFIDPRKVNIEMIMYPKNTEDTLVHLLKEQHFKTFILLPYNTEFHRVLLLFDLEASRVNVYDSMNKDESTFDQVFELIDRAXDQFRQLVCGSWKEKLSRRFNFPCAKQSQGTNLCGYYVCEYAHCLSTQIYTTREPDVIHMRDNLTHKEFIAAVQEQLMGFINEQVLDPEGEFYYDRSAIHKIIPSSSEITPMSKP

SEQ ID NO: 198635 - protein, 123 aa, Oryza sativa
  Clone ID: PAT_MRT4530_94276C.1.pep
KGGGFSLPTYFLGVKSSKTGYFTRATERAPPKKPNIMGPHKKHRGNGPTFLIPFFGKAHRRPKAQKKLDISKQGGWETLPIVLRKQWGEKGGTNFWPTKNILRGSRGTSKQGGGGRVPKMERP

SEQ ID NO: 198636 - protein, 160 aa, Oryza sativa
  unsure (1)..(160): unsure at all Xaa locations
  Clone ID: PAT_MRT4530_94277C.1.pep
GRENTAPAPPPSPLRSVSAAAPSSASPXPPPPRRTRCSRRQVAAAPXLHRLSPPIPSARGAPVARSPPTPSAVIRSAIESPPPARPPRSPSACPPPPRRTNSSXSPGRRHRSAPPIPAARGAPVARSPPTPSAVIRSPSPVRGDQKFHRSASARAEQLRR

SEQ ID NO: 198637 - protein, 62 aa, Oryza sativa
  unsure (1)..(62): unsure at all Xaa locations
  Clone ID: PAT_MRT4530_94278C.1.pep
SILSTVSILHEWIDTSCRAAAPTXSPKHLVVHSISTNKNWMQTDIINKIFTIHAIMSMVHIE

SEQ ID NO: 198638 - protein, 127 aa, Oryza sativa
  unsure (1)..(127): unsure at all Xaa locations
  Clone ID: PAT_MRT4530_94279C.1.pep
MARTKQTARKSTCGKVPRKLLATKAAWKSAPTTGWCXKSHRYRPGSVVLRXSACTQKSTELLIRKLPFERLVREIAQDCKTDLRFQSHAVLRLHEGRLAYLVGLLEDTNLCAMHAKRVIIMPKDMQL

SEQ ID NO: 198639 - protein, 163 aa, Oryza sativa
  Clone ID: PAT_MRT4530_9427C.1.pep
MTHPSGTPGYIDPECVITGKASAESDVYSFGVVLLEVVCARRPMSLLDDQNNGLFRLVEWVWDLYGQGAIHNAADKRLNNDYDVVEMERVIAVGLWCAHPDRCQRPSIRAAMMVLQSSGPMPMLPAKMPVATYAPPVASSEGQLSSSTGMSSSSLTQTAITPR

SEQ ID NO: 198640 - protein, 59 aa, Oryza sativa
  Clone ID: PAT_MRT4530_94280C.1.pep
TDLTKLAGFIYHFIIPDKLTHTHTHTHFLFHEAPICMFVLFHFSTKIHFVVHSLRPNDP

SEQ ID NO: 198641 - protein, 126 aa, Oryza sativa
  unsure (1)..(126): unsure at all Xaa locations
  Clone ID: PAT_MRT4530_94281C.1.pep
LKLQCWLPMEDCMCAKLGSCNLWQGIRFWLYMHPKVSSKGFMLNFLFCSFFWVCQYLXTLLLQDFLRQSNTGXLLWQVFGIQAAPLCLFGIQEHEDIMWDAFQRSGCYKSQCQLSSVKHMKSVTLK

SEQ ID NO: 198642 - protein, 161 aa, Oryza sativa
  Clone ID: PAT_MRT4530_94282C.1.pep
MGVTPFRGGHRGRHPRNTKLGDNRTIMDSIDDNTTVADAIQGTSSSPTPMLLWTTIASPTGMPKLADVHPVMESDCSIKLGNAEVYNKERRPRPHDSWICAIPAENDHEEEAARSGTGRIRAAPVDDDEEEAAGSGAAGPSRMHAGQIRAAAAAAAGFLGF

SEQ ID NO: 198643 - protein, 106 aa, Oryza sativa
  unsure (1)..(106): unsure at all Xaa locations
  Clone ID: PAT_MRT4530_94283C.1.pep
XGDIIIYWGVFKKKREICIDIPIPAHGTPSQATTLRVFWTTHTYQFILARVCPTDRQSNFFLGETMEMETTTNPAKAKGGETTTFTGGDHKNRSTRHPLFAWAMAG

SEQ ID NO: 198644 - protein, 135 aa, Oryza sativa
  Clone ID: PAT_MRT4530_94284C.1.pep
MKGVKSLIMCVLVLGLVLQQETIKVGAKSCCPTTTARNIYNACRFAHGTRERCSKLSGCKIVDGKCKPPYIHHTLHPESEELDVLDFCMLGCTSSVCSNINTFAGNEEGNGAVERCNEACYHFCNKEADIVTIVS

SEQ ID NO: 198645 - protein, 45 aa, Oryza sativa
  Clone ID: PAT_MRT4530_94285C.1.pep
ALFGNFWGSLGAPLMCLLSQDGPPPYAAPLGGAPVVQPAQIVAPV

SEQ ID NO: 198646 - protein, 59 aa, Oryza sativa
  Clone ID: PAT_MRT4530_94286C.1.pep
SIKSLPNQLLIGFNLILIALQGMSRRSSSWRPGDWGSSCCGCCARDGLSRLFTGLRALY

SEQ ID NO: 198647 - protein, 84 aa, Oryza sativa
  Clone ID: PAT_MRT4530_94287C.1.pep
MSIVVAPSAIGVLVIVITGGVRVREELSSARSGAVPNQPSLLSLTALSFLLRIPGTADVILRSHLQGQTRDGRLINCAQDREIW

SEQ ID NO: 198648 - protein, 158 aa, Oryza sativa
  Clone ID: PAT_MRT4530_94288C.1.pep
MALVAAAAANQKQQKASIGRRAWRLLRLAVLWARKGSAVHSLCLFSNLRRAGVGLGVVGGGGRSERLRGVGCYDYIENDVLKTEQIVQVGHGARGDVTILPTLVINNMQYRDLFCYDYNGEPSECGGVEDECFRDGAMDEQLLELSMPTPASARRSAR

SEQ ID NO: 198649 - protein, 67 aa, Oryza sativa
  Clone ID: PAT_MRT4530_94289C.1.pep
MAADEEDGAGAINFRRRRRRRSLELRRLVPLTLSYTLRPTKAAAAPPAERVPAAGHKAMMAAGDEGE

SEQ ID NO: 198650 - protein, 73 aa, Oryza sativa
  Clone ID: PAT_MRT4530_9428C.1.pep
MADPARIPRIRGRIRRRFARGGALDREGFSKLWVDNHGYMLIAGMCGVIIAGSPSEGNDVPPSEHLFSSSLAS

SEQ ID NO: 198651 - protein, 421 aa, Oryza sativa
  Clone ID: PAT_MRT4530_94290C.1.pep
MASRKSLRRSALLQLPCGCFAETRVVLDEKTEHLQLPPTRTRCHDENSVYANLLSNIGFNTGLEVCKASYTVSLAYGGALKSDFAICGIWFLKIKCWPVLQFTPEFCTYVQQGLLRNPLTLMFSCLHFPSHAAIWNTVLGMIIAWVGDKQQLYRNNILGINFSRTSYMHNASLLLYFPWAFSHRQCSCIGLLGVDSRQRKILPSPYISSSQCDLERTSTRPLGRGLVKILALLKEEDANGPTCDCHDDKTHCQEWIIFLSKLPEIIVFYFCVSCGGTLGQQSATFSELCIAVVEFFVKRKQKMITVPFRNTFPETFVDWVYHIRADAISSINKLPKHICIQHLISSQKAATGADYTNAKYDCLEQSYRHLHVDVDLRSVIGLSNTAFRKCLLLGIHNDSDVNELTRNLGWSDLTCVFLNRD

SEQ ID NO: 198652 - protein, 210 aa, Oryza sativa
  Clone ID: PAT_MRT4530_94291C.1.pep
MALVAAAAANQKQQKASIGRRAWRLLRLAVLWARKGSAVHSLCLFSNLRRAGVGLGVVGGGGRSERLRYGEPEYSIEETPSARVLCLIPCIAPAVLDTPGFYGDEDRYFFCRWDTEPECSSVGCYDYIENDALKTEQIVQVGHGARGDVTILPTLVINNVQYRDLFCYDYNGEPSECGGVEDESFPDGAMDEQLLELSMPTPASARRSAR

SEQ ID NO: 198653 - protein, 203 aa, Oryza sativa
  Clone ID: PAT_MRT4530_94292C.1.pep
MALVAAAAANQKQQKASIGRRAWRLLRLAVLWVRKGSAVHSLCLFSNLRRAGVGLGVVGGGGRSERLRYGEPEYSIEETPSARVLCLIPCIAPAVPNTPGFYGDEDRYFFCRWDTEPECSSVGCYDYIENNVLKTEQIVQVVRPTDQLDAEKCRIFDLFCYDYNGEPSECGGVEDESFPDGAMDEQLLELSMPTPASARRSAR

SEQ ID NO: 198654 - protein, 94 aa, Oryza sativa
  Clone ID: PAT_MRT4530_94293C.1.pep
EYCFYHRFAALLFLLPPFKCAKKENNKYQTIDWYIQLHYRKVQKVIRKDHPSVILERTYRKLDFNVSKVEYRRENNMTLEYTVRLSEDASLFKR

SEQ ID NO: 198655 - protein, 90 aa, Oryza sativa
  unsure (1)..(90): unsure at all Xaa locations
  Clone ID: PAT_MRT4530_94294C.1.pep
CSSTRKQELVEIKLKQKGWRCAEIVLNVTLSIRGNHLEAYRLNPMSYTKSHCRNRLYHLTQSDSDLADPXIIADPDSSRFLLYFRDDPHL

SEQ ID NO: 198656 - protein, 846 aa, Oryza sativa
  unsure (1)..(846): unsure at all Xaa locations
  Clone ID: PAT_MRT4530_94295C.1.pep
MVSSSKTAARNPLGGNAISEKLSKSNHVLWKAQVLGFLLSTLARDVLAQVATCNTATAAWQMLEEMYSSVSRARFINTRIALSNTKKGTLSINEYVSKMKTLADEMTAAGKVVDDDDLVLYIIAGLDDTYEPVISTIVGKDFMTLGEAYSQLLSFEQRLALRHGGDASANLANRGRGGGGGQQRGDNAGNGRGRGNNNNGANRGRGRGNNGGARPPGGVDNIPKCQLCYKRGHTVINCWYRYDEDFVPDEKYAGSATSYGIDTNWYVDTGATDHVTXELDKLTVRDRYKGQDQVHTASGARXSHQWPYSRSSSMSSYPLELIYSDVWCPALTSVGGKQYYHKSEVVQKFHEFQALVERLFNRKIIAMQSDWGAPNPGEQQLDDNMANIPANPADQFFGSNVQPVSAENDEPDDPSYATEDPAEEIHPEFSAAAKESASGSPPASDAAASHSSAATSPDVAMDIEYDALMNNETWHLVPPRQGRNVIDCIDYEDTFSPVVKAATIRIVLSIAMSMGWCMRQLDVQNAFLHGFLEEDVYMKQPPGYEDKSFPDSRQEAVSALLQDLKKEFALKDLGDLHYFLGIEDKYACDLLRRVNMFDCKPVSTPLSTSEKLSAHEGDLLGPLDATNYRSVVGALQYLTLTRPDIAFPVNKVCQFLHAPTTIHWVAVKRILRYLKHCTKLGLKLCKSKSMLVSAYSDADWAGSLDDRRSTGGFAVFLGDNLVSWCARKQATVSRSSTESEYKALANATAEIMWVQTLLTELQVQSPPMAKLWCDNLGAKYLSSNPVFHTRTKHIEVDYHFVRERVSQKLLEIDFVPTGDQVADGFTKALPVRQLENFKHNLNLGRL

SEQ ID NO: 198657 - protein, 78 aa, Oryza sativa
  Clone ID: PAT_MRT4530_94296C.1.pep
YLFPFFLTFTNLQTHFCKEKKMKICCRVFLISYYTLRPKKINLALDGTYSSTINLDRDIPDSVYYNMAYPNMFSFVVL

SEQ ID NO: 198658 - protein, 1447 aa, Oryza sativa
  Clone ID: PAT_MRT4530_94297C.1.pep
MASSSKTAAGNPLGGNAISEKLSKSNHALWKAQVMAAVRGARLEGHLTGATKTPNALITTTAGDKGEKEVTVRNPEFDDWVATDQQVLGFLLSTLARDVLAQVATCGTAAAAWQMLEEMYSSVTRARFINTRIALSNTKKGTLSINEYVSKMKALADEMTAAGKIVDDDDLISYIIAGLDDTYEPVISTIVGKDTMTLGEAYSQLLSFEQRLALRHGGDSSVNLANRGRGGGGGQQRGGNTGNGGRGRGGNNNGANRGRGRGNNGGARPPGGVDNRPKCQLCYKRGHTVINCWYRYDEDFVPDEKYAGSATSYGIDTNWYVDTSATDHVTGELDKLTVRDRYKGQDQVHTASGAGMEISHIGHSTVRTPNRDIHLRNILYVPNANKNLVSANRLVSDNSAYMELYSKYFNLKDLATKKLLFRGPCRGRLYALPSSSPHERPRPLKEAFGAIKPSFERWHSRLGHPASPIVEKVISKNNLPCLAESNKQSVCDACQQGKSHQLPYSRSSSMSSHPLELIYSDVWGPALTSVGGKQYYVSFIGDYSKFTWLYLIKHKSEVIQKFHEFQALVERLFNRKIIAMQSDWGGEYEKLHSFFTKIGITHHVSCPHTHQQNGSAERKHRHIVEVGLTLLAYSSMPLKFWDEAFQAAVYLINRTPTKLLQFLTPLEHLFNQTPDYSSLRVFGCACWPHLRPYNTHKLQFRSKQCTFLGYSTLHKGFKCLDPSTGRVYISRDVIFDETNFPFAKLHTNAGARLRSEILLLPSHLLNPTSNPGEQQLDDNMANIPVNPANQIFGSNVQPVSAENDEADDSSGATENLAEQIHQDTAASPSASDTAASQPGAATSLDVVHFPASPDVMTHHSADSSSPSQPSHATATPASNDDVPSPSHISASEPFATGEEVTQAPSRPTTRLQRGIRKEKVYTDGTVKYKNTFLTVTGEPKNLTDALQNTNWKKAMDIEYEALMNNKTWHLVPPKQGRNVIDCKWVYKIKRKQDGSLDRYKARLVAKGFKQRYGIDYEDTFSPVVKAATIRIVLSIAVSRGWCMRQLDVQNAFLHGFLEEEVYMKQPPGYEDESFPGYVCKLDKALYGLKQAPRAWYSRLSKKLYDLGFQGSKGDTSLFFYNKGGLIIFVLIYVDDIIVTSSRQEAVSALLQDLKKEFALKDLGDLHYFLGIEVNKVTDEIILTQDKYACDLLRRVNMFDCKPVSTPLSTSEKLSAHEGDLLGPLDATNYRSVVGALQYLTLTRPDIAFPVNKVCQFLHAPTTVHWAAVKRILRYLKQCTKLGLKLCKSKSMLVSAYSDADWAGSLDDRRSTGGFAVFLGDNLVSWCARKQATVSRSSTESEYKALANATAEIMWVQTLLTELQVQSPPMAKLWCDNLGAKYLSSNPVFHARTKHIEVDYHFVRERVSQKLLEIDFVPTGDQVADGFTKALPVRQLENFKHNLNLGRL

SEQ ID NO: 198659 - protein, 122 aa, Oryza sativa
  unsure (1)..(122): unsure at all Xaa locations
  Clone ID: PAT_MRT4530_94298C.1.pep
SSWVVAAQIDRAEARPTAADERVAQLEAELEVAREDLQKMMELVAGNEMQRQGLFSIRDSLRKTFTWLHQLAXLSCGAKSSIPTHPDEKSLTSALSELVDEMETIPSRHATHIAEEISNGIH

SEQ ID NO: 198660 - protein, 776 aa, Oryza sativa
  Clone ID: PAT_MRT4530_94299C.1.pep
MAGGKRRHARSNPTAGGPRHGAGAGRRRPVPELPSFVSPASVAAAFSSSSSGGRGRGGRGGRRGGGGGGSSNSASDSSSHAVPFSYAALRPSASFEGATQVLDVTIDTAPCADPASASVPVYSYGPVGGIGLGFHGEEEDEEEEAGEAGLHLGLGFRGCSNEEVELEEATLVTPRKPKEKPKGKRNEGFLSIGGIRIYTEDISSPESGVGDSDEESESDYEGRDGNDDGDSDEEGSDVNEGGSESDEELSGSDSEEDLSIGDSSVDDEVVADYMEGIGGSEELLSSKWVAGMNLVDSDDDDEMDTDEDEDGFLKKVKGQLEGYALMNASEQYGMKRPSSADRLKGKGTAVRACDRDLASMRVMGLDAVMMVKDVRMANRLRKGAKVASSSSHLSRSWPNEGRKSKKYQSVPGEKKKHRKELIAKKRRQRMLGRGVDLDQINTKLRKMVVDQVDMVCFQPMHTRDCSQVQRLASIYHLKSGCQGSGKKRFVTVTLTADSSLPSSEGQIRLEKLLGTEPEDFTVNWENSKRPAQVKGLSAPGKLARNQTSSGKKSSKKQVSFAERPVSFVSCGTMAESVTETIAVATTSGEVSCEKIVESDSVKLGTFEMHTKGFGSKMMAKMGFIEGTGLGKDGQGMMQPIQPIQRPKSLGLGVEFDSEAEAIKARSEPPTKARSEPWRNLRKVEIGGVGSFERHTKGFGSKMMARMGFVEGSGLGKDGQGIVNPLTAPLEFDNLVVYMLGEHNPVGRGKQHAKSWVPMPLAVGSCIRLASRIPLLV

SEQ ID NO: 198661 - protein, 722 aa, Oryza sativa
  Clone ID: PAT_MRT4530_9429C.1.pep
ALSRKPQQSEEEFNAISQCVPQWLMEVLQSYDTDPHATQLVAALTLNPNSKPHFSLQHGVLRYKGNIWIGNSPDLQLKIINEMHASPVGGHSGFPVTYRRIKQLFAWNGMKSQIKETLANCQICAQAKPDRSRYPRLLQPLPVPKGAWQTISLDFIEGLPRSSHYNCILVVVDKFSKYSHFIPLRHPFTAIDVAKAFMSNVYKLHGLPQIIISDRDKIFTSQLWEQLFLRSGTKLHYSSAYHPQSDGQTERGNQCLEIYLKCFVQSAPSKWPSWLHLAEYWYNNSYHSTIDRTPFEALYGYPPRHFGISIRDCDNSELITWMQDRKLMQQLVQQHLHRAQQQMKLFADKKRSFRQFQVGEWVYLKLQPYVQSSVAPRANHKLAFKYFGPFQILEKLGTVAYKLQLPATSSIHPVFHVSLLKEAKGFQPSVHTPLSPTYSAVQYPIALLDHRLTKKGNHTVHQVLTHWSDTIPAQATWEDLHDLKARFPNALAWGQAKTQGEGIVRSSSDSAEEDTEEELSLEAEQDDDEKMQAEAEDAEQGGVMDHQPVLRRTSRTVKPNPLYHGPQWAVLDPNIFFLSVFCDDLYSPALVVVALTFNHTNFGPDEQTNIRLEGDAAFSADVSFSGDGGGWVDISANRLDGNIDHSRGRVSYALPVPLWDAATGEVASFTTGFSFVINPPKEDGGINNKGAGMAFFLAGFPSRLPSAGSYAYNLGLTNQTAD

SEQ ID NO: 198662 - protein, 47 aa, Oryza sativa
  Clone ID: PAT_MRT4530_942C.1.pep
MARLPADFEEVEPRQRIICFRVLKFVLLRKRKFEIHSRYDGLRQMTS

SEQ ID NO: 198663 - protein, 107 aa, Oryza sativa
  Clone ID: PAT_MRT4530_94300C.1.pep
IMQPIQPIQRPKSLGLGVEFDSEAEAIKARSEPPTKARSEPWRNLRKVEIGGVGSFERHTKGFGSKMMARMGFVEGSGLGKDGQGIVNPLTAVRRPKSMGLGAKNKY

SEQ ID NO: 198664 - protein, 103 aa, Oryza sativa
  Clone ID: PAT_MRT4530_94301C.1.pep
HLHWMQCITDLAWLRWCLAVPPRAAVRFACFYAALALCSMLLCAQCSRFHRCKVASCTPEPDVPCRVASWWLGYSTVVPNLAAVQPLVRLVRGVSLLLRFSGP

SEQ ID NO: 198665 - protein, 48 aa, Oryza sativa
  Clone ID: PAT_MRT4530_94302C.1.pep
LSRRLQLSSCQVMRQQCCQQMKLMAQQYHCQAVCTMVQSIMQHVQFDA

SEQ ID NO: 198666 - protein, 187 aa, Oryza sativa
  Clone ID: PAT_MRT4530_94303C.1.pep
ASCWRSASRCSSPSRCSSSPTSSAPTSAGAGCARRRGRRCPGGARSSGWRGRRAPPRATTTRRRWRRRRPPPPRARRCRAPRRSTTRTASCRRRRTPRTSSSPSPSWSPPCGGGRRPGARRRPPAPPPTATASCASPTRCTSGAPRPRPTFVGTRTRHSRRPTPRRRHLGSRRRWKKRVASSRRHCP

SEQ ID NO: 198667 - protein, 76 aa, Oryza sativa
  Clone ID: PAT_MRT4530_94304C.1.pep
SCAPLFSPASRLLNDSRVVGWPLCWFSSQRGVRQHQGLHSAHLAAHPHPRLHGYLVPAIVLPATPPATRSSPLPMP

SEQ ID NO: 198668 - protein, 66 aa, Oryza sativa
  Clone ID: PAT_MRT4530_94305C.1.pep
NTHKYDTLPGDSIQISVVNKAYKFLELSYFMPMGYSIIDYSGCGYIHIIYPINKKQHLLLISVDDI

SEQ ID NO: 198669 - protein, 150 aa, Oryza sativa
  Clone ID: PAT_MRT4530_94306C.1.pep
MEEVVGKPPCRSAPRIAGAAADCQDFYQFSCRRYTGTPAHICISKQTRSQMLFSTLNSMVMGTLGVAADSGTGGFTNTDSACCGSGIMGAEDDCLPNSTLCTDHEGFLFWDRVHPSQRSAQLTAATFYDGMSHFTTPFNFKQLVAKKMTD

SEQ ID NO: 198670 - protein, 331 aa, Oryza sativa
  Clone ID: PAT_MRT4530_94307C.1.pep
MELTNVPHIAASSRFFSSCSRCTCRIRRSGKTRIGASAAGRRCSSDDSACSEPSEQQNADFFSGPISSLCYTRRDFASVALLPFILPHVHIASAAEPIDGSIIQNGVRNVLSKVKAAGMLRLAFHDAGTFDIADKSGGMNGSIIYEVDRPENTGLNKSIKVLGKAKEVIDLVQQVSWADLIAVAGAESVALCGGPEIPVRLGRLDSSTADPAGKLPEETLDATALKTLFSKKGFSTQEMVVLSGAHTIGGKGFGNPNIFDNSYFKVLLEKPQPSSSGMPAMVGLRTDWALTEDDECLRWINLYAQDQAKFFADFKDAYIKLVNTGASWRSA

SEQ ID NO: 198671 - protein, 83 aa, Oryza sativa
  Clone ID: PAT_MRT4530_94308C.1.pep
WNVFLEVSTSVQSVQIIVCYFSQRVVVLSYSNEGQLLSVFGGLVASWVDKHCHMFKFLFSAERKQQTKMGGTVVSCFVFFKLN

SEQ ID NO: 198672 - protein, 82 aa, Oryza sativa
  Clone ID: PAT_MRT4530_94309C.1.pep
MRLNSLDLIVPKKTGRAHVSLSLGGIGIWGTFTSPWESMDFTVDHHTAACRWLAHEKSDQNWMIDAGEKIKFPGGGTHFHHK

SEQ ID NO: 198673 - protein, 61 aa, Oryza sativa
  Clone ID: PAT_MRT4530_9430C.1.pep
KKNSIHFIVSFSTLHHSHFPKFYLLFPHPKNNDLTHHTCIVLDLLILSQIGILVHATVTNP

SEQ ID NO: 198674 - protein, 109 aa, Oryza sativa
  Clone ID: PAT_MRT4530_94310C.1.pep
MEGVYPYQYRPRATIYRLPAHHTKAPTPLRSARGNKSRRRCRAGRTYADGDATTTTTAYGLDRWPAWGMYRSAFQGLNVAVPDDRYISWPPLRRVDVNELDRLCRCLHH

SEQ ID NO: 198675 - protein, 116 aa, Oryza sativa
  unsure (1)..(116): unsure at all Xaa locations
  Clone ID: PAT_MRT4530_94311C.1.pep
HEGLYAQAVHVRQPDPSTGKMRIANKQSSRLVXETCLSDLKSLGKVAVRLIFLHATAKGFRCAPPMSRWLTAPGSSAAGIARAQRLVYVAANSKLERRDFSNDDDKDLELAHGGRR

SEQ ID NO: 198676 - protein, 51 aa, Oryza sativa
  Clone ID: PAT_MRT4530_94312C.1.pep
MAVMHGKEEEGKVESESSPRQCGTTGTMEQREKPSVVGDAQAMVRECPNAR

SEQ ID NO: 198677 - protein, 118 aa, Oryza sativa
  Clone ID: PAT_MRT4530_94313C.1.pep
MGLPIIAPLPTDKLLGKKWGRWGQHPALWASAARRRGIVSRSHGAHDKRPTSSLQSGLLCVFTRLHIASAPASFRACMQGFPGPGLPCLGGRPMPFADRCGPPVRFFYSSRPPSDCGA

SEQ ID NO: 198678 - protein, 276 aa, Oryza sativa
  Clone ID: PAT_MRT4530_94314C.1.pep
VRIPGRPTRPANANAGVGVGANLGIGASISGGAKVGGGIGANAGVGVDAKANADASLNAGAGIAKDDKIGAGISKEDKSSAGIGGNAGANANAGVGVGANLGIGASISGGAKVGGGIGANAGVGGDAKANADANAIGGGGAVGGQAGANANANANAGANVGIGASKHIGFGFGAGGSFHFRASAKAHANANAAISGSEGSNIGAGASASKSVGAGIGAGVGVHTGMNIGFHGGIGGNANVGSNAGIGASGKENNSVEEEKSKSAEASTHKEYGSAN

SEQ ID NO: 198679 - protein, 203 aa, Oryza sativa
  unsure (1)..(203): unsure at all Xaa locations
  Clone ID: PAT_MRT4530_94315C.1.pep
MAVIGRRRRRRRPAVGEEVVEVAKVSVAGSAVASAAGRRGKAPAAESGFPEAKLGGIGGREARKGAGGQIRLPGGQIWRPAVRRRLEASPAEAAEMETAATVGPQPPPLPPSAATAPRLXDPSSATAPPLAHAGSGGRTAAAPPHPPLPDLAAAPPPPPRLPSRPCRIWRPGRRRRPSRPGAAAPPLAMAQRKRGEIEKKWKR

SEQ ID NO: 198680 - protein, 316 aa, Oryza sativa
  unsure (1)..(316): unsure at all Xaa locations
  Clone ID: PAT_MRT4530_94316C.1.pep
KRTCWQRAEAEARLEASPAEAAEVETAAAIGPRPPPLPPSAATAPRLXDPSSATAPPLAPAESGGRTAAAPPHPPLPDLAARPPLPPPPAWRRRASPPAPAGSGGRAAAPPLATAQRKRGEIERRSGRDRGEVEKREPAGLISSCGPRWERRHIYTVAEVISNGLGLKSPGCLTDDGIPYDPLEVTVISHPCVRPPQTQAARHSARSEQRLHDRDSARPGRDRLTALMAGAIDEVASPPAPSPLGCPAFHHRLQTSDSADAASDLQFRFHRFRGYKQDDPAPDSDDAENEATSEERLDPNRHIERQIYPYRFYTAS

SEQ ID NO: 198681 - protein, 227 aa, Oryza sativa
  unsure (1)..(227): unsure at all Xaa locations
  Clone ID: PAT_MRT4530_94317C.1.pep
MSILTNSWRPDMAVIGRRRRRRRPAVGEEVVEVAKVSVAGSAVASAAGRRGKAPAAESGFPEAKLGGIGGREARKGAGGQIRLPGGQIWRPARLEASPAEAAEMETAATVGPQPPPLPPSAATAPRLXDPSSATAPPLAHAGSSGRTAAAPPHPPLQDLAAAPLPPPSPAPXPPRLPSXPCQIWRLGRRRRPRWLGAAAPPLPPLPDLAAGPSPPPQPPRHREREER

SEQ ID NO: 198682 - protein, 33 aa, Oryza sativa
  Clone ID: PAT_MRT4530_94318C.1.pep
KDGIEYHYFHPKIQFSDNILEKSLAFAPWLGKA

SEQ ID NO: 198683 - protein, 128 aa, Oryza sativa
  Clone ID: PAT_MRT4530_94319C.1.pep
MAAIFPHLASTLPLLRAVRTPRRLPPAVSAVPPRAARVVLRGFRLPDPAARKFLCFEDSIGLQTEHQKPDSTSTGAKQNSSSDDNSSSTDGPPVLTILAGIIVFLLVLWVIGSLFTWIAGLVFGAAKS

SEQ ID NO: 198684 - protein, 75 aa, Oryza sativa
  Clone ID: PAT_MRT4530_9431C.1.pep
SHITCRRNHSHIRLGDEATHWRTIAHPPWLNGRPPTTRLLDGSTTLTQHLHYRKSHRRGIAHDRTPSPQCHENSL

SEQ ID NO: 198685 - protein, 188 aa, Oryza sativa
  unsure (1)..(188): unsure at all Xaa locations
  Clone ID: PAT_MRT4530_94320C.1.pep
PLSHRRWPAAAQCSRSSSSSSSSPRLSGGGGGARALVVVVVAAAADLADGEEATANPRRRRHARARPPPRSPRRRGXGAGEGHRLPPRAQQEYDVTSATATGPCDAYLVFRCSPPLYASAISISNVLNITATAVTESNAVDPVTPVAADPLVLAPVVGDLIPTRRLACPRGEGEREEEGRGGERDGGG

SEQ ID NO: 198686 - protein, 111 aa, Oryza sativa
  unsure (1)..(111): unsure at all Xaa locations
  Clone ID: PAT_MRT4530_94321C.1.pep
AQRKKALRRRRNPRDVXRIDVEEVIDRTGSTFSSSCVLLAVLPHRSAPQGNDDSTGIYTYSSKAHRTPIRIPTRSSCTLGCNPKTPFQSTCQQWPLAERIDXPGIHKDHNG

SEQ ID NO: 198687 - protein, 81 aa, Oryza sativa
  Clone ID: PAT_MRT4530_94322C.1.pep
RQPVHRRILRASSSRLAASAPTFSTPLSLIFRPKLALSSCPSWCARGAFCLMCTPRHCNDGEEEEKAATVTMEMVDLPVGG

SEQ ID NO: 198688 - protein, 111 aa, Oryza sativa
  Clone ID: PAT_MRT4530_94323C.1.pep
LFCTLNPYVGQQYVPIYGVSSAANTASQPFSQFSPSISGGGNGYVAIHGYNVPGNPFVQLTGSNFSSASPTPRPTIQAPFLVAPVPTHPHLVLPAHSPQFTQASGSDQRAS

SEQ ID NO: 198689 - protein, 1932 aa, Oryza sativa
  Clone ID: PAT_MRT4530_94324C.1.pep
MFAPSSPPFFPLPYARIRRERAARSLMGGPAAVYGRASFRPNRLRSFLSSGFLPPCGGCCDSSASHCRLPLVSYLWELDGHGTLLAGVELILPPEDPASGQAHPSNNLARKFFWVAATDPLIVSHEMVAQQVVRFMQAKYRFAVHDYNFHMLLSYRKIASSAVDAALTAASCLARLQSRYGALDLPCEGSSSSQSVNHSMCSVLVQSVHVGQQGTSAGAGPSMEQPIDSEPLVGNAKRKSSLLDIPRSAAAVNRERRRMKISGGQTNHSLDGILNGPTPSADDILPLPKDYIASLKALYPHQSYYGGPSHECPHCGAVFWYQERVKKGSVVSQRKILYNLCCRGGANIDKTINNGTAPCVFKINGVVHQGIGSLLPQQGSRPKFAQLYIYDTENETANRMNIYEKDNPSDEPDPDIVNGLSSMLDEHNDLVKAFRFARDRLKDNGDQKIALRLLGCDSRDEIQYNLPTSGDIAGNIEFSAPIVDGFISAEIPDVLTDPLGYALVDEFMIHGPCGDVNKTCSCMKKGECSKHFPKSFQEETIMDEFVFTVYKRSNDGRYVLKNGIKLDNRWVVPYNMELLKKYQAQINVEWCNKSNMIKYLFKYVTKGADRTKAFFEISGNAPNKPAENCTAPRNEIQEYIDARFLSTCESLWHAFEFDIHYRVPSVERLAVHLPNMNFVRYKKGSDLKSLLSSPVAKKTMLTEWFEATRKHNSPRTLTYCDFPREWTWDSISRSWRPRTPCEKIGRIYYVSPVSGELYYLRMLLMIVKGATCYADVRTYDGIVYPTFRQACEARGLLESDNEWHLLFDEAIVSASSGQLRQLFAPVVMFCSVGYVRSLFEKYWTYFTDDIQRRVRTALSNPSYVIPPDRLLSLLMKELHIVFSNSGGSIDDYDLPQPAIYSDDITGNRMVDEELALDVAALTAEANLNIPRLNTDQRNVFNTIMQRVNENRPGLFFVYGHGGTGKTFLWNTLISKIRSEKKIVLAVASSGVASLLLPRGRTAHSRFKIPIDIDENNICTIKRGTMLADLIQKTSLIIWDEAPMTHRRCFEALDRTLRDLLSEHTPSNSIVPFGGKVVVLGGDFRQILPVIRKGSRASIVDASITNSPLWRHVVLLRLTINMRLLHGNVTDQNRVDLSNFGDWVLALGDACAQKRCDDYATTKPKSIYGSMQWDKIPNLELGDGNPTLLVRVSRLWEYHDQDDEGDLRHIGLVLVGEKGYAIAAMIYPPWGKKFKPLISEGKVYLLTYYRVKPCTKHYRPVDNKMMINFTRWTGIEEYVDVQAGFGHYAYTLTPYQELRSRVDRKDSFTDVIGVITDISSVTTVRTRVRDSDSLKRNVYMRNAENETTNIVLWGERATSFPADEILSAGKEKPQIVIFVGTLVRGHGSVVLIAWDTVVIGNVSLSGNSACKCVEGNYEAIKWIDLPAAPILQNNCEQKTIAEIRDPHPFKFKKHEFSVTVVIKKLNMEYSWWYTACDICKKTAKPYGNLYRCGNSTCPPTGSASPRFKLSVIAGDDTGDTTFIIFGHLAQRLIGRSVEALMLENPTGKGCISREITDLLEKEFVWNVSFTENTVSSGIVAFQVNRVVKGAQSHSLALLQSPSGSQTSSLMPCMALSPVASQDTSIGQPIAASPSAGFSDAQRTLSSPPINTEKDKNTGNEYASKSPAQDAGDNEDCYEDDEAVSLTQVASAPATKNSTSKAYKKRPRPSPGTGAAKKLFKDDAADDTDGATGGSNMEPDSNRQITMPVTQPSSYARKRPLAAAKFSDRKETSQLLVDIIYRDSVVVKVLGAGNPSTTQISAMVGEHHIQDLSVFRLAAWTTNCDLIPKIIEWNIETNQEGEQCTDLKWKPNGDLSIILIHIEKLFDYSNENNTTEDNQGDLTEYEKTKQRLPIMKTFQWTPGQIDSDYGPIEGGSPLVPPLDLDKKNWFDPDQ

SEQ ID NO: 198690 - protein, 97 aa, Oryza sativa
  Clone ID: PAT_MRT4530_94325C.1.pep
VFKPHTGVVGGYQHAVSVNLGLTVLDGAERLGVSAASSPSSPATRAGGWGARGRRRWTAVLGGRPGRTAATTAAVGSHGVFQRVPPALGGEGWGRER

SEQ ID NO: 198691 - protein, 84 aa, Oryza sativa
  Clone ID: PAT_MRT4530_94326C.1.pep
VGGVLFFFFLGDLFFFFWGGLGGGLKIMIGVCGGKWFSFKGVIKRWALNKEKKVSGGKWGGYQNLQKLGSGGIMKKGGGSIKGS

SEQ ID NO: 198692 - protein, 114 aa, Oryza sativa
  unsure (1)..(114): unsure at all Xaa locations
  Clone ID: PAT_MRT4530_94327C.1.pep
DVGDDVITGGGSGAQARRRTMARRRERRTPTRRGRRGELTGDQNSGGRSTDGDDGGVDEICDLRRCSGDLRRRLGDHDGDLPEQQRRPERRRRTAXTVLGRYRRQRAKARVAAG

SEQ ID NO: 198693 - protein, 72 aa, Oryza sativa
  unsure (1)..(72): unsure at all Xaa locations
  Clone ID: PAT_MRT4530_94328C.1.pep
LHLTFHQLQGMAVALKCGATKATFDSXPSAAEEFVTMRTLTRRVSPSSKPKTKGLGQEMRSLSAAGLCVPVG

SEQ ID NO: 198694 - protein, 243 aa, Oryza sativa
  unsure (1)..(243): unsure at all Xaa locations
  Clone ID: PAT_MRT4530_94329C.1.pep
MAGTSGGAVTGGGHGKLLPDLNVVATVAHDDEGRHARGAPRPQDGGTSTTTTMVASAGAERGSTTGHLPAATAGYRRTLMLFLEEEDDDAVEDEQQQQQAPPLPPATSTATTTTRTAAEANVQRQRQPPCCTFVVHPCAVHAKMRHGAAYGTIHFHLFESGFMPSYNCWTSYGEQGVELEEDEVEDDNIPDFAQYAGFEGNQTGEEERDADGNDVADDLGQMLQDTKEDCESEKGXYKLDKML

SEQ ID NO: 198695 - protein, 108 aa, Oryza sativa
  Clone ID: PAT_MRT4530_9432C.1.pep
MGAGGEDVECAAIAVDVHGSGNGGRGGVGDGLGSTSLSLSVAVAVDRDENRHGRGLGVASDQQPWSSRPAAAVTGIERHPQCVRLTRGILDGAVFPLGMPTEIWRLTF

SEQ ID NO: 198696 - protein, 372 aa, Oryza sativa
  Clone ID: PAT_MRT4530_94330C.1.pep
MGRWAAGICAVALVWLAAAAAGDLEPDELERAFPIVEPDYGHTKLRLSQQGLDAIRRIETPIAVVGVIGPYRSGKSFLLNQLLSLSCEKGIWIWGTPVEMDIDGSKVSVLYLDTEGFESVGKSNVYDDRIFALATVLSSVLIYNLPETVREADISRLSFAVEIAEEFYGRVKGQDVAFEPAKLLWLIQRDFLRDKYIDEVNQIRDSLAVMGNNSTAFSLPQPHLQRTKLCDMDDRELDPLYVKRRDELKQVVASITRPKIVQGKTLNGKEFVSFLQQILEALNKGEIPSTGSLVEIFNKAILDRCLKVYRDKMDGLRLPVPVDRLQQVHETAIDQARMLFDKQHFGKHHAAQSILKLDDEIKKGVQKLPSSK

SEQ ID NO: 198697 - protein, 72 aa, Oryza sativa
  Clone ID: PAT_MRT4530_94331C.1.pep
NHLIFPKLIPKNLCIFIISMEIFFFIPSYIATSIQQLLSVNHNIEVQPKKKRLQNMKVTSPKISSLSNFSKS

SEQ ID NO: 198698 - protein, 47 aa, Oryza sativa
  Clone ID: PAT_MRT4530_94332C.1.pep
TGPQHLGASLTVRGRSTFSQSIIPHTAHHIQAFWHQSLNQHFNFTRA

SEQ ID NO: 198699 - protein, 36 aa, Oryza sativa
  Clone ID: PAT_MRT4530_94333C.1.pep
MARVEWGIGAVDAGRNFVKFLREDWSRLMNPNFVGA

SEQ ID NO: 198700 - protein, 66 aa, Oryza sativa
  unsure (1)..(66): unsure at all Xaa locations
  Clone ID: PAT_MRT4530_94334C.1.pep
APHMNVGDRCEVEPDAKRGTVKFGGRAEAIEHGFWVGVQXYEEPLGKHDRMVIGILFFQRTERHGA

SEQ ID NO: 198701 - protein, 608 aa, Oryza sativa
  Clone ID: PAT_MRT4530_94335C.1.pep
MDRASSLIRNCTDAEVRLLEKRAKWEIWRVNSLSMVNAMLMGVVVGIGAYAPRYRHHPLTRFLFQGAAALFMPIVSYVVSDSTFVTFLIQPITTTATCRWLLHTFCILQWTVLVQIAAINTITLVATDARELGRSIAPSALLIIHAIWTCYLVIYFLGTDLGSGNDFSVKTISQDMSDFRRIFVLVSACLMFVKLVFKLVAFFMARQSFALGRNPRLVLGYMKEKEKDVVLPSVMHVTGDDVPPPPLLVMGEDTVNVQKGPNSYTSVVDNNLQQRGAAGLVNLDEVWQQMDDEYTNYSLTSWTPAGHKQLKDVCLSFALFKLLRCRFASCKLVNNPWKDNINLCSILDMHRPTAKWSPLPEKTKIVKVPDQVKSAIVAKLRSSKGSLQLTKACTASLHLQGSDSQLLWEDVTATTDVLLVCHIATTILEVKYPNPSTTASSSSDSSNRVVATHLSGYCAYLVACCPELLPDDDGWSKDLYKAVKADARRALAAGRAPPEYEKLVRLLSAGCRHKVLRNGAQLAEQLVALVQNQQEEEEEGNKAWGVLAEFWSEIILYLAPSDNLDAHAAASSSRCSGRCSTTPASSPGPPPPPPTTRLRLLHLLFKFI

SEQ ID NO: 198702 - protein, 284 aa, Oryza sativa
  Clone ID: PAT_MRT4530_94336C.1.pep
MATTGCGGGGGVYVGSMRGWRARATACWRRLAGGGRGSQAAASTGGGLGGGVREAAGEAAASTVGGQGRWRRCVGQPAAVARGLTGASGSRAARRRQRQGNAYKVLDEMAMRDVDTFSYTIEYMVLPYYTNPCIGAHLTEERADNAKLQEEIASAEESPSPRTTWLHSGKLCTRTTGASMWPQKGLGMSVPHPEFPDETTVLVSLGSLITKLETAASSHADQVDKGMRSRIQTDACHVLMCLKLTRPEVNIEQMMTKGGANKRREDMISELEDVEESVIPFFEE

SEQ ID NO: 198703 - protein, 109 aa, Oryza sativa
  Clone ID: PAT_MRT4530_94337C.1.pep
FFSRSRWLSSTWGPKRIKQALRQKGVQDAEVDQATRRVFQDGHSNQTMYGISEDSMDHLFEQAAKQWQRGQSLPLENRRARVVRWLQYRGFNWAVTNAIVRKLEAQKPP

SEQ ID NO: 198704 - protein, 145 aa, Oryza sativa
  Clone ID: PAT_MRT4530_94338C.1.pep
MHSAGLKVENTGFGCIQEFLYGMAYEAVTTCRLPLTNPWDTQQTKVLTVRYYDLRTVNISSPCLVGSPWKSFPFAGMVSIVSMVSAIGTLIVDTVATGYFQRTDAKRKAAAIADEPDDLQTSDEHSHGPRPWHALQNKDNSFSLH

SEQ ID NO: 198705 - protein, 277 aa, Oryza sativa
  Clone ID: PAT_MRT4530_94339C.1.pep
MAAAAAMAASRRLLHLRPELGLRLRSRALIPYPSWTKAMGRCRYEPSPRRLSSCRRAAKNERPWRSSSNEQLTDGDGTAKYMGRNFPDEFAQLSLEEEESDDEVHGISETMVKDVEKAAVELLAGRAFTVSDLRKKLRAKKFPDNAVDSVIADFKSRGLLNDGYYAESFSRSRWLSSTWGPKRIKQALRQKGVQDAEVDQATRRVFQDGHSNQTMYGISEDSMDHLFEQAAKQWQRGQSLPLENRRARVANKCFQCRGFNWAVTNAIVRKLEAQKPP

SEQ ID NO: 198706 - protein, 85 aa, Oryza sativa
  Clone ID: PAT_MRT4530_9433C.1.pep
GNMWFCTNEFAELASFGEVCDVVHTDIYNHAQTYRCEGFYSLNRVTASRNYSYRKADWRGVISIRWAMSSILILLREISKRKIQP

SEQ ID NO: 198707 - protein, 236 aa, Oryza sativa
  unsure (1)..(236): unsure at all Xaa locations
  Clone ID: PAT_MRT4530_94340C.1.pep
MGCSCVLYSVLITAVVTTVVKNAVGRPRPDFFWRCFPDGKQLYDQVTGDVICHGEKSFLKDGRKSFPSGHTSWSFAGLGFLSLYLSGKIKVFDRQGHVAKLCIMILPLLIASLVGISRIDDYRHHWEDVFAGGLLGFIMAMLCYLHFFPPPYHHQGXDRMHTSICLRSFKWPTPTMQKASSQCVGIMLSYLDYTIAGHQEMIWKLVVCNIPSMLKTEEAACTVSMTKPSMLVINKY

SEQ ID NO: 198708 - protein, 72 aa, Oryza sativa
  Clone ID: PAT_MRT4530_94341C.1.pep
DENTQMKDIPQHKMQPIWACINCSLRDSHLCRCRTITTSHHYEAGEPSRPGMPCCLPCRREGVSDGPSRVSP

SEQ ID NO: 198709 - protein, 1292 aa, Oryza sativa
  Clone ID: PAT_MRT4530_94342C.1.pep
MSGLDLREMLSSAARRHTWRRSGWGAEWGGGDDARSAALPARCPPPPPPRRPAAAGGRGDEGSGGVRGRGEEGTSRGGSGARREDAAGTGRNAVAVVAGGSATSGAERVAARAEDGRRSMDGPTLELSEMMLHAAQPWRSRCTQRDVRPGAVPPRPVAADGRGEGTSTVRGRVLEGTTRGGGRGGGMEREREVVAPARNAVAVAGDLATHGGERVAGPLVAKEKRNGGGELGTKRGLEKRAPLPPPKRRVVSAKRQFPPDFGRDSAVPLGRGRGRGGGVRPSDGAPARAVLGEKVASAGNGDSMANVHHHAVMDTVLMKSSHASDENLVAFKVGSPENGAEGAARGKGAHNGELLGKREVLAQAVNLLPMRRTVSATHRFTAGCGRDAAAPLARREEGKVGSGLEVMPVDVGGGVSKEVMATDGSKHSVNQCTANIVGAVGVLDGTVQYQELEEGEVADEAYCDVESQKVVGCDSFDDSAGERHEGVVPVTFAVTEVLTSHAYDEMMQIKALQEGGSDAAQETEHDLPMGGKCETILPDASPKCSFGGPSNEIVHGKRVLGSHGMKGEVPSLAIEDHGGIAQIDQELEDVEMTTGEYRVQDAQIATHVIPHESTTGRHEGGLCASAAAEDVKVMNKYKGTLPKGAAKSSMNIATGVFGDGIMRSKILSTARKVVKPPVRASHKPPLNTLHRPFSTNSASFGHKKLKVKRPDQSKDIPMKIASTSGLAGKDNLIDEKALSLEDDDILKALVVHDGKLEVYLNVPSCVQLHRQHGSGNADDRSKIRMLCRRFQFICRALLHAVEQGSLKIRRVDLAADKIIRKLPGFTKPGPTVGNVNGVEVGDEFMYRVELALVGLHRPYQGGIDTTDYNGVLVAISIVCSGGYPDELSSSGELIYTGSGGKPAGKKKDEDQKLERGNLALKNCIETKTPVRVIHGFKGQNREDNSHSRAKQILTFTYDGLYLVVDCWTEGLKGSRIFKYKLQRIPGQPELPLHIAKGLRRSLSRPGLCIADISQGKEMDPICVINDVSNVHPTSFQYISRIKYPSWLTKRHPQHHGCDCSDGCIDSTKCFCAVKNGGKIPFNSNGAIVHDKPLIFECGPSCRCHSSCHNRVSQKGMKIHLEVFRTANKGWGVRSLRSISSGSFICEYVGILLTDKEADKRTNDEYLFDISHNCDDEDCSKGRPSTISSLNSSGGCSQTMEDVCFTIDASEYGNIGRFINHSCSPNLYAQNVLWDHDDQRVPHIMFFAAENIPPLQELTYDYNYKIGEVRDLNGRVKVKDCHCGSPQCCGRLY

SEQ ID NO: 198710 - protein, 36 aa, Oryza sativa
  Clone ID: PAT_MRT4530_94343C.1.pep
MADGDAPGSRGRPTGGDGARQAVGVRTGVEIYGIGD

SEQ ID NO: 198711 - protein, 124 aa, Oryza sativa
  unsure (1)..(124): unsure at all Xaa locations
  Clone ID: PAT_MRT4530_94344C.1.pep
IWSIDHNRGHGYSNXFTLARDAQLYPQDTIHRHVTASSCAYEEHVTMSSDCDKTLHIXPSDQSHNTSGYAPAXAGSPLSCHGESESRSTEQPGXPNPITPTLAXEHQPEESYTTDQAVTHSHLW

SEQ ID NO: 198712 - protein, 33 aa, Oryza sativa
  Clone ID: PAT_MRT4530_94345C.1.pep
RDLLVCHALEANTIGPFSYDVTPCSRIQSDGLL

SEQ ID NO: 198713 - protein, 133 aa, Oryza sativa
  Clone ID: PAT_MRT4530_94346C.1.pep
MATTDTTIAHIMNEQDDIKIKSSKCWNPIRPLATLLTSNGCQICIRAPFWAREYLMERSRSPLSNGSSLIAKLHLSWPQSKKQGVASPVMGLWACNFVWDPGPSGAHVGCAPIRNKVDLYRQDQQPTERCIDR

SEQ ID NO: 198714 - protein, 239 aa, Oryza sativa
  Clone ID: PAT_MRT4530_94347C.1.pep
MVEMKNRRHQEAVGLGASGAGGGADGNAGGGVTSAGAAGGGGGGTRASGGGGEANAGGGCAIAGGGGCRGGGGCGMGMGMAASGGGKEGYWCGGGGVVAAVDGMEGCGTVSGRMGWHSSAAAQAEEEELARDLARWRRARKARTTPMRARRARTVKKILVAEAGRSLTAEKTSSSLSSTATTERSSMVEGEEEASSTAGTGGEAESGGGRRSMGVGGGGLARWRWRRRWWTGSQGLRLR

SEQ ID NO: 198715 - protein, 262 aa, Oryza sativa
  Clone ID: PAT_MRT4530_94348C.1.pep
PQGCIASRHAGRTESLPGGPPVEAGSGPASYWQVGPAVTSLEGGFAFCGRGASERVVAAAAAAVFLSCMETCRRRSSSHQPAPAPARVITADGSLKELAVSSAVADVLRGEGEGRSFFVCNSDALYFNEQPPALAPGEALRPGQIYFVLPAAMLGQPLSTADMAALAVRASAALAAAAAKAPRRRGVRRGGGDRKRKTVRVTPLRDERLDGGDVLLHEKLNERTLGEFPASWSPPKSGGEKLAAAARSRLKRVLSIIQEDAE

SEQ ID NO: 198716 - protein, 1184 aa, Oryza sativa
  Clone ID: PAT_MRT4530_94349C.1.pep
MERDNETYRSPTHVVYATVISYVIHDNNLFGEVPICLGLRTYIVHTTLVSKITLHSLQGFSPCHFHELHPSRILQVSEEPDYYDYVINCFKNADMVLYLLRKYLGEYVEGLSVETLRISVWQGDVVLKDLKLKADALNSLRLPVTVKAGFVGTITLKVPWKSLGKEPVIVLIDRLFVLAHPAPDGQTLKEEDREKLFEAKLQQIENRKVPGSNSWLYNLISTIIGNLKVTISNVHIRYEDSVSNSGHPFASGFTLSRLAAVTVDEDGNETFDAGVALDKLRKSVELHRLAIYHDSDSSAWKLAKKWEDLNPTEWGEIFQDGIDDHSGNSVWAMNRNYLVYPINGTLNYKRLGKQERGGPDIPLEKASLVLSDVSLTVTEAQYYDGIKLLETFSRFRTRVDVSHLRPIVPVKVDCRAWWRYAVLAGWQQVKLAVGGPQIISSLTNPLPWSAHWHMEFALMVVDTACEATHVCGVVHLKDSMELQQRTAQVVQGTRGERSCVGVEPNYYVLSNRIGSVNQANWPFYWFSWERTRHLCQLRRRYVHLYATLLQQASNVDMSEIRQIEKILDTKVIILWRLLGHAKVETVKSKEILHKKGASKRRWWTFGWNSAELPSEENALLEPQLDEEERLTKEEWQAINKLLSYQPEDDLSSPLEKVSPNTTRFLVDVSIGQAAARIINIDRTEILCGRFEKLQVVTKLYPKSTRCDVTLRYCGLSSPEGSLAQSVVSEGKSNALDVSFVRAPVGLDLDWQLVAKISPCHVTVLKGSYERFLEFIKRSKAVSPTMKIEQVTRRAQEQLQMVLEEQSSFGLDIDLDAPKVRIPLITCQPLLGNEHFVLDLGHFTLHTRDGTREEERRSLYSRFYIAGRDMAAFVVCDTAEDIYSVPENQRVLSGPTVDANQFCSLLDRCGMSVIIDQIKVPHPSYPSTRVSFQVPNLDIHFSPKRYGKIVELLGVLCKLKGSDSEDSDSCENCNLAPWYPADLAGDARTLVWKGLGYSLAEWHTSYVVLSGMYLYILESEVSQDYQSMASRQVIEVPSTSVGGSLYSIAVCSRGVDMQKALESTSTLIIEYHNEIEKANWMKALVQATYQASAPPEVNILGDPVSTTEPSTPRLSSLGSVDLLVNGSVVETKLSLYAKLDRKKKDPEEVVMLELLGSGGKFPRKWFYIVRCWDIRQLQSTLGLEE

SEQ ID NO: 198717 - protein, 204 aa, Oryza sativa
  Clone ID: PAT_MRT4530_9434C.1.pep
MARSALCARPCRPMGCTSDPGTTHQQHSPAVGPGPRRAVPCLGGAKMACHGPGRRALWPSISSGPKSAGRGEGEVTALHVGVVVTEGRRGRRRRGLSGSLSMKTIGPPTDQSPTPPSKKIQRRAIHVGAGAIRARSTASELGLRHQNSIRRHWSSTRGEKEGFATFASDRPFRLRLLGRRRESAKPHGGAVPSTRQLIDQSVVS

SEQ ID NO: 198718 - protein, 53 aa, Oryza sativa
  Clone ID: PAT_MRT4530_94350C.1.pep
KCQPASNQQISHLVFGTFVLHMTQLHSISNRTTMHLSFPCNAIFICFQWSLLH

SEQ ID NO: 198719 - protein, 942 aa, Oryza sativa
  Clone ID: PAT_MRT4530_94351C.1.pep
VPWKSLGKEPVIVLIDRLFVLAHPAPDGQTLKEEDREKLFEAKLQQIENRKVPGSNSWLYNLISTIIGNLKVTISNVHIRYEDSVSNSGHPFASGFTLSRLAAVTVDEDGNETFDAGVALDKLRKSVELHRLAIYHDSDSSAWKLAKKWEDLNPTEWGEIFQDGIDDHSGNSVWAMNRNYLVYPINGTLNYKRLGKQERGGPDIPLEKASLVLSDVSLTVTEAQYYDGIKLLETFSRFRTRVDVSHLRPIVPVKVDCRAWWRYAVLAGWQQVKLAVGGPQIISSLTNPLPWSAHWHMEFALMVVDTACEATHVCGVVHLKDSMELQQRTAQVVQGTRGERSCVGVEPNYYVLSNRIGSVNQANWPFYWFSWERTRHLCQLRRRYVHLYATLLQQASNVDMSEIRQIEKILDTKVIILWRLLGHAKVETVKSKEILHKKGASKRRWWTFGWNSAELPSEENALLEPQLDEEERLTKEEWQAINKLLSYQPEDDLSSPLEKVSPNTTRFLVDVSIGQAAARIINIDRTEILCGRFEKLQVVTKLYPKSTRCDVTLRYCGLSSPEGSLAQSVVSEGKSNALDVSFVRAPVGLDLDWQLVAKISPCHVTVLKGSYERFLEFIKRSKAVSPTMKIEQVTRRAQEQLQMVLEEQSSFGLDIDLDAPKVRIPLITCQPLLGNEHFVLDLGHFTLHTRDGTREEERRSLYSRFYIAGRDMAAFVVCDTAEDIYSVPENQRVLSGPTVDANQFCSLLDRCGMSVIIDQIKVPHPSYPSTRVSFQVPNLDIHFSPKRYGKIVELLGVLCKLKGSDSEDSDSCENCNLAPWYPADLAGDARTWFGSTVTEFCIFYFGCKGLGYSLAEWHTSYVVLSGMYLYILESEVSQDYQRCCSMASRQVIEVPSTSVGGSLYSIAVCSRGVDMQKVEIWFTALGIRTMAFNLNGFNFNHL

SEQ ID NO: 198720 - protein, 60 aa, Oryza sativa
  Clone ID: PAT_MRT4530_94352C.1.pep
YFPRHQKISGVGFRRTWGEKTPHLHLFYICECNRRYTLYLTLITYPLTYKGKPCVPPPVS

SEQ ID NO: 198721 - protein, 102 aa, Oryza sativa
  Clone ID: PAT_MRT4530_94353C.1.pep
SKIYHRSLNLYRCVIPVAKLANRPFRFDCVIPVPKLTDHSFRSSNLFSCVTPVPKLGFKYHLGQIGRDRGDTTEQVGGPKRVIYKFRDRDDIIEQLLELGSS

SEQ ID NO: 198722 - protein, 104 aa, Oryza sativa
  unsure (1)..(104): unsure at all Xaa locations
  Clone ID: PAT_MRT4530_94354C.1.pep
AIRAQGTYAEAQXMFLSXNESKTSELVKSXREKKIGIVAHFYMVPEVQGILTXSKKHWPHIHIXDSLVMADSAVKMAEAGCEYITVXLGVDFMSEKCSQYFDQA

SEQ ID NO: 198723 - protein, 654 aa, Oryza sativa
  unsure (1)..(654): unsure at all Xaa locations
  Clone ID: PAT_MRT4530_94355C.1.pep
MLARSLAKLPDPGESPHQMRPPAMLRWPAAAAALALLLLLIAAAPPAAAFYLPGVAPNDFQKKDPLQVKVNKLSSTKTQLPYSYYSLPFCKPDTIVDSAENLGEVLRGDRIENSPYVFEMREPKMCQIVCKATISDKQAKELKEKIEDEYRVNMILDNLPLVVPIARTDRDALVFQGGYHVGVKGQYAGSKDEKYFIHNHLAFLVKYHKDENSDLSRIVGFEVKPFSVKHQFEEKWNDANTRLSTCDPHANKIVINSDTPQEVEAGKDIIFTYDVGFEESDIKWASRWDTYLLMTDDQIHFLXLVSGMVAMIMLRTLYRDISRYNQLETEEEAQEETGWKLVHGDVFRPPTNSDLLCVYVGTGVQFFGMLLVTMMFAVLGFLSPSNRGGLMTAMLLIWVLMGLFAGYASSRLYKMFKGSEWKSITLKTAFLFPGIAFGIFFVLNALIWGEKSSGAVPFSTMFALVLLWFGISVPLVFVGSYLGFKKPAIEAPVKTNKIPRQVPEQAWYMNPAFTILIGGILPFGAVFIELFFILTSIWLHQFYYIFGFLFLVFIILIITCAEIAIVLCYFQLCSEDYMWWWRSYLTSGSSAIYLFLYAGFYFFTKLQITKLVSGILFFGYMLLASFSFFVLTGTIGFCACLWFTRLIYSSVKID

SEQ ID NO: 198724 - protein, 60 aa, Oryza sativa
  Clone ID: PAT_MRT4530_94356C.1.pep
CSNALISIAIACLLEDQSFRWIKHCKLMLLNRVYMKQKNEVLKDFPCIILCWCFTVEHCC

SEQ ID NO: 198725 - protein, 1092 aa, Oryza sativa
  Clone ID: PAT_MRT4530_94357C.1.pep
MLRWPAAAAALALVFLLLIAAAPPAAAFYLPGVAPNDFQKKDPLQVKVNKLSSTKTQLPYSYYSLPFCKPDTIVDSAENLGEVLRGDRIENSPYVFEMREPKMCQIVCKATISDKQAKELKEKIEDEYRVNMILDNLPLVVPIARPDRDDVVFQGGYHVGVKGQYAGSKDEKYNQLETEEEAQEETGWKLVHGDVFRPPTNSDLLCVYVGTGVQFFGMLLVTMMFAVLGFLSPSNRGGLMTAMLLIWVLMGLFAGYASSRLYKMFKGSEWKSITLKTAFLFPGIAFGIFFVLNALIWGEKSSGAVPFSTMFALVLLWFGISVPLVFVGGYLGFKKPAIEAPVKTNKIPRQIPEQAGYMNPAFTILIGGILPFGAVFIELFFILTSIWLHQFYYIFGFLFLVFIILIITCAEIAIVLCYFQLCSEDYMWWWRSYLTSGSSAIYLFLYAGFYFFTKLQITKLVSGILYFGYMLLASFSFFVLTGTIGFCACFQLLRSTQGSTVNHVCRGQRKPMQKAVSSVAVAVAAGDEVLVKMNELMSIETQITYSYYSLPFCRPDNLTESAPTLWQLLHGDRQQRSPYQFEMRVPKKCQIVCRVLVGEKEAKELTEKMEDEYRVNMALDNLPLSIPIRRIDKDDFFYQHGYHIGEEHKRYFIHNHLSFLVRYKRDIDTSASTIVAFEVKPFSVKHQYEAQWNGANSRLSTCDANANRFILSSDSPPEIEVGEEIIFTYDVNFEESDIKWASRWDAYLSMTDDQARWFSIVNSPVTLIGLSVAMAMTMLRSLHRDIFRYSQLETQNEAQGVVFNSLVLITVAFAALGFFSPSNSAGLRNVVLLTWVLMGMLAGYTSSRLYKMFKSGSEWKHITMATAIQFPGFAFVIFAILNTLLQDENSSATVPPTTMCALVLLWSGITPPLVFLGGYLGYKRPAIEPPVEINKTPRKIPKQAWYISPVFSILIGSIFPFTIVFIELFFGLIFIWYHQFYRGFGFLLITLVLLLVACAEISVAFCYYQLRSGNYKWWWRSFLTPGCSAVYLFLYATFFFFAKLSIVKPVSVMFYFGYMLVVSYAFFLLTGTIGFFSCFFFTRFIYSQRAFG

SEQ ID NO: 198726 - protein, 536 aa, Oryza sativa
  Clone ID: PAT_MRT4530_94358C.1.pep
MQKAVSSVAVAVAAVRRPTRRCHLPALPGDEVLVKMNELMSIETQITYSYYSLPFCRPDNLTESAPTLWQLLHGDRQQRSPYQFEMRVPKKCQIVCRVLVGEKEAKELTEKMEDEYRVNIVKHQYEAQWNGANSRLSTCDANANRFILSSDSPPEIEVGEEIIFTYDVNFEESDIKWASRWDAYLSMTDDQARWFSIVNSPVTLIGLSVAMAMTMLRSLHRDIFRYSQLETQNEAQVETGWKLVHGDVFRPPSNPVLLCAYAGSGVQLFGLRNVVLLTWVLMGMLAGYTSSRLYKMFKSGSEWKHITMATAIQFPGFAFVIFAILNTLLQDENSSATVPPTTMCALVLLWSGITPPLVFLGGYLGYKRPAIEPPVEINKTPRKIPKQAWYISPVFSILIGSIFPFTIVFIELFFGLIFIWYHQFYRGFGFLLITLVLLLVACAEISVAFCYYQLRSGNYKWWWRSFLTPGCSAVYLFLYATFFFFAKLSIVKPVSVMFYFGYMLVVSYAFFLLTGTIGFFSCFFFTRFIYSQRAFG

SEQ ID NO: 198727 - protein, 71 aa, Oryza sativa
  Clone ID: PAT_MRT4530_94359C.1.pep
SLQCCERASAYPTINNQTVNKRENVGGTAKAICLLATTSPHRRTATGDPGFWVQPAADGSASDLRTRRRDP

SEQ ID NO: 198728 - protein, 44 aa, Oryza sativa
  Clone ID: PAT_MRT4530_9435C.1.pep
EQGFWIFLEFLKNYNKRHFPSSILFWVLRTLARPHILFPWGGRF

SEQ ID NO: 198729 - protein, 58 aa, Oryza sativa
  Clone ID: PAT_MRT4530_94360C.1.pep
GELTTFKHLFPAQKKNEDWLESEERTHLGLSNIQGEQTALPCTWREFHFINRTGGLFL

SEQ ID NO: 198730 - protein, 590 aa, Oryza sativa
  Clone ID: PAT_MRT4530_94361C.1.pep
MRPTAMLRWPAAAAALALVFLLLIAAAPPAAAFYLPGVAPNDFQKKDPLQVKVNKLSSTKTQLPYSYYSLPFCKPDTIVDSAENLGEVLRGDRIENSPYVFEMREPKMCQIVCKATISDKQAKELKEKIEDEYRVNMILDNLPLVVPIARPDRDDVVFQGGYHVGVKGQYAGSKDEKYFIHNHLIFLVKYHKDENSDLSRIVGFEESDIKWASRWDTYLLMTDDQIHWFSIVNSLMIVLFLSGMVAMIMLRTLYRDISRYNQLETEEEAQEETGWKLVHGDVFRPPTNSDLLCVYVGTGVQFFGMLLVTMMFAVLGFLSPSNRGGLMTAMLLIWVLMGLFAGYASSRLYKMFKGSEWKSITLKTAFLFPGIAFGIFFVLNALIWGEKSSGAVPFSTMFALVLLWFGISVPLVFVGGYLGFKKPAIEAPVKTNKIPRQIPEQAGYMNPAFTILIGGILPFGAVFIELFFILTSIWLHQFYYIFGFLFLVFIILIITCAEIAIVLCYFQLCSEDYMWWWRSYLTSGSSAIYLFLYAGFYFFTKLQITKLVSGILYFGYMLLASFSFFVLTGTIGFCACLWFTRLIYSSVKID

SEQ ID NO: 198731 - protein, 86 aa, Oryza sativa
  unsure (1)..(86): unsure at all Xaa locations
  Clone ID: PAT_MRT4530_94362C.1.pep
CFPMINVLYILYQMITKTLIWALLLYLLSISAKNVSTSQXDRSHQCSLVIFTLPLPPPPPPPARSASVDMAIRSVGARVCVRACAR

SEQ ID NO: 198732 - protein, 329 aa, Oryza sativa
  unsure (1)..(329): unsure at all Xaa locations
  Clone ID: PAT_MRT4530_94363C.1.pep
GSDWVKRKTHWVSXELMIQSKYGGSMGSKDMWLFNQPLLAQQAWRLLAHPDSLCAQVLKAKYYLNVCLSDTTLSGNAPPGWRGIEHGXLELLKKGLIWXVGNSKSIRIWRDPXIPRDYSRSLIRVKGRCRLKXSFITDWGRMELRIXNKINRIFLLVDASRIFKIRISXRGDEDCLAWHXEENRSFIVCSAYRXAVRLRDVSEGGSPSTSADDGQRTIWDVIWKYPVPQKVWIFACRTATDNLTTNXNKRKRCLVQQGICSLCGTVVEDTFHALCQFNHAHSLWRAVQEEWLAMPRIRPHNTCLDWLLLYLMXFSEIEQFMILMLLWRI

SEQ ID NO: 198733 - protein, 348 aa, Oryza sativa
  Clone ID: PAT_MRT4530_94364C.1.pep
MGIHRADDQNGSGGDGVLVPSWNLGDPSSLPLLLPPTTGGLRGWSGCSPDHPKILEPKAQLNRYASALSSVGASSSAASVFSPTSSWLTSDKGLTLSPLLIPFLASDLRQSSGDVKANNKGRSEGCYIRRRSASAANGGRRCGCMWAARQAARKSRAASSPPSQAPPSPTPTTYLTKCPNNANPRVMVSSSHIDEETAPMVYLELGDGEDKVHDSYIVTKNFPEVTSTMCSMKCSSPDTEPDLTMTAVVACATTATASMEVVSVEDTTGVTYIDTYDYSKVTHVKRSKVGLDVDGGTDQDVVAFQTMMGVSRIVLASIQPMADFSPRYLFNIRPNTLVSTKVLFGSMG

SEQ ID NO: 198734 - protein, 40 aa, Oryza sativa
  Clone ID: PAT_MRT4530_94365C.1.pep
HTSVSIMCIRINYYSIMPHRYRLLARWIHQQYHYIYGKSY

SEQ ID NO: 198735 - protein, 70 aa, Oryza sativa
  Clone ID: PAT_MRT4530_94366C.1.pep
HYASIINLMEPYQASGMVTNHPSELALSRWGQTSSDSWGLNPHLVYRHKTSLYLPCYEKTKGNFWRSETY

SEQ ID NO: 198736 - protein, 84 aa, Oryza sativa
  Clone ID: PAT_MRT4530_94367C.1.pep
MRRFRSTIVVIAEDDHGAGDGFPEDDLGAGDGFMEDDLKAAEQLMQLRCSGGWQEEQADDDDDDGGDWWGWKRKRPRYRSLSEL

SEQ ID NO: 198737 - protein, 74 aa, Oryza sativa
  Clone ID: PAT_MRT4530_94368C.1.pep
MADLGEPITECTLVLALSRAPPTPPPGTVATTAITAMGVAMEIAATVALLRPPNKVAAASKPPTQANRLRESGN

SEQ ID NO: 198738 - protein, 94 aa, Oryza sativa
  Clone ID: PAT_MRT4530_94369C.1.pep
MEMHIYDPGSAEAASGEANISRRPPQLRMSCVQQLALLLLLAAASVDLPKELKQLFMPASFCSSTYSSRPTYVTDISFTRKGYGRSLNLFSFII

SEQ ID NO: 198739 - protein, 571 aa, Oryza sativa
  Clone ID: PAT_MRT4530_9436C.1.pep
MPRAPPPRPSEDARLAAYKPGVDVARSRRRREDRLLAVRRSNRDAGLFKRRRDEPTPTPIPPARAATPSSQADDVPTTTTATSPPSSAPSSPPSSPPAESVPPTAADSELEGLSEMVEKVWSDDTTSQLEATIQFRRLLSDEKNPTVIKIIRADVLPRFSDFLSRHEHPQLQMEAAWVLTNIAASDYTLLVAECGAVPRLVELLESANANIRHQAIWALGNIAADVPTCREIVLDHGAVTPLLAQFREGMKVPVLRTATWALSNLCFGKLPAEVQVKPILDIISQLIHSVDEKILGDACWALCYICDGVSDGIQHVLDAGACPQLVNLLMHASANILLPVITVLARISSGDDAQVQVLVENDILNYLAPLLARNYPKSIKKQACLIVSNISTGSKDNIQAVIDADVISPLIFLLKTSEKDIKEEAAWAISNAASGGSNDQIQYLVSRGCLEPLCNVLTYQDADLVYACLEGLQNILQAGAVGKQGQGSTVNPYAQFILECGGLDKLEDLQEVDNDAIYKLVMKLLEGYWDEEVSDDDPNLPTSNDSAETVETASEDAAQPTEPSASPNESE

SEQ ID NO: 198740 - protein, 116 aa, Oryza sativa
  unsure (1)..(116): unsure at all Xaa locations
  Clone ID: PAT_MRT4530_94370C.1.pep
CVXXGQPXLRVQGWXPYXRRRKKRXXRRXGERKEGIPXXRCLYXXRRLRAAISAPMFLSLSFXAPXXPCPLHXXSSXXSGADLTPDEGPXRXXENHFRASTXPRLXAPXDPGXAQP

SEQ ID NO: 198741 - protein, 57 aa, Oryza sativa
  Clone ID: PAT_MRT4530_94371C.1.pep
LVIKETLNIRTNEYEIQKEIRCNDDEMAGIRKKPYLWGYGHEMFSIGSSYWPPTLNS

SEQ ID NO: 198742 - protein, 63 aa, Oryza sativa
  Clone ID: PAT_MRT4530_94372C.1.pep
ATSKSKLATNTIAINGSTRMAKLMALDPLNSDDLKGGPEDNMYITTNYITYLHQTDTMHYHLK

SEQ ID NO: 198743 - protein, 55 aa, Oryza sativa
  Clone ID: PAT_MRT4530_94373C.1.pep
LLRLAFHYTKTELNSSFKRHTPNKMVTANPYLEKICGEKHLSPRPGLLHLNTFPL

SEQ ID NO: 198744 - protein, 207 aa, Oryza sativa
  Clone ID: PAT_MRT4530_94374C.1.pep
HEDQFSSWMGGDRDGNPRVTPEVTRDVCLLARMMAANMYFSKMADLMFELSMWRCNDELRARANELHRKSSRKYAKYYIEFWKKISPGEPYRIILGDVRDKLYNTCERARQILSKGISSIPEDQTYTNVEQFLEPLELCYRSLCDCGDKLIADGRLLDLMRQVSTFGLSLVKLDIRQESERHTDAMDAITTHLGIGSYREWPEERRQ

SEQ ID NO: 198745 - protein, 142 aa, Oryza sativa
  unsure (1)..(142): unsure at all Xaa locations
  Clone ID: PAT_MRT4530_94375C.1.pep
RSTPRPRSPTLHAAACPRPGDPSTSIGWLDHGCCCVIGPVNDLVLGVVLLLDEMALASNAFSLIRGCGGGGGVPCFAAPFXLCSSGAXVLVSGXXLGVADYXFPLXFWCVSCLSPPGGRSXXAAFSWLAWXPPXXFPLPGPP

SEQ ID NO: 198746 - protein, 1155 aa, Oryza sativa
  Clone ID: PAT_MRT4530_94376C.1.pep
MISLHSAPFTLLVKLPGRRRSGLTPPRCAVRGAGNVSSAAVREMAVAEGRRQHEYSIDARLRQLAPEKVSADDRLVDYETLLVARFLDILEDLHGGDFRQVVEDCLRLSGEYQSEGDPARLGELGGLLTSLDVGDAIMVASSFSHMLNLANLAEEIQMVYRKKAEASRRGDFVDEASAPTESDIDETFQRLVRGLGKSPREVFDALRSQTIDLVLTAHPTQSVRRSLLQKHASIRSCLTQLCGEGISDNEEQEIDEALQREILAAFKTDEIRRTPPTPQDEMRAGMSYFHDTIWNGVPKFLRRVDTALKNIGIDERLPYNAPLIQFSSWMGGDRDGNPRVTPEVTRDVCLLARMMAANMYFSKMADLMFELSMWRCNDELRARANELHRKSSRKYAKYYIASLCTPAATVSVSDLHKHQEPARFTSFLNAAIEDAALVSDIAARPEALRRLLSPPGEGAAAAAVGFPPVRMPTPTEAFSPTQERRRRPFAGTCRLLARAGPRRTRRHLHDDYTKPCFYRSQFVAQTPAAQEIGSDLFIALVEFWKKISPGEPYRIILGDVRDKLYNTCERARQILSKGISSIPEDQTYTNVEQFLEPLELCYRSLCDCGDKLIADGRLLDLMRQVSTFGLSLVKLDIRQESERHTDAMDAITTHLGIGSYREWPEERRQEWLVSELRGRRPLFGPDLPQSEEVADVLGAFRVIAELPADSFGAYIISMATAPSDVLAVELLQRECGVKKPLRVVPLFEKLADLQQARATMELLFSVDWYKERIDGKQEIMIGYSDSGKDAGRLSAAWQLYKAQEEIVGVAERHGVKLTIFHGRGGTVGRGGGPSHLAILSQPPNTVNGSLRVTVQGEVIEKSFGEENLCFRTLQRFTAATLEHGMNPPVSPKPEWRRLLDDMATVATDEYRSIVFQEPRFVEYFRAATPETEYGRMNIGSRPSKRKPGGGIESLRAIPWIFAWTQTRFHLPVWLGFGAAFRHAMQQSDAGGGLATLREMYDEWPFFRVTIDLLEMVFAKGDPGIAALYDELLVPDDLRPFGEQLRANYVETQRLLLQVAGHKDLLESDPYLRQRLMLRDSYITALNVCQAYTLKRIRDGGFRPETRPPLSKELLGSSAVAEKLVKLNPNSEYDPGLEDTLILTMKGIAAGMQNTG

SEQ ID NO: 198747 - protein, 44 aa, Oryza sativa
  Clone ID: PAT_MRT4530_94377C.1.pep
SIEKPQLQPLKQTTPRHNPFNSKGPHSKSQDQNQNFPIAPFFPT

SEQ ID NO: 198748 - protein, 127 aa, Oryza sativa
  unsure (1)..(127): unsure at all Xaa locations
  Clone ID: PAT_MRT4530_94378C.1.pep
GIPSTLGRMLYTDTVYLRVYGCFLYMLRKSITXTETESTDGRSHARTELGRYYIVWGPISPSSTWRLTDPRYKRDPXWEDLRHRISPPTHLPQPTKPEPTGAKSPGDLVEPTRLRSRRYHRIPLFPL

SEQ ID NO: 198749 - protein, 330 aa, Oryza sativa
  Clone ID: PAT_MRT4530_94379C.1.pep
MDLGGEVEDDASAGAAPNPGGIAGGKEGDLDAEDSGGGSGADDAAAAVSHGATSTDSIVLPPEPTSGHLASLLRARKLILVVDLDHTLVNSTADYDISGTEDYAAAVAKLLDPDGVYFGERIISRDESPQPDRKSLDVVFGSAPASAAERAAVVILDDTAEVWEGNSDNLIEMERYHYFASSCRDFGSPWECTHSLSERGVDESERAAALRVLRRVHAGFFAGGGGSFVADVREVIRRTRREVLLGCTVAFTRAIASDDHHSVWRRTEQLGATCADDVGPEVTHVVATNPTTFKAVWAQVFGKLLVNPEWINAAHFRWSKPKEEHFPVRW

SEQ ID NO: 198750 - protein, 108 aa, Oryza sativa
  Clone ID: PAT_MRT4530_9437C.1.pep
MVDLPLASASAPPLLELELSQTVSAPPKLGAELDEALSQNELESATSAEIIIQTTLELLVLGVEGCVISDIAVEGRMPNLAILRDLSELILAQIVLGLKRPYWMAHEK

SEQ ID NO: 198751 - protein, 153 aa, Oryza sativa
  unsure (1)..(153): unsure at all Xaa locations
  Clone ID: PAT_MRT4530_94380C.1.pep
RPPAKIFICWRLSAAGENGTPLLAFGLWQSLPPPAITIIGARIAKTCTYNAFSAHTRAHGGTLFFFGPPFPPCSLPLRAGASLPPPPSPXPPLSSSTPPSHPPPPPSPHLPPQHTPPLPHSHSLAQGIQATTTWAQRHDEDYGYATATLPSTP

SEQ ID NO: 198752 - protein, 110 aa, Oryza sativa
  Clone ID: PAT_MRT4530_94381C.1.pep
MLSHAPVNRETKAHPTNKRAGGKPSQNKKPNKDRGGHDPKHGEEPHQNPPTKQEQPTRGRDPQSPPPTPPTAGGQPRAGEPTRAGPTKRRTPGGAARTRPGPPHEGPPPP

SEQ ID NO: 198753 - protein, 267 aa, Oryza sativa
  unsure (1)..(267): unsure at all Xaa locations
  Clone ID: PAT_MRT4530_94382C.1.pep
MDADNERGRLDEGRADDERNWERREDDDKDRQGGDEGRRGQGRPCRCDAEGGGGAADRRTGEEKGVAEGTPAWMAWRRRAAACSGFXGETEEQPEERTMQRRRRRRRRRRSVLGHRGRGCRRWCSGGNITVYPRGRVSGGFPAKRRRRWGRGCTFDAEGGDAATGQRTVVAGGAAGGRPAPEXEKEKAGRGGVATGRRGRRLNRENEGWGFHCIGAGRDLATGEGGTEAGMAAGGHGKRPGKMRPFSVIKSTNQGGIKGKERGGKGD

SEQ ID NO: 198754 - protein, 69 aa, Oryza sativa
  Clone ID: PAT_MRT4530_94383C.1.pep
MVTGFGDRRRGAEWPAGREGDEKMRQGISDRSVVEAGQQRRGVKSSIGGEHGEGGGVFVKHPASSVRTR

SEQ ID NO: 198755 - protein, 563 aa, Oryza sativa
  unsure (1)..(563): unsure at all Xaa locations
  Clone ID: PAT_MRT4530_94384C.1.pep
ILLTSFQPRALRGPCRAGLLQEPCRAVPPNTVTWTSTPPPPPPPSDALPTERQDPVPYVPPPPPPPPRAPRPASSPSPAAPPPPTPAPPPGTPPPRTPPPRPPPRTPPGAAPRPPPSATAPAPPPCXTPAPRSTPPPPSAPRRRRRRAASPAPRPPPGRPASSPTPAPSRPARRPPRRPPPPPPRRPATIATTPATTVDTNSAPPSTPLRPTSPASSPPPPPPSPPRAPGPPPPXTATPTPSAPGSTTTSSSSRSPSSPPPXVDESSATSPEFKTPPALSPVPPPPPPPRTRTRVEPPHRPPPVKPQPPPSLPPPPPPPPPPPPPRPPSVKPPVVQPKPQPPPSLQPPSPPPPPPTRPPSVKPPVVQPKPQPPPTLPPPSPPPPPPTVPPRTPGDTPAVVEPKPQPPPPPPRAPVKMPRVLEPKPSPPPPSPLPPPPEDYWSPTAVTPPEPTKPKPPPPSPPPPPQQPSQRYWTPPPAITPEPAKPAAGKPTSSSPPSTKDSPRPPLPAPSPAANGGDPRLPATTPLSISSKPSTTISSVSSVLTTLFVICSHHHQSHINWTR

SEQ ID NO: 198756 - protein, 84 aa, Oryza sativa
  Clone ID: PAT_MRT4530_94385C.1.pep
MKSGAARQPLPLARRHFVGPPKRLNATAWRRPERAPQPAKMEPRRRSSPRWRPNSSDRRRTIAADSVARSPDVESGREGEKNRE

SEQ ID NO: 198757 - protein, 54 aa, Oryza sativa
  Clone ID: PAT_MRT4530_94386C.1.pep
CTTPLSLPSQSLPVDRTGHLLPNARARPPTARGRGEEETTPLLRSHLDRLEPRA

SEQ ID NO: 198758 - protein, 122 aa, Oryza sativa
  Clone ID: PAT_MRT4530_94387C.1.pep
HEVVMLCLFGFTSQKADGLNARGANTPLSSHVSVSIEELARWRWWRGKGRRGGGGLVAGGVGEAWVRCALHLLDEMLTSFSQFHADVILDGVVAQEELPWITKRTFSSGPQEPVLMSRGVKF

SEQ ID NO: 198759 - protein, 68 aa, Oryza sativa
  unsure (1)..(68): unsure at all Xaa locations
  Clone ID: PAT_MRT4530_94388C.1.pep
STHACVYSAVLAIFPGLLISSAPGQKLLLVLAHRCSSRTDQELQKSCEKLKKWEGRIWWRCSTGFXDT

SEQ ID NO: 198760 - protein, 388 aa, Oryza sativa
  unsure (1)..(388): unsure at all Xaa locations
  Clone ID: PAT_MRT4530_94389C.1.pep
HEGRLLVDLLDRLRALGVKPSPEARDEARAIAADWKRSKRIGPQAVLKKETIALLLPARAFGLVDDVGDASEVLDLVVSVSGRERAVEAFVGLGLDLEKHMPVFIHTMIKKGKQLEAVKFIQALNLVEKYPLLPVLRSYISDAAKAGNMIRIRGDDSACQTEADAKERXAARSIAEFIKDQKLEDYLXLEIVKQRLAHLEKKSVERKRAASAAIEAAHEVSKKIQKQEKQQQQVQSAMPSRVPGKAAQNSLSQNIHSVDSLSRPLMSSQSMGISGVLNLYQAASSQIIPAISPSPLSQHPVGIKNQTLNTPPVQTRYGGLADYYGLSSGRPRPDSVSPGIKCYRVHTHLPDQSSILQIPWLLSPEHQIRRVRLTTIALSSMSTYNPNP

SEQ ID NO: 198761 - protein, 372 aa, Oryza sativa
  Clone ID: PAT_MRT4530_9438C.1.pep
SSFVFDSGLMDIIRVSNGLIHAYASCALLCSARRVFDVNVSCRDVCSWTSLLTAYGRAARLHHARALFDAMPHKTTIAWAAILSAYVGAGSFAEAVDVFQEMLRARVRPNRAVILSVLAACGALGALEQGRWVHAHLVAAHGAMAKDGMVATALVDMYAKCGSLETARQVFSGMAERDVFAYTAMVSGLSDHGRCVEAIELFGRMQEEGVRPNEVTFICVLSACGRAGLVGRAREILGSMSAVHGMEAGVEHYGSMVDVLGRAGMVEEALEVVRRMPMRPDSYVLGALLNACVARGDTEGGEEVAAMMAELGLDDRSGVQVQLSNLYAGRGKWEEVVGVRRGMEERKVVKVPGCSMVEVDGVAREFVAGDRS

SEQ ID NO: 198762 - protein, 284 aa, Oryza sativa
  Clone ID: PAT_MRT4530_94390C.1.pep
MAESHTNQRTCTTEEWSFSWSLEMTDMYRSRTRRGAGRARRPRSPLLLPSRRGTSDYKNTTEAAVDATRIILQQCERSKTVKRIIHTASVTAASPLREDGGGGGYKDFINDCCWTPLNFSHRYSNALLDAYLSSKTLSEKELLRYNESERPAFEVVTLACALVGGDSIQPYHTLSMHPGDRASLGSVPLVHVDDVCEAHIFCMEQPSIAGRFLFAAGYPNMQDYVDHFAAKYPEIEMKLKEVVGEGVRVKVDTNKLVDLGFKYKYEVDETLDHSVEYTKRMGLL

SEQ ID NO: 198763 - protein, 144 aa, Oryza sativa
  Clone ID: PAT_MRT4530_94391C.1.pep
MEMMSPTNPMRKYSWWWDSHISPKNSKWLQENLTDMDSKIKRMIKIIDEDADSFARRAEMYYRRRPELMSLLEELYRAYRALAERHDHAAGELRSAQRKMAEAFPDEFQLDLDDDLPAETLSTETEADSRDMTPFFLSFINSGD

SEQ ID NO: 198764 - protein, 72 aa, Oryza sativa
  Clone ID: PAT_MRT4530_94392C.1.pep
MNMLLEKLLLSPVHNDTYKFIRFQDEKISAYILSNKIKHESSSSQMESPQDIQSISTAVNIAGCGGLIMFSK

SEQ ID NO: 198765 - protein, 108 aa, Oryza sativa
  Clone ID: PAT_MRT4530_94393C.1.pep
RLMRYRENGRTRGFEKTIAVRVAQSLRRDAHPGSRPAFQSARRKRAPTTPTPTRDDPSAGSHQVLPYNARTFGYGVVPSILIASPASRRTQPPHRRVIFVSNHRSFRG

SEQ ID NO: 198766 - protein, 230 aa, Oryza sativa
  unsure (1)..(230): unsure at all Xaa locations
  Clone ID: PAT_MRT4530_94394C.1.pep
PQPPRPRTAAATVSARAAAALPRPPSGRILEGRPGNHVAAVLPRPPSDRIWEGRPGSRRRRTGSPQRPCAAASASARAAAALPRPPSGRIWEGRPGNHVAAAAATGRCRVRALPLPPRPRAAAATVSARTAAALPRHPSGRIGCSRSLPLSCEPXDANGQNEHGDSFAILDNLEGLPYNAQDEPGDTDEDCREACLHTARSMSEHRRVLQRVTVAPSPDTSTEVVQAHIN

SEQ ID NO: 198767 - protein, 526 aa, Oryza sativa
  Clone ID: PAT_MRT4530_94395C.1.pep
MAGDQMHVLSALDSAKTQWYHFTAIVIAGMGFFTDAYDLFCISLVTKLIGRVYYTADGASKPGSLPPNVSAAVNGVAFVGTLTGQLFFGWLGDRVGRKSVYGMTLLLMIICSVASGLSFGDTPTSVMATLCFFRFWLGFGIGGDYPLSATIMSEYANKRTRGAFIAAVFAMQGFGILAGGAVAIGITAIFRSRFPAPPFAADPAASTPPQADYVWRLILMFGALPAALTFYWRMRMPETARYTAIVAKNAERAAADMSKVLQVKITAEQAEMASPVDKPFTSKPFGLFSGEFARRHGFHLLGTTSTWLLLDIAYYSQNLFQKDIFSAIGWIPEAKTMSALDELYHIARAQTLIALCGTVPGYWFTVALIDVVGRFKIQAAGFFVMTAFMLALAVPYDHWTAAGNQIGFVVLYALTFFFANFGPNATTFIVPAEIYPARLRATCHGISAASGKVGAIVGSFGFLYLAQSPVPAKAAAHGYPPGIGVRNSLFALAGCSLLGFLLTFLVPEPKGKSLEEMSRENEVGQP

SEQ ID NO: 198768 - protein, 212 aa, Oryza sativa
  unsure (1)..(212): unsure at all Xaa locations
  Clone ID: PAT_MRT4530_94396C.1.pep
RRGGLERRDVTGDRRGLARQRVTAAATRRRGQARQALMAAAXQAIGHHDDEDGVATGDEGRGVATGTARRWGTGRLVRGRGRAEKGQPRRAAEALQLVEWIEGRSSQSDPEPPPRSPTACHYRRRCSAVTLARQRRRSTYHQPSAAAAAATSHTSTAGTCPNTLCDTLYNIRCVTLKLYLNTPFEAKGISIAIGKWRNGFLLAIDRRRPRSN

SEQ ID NO: 198769 - protein, 173 aa, Oryza sativa
  unsure (1)..(173): unsure at all Xaa locations
  Clone ID: PAT_MRT4530_94397C.1.pep
GPPHVILTPGHFSSSSGFFCGDFGAHYXGKAFFTCTSTGGECRCVKGFKLSDTYEGVGRLGYFVTGCSRSLPLSCEPXDANGQNEHGDSFAILDNLEGLPYNAQDEPGDTDEDCREACLNKCYCIAYSSEYGCKLWYYDLYNLSSPNKPPYSKIYVRAPPRPPACHRRPFSGY

SEQ ID NO: 198770 - protein, 275 aa, Oryza sativa
  unsure (1)..(275): unsure at all Xaa locations
  Clone ID: PAT_MRT4530_94398C.1.pep
YPVQYLSLDQMPTPSSEVPIVLRSHNXQSKDDQKEKLMVSAFRGGEKRAKEREDDPKKATELAGPKFFATDDCPKKFQLGKAFLLDHALDDGPWEMRSYTKGXMDASKKGLTNLTIRSPPDFFTGEGFFWLDFADLHAIYHHEKMDINFLSALCLMQYMDAEKTKQSIGYLDPTRICQTXHTMTLSPNSEQLKNKTPEEIMEYKKGLNKQKLITVAQYIGRVFLHFQNKRVIRAAYNFNDHYFCFIIYPKYGTVIVLDPLNYHHMTYKQFLTILQ

SEQ ID NO: 198771 - protein, 121 aa, Oryza sativa
  Clone ID: PAT_MRT4530_94399C.1.pep
YARYSPGTGDNPGNGGNVSCPAGASLIGKLFPSDLYNQHCCFRTEWDHGVDLIGLGHLSKMDGPHLVHPLIPSDTSIDLRRRGPNHGRPSWICNTFRLWPTLHWERFAGSDSSTPDDHQKV

SEQ ID NO: 198772 - protein, 71 aa, Oryza sativa
  Clone ID: PAT_MRT4530_9439C.1.pep
APYNIIVLSCTGRSAWILNSDRPYMICLCSSIDVLLVLRAHPMLSSLTTKAAEPGSYFRISHRIGLVPALS

SEQ ID NO: 198773 - protein, 252 aa, Oryza sativa
  unsure (1)..(252): unsure at all Xaa locations
  Clone ID: PAT_MRT4530_943C.1.pep
PRVRANGLAYYVRSNPKPRMRAALSLAXKVGSVVEEEDERGVAHIVEHLAFSATSRYTNHDIVKFLESIGAEFGACQNALTSSDETIYELLVPVDKPGLLSQAISVLAEFSSEVRVSAEDLEKERGAVLEEYRGGRNATGRMQDSHWALLFEGSKYAERLPIGTEKVIRTVPHETVRHFYHKWYHLSNMAVFAVGDFPDTQAVVEMIKEHFGQKAPPSCPPPVIPDFSVPSHVEPRFSCFVESETCRSAVGC

SEQ ID NO: 198774 - protein, 102 aa, Oryza sativa
  Clone ID: PAT_MRT4530_94400C.1.pep
MRGLGLQRAAPELSMLVGSSGGKRAAAVEETEPKLEDFLGGNSFVSEQDHHAAGGFLFSGVPMASSTNSNSGSNTMELSMIKTWLRNNGQVPAGHQPQQQQP

SEQ ID NO: 198775 - protein, 256 aa, Oryza sativa
  Clone ID: PAT_MRT4530_94401C.1.pep
MSADGGDREPGGLINPSARRRQRQLLIDPVTVAARRRRGRGRDVRCPTCRSSGRAPAACWRTPGTRRSPRESDYRVHRRHSSRLVPPHAMHRGADVSAPHRSNAAAGDDDDVLLLLLMFAIATPAEHARPRSPCCAPALLETGLWPCGMERARGELKLRLDRVDPEGEIPLVGRMTGGAGKGCGAHMAGRRLGRVNATREWEAACGMSTSGGHGESGAVRGTDGGERIAPMSRAEPRLRMNSAGFSGSACGSNQEE

SEQ ID NO: 198776 - protein, 121 aa, Oryza sativa
  unsure (1)..(121): unsure at all Xaa locations
  Clone ID: PAT_MRT4530_94402C.1.pep
CQHPEFTVRHVRRTPPRRRRRRRPPPTRTTXRRRPPVRSSPIFKQQWSRGRRRDDDDDRRADRSRGQDQEEEEQTGERLPAGGRRRRHGPCHAPCRCCARQPYGGGAAVIWWRRRRRRRRP

SEQ ID NO: 198777 - protein, 136 aa, Oryza sativa
  Clone ID: PAT_MRT4530_94403C.1.pep
GSNNGGATWAYEVAGRTMVCPIIIEDLSPPGQMLVEMLCEERGFFLEIADTIRGFGLTILKGLMELRDGKIMARFLVEANKNVTRMDIFLSLVQLLQQNSLNRSSDQISKVIRNGVPSFAEHQQSPISVPVGLADR

SEQ ID NO: 198778 - protein, 35 aa, Oryza sativa
  Clone ID: PAT_MRT4530_94404C.1.pep
MSDKCGNSHCADKSQCVKKGTSYGVVIVEAEKSHF

SEQ ID NO: 198779 - protein, 52 aa, Oryza sativa
  Clone ID: PAT_MRT4530_94405C.1.pep
PSVKKWRYYPDDLKIAIYLQLLAKTDPLVLQRGVTKAVALNFDLPVRAVQQV

SEQ ID NO: 198780 - protein, 94 aa, Oryza sativa
  unsure (1)..(94): unsure at all Xaa locations
  Clone ID: PAT_MRT4530_94406C.1.pep
KTETATHKQKEEQAKPAQRGRGRSRRKPQGKRERHQRDQRKAKHRENRDEEXKRMGKTTERDNRSRGNQQEISRKHRKKRKDDRNRIWGKKGMR

SEQ ID NO: 198781 - protein, 212 aa, Oryza sativa
  Clone ID: PAT_MRT4530_94407C.1.pep
MGTEIATVEVEGIPFPQEITVSKPLSLLANGITDIEIHFLQIKYNAIGVYLEKDNVLAHLESWKGKKAEELVQDDGFFQALVSAPVEKLLRIVVIKEIKGSQYGVQLESSVRDRLVSVDKYEEDEEEALEKVTEFFQSKYFKPNSVITFHFPTTPGIAEISFVTEGKGEAKLTVENKNVAEMIQKWYLGGESAVSPTTVKSLADQFAALLSA

SEQ ID NO: 198782 - protein, 67 aa, Oryza sativa
  Clone ID: PAT_MRT4530_94408C.1.pep
ITYTIVLGLTLSFSDSRLGQRKSQISASTGKSLPAQRLHLRLCRVSHKATEIFERGSNASLIGENSP

SEQ ID NO: 198783 - protein, 219 aa, Oryza sativa
  unsure (1)..(219): unsure at all Xaa locations
  Clone ID: PAT_MRT4530_94409C.1.pep
LEAGPGKKSHSKSETSDLQPRIGADDDETTAATRRWWKRRGGGGGDGAEDGDDLIPMDIQDQEEMVRSLEQKQAQQSRRWRXSSPGSSSATRPSSSTPAFTMRRPRGNXRYHAYFMEDLSSPMVVVADWIAALACLFSIKGLLHSWKKWMWYSFYVSILVALFWTYYLLRLPRIRWDVAWLPFGPLIASALSLYVDHSMLESMQDINTLRSYMYNYKAL

SEQ ID NO: 198784 - protein, 964 aa, Oryza sativa
  Clone ID: PAT_MRT4530_9440C.1.pep
MAASCLAQTNALFRKSLVIQRRAGKTNCCIVLFPLLLFSAIGGLQIAINVEMLREFAAAASIDCGGCGGGVAVAANATGGLDCPTRCALPRAPKWPPLLQIPPPERRAVGDGDLLSSAGDLPDAASCRAAGSCAAAFLVTGGNRSFVARVMDNMFPAHNSSAKLPSDISALSDYVLAEADDELDFNSFEVSSFLQKTCTPNQTLSFTYQSGNTTETKHVQCTQGLMLWRDSLWLINDELYRGYYQGNNKKKTNEIAAAYDFLSSDQGNFNVFISYNSTKKFDAYEQDISLTFNQGAWQAPRLVQVSRLINMASNAYLHLRASGLKISFDFVKDMPRAARPMRPIDISSLIGQLPYVWTMELLFPVILTNIVYEKQKKLRIMMKMHGLGDFSYWTISYCYFFLLSLLYVMSFTLFGSVLGLRFFRLNDYSVQFVYYFAYMNLQISFAFLTASCFSSVRTATDYEIYFDYLAYCASVTGYFYIIGSGLLGEFLFRSYVEDVFLSRSWITLLELFPAFSLYRIIYEFAQSALLGNYMNSSGMKWVDLNDPKNGMRSVLTIMVLEWFLFLLLAFYLDHFGSFQKGIRKAAVLFHSHIDKNRFQATQQTIQLQEFKASADNEKTDVIKERETVEQILQESKNSYSIICDNLKKVYHGKDGNAKKIAVRGLSLSMPRGQCFGVLGPNGAGKTTLINMLTGFTKPTSGTAYIEGMDIQFEMNKIYAGIGVCPQHDLLWETLTGREHLLFYGRLKNLRGAPLSQAIEKSLKSVRLFAGGIADKLVSKYSGGMKRRLSVAISLIGDPKVVYMDEPSSGLDPASRKDLWNAVKSAKQDRAIILTTHSMEEAEFLCDRIGIIANGSLQCIGNSKELKAKYGGSYVLTVTTATGEAEEMRRLVQSISPTMNIVYHISGTQKFEMAKQEVRISQVFRAMEHAKLRMNVLAWGLADTTLEDVFIRVARESDSASSSVA

SEQ ID NO: 198785 - protein, 319 aa, Oryza sativa
  Clone ID: PAT_MRT4530_94410C.1.pep
MASGNSGEPSTAPQPNRWYELRLGSSCRDPSPTAKFCTLRYEFKPASIDKTQAGSLQKTKDNRVTVEFHNNQPGKPKVTFEGSQEEYKDNDGVLFFDGETFRLERLHRAVKRLRHVRVPGESSAATSATTGMGESHSPPLPKVGKSPAMSKPAVHSVPVEVERIDIGEPENPGLRNNNRSTTYQPVTTNPFSFSPDPNDQEENLDILGDDDNGSPNNMSSGQGASVRGFDINIPNQLDIDDEIADVDVSDEADEGLNAAEALRAQVNAEGQQDEQETSSSSGSSSSSSSSGSGSGSGSSSSDSDGSDGDSASSGGDVDI

SEQ ID NO: 198786 - protein, 75 aa, Oryza sativa
  Clone ID: PAT_MRT4530_94411C.1.pep
MKDHLGFGSDIDPVGASRAPAGNLADDVVCMQSPFCLAANDPAFATPSVYGLHRGFSPQSSSAGAGAGEATTGRQ

SEQ ID NO: 198787 - protein, 98 aa, Oryza sativa
  unsure (1)..(98): unsure at all Xaa locations
  Clone ID: PAT_MRT4530_94412C.1.pep
GGFPRXVFILPQXYXVLRRHKGEGXXIAXKXNXNFMVTXIAXKGSIFRVFXXXVLAKAXCIXXXGGXGXKXXXXXXXXAFNXIXXKXYPEVXXAAXSF

SEQ ID NO: 198788 - protein, 168 aa, Oryza sativa
  Clone ID: PAT_MRT4530_94413C.1.pep
KKDEEGGHKDVDNTAARGDNDDGGGGGDNDDGSRGGNNDDGSDDGGASGGGDGDNDDGGGGVGAAHAGTGINIKRRRHYPPDVKRTIYAKLLEKSNPGMMKEGVTKSVANEMGVPLRDVQRVWRHIQIGDGIEAFESKKKKYCGTKNFRVILVSSKMCRLDNAIASVT

SEQ ID NO: 198789 - protein, 380 aa, Oryza sativa
  Clone ID: PAT_MRT4530_94414C.1.pep
MAAAALAGMDARGWDEAAYRRGILRERDLSCRTLFRAVFFDHHDDDPDVLLAAASSDGSLASFSLSSCISSSSSHPTPQTHPDAAVSLVDPVCIVQAHSGPAYDVRFYPDSQQPLLFSGGDDGRLRGWRWHEMQSCLVPLSLQGDHLEPVLDLVNPQHEGPWGARSPIPENNAIAINKQEGSVYAAAGDACAYCWDVESGKCKMTFKGHTDYLHSIAVREANRQVVTGSEDGTARIWDCRSGKCTQVIRPVKNKIFEGSWVSCVAIDASESWLACGTSSGISVWSLLSNECIFNVDCHAPVQDLLFDRNQILAVGAEPLLSRFSINGTLLSQIKCAPHSAFSVSIHSSGMAAVAGYGGLVDVISQFGSHLCTFGCRSLDK

SEQ ID NO: 198790 - protein, 71 aa, Oryza sativa
  Clone ID: PAT_MRT4530_94415C.1.pep
LLLEENHKHGSYIRFALLLPWRSPRMLSTGHNSTLMWSRCFDLAWPGHVWQTTASGPSLVATDCTLVPDGR

SEQ ID NO: 198791 - protein, 82 aa, Oryza sativa
  Clone ID: PAT_MRT4530_94416C.1.pep
GGTFWGVFYLRTWMQSPSLKPKNFSRPRGKQKIKVGPGGRRIHVSFYGKGGPKPIKICKGLQKRRGFMGKKKARTGLPAPMF

SEQ ID NO: 198792 - protein, 107 aa, Oryza sativa
  unsure (1)..(107): unsure at all Xaa locations
  Clone ID: PAT_MRT4530_94417C.1.pep
GXXXXXXXXQXXTXXXXXXXXHXRXXHXXSSPXRXWQXTASSCLASSAXXQCRQTGRRTXHFXAFSTGPDDPAKFHSFLTEMKEEQGGGKTFRAIFTDKDELEWFDN

SEQ ID NO: 198793 - protein, 205 aa, Oryza sativa
  unsure (1)..(205): unsure at all Xaa locations
  Clone ID: PAT_MRT4530_94418C.1.pep
MAPPPPPRDGVGFCRVHGHHHRVHVGHEPLERGSAPGGRSRRRRAWNASPAWSPAAAARGGSWSSPCPRGSPSPRCRTPRRPPRRCRTCPATPSPSPPSCCGCGSPPRTSPTASSSPPGTSSPPPPEAPPSNLPPPPQPAPRRNPLPLPRRPAPPSPPRLRPQNPPPPRPAPPTRRCXSPPPPPQPPPPPRSPRSPAPPRAGSTP

SEQ ID NO: 198794 - protein, 66 aa, Oryza sativa
  unsure (1)..(66): unsure at all Xaa locations
  Clone ID: PAT_MRT4530_94419C.1.pep
ELVSSXFFFFFFFFFFFFFFFFFFFFFFGPWPHCIGMAHSWGLHFITTCGGHNNLHICLKKRVSPF

SEQ ID NO: 198795 - protein, 137 aa, Oryza sativa
  Clone ID: PAT_MRT4530_9441C.1.pep
ACRASLHLPRFDLARRRRCRSRRRWPLGRRRGSSRRAGRMRRGRRAADWGRPSPVSCGWPCSGPPPPSSSGRNRPPADPGHAHVQTFPERETPLDFLDVLYHKKEKFQWHFNYWGSPSLLRFRATLPICPPGAPSHS

SEQ ID NO: 198796 - protein, 79 aa, Oryza sativa
  Clone ID: PAT_MRT4530_94420C.1.pep
TGRSFFFFEAEAHPSFSLRSLILSYTCGRPTDGGPPITCRKDDENLVYRGEAELRHGLCHHQYFRNHEPLPPLHDESDD

SEQ ID NO: 198797 - protein, 100 aa, Oryza sativa
  Clone ID: PAT_MRT4530_94421C.1.pep
PSGQMRFSPFACACGSGGKCQTSYVVLAAHMSLLPYHCKRPRYTVGPDWRESGWTQSPCVRDVTAPLPGSLIRGGHQNSLGIEQGAGPNVRQRTPPWRDG

SEQ ID NO: 198798 - protein, 302 aa, Oryza sativa
  Clone ID: PAT_MRT4530_94422C.1.pep
MHVCFHGGGGGGGGRLAKSFNVISDFTKILIGRRGGDHALARRRRMRQCKDAAPAAAAAAVASASAKIAPEEEGEGGGGGKEEEFCDKCCSALSGGGGAEEEAAAEGERDNRLRRIRFREEVFDAWAAQCWWADNHDRIAELYCLVKPDDDDDEEEAIAAAEAAMLPATPCQSEAEDDDDDDGAESSSRSPSTSTFSGGPSSGSGGGSTGTLGSPILGLVTAPNTTGGGEHDAVRDQHQPTAATWREWVEEYEPGVFITVGAYPGHRLQLRCVELSREKFGEVKARVWWEENKARLHHLYSF

SEQ ID NO: 198799 - protein, 153 aa, Oryza sativa
  unsure (1)..(153): unsure at all Xaa locations
  Clone ID: PAT_MRT4530_94423C.1.pep
PVADAVGARRQRQQPPPGPGSATNPGSPPAAASSSAPPPPDRAEQHLSQNSSSLPPPXPPPPLPARSWRTRTPPPPPPRPARHPCIAXPPPPRQRXSPPRRPASLPPPPPPPPDSSRPPAPPAPASSAAASAARTPPRGRCPTAASPARATPP

SEQ ID NO: 198800 - protein, 65 aa, Oryza sativa
  Clone ID: PAT_MRT4530_94424C.1.pep
VKENPVRPFAAATSRWSVAAVVKPSRAAVGVRRWSSFIVVLCTVSDVPEENVYIEEGLEAFEEAQ

SEQ ID NO: 198801 - protein, 80 aa, Oryza sativa
  Clone ID: PAT_MRT4530_94425C.1.pep
GSSGKTRESWGSKNDSSPACFAPLIILPGAPSFSIGKVVVGARLYWDWSVVLAPRDFILCVCAKIFVLTFASFMYANMDR

SEQ ID NO: 198802 - protein, 355 aa, Oryza sativa
  Clone ID: PAT_MRT4530_94426C.1.pep
MAAKLSLLLPVTCFILFVLHAVHVEARPDPAAFGDSDNGFYTLFVFGDSFADTGNLPKRRLSEQSREWYYPYGRDRGNNRPTGRFSNAMVQSDLIARMLGRHEAPPTYRRVDNYVHPHGMNFAAGGSGVFKLPSGAPTLDKQVDHFRDLVQDGTITRRNLRNSIALVAVSGNDYARLANVNDTSKMIKFVDEVTSEIAKQVHRLKNNGARKILVNNLHPVGCTPWVTRPGNYSGCSSTGNMGAYLHGSNLQQKLSHLDYVHHVDLNTAFSNIVNPDQGSKHKVSSQFEHKMQPCCESLDPNGFCGQKGHDGKDLFSVCNDPEKYFYWDDVHPTEAGWKAVMQQLEGPIKKFLRIN

SEQ ID NO: 198803 - protein, 48 aa, Oryza sativa
  Clone ID: PAT_MRT4530_94427C.1.pep
QEQGNFYWKVDYWIPFLCSDNKSLSSLKKLIVQHEDHCNYLYSRLQRW

SEQ ID NO: 198804 - protein, 109 aa, Oryza sativa
  Clone ID: PAT_MRT4530_94428C.1.pep
LIPIISSSVQNLLLLKHFVADFFFLLEFLLWGKAQSAARQGITAESCNLYRFWIPPPPAAALSPPRLQHILVPREKGEIFFWGRMIRSLAVCCCCLAAHRFGPFSVCFL

SEQ ID NO: 198805 - protein, 70 aa, Oryza sativa
  Clone ID: PAT_MRT4530_94429C.1.pep
LDRAPRWREGTQLPKVYKFYHKIKELEGICTPIFPKMSQGPGGTMPGGMDKENPPPAGAKGSGPKIEGVA

SEQ ID NO: 198806 - protein, 40 aa, Oryza sativa
  Clone ID: PAT_MRT4530_9442C.1.pep
CGAAHAYPVRGRSQCVTGRRPVRSRTTVLPRCICFRWSGG

SEQ ID NO: 198807 - protein, 105 aa, Oryza sativa
  Clone ID: PAT_MRT4530_94430C.1.pep
HDAGWGKHGFGYAFQTPESWTADGGYRALHYMRPLGVWAMQWALSPPVLHKEHRVAAVAASPEDAALGQEKFDKVASMLRLPEEQQHKGILRALYDTLRQLLLPS

SEQ ID NO: 198808 - protein, 144 aa, Oryza sativa
  unsure (1)..(144): unsure at all Xaa locations
  Clone ID: PAT_MRT4530_94431C.1.pep
GADSLHLPPAIPWVATAXEGGDGRRXAARLKMDXIGFTVTMTLRWLVASRGRLPCLLLSLRCQRRRQRGSATMESTAKLRRRSKHGDGSAFTVMTTSGGVQGKRTGGRGRALHCKAEGGDGADRGRLERRRDSAGXAAGGGDSG

SEQ ID NO: 198809 - protein, 575 aa, Oryza sativa
  Clone ID: PAT_MRT4530_94432C.1.pep
MDAGDAMERGQQRLPESWNPKLQDDVSLTVPLIQDKKSGSKAPAVVLGFECLESTAFNGIATNLVVYLETVLHGSSLASASNVTTWFGTSYLTPVFGAIIADTFFGNYNTILVSLVFYLLGMVLVTFSAFLPTTALCAVAGSTSCQQPVFGAQTIAFVGLYLVAFGSGGVRAALLPFGAEQFDDDNAVDRERKMSFFSWFYMCVDFGMIVSGLFIVWIQQNVSWGLGFGIATVCVAIAFGGFVLATPMYKRSMPTGTPLKSLAQVVVAACRKVSLRVPADAALLYEVHDKIDQPKITHTDEFSFLDKAAVIVQSDLEEDSNDASAAAAGSWRLCTVTQVEELKILMRLLPIWATSIVLSAAYAQLNTTFVQQGAAMNMRIMSFTIPAASMVSFEVFCVLAWVLVYGSVIVPLLRSFSPANGEPSQLRRMGAGRLLIAVAMAIAALVEMVRLDAAARGESLSIAWQMPQYFMLAGGEVFCYIAQLEFFYSEAPESMKSICTSLALLTVALGSYMSSFIYAVVNAFTAVDGRPGWISDNLNEGHLDYFFWVMSALCTLNFVVYSAFARNYKVKTVVS

SEQ ID NO: 198810 - protein, 116 aa, Oryza sativa
  Clone ID: PAT_MRT4530_94433C.1.pep
ICSETCPPGSGPPPPRPRPRRPPRSPPAGRRRPPTPRAARGGRGTPAPPAPCPPGWRSTPPCCTAGTPPRCPWAPACSRCPSRRRGGGRSDGIPGGIARRRRRRGFQIWGWRPPRT

SEQ ID NO: 198811 - protein, 153 aa, Oryza sativa
  unsure (1)..(153): unsure at all Xaa locations
  Clone ID: PAT_MRT4530_94434C.1.pep
VVMRHGDRVDHADPLWAANNPRPWDPPXTDAGLLRASTVASRILADGFHIHRVLVSPFIRCLQTAAQAIAALSPLPRINIKVSIEYGLSEMMNTQAMGILVSQIAPSIDRWXLTLSQLEAALPAATIDHSAEPLYQEVLKWGESVWEARSRYC

SEQ ID NO: 198812 - protein, 511 aa, Oryza sativa
  Clone ID: PAT_MRT4530_94435C.1.pep
PEFPGRPRVRSLSLRPGSCLTSCCLLPPSSSSSSSSSRNTGVWGESDQVAAGCFFFFFSSSSSLAMALLLLRMGVSVALLVAFFSSLIPSSEAYDPLDPNGNITIKWDVLQWTPDGYVAVVSLYNYQQYRHIQSPGWKLGWVWAKKEIIWAMNGGQATEQGDCSKFKSNIPHCCKKDPEIVDLLPGTPYNMQIANCCKGGVLNSWAQDPANAIASFQVSVGQAGTTNKTVRVPRNFTLKSPGPGYTCGSAKVVRPTKFFSQDGRRTTQAHMTWNVTCTYSQIVAQRSPTCCVSLSSFYNDTIVNCPTCSCGCQNNKPGSCVEGNSPYLASVVNTHNKDSLTPLVQCTSHMCPIRVHWHVKVNYKEYWRVKITVTNFNYRMNYSQWNLVTQHPSFDNLTTIFSFNYKSLNPYGVINDTAMLWGIKYYNDLLMTAGPDGNVQSELLFKKDPKSFTFEKGWAFPRRVYFNGDNCVMPPPDAYPWLPNASTRVMSSILLPFITIWTALTFLMVYA

SEQ ID NO: 198813 - protein, 386 aa, Oryza sativa
  unsure (1)..(386): unsure at all Xaa locations
  Clone ID: PAT_MRT4530_94436C.1.pep
SFLRGCLTKSSFATFXIKTGMRCVITEIRYAVIVNGELSDPVIPTRGIWQGDPIFPYIFLTCTXGLSCLLKNKEGEGSLXGLQNGRFGPPISHLLFADDNXFTKVSLLMIAFYKSTEGLEINSTGLEINCHTCQILIGPGCHTQEIMLWLDCRFXNDALKSTYLDVPIEVGHSPTKSSNFLQERTWKXINSWTDHXDQLLSIARKETLVKVVVQSIXNFVMRCFHILATTCXEMRKSIANTCWGXEHGKKKMHLHSWIXLFSPKFLGSLGFRDLQLFNXAKLGRQXWHLLTYLDSSCARVLKCHYFPNMIFWHASCPRPASYTXIVSCVAKKKLLEQGILWKIGNGYVLICQDKWIHDDISYQSGAKSLLMISNNLGNIFAPDNSK

SEQ ID NO: 198814 - protein, 55 aa, Oryza sativa
  Clone ID: PAT_MRT4530_94437C.1.pep
KVYSLTVDFSGSPVNFHTKNDSGSKIFGQVVFQLVNINHLAGLPYGVNFLSVKAI

SEQ ID NO: 198815 - protein, 92 aa, Oryza sativa
  Clone ID: PAT_MRT4530_94438C.1.pep
MAPSGATVGSGTKRIEVENMEVFKETVELISLCEDLTYKTRLTNDETTQKPWSMEEQVWSESERKPWSSTLLPPYLHTREVAHLGHDETWLL

SEQ ID NO: 198816 - protein, 248 aa, Oryza sativa
  Clone ID: PAT_MRT4530_94439C.1.pep
MDPGPPWPDLLLRAAGSRASAWAASAVWLAAGGMHAASGVVHEAFGGEPDEAAAWTRFRGGGMHAAGDLSRRRWPAVVMQQGAAAWRERGGRLPCGDGDDVYGGCVAVARAATVAAVVEIVGVGVGGSKWRRGRSLPVRCTARRPDGLGRLAGVEATVSGAADGSGGRLSARGAGDGDGGRLGARGAAGGGGGDLSVRRSCRWVWRGLRCTKTSRRGASVQWSHMSVEVEWWRSIGALAVDLQVVNGG

SEQ ID NO: 198817 - protein, 53 aa, Oryza sativa
  Clone ID: PAT_MRT4530_9443C.1.pep
LNRIFTFPFYMVIFDHKIKEKMNKFHFLDCIKDFFFSVGVFSMYTPTISVPSF

SEQ ID NO: 198818 - protein, 311 aa, Oryza sativa
  Clone ID: PAT_MRT4530_94440C.1.pep
MKRKSSIVARKDAKKVQSWATVTTSLARFREEVAPGFLSLSPSSVSPGDAAAQLAPQTTTITTSNSAAAVGNSTSASGTTAEVSAAGEPMLIDAAAPIAAEPIDAVPLQAVAAHVPRAAVPQRVDDDDAAPPPPAWIRGELLPLLGLRGDLPLHFICRKRVEASDLSAQQSRFLIPQAAASLRLCPLLSAAEREAAKLVEEFLHKKKKSPEPKPREKGEKSPGLAVRVVVYRASPLDVMAMELTRRLSNCHTIIRQKETTRLVDRGVQVKDDVAVWAFRPDPNSALHFVIANTAAQQQQPPPAAAPNALPQ

SEQ ID NO: 198819 - protein, 121 aa, Oryza sativa
  unsure (1)..(121): unsure at all Xaa locations
  Clone ID: PAT_MRT4530_94441C.1.pep
SRRRWPAVVMQQGAAAWRERGGRLPCGDGDDVYGGXVRCTARRPDGLGRLAGVEATVSGAADGSGGRLSARGAGDGDGGRLGARGAAGGGGGDLSVRRSCRWVWRGPLKGVCRVKAQSELL

SEQ ID NO: 198820 - protein, 113 aa, Oryza sativa
  Clone ID: PAT_MRT4530_94442C.1.pep
RGGSTAGLCTPCLLCCRLMDWKPHLLLLLLTLSCIFQSFGQQFFLLCCHPFLVPVSFAPFSINPPHTFTAPRYLFYYHSTHTSENKSSFFFLFFFCLLLKKLTANARLLSSEP

SEQ ID NO: 198821 - protein, 129 aa, Oryza sativa
  Clone ID: PAT_MRT4530_94443C.1.pep
WNKIFHVLPNFYKFEYLNSLTPNGLPHLLKVKVNCLVILLRNLDLHNGLCNGTRLMIRAFQNYSISAEIVSGAHAGKRVFIPRIPLYPSEDLQLPFKFKRKQFPIRLSFAMTINKAQGQTIPNVAIYLP

SEQ ID NO: 198822 - protein, 90 aa, Oryza sativa
  unsure (1)..(90): unsure at all Xaa locations
  Clone ID: PAT_MRT4530_94444C.1.pep
EKALVPLSPRAARAATRRAAAPTSSSSPSTFRRRXPRXAGDEYXARAPTLRARAGRAYEKLGXVARQSXVXVRPTXFGLAWXEERRNESR

SEQ ID NO: 198823 - protein, 98 aa, Oryza sativa
  Clone ID: PAT_MRT4530_94445C.1.pep
SMYESIQNKTSNNVRYMKCVEFRTKHILGHSGVRVLLLGPKAKHGEIYQTTVCELLHYFAGPFWATRPLVYWATGMSPVERHSHNLGIGEFYLFAFDP

SEQ ID NO: 198824 - protein, 42 aa, Oryza sativa
  unsure (1)..(42): unsure at all Xaa locations
  Clone ID: PAT_MRT4530_94446C.1.pep
LTRPINTRTHAVTASLFPSRLTAPARHQSSIRLXTTMAHMTT

SEQ ID NO: 198825 - protein, 268 aa, Oryza sativa
  Clone ID: PAT_MRT4530_94447C.1.pep
MALQLQAATPHPPLPLRSSRRRFAAPPSPLVLRAVASSRDGPSTRLSSPAPAPPRRRRRASVRARAGAGRGGRGESPYDVLGVPPSAPPEEIKRAYRRLALKFHPDVNKEPNAQEKFLRIKHAYNTLMNSESRSKYASTSSNTYYSSRTYGKSSTTSADEEEPFYGFGDFLRDLQAEFQNWEAGLNSEQKPKSLWEELAAIGEEFVEFLENELKIDDSSDAEDNANDPYTQSGGKNKQDVNTSTSSFDDSVSEIEAALEKLKKELGLS

SEQ ID NO: 198826 - protein, 280 aa, Oryza sativa
  Clone ID: PAT_MRT4530_94448C.1.pep
MAGEEFGLAAAAAAAASATVDAASGRSSRVTALRSVEDIFSDFRARRSAIVRALTEDLEKFAALCNPDLDCLCLYGNSDGTWEVAPPPEMVPPELPEPALGINFSRDTMYRSDWVALLSVFSDSWLLAVAFFHGARLDRDDRIEAGVEAVLRKILALRSPQISQTLFQFTLHLPPEIVSPPAQRNFLLILSMSSKGGKKPEICCFLQKVMKREVNEIVNIHEVIMNASPLNESTLGLTDQGSHVGLQAESKNFGDQLFDTMNEADWPEVAYPFSPFLFWN

SEQ ID NO: 198827 - protein, 41 aa, Oryza sativa
  unsure (1)..(41): unsure at all Xaa locations
  Clone ID: PAT_MRT4530_94449C.1.pep
LPMLLGKKLLRHLVQLSXYHRNSIPQSRLVEDSPGTEPPSN

SEQ ID NO: 198828 - protein, 39 aa, Oryza sativa
  Clone ID: PAT_MRT4530_9444C.1.pep
LIVDRRLYVAKVKPLSLVLSSIHIYNNNNNNNNPCKLLL

SEQ ID NO: 198829 - protein, 149 aa, Oryza sativa
  Clone ID: PAT_MRT4530_94450C.1.pep
MARAGGHGMGNPVNVGIAVQADWENREFISNISLNVRRLFDFLLRFEATTKSKLASLNEKLDILERKLEVLEVQPSSFILYVFISTVLPYRSNASSNNLCRQLSRCTLGVMERGQRCRDELIEGEESLDLTEKAHDWSRQATPPETQGM

SEQ ID NO: 198830 - protein, 63 aa, Oryza sativa
  Clone ID: PAT_MRT4530_94451C.1.pep
SSSFGPGIFFYHLKNCLQQETLVCTVPMKADLLSNAECTGPLCYLSIQKIRSPDMDNAKSGHD

SEQ ID NO: 198831 - protein, 65 aa, Oryza sativa
  Clone ID: PAT_MRT4530_94452C.1.pep
MGEGKEAVVGEEEVEVVVDRIDVSCCNRRRKPDQATRHESSRTARHSMASIAILLVKNSLAETQV

SEQ ID NO: 198832 - protein, 117 aa, Oryza sativa
  Clone ID: PAT_MRT4530_94453C.1.pep
FGNQEEKNISRIKEKKTREEQSSITYTSIKNVHIIIIRSSSSSKHYQQHQSSPLPSSNPKPSRNNNPLINRPYFFPEPFQFPSHRIESSIIDRVMNSRLTTKPSPLHLGLVGGGLRP

SEQ ID NO: 198833 - protein, 82 aa, Oryza sativa
  Clone ID: PAT_MRT4530_94454C.1.pep
RITIFPREPLFPLFPPAFKRPPIGKTGTPPGPPPEFPGGPPGPKKKKKKKKKKKKKKKKKKKKKKKKKKKKKKKKKKKKKNK

SEQ ID NO: 198834 - protein, 88 aa, Oryza sativa
  Clone ID: PAT_MRT4530_94455C.1.pep
HARGVQGIFGMGMPVGSISWIFIKLDCRDRSFASVSGSALRVERSLWKLTVRVYSYGMWQKVYLFCVISKGKKHRLKKKKKKKKKGRP

SEQ ID NO: 198835 - protein, 41 aa, Oryza sativa
  Clone ID: PAT_MRT4530_94456C.1.pep
TSENLKVSEDVPCFGVHNIVVDSFVVLPISISLTPAKFNKL

SEQ ID NO: 198836 - protein, 917 aa, Oryza sativa
  Clone ID: PAT_MRT4530_94457C.1.pep
MEAQATAAVKKALAALYHHPDDATRTAADRWLQQFQHTLDAWQVADSLLHDESSNMETQIFCSQTLRSKVQRDFEELPSEAFRPLQDSLYALLKKFSKGPQKVRTQICIAMAALAVHVPVEDWGGGGIVNWLSDEMNSQQDFIPSFLELLTVLPQECSSHKIAARPERRRQFENDLRSSAEVALSLLTACLGIDQLKEQVLEGFASWLRFCHGFYKNKVQFPVTSELIHFTVSRESNGITEQLPLIQVLIPYVMGLKEQLKDSSKDEEDVKAIARLLADMGDSYVELIAAGSDDAMQIVNALLEVTSHSEFDISSMTFNFWHHLMRNLTDRGSYASYGSEVSINTERNRRLQLFRQPFEILVSLVSFRVEYPELYHTFSEEDQRDFRHSRYAVSDVLLDATDVLGGDPTLKILFTKLIQACGNGQNQKWQPVEAALFCIQAIAKSVSVEENEILPQVMSLLPSFPHQEQLLQTAHCFEFYTVTGIQVSLLVMSYDDDWSSNVLETAVCSLVGAFSKWIEAAPSELLILPPLVDILNKGMSTSEETAAAASVAFKYICEDCRRKFSGSLDGLFQIYQIALSGVGGYKVSSEDSLHLVEALSNVKLPQVVADAVNRYWPTLKSIFDQRAWDTRTMESLCRSCKFAVRTCGRFMGFTIGAMLEEIQTLYQQHNQACFLYLSSEVIKIFGSDPACANYLASLIQALFGHTIQLLRTIQDFTARPDIADDCFLLASRCIRYCPDLFVPTEMFPRLVDCAMVGITIQHREACKSILSFLSDVFDLAKSPEGEKYRELINTVILQRGAVLTRIMVASLTGALPSSRLEEVSYVLVSLSRSFGGNMLSWARECITLIPPQALTDSERSRFLNIISDASSGSSLGSITDRFAEISEVCRRNKTVQDIVQGALRPHDLSFTVAPPPL

SEQ ID NO: 198837 - protein, 33 aa, Oryza sativa
  Clone ID: PAT_MRT4530_94458C.1.pep
MLSAATSDALVKIKPGEISMVSGIPKEHLRRKG

SEQ ID NO: 198838 - protein, 69 aa, Oryza sativa
  Clone ID: PAT_MRT4530_94459C.1.pep
KPSRQAANGAETAATVLAGAARTDEAFLIVPPLLGRHSLPPTLLPTELGLGRRAAGSGGQVEVVVAAGF

SEQ ID NO: 198839 - protein, 76 aa, Oryza sativa
  Clone ID: PAT_MRT4530_9445C.1.pep
VYWTMWMQHTTRPFLTWHRGRPLLDQKDTYALETRTYDVEFGVFDPMANTRASRYKAFIYLALDSSAVISLWMSSL

SEQ ID NO: 198840 - protein, 190 aa, Oryza sativa
  Clone ID: PAT_MRT4530_94460C.1.pep
RRTVARQGEMAAAVAAARTGGDGGGGEGVERRARRRGEARRRRRRRWGGERIGAHMAMTCLAMVVAALVEARRLRVTHDASLVDRPDAATACLAMVVVALVAARRLRVARDATAAAALASSATPRRRPSPPPHPTTARLLRRTLWRQRQEAGGVGHGEEGEATADHRVATPCLLPPHSRAPEPRAIAQPH

SEQ ID NO: 198841 - protein, 71 aa, Oryza sativa
  Clone ID: PAT_MRT4530_94461C.1.pep
ALASDGSGCSCLSQSLRAGKWSRVTATATRRCTTPAPASMGMSARSSELRAQYWMVSSVFYSYSGRVVDLD

SEQ ID NO: 198842 - protein, 758 aa, Oryza sativa
  Clone ID: PAT_MRT4530_94462C.1.pep
MATMLPLLLPPSPPRALSPRCSLQPRARHHLLDGEASPRRGAPAVGANAAAYAREIGACVRARRWGAACEAFAAMRAAGAAPDRFLLPQVLRACAGAREGRLAAAAHALAAKGGPAFAGDAVVGNALVAMYAALGDVAAARAAFAGLPERDVVAWNCIISGCVQNARYDEALNIFCEMCESESPDAVTVASILPACTGLMALGIGKQLHSYVIRCGIKLNVYIGSSLIGMYSECGEFGYARSVFAAIEEKNATVWNELIRSYINEERMNEAWEAFRLMKENGLQPDTITYNSFIAAYARAGQKEHGKEVHCYAFRSGLISNIFVSSKLVDLYGKTGDVGTADKVFRRISNKNVVTWNSILASYRQNRKPEIALKLFHEMIKSNLLPNLVTLQIALLSSGMTMALQHGRELHGYIRKNWPDGYPTALASALIDMYGKCGKIEDARLVFECTDEKDIATWNAIMSAYLLHRIPGEVKKLFKYIEQSGIQPDPVTFIILLSACKQEGSMEEARRYFYSMEDVYGIQPTLKHYTCMVDIMGMAGLLEESLELIQKMQLEPDGCLWSILLKACKLHSNLEIGEKAAKALFELEPNNTSNYMSLSNIYADNGLWESTEALRVAMTEQGLNVERQCSRLYLGTDVHTFEAGDSSHPAFEKILSTWNDLSDRMEQSGYPPQDIEPYSNAEADPLSCQHTERIALCYGLISVRVHDLIRISKNFRMCMECHSSIKFISRDMNREIFVSDGCTYHHFQNGACSCGDMW

SEQ ID NO: 198843 - protein, 571 aa, Oryza sativa
  Clone ID: PAT_MRT4530_94463C.1.pep
MALAHEVAFEVNLIEDDGGLAGWAPVGTRTALSSHAERDTAMLISGAVSAAEPNERIRRSSGRYIVASRRADEEDGLRRAVPAGALVPRVTYRVVGWVSVQGQGDGRHHAVRVGLRVDGDGGDDERGSWLDCGAARVEVGGGWAEINGAFRLRASPRVAAVHVHGAPAGVDVKVMDLQVYATDRKARLTQLKEQTDKVRKRDVILNLGGGATMAGASIRVAQLLENRFPFGSCINKTAIRNPKFVDFFCENFDWAVFENELKWYSTEPQRGQINYRDADELLDFCHRYGKSARGHCIFWAVDGDVQQWVKDLGRDDLAAAVQGRLHGLLSRYAGRFRHYDVNNEMLHGRFYRDRLGDGVAPLMFREAARLDPAARLFVNDYNVLRGNDPNATPEKYVELVDALRRGGAAVGGIGVQGHMDSPVAGQVIRAALDKLAAAGGAPIWITELDVSEPDVGLRADDLEVVLREAYAHPAVEGVVLWGFMEGQMWRRDAYLVDADGTVNEAGQRFLQLQREWRSDARGIVDGDGRFKFRGFHGTYVAQVTTATGKMLKTFTVEKGDNSLELDLDIEI

SEQ ID NO: 198844 - protein, 129 aa, Oryza sativa
  Clone ID: PAT_MRT4530_94464C.1.pep
RRCEESRHRRHPLRAGDGNGVASRPDGSHGAAKRAGGGDSGARPPRLRVAGSAGEEAGVTGSGGPGLLVGGCGGECERMATAGQRCGDGSGPRAGRRRARQQRVRGGGRHQRRRGGRSAREIPPFSSAR

SEQ ID NO: 198845 - protein, 261 aa, Oryza sativa
  Clone ID: PAT_MRT4530_94465C.1.pep
KFQIPSYFSLVIRSLAVLEGIAISFNPNYKVLGSSYPWIARKVLTDSSPKLRSTLQTLLYKDGTFQIDRLESLLTESLRARTEQSLTRDQQEETDSSKFAIKQVLSFTLTEQGAFVKDLLLQEIAKGLDALGAATLSSATSAAASRLPVAVPSPSPSLDNEDATNLRNLHRLLLLLSKVPQKEDSSPIPGYNSTEENEGDSTDEISLVLYEMRSLPELLPVLSVIPELPPESQQQFLLLPADLTNRLLSRAVARTIRRIFI

SEQ ID NO: 198846 - protein, 628 aa, Oryza sativa
  Clone ID: PAT_MRT4530_94466C.1.pep
MAKAPSTTAVTQFQAAALNQATASTQQAATLTQEGIDLESQDGGDATEYEQATRHASSNARAASSLRSGEASQASPIGPPPGFDSDGHHPSFRPSCSTPCCTGFGCLWTTSELVKSVRHDLDTSTMTQAVSANMQGALFGTGPQLNTMAQPNMQAMASPFTVPYPSLNSPFEGAMMRGGGKKRLPLSWGLKNHPIPPQFKYPPVARYLGESDPSKFLSIYESAIEAAHGDDNTKKKKPGKTAREHIRCFSQARCQVQDITEASIINAASAVLLPSELTRRIARKEPQTIERLYCIIDGYARGEEDTNKGWRYKPTMTTLLPPLQLLQVLGQVQLAVAFGICPNMREEMILFEVVDIPYNYNAIFGRATLNKFEAIAHHNYLKLKMPDAYSGYHQILMNPGDIPKTAFIKPFGTFHHIRMPFGLGNVGATFARLICKVLCSQLGWNVEAYVDDIVVKKRKAFDHASDLQETFDNLRSAGMKLNHDKCVFGVRANKLLGFLVSDRGIEANPEKIDAIQQMMPPKSVREVQKLMGRIVALGRFLSRAAERGLPFFKTLRGAGKFNWTPECQTAFDEPKQCLQSPLALVSPAAGSELLLYLAASPIAVSAALVQETEVGTKPVYSMSKAQQG

SEQ ID NO: 198847 - protein, 50 aa, Oryza sativa
  Clone ID: PAT_MRT4530_94467C.1.pep
CTGFPLARNHESDDAAKVIDKALTTAGMWDIIDSTAIAIGRRDAWTYYTG

SEQ ID NO: 198848 - protein, 54 aa, Oryza sativa
  unsure (1)..(54): unsure at all Xaa locations
  Clone ID: PAT_MRT4530_94468C.1.pep
LGLLEHWLVCMLGRTTSSXHISMSVLEFCTIPSVRIGTIAKRHVHRSIYIYSCL

SEQ ID NO: 198849 - protein, 495 aa, Oryza sativa
  unsure (1)..(495): unsure at all Xaa locations
  Clone ID: PAT_MRT4530_94469C.1.pep
MAAVGVKRKLIVDKSPTHHLLHLPPSPIALLRRRGLPSDLESSEGFFTSLRSDAAYTATTEEDVQAVARAVICIALNFPEAICQLVRQLTPGNVAVALDWDLLDSDHLRKMAAGHTTWNEAELQAFLEAYMEEIEARTITSTCPNRQGYANLEVKMYQKAQKLKNFGDTYRRRFQTWCWLESMATGLGRCPFTGNILASPEWWTRMDQMRRGARAFRNGPLLFTPENHTVFRGRVCTLNRSGVPVSPCAISAAPQQAEILDIEDLTEQAQQEPEDQTPRRGKRTLTGGTSSGSSSKWSRGSYASGALNRLANLRIQSNESRARREELKQAKSARACMELLKADGVSSRDPIYHMALRVFRDGFLREFFLDDCPTPEGRLYFIQSQYQDMAQYQPLPPPGFGGYLQSAPPGIVVGEGSGYAAEAERVGAGDDEDGADDDGERVGDNKGGQGGHGKGGDDDGDDGNGGAAGYGGSGYGGALYGXSLEAMIFPDMQCF

SEQ ID NO: 198850 - protein, 65 aa, Oryza sativa
  Clone ID: PAT_MRT4530_9446C.1.pep
PVCLAQKYRLDAGVVRVALAGKRRGRTGGAQQREGGLCRNARAGYRRAQPRRVRRLLRCPASLSR

SEQ ID NO: 198851 - protein, 80 aa, Oryza sativa
  Clone ID: PAT_MRT4530_94470C.1.pep
MAMWAARHGTAQARPCLGLGLSGRHGPTDAPGRAVPAHVLHSQPRHGPTRLGPCRAGPKARWAIVLFLRISLNFLPPIGL

SEQ ID NO: 198852 - protein, 51 aa, Oryza sativa
  Clone ID: PAT_MRT4530_94471C.1.pep
MLPDIDFRDRHEYSPTVSPDTVRRYESANSDLAGHRSEEEDYPVVDYELYL

SEQ ID NO: 198853 - protein, 70 aa, Oryza sativa
  Clone ID: PAT_MRT4530_94472C.1.pep
MVVLAVDEGYGHGGAVPDWIGYEVDGRRCGRAGYSHGLALLLLGRKDEEKPVKVSPWNQYRLVDREAEQV

SEQ ID NO: 198854 - protein, 33 aa, Oryza sativa
  Clone ID: PAT_MRT4530_94473C.1.pep
SRSYHIGDSLIPDPTSYIRSKLLLLHHSYIEII

SEQ ID NO: 198855 - protein, 131 aa, Oryza sativa
  unsure (1)..(131): unsure at all Xaa locations
  Clone ID: PAT_MRT4530_94474C.1.pep
AAKNRRHVPFFNAIEVGRRGETRARRIAEACLRRAVPPGALHPQIALSARVFLLLPRSLHCTTVHLKIAARRADDREGRGAGDRDGDGREGADDGEGGAPAMGMGMGRCEGXKKRQLQAYGQAAGQTSMIL

SEQ ID NO: 198856 - protein, 45 aa, Oryza sativa
  Clone ID: PAT_MRT4530_94475C.1.pep
MIDVPIGRDISWFACDHVSVGQNTRGTVQLLQDVDNMACAVQSSN

SEQ ID NO: 198857 - protein, 358 aa, Oryza sativa
  Clone ID: PAT_MRT4530_94476C.1.pep
MKSSLRKLRGFALQRHEQRVDRRGGHSPAAAAAANELLAASQDMADMRSCYDNLLSVAAAIANSAYEFSEALQEMGTCLLKRVTPNKDGINDKVLLLLGKAQFELRKLVDSYRVHVLNTITTPSQSLLNELQTVEEMKHQCDEKRELFEFLLNAQKEKGRSKNAKSDIGASEQLKQAQDDYQEEATLFLFRLKSLKQGQFRSLFTQAARHHAAQLNLFRKGLKSLEAVEPHVRLAAEQQHIDHQFSALDEEDYSVDEENEDDYNDSHEDLSFDYGENKEGTEAGHASRSPTEELLDRSKAEYSSFPGERQRSGSQSAPLFPEKKLEAAERIKELRRSATRKLNTYVLPTPNDVRDTSQ

SEQ ID NO: 198858 - protein, 75 aa, Oryza sativa
  Clone ID: PAT_MRT4530_94477C.1.pep
VLSLFTFFLTPRCYLLSSSVSPIELFFIFDSQTLRASQAYRIPAGAPSFLCQPSSNQKTNQSSLHYDNSLELPTS

SEQ ID NO: 198859 - protein, 197 aa, Oryza sativa
  unsure (1)..(197): unsure at all Xaa locations
  Clone ID: PAT_MRT4530_94478C.1.pep
MVSLLRRHPNPLLAASVPAHLLRRFSALPDLAVCGEADLARIHSLVATTLSRPDDYPCLHGSRPLFSLAVSCLPRLRRLDLAVSLLCALLDSALASPGLLTRAISLFSGPNNALRAFSDSAPVACSNVSLSALLSALFGAGRVDDVESTLASAESSFAXGVAPGRASHNVFGASEKSKRDGRKKGEKGKKGDVDTLT

SEQ ID NO: 198860 - protein, 189 aa, Oryza sativa
  unsure (1)..(189): unsure at all Xaa locations
  Clone ID: PAT_MRT4530_94479C.1.pep
PIYLSLALQSARSSGERRRVTTTGRRAGGXSRESRSSGGLATAALDPGGEDTLGRCAPLPSPVTIEPPPTVPGHPRRGALFSVGVSRVGAXGGRSWQRCRHLYPSTTAADPPSSXTTDPSPASRKSSPDLVNKSDERRAAAGGDNPXSCRARQQPPSLPPPPPATSAARGPPACRRHASAVVVIGGGED

SEQ ID NO: 198861 - protein, 87 aa, Oryza sativa
  unsure (1)..(87): unsure at all Xaa locations
  Clone ID: PAT_MRT4530_9447C.1.pep
RTSPQQPPSIGGRDAHRAGDLEHARSTNLGTSVSSRLTIQLVTRCVERRHHQVNVTRDKHHNHHRPXNXIPSLIRRCIQHLQRPVYA

SEQ ID NO: 198862 - protein, 153 aa, Oryza sativa
  Clone ID: PAT_MRT4530_94480C.1.pep
REEEVGRLVVAVATAATRRPGEAAVNVGERLTVLITDIAVRTIIGDRFERREDFLDAAAEWVKIMSGFSLGDLFPSSRLASFVSGTVRRAEANHRKNFELMDYALKQHEEKRAAAAAAGAGAVEDDEDIVDVLLRIQKEGGLEVPLTMGVIKG

SEQ ID NO: 198863 - protein, 255 aa, Oryza sativa
  Clone ID: PAT_MRT4530_94481C.1.pep
MEYAILFATSLVITVLAASGFAPAHGWNKGTATFYGGADASGTMGGACGYGNLYTAGYGTNTAALSSVLFNDGWSCGQCYLIMCDAAATPQWCRAGAAVTITATNLCPPNWALPSNSGGWCNPPRPHFDMAEPAWLQIGIYKAGIIPVLYQQVKCWRQGGIRFTMGGFNFFELVLVSNVAGSGSVRSVSVKGGSTGWITLNRNWGANWQCNSGLVGQALSFAVTSTGGQTLYIYNVVPSWWSFGMTFTSNQQFSY

SEQ ID NO: 198864 - protein, 134 aa, Oryza sativa
  unsure (1)..(134): unsure at all Xaa locations
  Clone ID: PAT_MRT4530_94482C.1.pep
MSISYFGGCLAVSKQVCNLVVASTICHLGDGKTMLFWEDKWHILVGCAESCQIWWLILSVNKQPXCFPSNPQPFLWWWCDSRKSINKADKEGFDTVVILAAWDIREREPLILFLAVPSTPTEGEPVFCFMATSL

SEQ ID NO: 198865 - protein, 75 aa, Oryza sativa
  Clone ID: PAT_MRT4530_94483C.1.pep
LPPQSRLFFLLGESFLFRGLWDLLSPDLYRIFLDGAKPRVFFVPRITLFFLPTLVYPPPLWFREGGIFLEYLKII

SEQ ID NO: 198866 - protein, 130 aa, Oryza sativa
  unsure (1)..(130): unsure at all Xaa locations
  Clone ID: PAT_MRT4530_94484C.1.pep
WNGLDIPVWLSXKQVCNLVVASTICHLGDGKTMLFWEDKWLHGANIQELAPAMWEHDNILEQERDNTFSWKWEHSGQYSPESVYATPVPWEEMLHGGQIKKTGKSINKADKEGFDTVVILAAWDIWKEEK

SEQ ID NO: 198867 - protein, 262 aa, Oryza sativa
  Clone ID: PAT_MRT4530_94485C.1.pep
MAPLLLRGLHELSPAPAAASFFSASGNTAWDSEGPFKPLHLMNPTRLSFIRSTLCRHFRRDPNSSKPLEGLKVIDVGCGGGILSEPLARMGATVTGIDAVDKNIKIARVHAASDPSTASIEYFCTTAEDLVKENKQFDAVISLEVIEHVANPSGFCESLSALTVPNGATVISTINRSMRAYATAIVAAEYILNWLPKGTHQWSKLVTPEELVLILERASISVQEMAGFVYNPLRGEWSLSDDLTVNYIAYGMKKVETPSESN

SEQ ID NO: 198868 - protein, 97 aa, Oryza sativa
  Clone ID: PAT_MRT4530_94486C.1.pep
FLFFFFFLFFFFFFFFFFSGTTSISIAFFFKTTRFFKIQGKVHQFFKNISPHFTHIYYKLVTNGNFYKLFQEKEKPPPRPEATTRVVPVGKRDAPKG

SEQ ID NO: 198869 - protein, 72 aa, Oryza sativa
  Clone ID: PAT_MRT4530_94487C.1.pep
QPGAGQAGWCRAEQPCMKQAGGTTIAGEDSGRSGVAAVGYRGDPGNTPSTMVSSKRRQHSSLKERSTSEDDG

SEQ ID NO: 198870 - protein, 117 aa, Oryza sativa
  unsure (1)..(117): unsure at all Xaa locations
  Clone ID: PAT_MRT4530_94488C.1.pep
AAPLTSVDLSLFSGQQIVIEERSPKELLNSRGGLGEQVAASGISVWNPAFDVTPANLISGXITEKGXITKTAAGDAFDIKAXVQKTILGTYFSNPGFFSTFIHRVWKFFGEFGPSKV

SEQ ID NO: 198871 - protein, 249 aa, Oryza sativa
  unsure (1)..(249): unsure at all Xaa locations
  Clone ID: PAT_MRT4530_94489C.1.pep
STKTQPPSPPSSPPPSTLPPISXPPPSTATXPPLQCPTVTPPLAHPLPPRRPPPAVASPPCSPTSTSPSLPLNPXSTPPQPPSFPLSPSXRSPSTAAASLSGQRHSLPSAHSCPGRPRSSPARPXSAPPDHHRPESPGPLSSPAKPISYALPVGFATGMASCPARLSTAVGADPLPLPRLALAWHHPLASASPCIGLLLRRQIPTPTYQGLRLAAVKVVEVVASGVPVTTATQLGHVDCLDAAQQMPGG

SEQ ID NO: 198872 - protein, 55 aa, Oryza sativa
  unsure (1)..(55): unsure at all Xaa locations
  Clone ID: PAT_MRT4530_9448C.1.pep
GHSWSHGPQIXKKLLRLVDRVLLKKKNLPPLDXKLKLFPPIPLQKGKPITLRIKN

SEQ ID NO: 198873 - protein, 118 aa, Oryza sativa
  Clone ID: PAT_MRT4530_94490C.1.pep
YDSHTRADDMIHLSDTDIGHRQGAHIHCLHDIGLCLWDKGTQWRSHMALGKGPQRFRWRGLVGNSGKIACPLCHEPGCTVSTMHYTHVCTWCMLCPTTPLLWKKCCWHPCTLGAWSTH

SEQ ID NO: 198874 - protein, 93 aa, Oryza sativa
  unsure (1)..(93): unsure at all Xaa locations
  Clone ID: PAT_MRT4530_94491C.1.pep
GWTSSRCCYGKEKSYPCPEYAAAAACGVGCGGGVGHXGGGGGSMGCGGGAGGVGXGGGSSAGHRGGGGGSMGCGGRCQPYPPLTCRTGMQFTA

SEQ ID NO: 198875 - protein, 221 aa, Oryza sativa
  Clone ID: PAT_MRT4530_94492C.1.pep
KPVFRWIHRLLDEMDIEILCLRLGRVHVITVASPEMAREVLRKNDALMTSRPASFAWRAFSFGYKNTIGSTGDQWKKMRRALASEILSPAMECHLVNYVYSHCNNGTVDVRHVTRHFCGNIARKLVFGRRHFSTPPPANSGGPGHDEEAHIDALFTALDYPSAFSVSDYFPALVGLDLDGHEEVVNGLLNTFGRLHDPIIMERMQEWRALRRNGDERREVA

SEQ ID NO: 198876 - protein, 61 aa, Oryza sativa
  Clone ID: PAT_MRT4530_94493C.1.pep
LQPQEQHLRLDLAEPIPCKQVKVLYPAPKRGPSPTMSRTPPLPKTPKGPGKNNKRGFFPPS

SEQ ID NO: 198877 - protein, 70 aa, Oryza sativa
  Clone ID: PAT_MRT4530_94494C.1.pep
VLLNMLVGALNHSSKGQGPHQGQRATACMRPPPMNSTMQRSTHALGVIMSSASPPEAAAGAAHCTAEHEP

SEQ ID NO: 198878 - protein, 94 aa, Oryza sativa
  unsure (1)..(94): unsure at all Xaa locations
  Clone ID: PAT_MRT4530_94495C.1.pep
HAYDSCYTIYILKAKIHDREGIPTDQQRLICAGKQLXDCRTLADYNIHKESTLYLVLRXRGGMQTYEKTLTGKTITLEAEYSDTIDSGKAKIHD

SEQ ID NO: 198879 - protein, 61 aa, Oryza sativa
  unsure (1)..(61): unsure at all Xaa locations
  Clone ID: PAT_MRT4530_94496C.1.pep
EKEKKKNKIKEVSHYWGVGNKQRXVWFMKPYDITXKDEYSAFYMSLSNDCEEHFAGKLFSV

SEQ ID NO: 198880 - protein, 103 aa, Oryza sativa
  unsure (1)..(103): unsure at all Xaa locations
  Clone ID: PAT_MRT4530_94497C.1.pep
VDTTQAFLKRXTNKSIRQTLAISLTQTDINILINRYNCLKXTISLNGNDGYLNRGPNXSXVELYRLPAISTQPNSNSLVRFYLLRFRFDIQLQXRVYLAKFHC

SEQ ID NO: 198881 - protein, 103 aa, Oryza sativa
  unsure (1)..(103): unsure at all Xaa locations
  Clone ID: PAT_MRT4530_94498C.1.pep
SGGRAARSGLKQXSRADMNSRRRRAWXRLLSRVPAASSASSSXXXAASSTWRRLVGERXKDGXGNGFVTXXVVVAXLPSXPAXTSPSPFSLCPXFXMGVDVIL

SEQ ID NO: 198882 - protein, 249 aa, Oryza sativa
  Clone ID: PAT_MRT4530_94499C.1.pep
MSHNPYITSLPLTPLLKPPDLTQFTQPQASKLPTTSPPPSSPAPATMTLTIPDDVRAKAEVYVGDEAGQEKTRLLLEETGLPSGLLPLRDIIECGYVEETGFVWLKQRRKVDHFFAKAGRHVSYAAEVSAVAEKGRLRKITGVKAKELLIWVTLHEIAVDDPPTGKLTCKAIGGLSRSFPVDAFEAPPPPPKNPSPAAGDTTKVDEEKKKEEEVAGDAAAAAIDEIEGKMKEMNSKEVQVQAEGVAAKN

SEQ ID NO: 198883 - protein, 463 aa, Oryza sativa
  Clone ID: PAT_MRT4530_9449C.1.pep
MGGRYHMEMPTGMRELDRVQQQIASHPYAFEVCSYFLQGYYNVLANSPELACQFYTDYSTAVRLDCQTMKSSFGETVEEINDMIISMNVHKIEVKTANFVQSWGGALQMLVTGLVQLKDYPVRKRFAQTMLLAPQDNGYYVFSDIFKLICDEYDYYEGADYSHTDNILQMDAHNTMTETENFSNGNRDYSDNVYFLLLVDSLASDCMPEELEAKEALAPADIEERGPAFMPENHEVQQQDPLEYGVVIDDDSPSEELTPSFPSSTDSKQDAPLGPIVHPSVTTPEEEPMGEPAKQTYASVLRTKGHPSHQAIHSIPLNKATASSVESQLNGHMTKQVQPVHEKANLDTRYDASGPEDEEEFLSVYIGNLSPSTSVFDLEKEAGIFFGFVEYEDMSGIHNALRASPIELNGRLIHVEERRQIYRGGGARRGRGRPADFSRGQSGGRYDGDYATRSKGNGYQRRV

SEQ ID NO: 198884 - protein, 111 aa, Oryza sativa
  Clone ID: PAT_MRT4530_944C.1.pep
LEQLGALGQRTYGSAASTSVGSPPVVASSAPKAPALPQAAAAVAPPHPSPAQPPPSEAGAASRRQRARPPGACPWISPAPASSSSPPPPRRPGAKNTRPPRQPPQPRRRRG

SEQ ID NO: 198885 - protein, 99 aa, Oryza sativa
  Clone ID: PAT_MRT4530_94500C.1.pep
RHWPQPASISGGILMGPVDRILLTERGYQRRLSRRYRKAGCVRRQRQVGARLHLPSEDIGTRIQECLTHPVCQLVDLAPMIVLRRASLSEYEEAVIVWG

SEQ ID NO: 198886 - protein, 149 aa, Oryza sativa
  unsure (1)..(149): unsure at all Xaa locations
  Clone ID: PAT_MRT4530_94501C.1.pep
FXXXXXLGPXXGFXXXXXGXGXXNXXXGXXXXGIXKXXXAXTFXEKTFXXNXXXGGXIPPPQDKXKPHLWAGVPPPPPREMNXVXGGLGHPFRREREVFLXQGIWVXXXVXNPTXPHLYPXKHXEFXGLFNLXESLISSKGAXGVXTPF

SEQ ID NO: 198887 - protein, 143 aa, Oryza sativa
  Clone ID: PAT_MRT4530_94502C.1.pep
MTANHSGVEEEQDGGKTFWSVAVHGDSSNDINGRPIPSFTNVGWPPASCSSIDPSSSSLLDLAFISCGGGIMEYTWVGVVRPSPLCARTPWPSSHFLATVAALATGTPMPPCRELGGEALQAGSHDSGEDSSIASDRRALRRQ

SEQ ID NO: 198888 - protein, 1449 aa, Oryza sativa
  Clone ID: PAT_MRT4530_94503C.1.pep
MKLPDDLAAVFTTRMSSPRRSRWDPASAPIQSSFREVGVILQPLGTVSTEELDGYLSSPGVDSRPTEILDYDDFGYNYDFSNLDDFDEAYEDNYTPLFFGVFMADNETVEQRQAHCYDDDEDGVAAFTSDLRRVDWPAGFKPTGIVKYDGKTNPESWLTVYGLAIRAAGGDSKAMANYLSVALADSARSWLLRLPCGTIGSWAELREHFIANFQGTFESPGTQCDIYNVIQMPGESLRDYIQRFSEQRNKISDITDDVIIADFTKGVRHELLVGKFGRKPPGHSSRCLKKPMNCFIYQQFAEQYAKKARKPTDGEQSTSKKKDDEDDGPTGFQDSRKEFNHTFGGPQAYESKRKQKLIEREINAVQPDTPQYLRWSETAIKFDRSDHPDRVVHPGRYPLVLDPVVRNVKLRRSLIDGGSALNILFAKTLDDIQIPRTELKPSSAPFHGVIPGLSSTPLGQITLLVTFGTRENFRTENICFEVADFKTTYHAILGRPALAKFIAVPHYTYMMMKMPRPRGVISLRSNIKQAVTCDKESCEMAQTHEITLVRDEIQLTASTATEGEVPAPKISKTGESDAKTKKFPLDPSDPSKTAIGRNVEAYVDDVVVKTKQKDDLIADLEETFASIRFFGIKLNLEKCTFGVLSGKLLGFMVSRRGLQANPEKINAILNMKPPSSQKDFQKPTGCMAALSRFVSRLGERGMPFFKLLKKTDNFQWGPEAQQAFEDFKKLLTTPPVLASPHPQETLLLYVSATSQVVSTVMVVEREEDGHVQKVQRPIYFISEVLADSTTRYPHVQKLLYGVLITVRKLSHYFQSHSVTVVISFPLGDILHNCEANGRIAKWALELMSLDLSFKPCTSIKSQALAYFVAKWTECQEDTPAEKLEYWTMHFDRSKRPLGTGVGVVLISPTGERLSYVLWIHFSASHNVAKYEALLHGLRIALSLGIWRLIVRGDSQFVVNQVMKEWSCLDDNMAAYRQEVRKLEDKFDGLELTHVLRHDNEAADRLANFGSKREAAPSDVFVEHLYEPTVPRKDVIEMTSTQEVSMIDADWREPFIKFLTKQKLPQDKYEAERISRHNRLYFMIEDDLYKRSPSGILQCCVSLEEGRQLLQDIHSGICGNHAAARTIVGKAYRQGFFWPTVVSDAEKVVRTCEGCQFFARQIHLPAQELQTIPPSWPFAVLGLDMVGPFKKVTGGFTHLFVAVDKFSKWIEAKPVVTITADKARDFFISIVHRFGVPNRIITDNGTQFTGDVFKDFCEDFGIKICYASVAHPMSNGQVERANGMVLQGIKARVFDRLCPYDGKWVDQLPSVLWSLRTTPSRATGQSPFFLVYGAEAMLPSELEFESLRFRNFKEERYGEDRVDDLNRLEEAREAALIQSAWYLQGLRRYHNRNVQSRAFLVGDMVLRKIQSTRDRHKLSPLWEGLFKISEVTRPGSYRLKREDGSDVDNS

SEQ ID NO: 198889 - protein, 260 aa, Oryza sativa
  Clone ID: PAT_MRT4530_94504C.1.pep
LRTKGTSEWEICPHVVVNIPPLEAEASRWFRLVWAEFAVVICGLCQDILVSVSLDVSSLPLNNIIRALIVFVIVWFLRLGLKCCQEWGSRTGMPRLPMDGSMAPSGYHPVRLWPAVLCLGWVSSETVKFGKFSQELERLLGFALGSVSMGGFVLHQRRAIYRSLADADAAAAPSPFSSYQPSETRSRTSSTELAHVWNKGVDETLGRLVAYLSSRGCEYSCWQFVLTGYDNTTADVQGILVSDRGIAIQSCGKPPSVGYE

SEQ ID NO: 198890 - protein, 2013 aa, Oryza sativa
  unsure (1)..(2013): unsure at all Xaa locations
  Clone ID: PAT_MRT4530_94505C.1.pep
MGFVSGIDDFVFPPGQAFRFGSLDFITNNFGKISLLDSNLNQSGRDKVSAPFGLPNSAEIYSKIISSELASNHSDEISSTPTRPHQDDGAYPSILMKLLDDLAAVFTTRMSSPRRSRRDPASALIQSSLREVGVILQPLGTVSTEEFDGYLSSPSVDSRPTEILDYDDFGYNYDFSNLDDFDEAYEDNYTPLFFSVFMTDNETAEQRQAREAKEQRTRQEAERRRLEEERQAQERDRLQREQQEREWAAKEAEDRRQRALEAGRXARELIGQQDVEGTTVFRTLHQNAVAAITILDTLLQEDAPKHVVNILNQTKTMIASSVPLNFASIRTPTGSQVPPLQSQDYHQPSLIVTASGSNRRSKDHVERSVHSPADRHRERRAEQPRSPRRRHPVDLRETINRHCAERGYIPHRSPDRYDDNVDGVAVFTSDLHRVDWPADFKPIGIEKYDGKTNPESWLTVYGLAIRAAGGDSNAMANDLPVALANSARSWLHGLPRGTIGSWAELRDHFITNFQGTFERPGTHELYNVIKKPGESLRDYIRRFSEQRNKISDITDDVIIATFTKGVRHELLVGKFGRKPPRTIKKMFEKANEYAKADDAVTASKQSGSNWKPKKDAPATGGSGSTNHKDRTRKPEDLVATTSPSSRXRSRINTFDKIMNSQCSHHPNSNHAAKDCFIYQQFAEQYAKKARKPTDGEQSTSKKKDDDYDGSTGFQDSRKELNHIFGGPEAYESKRKQKLTEREINAVQPDTPQYLRWLETAIKFDRSDHPDRVVQPGWYPLVLDSVVRNVKLRRSLIDGGSALNILFAKTLDDXQIPRTELKPSSAPFHGVIPGLSSTPLGQITLPVTFGTWESFCTENICFEVADFETAYHAILGRPALAKFMAVPHYTYMMMKMPGPRGVISLQSDIKQAVICDKESCEMAQTREITLARDEIRLAASTATEGEVPAPKVSKTGESDAKTKKIPLDPSDPTKTAESALITFLQANKDIFAWKPSNIPGIPREVIEHSLNVKEDTKPIKQRLRRFAQDRKDAIKEELTKLLAAGFIKEVLHPDWLANPVLVWKKTGQWRVCVDYTDLNKSCPKDPFGLPRIDQVVDSTAGCELLSFLDCYSGFHQISLKESDCLKTXFITPFGDYCYITMPFGLKNAGATYQHMVQRCFSTQIGRNVEAHVDDVVVKTKQKDDLIADLEETFASIRAFRMNLNPEKCTFGVPSGKLLGFMVSRRGIQASPEKINDILNMKPPSSQKDVQKSTVCMAALSRFVPRLGERGMPFFKLLKKTDNFQXGPKAPQAFEDFKKLLTTPPVLASPHPREPLLLYVSATSQVVSTVLVVEREEDGHIQKVQRPIYLISEVLTDSKTXYPQVQKLLYRHSVTVVTSFPLGDILHNREANGRIAKWALELMSLDLSFKPRTSIKSQALADFIAEWTECQEDTPAEKLENWTMHFDGSKKPSGTGAGVVLISPTGERLRYVLWIHFSASHNVAEYEALLHGQRIAVSLRIRRLIVHDDSQLVVNQVMKEWSCLDDNMAAYQQEVRKLEDKFDGLELTHVLRHNNEAADRLANFGSKREEAPSDVFVEHLYEPTVPRKYVTETASTQEVSMIDADWXEPLIKFLTKQELPQDKDEAERISQRSRLYVMIEDDLYKRSPSGFSXRCVSLEEGRKLLQDIHSGICGNHAAARTIVGKAYRQXGFWPTAVSDAKXLRTCEGCQFFARQFHLPAQELQTIPLSXPFAVWGLDMVGPFKKATSGFTHFFVAVDKFSKWIEAKLVITITADKARDFFISIIHRFGVPNRIIMDNGTQFTSGVFKDFCEDFGIKICYASVAHLMSNGQVERANGMVLQGIQARVFNRLRPYAGKWVDQLPLVLWSLRTTPSRATGQSPFLLVYGAEAMLPSEVEFESLRFRNFKEECYGEDRMDDLNRLEEAHEATLIQSVRYLQGLRRYHNRNVRSXAFLVGDMVLRKIQSTXDLHKLSPLWEGLFIFSEVTQPGSYRLKHEDGSDVDNSWNTEHLRRFYA

SEQ ID NO: 198891 - protein, 796 aa, Oryza sativa
  unsure (1)..(796): unsure at all Xaa locations
  Clone ID: PAT_MRT4530_94506C.1.pep
MAAIACRERSTVAAACKAGFKPTGIKKYDGKTNPESWLTVYGLAIRAAGGDNKAMSNYLAVALADSARSWLHGLSRGTIGSWAELREHFIANFQGTFERPGTQFDLYNKDDEDDGLTGFQDSCKELNHIFGGTQAYESKRKQKLTEREINAVQPDTPKYLQCSETTIKFDRSNHPDRVVHLGWYPLVLDPVVRNVKLRRYIIDGGSALNILFAKTLDDMQIPRTELKPSSAPFHGVIPGLSSTPLGQITLPVTFGTRENFRTENICFKVADFEMAYHAILGRPALAKFMAVPHYTYMMIKMPEPRGVISLRSGIKQAVTCDKESFRKKIGQWRMCVDYTDLNKCCPKDPFGLPRIDQIGRNVEAYVDDIVVKMFFQLRLIADLEETFASIHAFRMKLNPEKYTFEVPSGKLLGFMLLKKTDNFLWGPEAQRAFEDFKKLLTTPSVLASPHPQEPLLLYVSATSQVVSMVLVMEQEEDGHIQKVQRPIYFVSEVLADSKTRYPRLVVNQVMKEWSCLDDNMAAYRQEVRKLEDKFDSLELTHALRQDNEAADRLANFGSKREAAPSDVFVEHLYEPTVPRKDVIETAGTQEVSMIDADWREPIIKFLTKQQLPQDKDEAKRISRRSRLYVMNKDDFYKRSPLGILQRCVSLEEGRQLLQDIHFGICGNHAAAQTIVGKTYRQGFFWPTAIHLPAQELQTIPLSWPFVVWGLDMVGPFKKATGGFTHLFVAVDKFSKWIEAKPVVTITADKARDFFISIVHRFGVPNRIITDNGTQFTGGVFKDFXEDFGALRRRPSG

SEQ ID NO: 198892 - protein, 1489 aa, Oryza sativa
  Clone ID: PAT_MRT4530_94507C.1.pep
MVSTVELDGYLSSPGVDSRPTEILDYDDFGYNYDFSNLDDFDEAYEDNYPPLLFGVFMADNETAKQRQAREAEEQHSWHEARNFVVEIVPALPSRENKAMVNFTVGCVNGSWEKLRDRFCLAFFLVTRITALRVEILSFKQIKNESIGAAWSRFTILVQSGPTLSLPEYVLLQHFHTGLDKESTFYLDITAGGSFMHKTPSEGRTILDRILENTSCMMQSDEPQLEASVSKIEEPLTIEPLFEPSTSASSIDEKVPEQPSVENEEIQTPERAAILFRDGLDEDYGNNVGILYSPTVGANLVSESFAFAYLSDKAVTPTNKFFKHPNGNINEGFGIVQDVPVCFEDRDAILDFHVFEIQHFDILIELPIKKLLINTPRLDSLKITLGGNEFSVPFSRARIALTDSLPEIEPADEVTTVPPHESPEALLEDEVPDFIKEEVDPGETLNLPIMEPPPRPPLELKPLPPGLRYAFLHNDREAPVIFSDKLSEDETQRLLTVLEKHRSVLGYSLQDLRGINPALCTHRIPIDPESIPSREHQRRLNNAMREVVKKEVSSNSYPSGGPKMSFGLCNAPVSFQRCMMSIFSDMIEDIREVFMDDFSVYGKTFDQLPHPVNIKGIRSFLGHAGFYRRFIKDFSTIARPPTNLLAKDAPFEFDDACLKSFEILKKALVPAPIIQPPDWTLPFEIMCDASDFAVDAVLGQTKDTKHHAICYASKTLTGAQLNCATTEKELLAVVFAIDKFRSYLVGAKLIIYTDHAALKYLLTKKNAKPRLLRWILLLQEFDLEIKDKKGVRNSNRWYANIVNYMVSKYIPPGENQQKLKYESRRHILDEPYLYRAYPDGLLRRCVPTEGLKIIERCHASPYSGHYGAFCTQAKIRAAGGDRKAMANYLPVALADSARSWLHGASRTLHCQLSRHLPASWQAGTQFNLYNVIQNPDESLRDYIRCFSEQRNKISDITDDVIISAFNKGVRHELLVGKFGRKPPMTVKQMFEKANEYAKADNAVTASKQSDSGKELNHIFGGPQAYKSKKKQKLTEREIKAVQPDTPQYLRWSETAIKFDRSDHPDRVVHPGRYPLVLDLVVHNVKLRRSLIDGGSALNILFAKTLDDMKIPRTELKPSSAPFHGVIPGLSSTPLGQITLPMPGPRGVISLRSDIKQAVTYDKESCEMAQTCEITLPRDEIRLATLTATTGEVPAPKESALISFLQANKDIFAWKPSDMPGIPREVIENSLNIKEDAKPIKQRLRHFTQDRKDAIKEELTKLLVAGFIKEVLHPDWLANPVLVRKKTGQWRMCVDYTDLNKSCLKDPFGLPRIDQLKGIRLLEDLIYHTFWGLLLYHHSLWIKECWSNLSTHDPEMFSTQIGRNVEAYVDDVVVKTKQKDNLIADLEETFASIRAFRMKLNPQKCTFGVPSGKLLGFMVSRRGIQANPEKINAILNMKLPSSQKDVQKLTRCMAALSWFVSRLGEWGMPFFKLLKKTDNFQWGPEAQQAF

SEQ ID NO: 198893 - protein, 43 aa, Oryza sativa
  unsure (1)..(43): unsure at all Xaa locations
  Clone ID: PAT_MRT4530_94508C.1.pep
MKLWCKQGTAAVVLAGLIAAQKFXVSGTLADHTFLFFGAGEVS

SEQ ID NO: 198894 - protein, 376 aa, Oryza sativa
  unsure (1)..(376): unsure at all Xaa locations
  Clone ID: PAT_MRT4530_94509C.1.pep
SCLDDNMAAYRQEVRKLEDKFDGLELTHVLRHDNEAADRLANFGSKRETAPXDIFVEHLYEPTVPRKDVIKIAGTQEQELPQDKDGAERISRHSRLYVMIEDDLYKWSPSGILQRCVSLEDGRQLLQDIHSGICGNHATAXTIVGQAYRQGFFWPTAVSDAEKVVRTCEGCQFFARQIYLPAQELQNIPLSWPFAVWGLDMVGPFKKATGSFTHLFVAMDKFSKWIEAKPVVTITADKARDFFISIIHRFGVPNRFITDNGTQFTGGVFKDFCEDFGIKICYASVSHPMSNGQVERANGMVLQGIKAQVFDQLRPYTGKXVDQLPSVLWSLRTTPSRATGQSPFFLVYGAEALLPSEVEFESLRFRNFKEERYGED

SEQ ID NO: 198895 - protein, 70 aa, Oryza sativa
  unsure (1)..(70): unsure at all Xaa locations
  Clone ID: PAT_MRT4530_9450C.1.pep
KFVVYIEKIQRENANGTNVYVGIHPXKCLIVKLKLDKDRKAILDRRAKGRMAALGKDKGKYTEETAAQAV

SEQ ID NO: 198896 - protein, 143 aa, Oryza sativa
  Clone ID: PAT_MRT4530_94510C.1.pep
MVAGRRVAARRPRQPGGEEDLSLDVDLSGARILDELLEMPWLSAPGDQHALIKQLLCSASPTLVDVEGEVLAELLKGSGGDGGHKDTCAVSSCRRHKDIPTSTSTGLQVGRVHRRGTWQPRLRLRAQRRGARPRGAASLAAAT

SEQ ID NO: 198897 - protein, 143 aa, Oryza sativa
  Clone ID: PAT_MRT4530_94511C.1.pep
MTGGAGEGWAHVSVSLGAVVWRASVLERRRAAIWIRTVRGFRVLGVDDRWGPLEVGFGLACIGGYEYRVLETDCYGGGGGPTGQREFVFLRPTETGPTMGWPILLQHQAFKTQPFLQVGPSCQDLKAFITLGHVESMFTGGIW

SEQ ID NO: 198898 - protein, 94 aa, Oryza sativa
  unsure (1)..(94): unsure at all Xaa locations
  Clone ID: PAT_MRT4530_94512C.1.pep
MPPPPPTPXPSPPVRVVSTRTVKPSRPRPRERIPLTTWDVSLLAADYIQKGXLXRXTAATLHLXEHFAXALRDALHVYYPVAGPFRPDKHPRRR

SEQ ID NO: 198899 - protein, 59 aa, Oryza sativa
  Clone ID: PAT_MRT4530_94513C.1.pep
SFCQGFLALLGRVRDSVFFSLPFLFFFQAGLFRFYIAASSVFKSDDEPNIIDFGCMLHN

SEQ ID NO: 198900 - protein, 74 aa, Oryza sativa
  Clone ID: PAT_MRT4530_94514C.1.pep
MDTREIQRAICREVYRAAGGELLGLSGHFSAPLAAVACGMSALLNNSQSAEGSDVKPSTGQEKNHHLDHGVQAR

SEQ ID NO: 198901 - protein, 106 aa, Oryza sativa
  unsure (1)..(106): unsure at all Xaa locations
  Clone ID: PAT_MRT4530_94516C.1.pep
MASMSTILHMSLGLLLFCPRVHGTNSDLVXTPLQRPRGLYASXQDTPTTCRLDHLIAXLSATHPERSEAELPEYYNFEARNELPCVGXSGRRLLMVSKGLSLPPGC

SEQ ID NO: 198902 - protein, 148 aa, Oryza sativa
  Clone ID: PAT_MRT4530_94517C.1.pep
MAARLSFLLLLGLVLPASGDDAAAPARLPRAALVELLSVHVVLDYIDAAKIAALPRGRPTVSTTLFQTTGNVCRRTRFLAITPTAKGGAVFTSAALSALVNATLKRVVAAVPYNIFVLHISNFVVPPSVLTRPRPALPPSPPLPRDKG

SEQ ID NO: 198903 - protein, 441 aa, Oryza sativa
  unsure (1)..(441): unsure at all Xaa locations
  Clone ID: PAT_MRT4530_94518C.1.pep
SARVGGVRPPTPAACNAFMSAYSRAGGHGRVLRLFRSMPFAPTAPLFTTXISSLAASGRPLAARAAFASLLKSGVPPTASAFTALLRSSSDALDFVDSVFRAMEALGCSPDAAVYNWVISMLCDFQLVQEALGFLDHMLENGPRPTARSFTAILRAYCEQGRFFDAGRLVDTMIQNGCPPDVVSYTVLIEGLCRVGEFSTVEMILGESESQGWMPTAVTYNIYMSGLCRMGFLDEAFRQVDIMRGRGLSVTAETVHILFDCLCRNAMFSEAVCLLEHSEELGWDVDVFCYNTLMSRLCDVDDFARVLKLLVDLLKKGIGPDKFSFTIAIRSLCRAGKLRLAKCLIENKGIKYDVVAFNTLIHGFCIAGDLDRVQQTRTDMINRDVIPNNFTDAMLIDSLCKERKFGEAKRFVLDSLVFRGGIAEFEQMTLRFEESIRSYQV

SEQ ID NO: 198904 - protein, 409 aa, Oryza sativa
  Clone ID: PAT_MRT4530_94519C.1.pep
MADHAVHVLSPPCVCATLVGAASFSSLRAAAAAAAASGDGHRGRERQKEEAAAAACSPWEDAVIAAGMMGVQLAGAAYMVVLAPAMERGLDPLFLVTFGSLANAAFTLPFSVALERRLLWPPAEQLLTGRLLLRFVLLALGGVTGFQALMLQGMKRTSPAIAAAMPNLTPGFIFVVAASLGLERVRLRCCYTWAKIVGTALCLGGAITMSVIQSATAPPYSPSPSSGWAAGCFCLLGAVVVVSCTTVLQAATMVGFPAPITLCTVTSFLGAALTAALQLVARGSLAGTGAGAGVVGLRAVLALVLVGGVVSSACVAFQAWALKKKGPVVVSMFSPTQTVGSAVFSAIFLGRVVKPGSVVGMILLFSGLYVVLWAKKKETTIINSDDSSMAVATKDGDDPEKQPLLSRRH

SEQ ID NO: 198905 - protein, 348 aa, Oryza sativa
  unsure (1)..(348): unsure at all Xaa locations
  Clone ID: PAT_MRT4530_9451C.1.pep
QGILQLLWIWEVKPNQSTCPDKIGTIIVNNLVYRDHPSLKIRGVLKDVRSYNVQXVRSKEQLSTRVGCGQTHTIXENFIDKCGVVAPNLPTKTDDLSHSTGHSWAIREKVVXRIIPRERCRLDHTTRSIVPXTSLGREMRLLLVLGPVGCSYLSHLHFKWSXLRLHXFSTSGVAILPLFPLQLVELRLHLVLDQXCNDSPTISTLSGRVTTTTWFSTSGAAILLLHPLQXWSSYDYXLILDQWCSDSPTTSTPAKLISGTQYRQVFYPEIPYHXQHLELKPILLSLYAALARPPRNLRELRLGTPRVDKALSGNAETNDHVRSGHVRVLTMRINRKGTRNNRSTYKPT

SEQ ID NO: 198906 - protein, 656 aa, Oryza sativa
  Clone ID: PAT_MRT4530_94520C.1.pep
MCPGQLDSNKQRKKWTRLDTNQRGLGLQQEIKHASLFCGVSHGLWRAALPQRIFFRVTDCNAVICDICEDPGHLAPKSIPSSSSNRSSVLHLPYRRGKISSSRYANRPSKRGGCAKLGERRSKNGVFLSSRHFATAASPAPIQTFPRRDLTSSATSPPSPSSPAGEEGGGFFMIPTPAKVSGRPREFSKTATVRVENGHISIDNLTTELRRLVPVRFEVKETAQDTFVVQFPSTIELDRLHRVGRVRSFDFGVDLLFNKWEQEIEAKFVLKKTWFRVYGVPYEIRDFLSLHAVGSVIGNTTMVDMVYLRKHGVVRMQVAVDDLATLPPSVYIVFRNHGYEIFFEPEMPEEESKGKEKLDEDDQRDDSEQKRNDDDVIMEDRNPKRLKNEAASSSMSLRGGSVTDSQLNSHCVSAIAGLLTVVDDSAVEQQAEEVLPTICVASSLETVMNKAPEESSMQIPTTGQNVTLANEEVAALSLAVPDSVAAISEEEFTTTLTDAGEMAPAGCASLSEASTGASTLEGAVTVSLAAPVVMDDAAQEIESDKVGLVAADAPTLSVDATQVLPSSSTGTMDAAPMVNQEVTEVTTSQDSMILDVGTAGVNTVIELAADGAQLDAARTIIAEAKVQAEAGGKRPSQEAKRRSRRLIHPTPTRQSE

SEQ ID NO: 198907 - protein, 115 aa, Oryza sativa
  Clone ID: PAT_MRT4530_94521C.1.pep
RATPVTTHVTHDDATSHCHTTGYLCLESRARHATMMMNHWAMPRCPHTHCGHTTGPLSTSTLSFLWLLLIQPLGYHCTSSNKVLPLLSCAQPPRNKNPLNKYPSISDFPKKKKKK

SEQ ID NO: 198908 - protein, 62 aa, Oryza sativa
  Clone ID: PAT_MRT4530_94522C.1.pep
SFFSIISGDFFYWENATVPPQLTSIAHTTNKNPFIPYTARALPPNFLPTQSANLPEKLTNQA

SEQ ID NO: 198909 - protein, 244 aa, Oryza sativa [sequence omitted]

SEQ ID NO: 198910 - protein, 63 aa, Oryza sativa
  Clone ID: PAT_MRT4530_94524C.1.pep
MAAGPAPNQVAMPIPAATNPCPVLEISTPAAPSQIAAPSLAIILVPAATSATRPAAASSPTKH

SEQ ID NO: 198911 - protein, 105 aa, Oryza sativa
  unsure (1)..(105): unsure at all Xaa locations
  Clone ID: PAT_MRT4530_94525C.1.pep
FFFFFQXLKEWAQDSSGQCFPSISHPFCTVSKITFTTANATKRLSQKWLTHKVLKPWNLHPLSLFLIKKTIALKTTHFFKKEKRMRTNITSWLAINSFKESFHFI

SEQ ID NO: 198912 - protein, 39 aa, Oryza sativa
  Clone ID: PAT_MRT4530_94526C.1.pep
TPGARYASRQVRVTQSGIYVSDAQSYNIVYSMEYVSEYL

SEQ ID NO: 198913 - protein, 102 aa, Oryza sativa
  Clone ID: PAT_MRT4530_94527C.1.pep
FFFFFAVTIVCFSSSVSFPILFSFGCCHWVQDRQFVNIWFTDRLNSFSQIISGGVQLISFTICTALGRWRRIEHAIAHFTFLPRFSSECQGRAQNSLQGNRR

SEQ ID NO: 198914 - protein, 96 aa, Oryza sativa
  unsure (1)..(96): unsure at all Xaa locations
  Clone ID: PAT_MRT4530_94528C.1.pep
RGLLTSSKGRGGAGKRAPPVSGTRASVHRGPGPPRRPTAGPREPTAGSAQSRSNXTRRRGWGTVSHPNLLLALGRKSAQNRSLSPRPKSAQSAARA

SEQ ID NO: 198915 - protein, 59 aa, Oryza sativa
  Clone ID: PAT_MRT4530_94529C.1.pep
CPVLPRALAASDVCGFSVCLGAIAIAGRARSTGPCLYETHGVAFRCWACNVAVSWEQKS

SEQ ID NO: 198916 - protein, 115 aa, Oryza sativa
  Clone ID: PAT_MRT4530_9452C.1.pep
SRRRRPLHRSLPPQPRRRRPLHQSFPHYLVDDGRRNETFCCNPVNDDHCTRSFPRDPVDDGRRTGAGTPSTTTAALKPFPLQHCRRLPPHRSRVPHRQGPCTVAVPSRWEDVDVQ

SEQ ID NO: 198917 - protein, 413 aa, Oryza sativa
  Clone ID: PAT_MRT4530_94530C.1.pep
MALVGCSNGEAAAPAATWTPPYCTVVAADMSDFCYLSCPRCERALPDHADACAACTGRGGGGGPVPARVYRLRASVATHDRVVPVVLFDRAARVLVGCPADELARFFAAHAGAARAAEEALEGEVCRVAMRAFAKGAAERFRAVSVVPLRDGFRPLIDTLRELYCTADPTPATSPPPRLETTVCFYLYVMVKRKKVVTDLSRRKIRTESIDLAQLVEATMDFSKWTITLDFDVTEERLRNEFSSNSEVPAIALIADFTCFHLHKFKASRISVGCRINLPILNSQLNTSCVRGCLELRAAQRCKRHEADQSHSDAPRTLCTVQHPLINRSIQHRRLCGALNLMIDPPVLLVTMKTMCQRETMQNCISMLDQFSSAFKNVHVLTISCMCIVWFLLYYWQRSYPVEVYHDTSSAIN

SEQ ID NO: 198918 - protein, 62 aa, Oryza sativa
  Clone ID: PAT_MRT4530_94531C.1.pep
WISMYTRSQSMVPQSIMPAVILNTQVYNQAQQSFEKFQDKECACYFYTCRISSGIGLNYYIS

SEQ ID NO: 198919 - protein, 924 aa, Oryza sativa
  Clone ID: PAT_MRT4530_94532C.1.pep
MPSASAAAAALVLLFLAFSLSNAQPGFISLDCGGDDDYTDGIGIQWTSDAKFVSAGQEANLLLQNQQLQQYTTVRSFPADNRKYCYTMNVRNRTRYLVRATFLYGNFDNSNVYPKFDLSLGPTPWTTVVIDDATTPVVQEAIILAAAPTLSVCLSNASTGQPFISTLELRQFNGSLYYTTDEKQFFLRLSARINFGAESNASVRYPDDPFDRIWESDLVRRANYLVDVAPGTERISTTKPIFVSTNEEPPQRVMQTAVVGKNGSLTYRIDLEDFPGNAWGVSYFAEIEDLAPNQTRKFKLVIPGKPGFSKPTVDVEENAQGKYRLYEPGYTNIPLPFVFSFGFKKTNDSSEGPILNAMEIYKYIEISVGSQDANIMASLVSRYPEAGWAQEGGDPCLPASWSWVQCSSEAAPRIFSISLSGKNITGSIPVELTKLSGLVELKLDGNSFTGQIPDFTGCHDLQYIHLEDNQLTGALPPSLGELPNLKELYIQNNKLSGEVPQALFKKSIIFNFSGNSDLRMGHSNTGRTIVIIVCAVVGAILILVAAIVCYLFTCKRKKKSSDETVVIAAPAKKLGSFFSEVATESAHRFALSEIEDATDKFDRRIGSGGFGIVYYGKLTDGREIAVKLLTNDSYQGIREFLNEVTLLSRIHHRNLVSFLGYSQQDGKNILVYEFMHNGTLKEHLRGGPDDVKINSWVKRLEIAEDAAKGIEYLHTGCSPTIIHRDLKSSNILLDKNMRAKVADFGLSKPVVDGSHVSSIVRGTVGYLDPEYYISQQLTEKSDMYSFGVILLELISGHEPISNDNFGLHCRNIVEWARSHMESGDIHGIIDQSLDAGYDLQSVWKIAEVATMCVKPKGVLRPSISEVLKEIQDAIAIELQRELPSSIHHLMSKTSPSEAVNTTGSLQDLEQNASFDELLMRPGLR

SEQ ID NO: 198920 - protein, 67 aa, Oryza sativa
  Clone ID: PAT_MRT4530_94533C.1.pep
LLKKKKKKKKKKKKKKKKKKKKKKKKKKKKKKKKKKKKKKKGGPLLGDPILLPRACNVKFFFWGPQI

SEQ ID NO: 198921 - protein, 672 aa, Oryza sativa
  Clone ID: PAT_MRT4530_94534C.1.pep
MAIPGAYAHAVQALATGILFVVVSLVLDHVEGRHHKCPSFSCGHLKGVSAPFRRAADPPGCGSKSYELVCSDTNATILIDNATYHVNEINYDYRRFWVVDANIAGSTCPLPQWNHLLDQYKRKVSGHRIEIELAPGAYNHAYFVRCSREVKDNGIYRPVTCASSNYSFIYVLLSSDSDNPGYIESLEPSCGYLAMTLLGDWSTTVPRNASYEDVKKFMREGFAIRFPRIYGAGSINECLMDSISELRNGIEPRSSTGTAISDRLIVISIIDLHFWFCLIGYPSGILIAFGMWIVKCIAVLCRFVLVPLAILTFLAHKYWKTRLAIDAVEKFLQMQQVLGPTRYAYTDLTAVTSHFRDKLGQGGYGSVYKGVLLSGDVHVAVKMLNGASTYDGEEFISEVSTIGRIHHVNVVRLVGFCSEELRRALVYEYMPQGSLDKYIFSSERSFSWDKLNEIAIGIARGINYLHQGCDMQILHFDIKPHNILLDDNFVPKVADFGLAKLYPRNKSFVSDRALRGTVGYIAPEMVSRSFGVISSKCDVYSFGMLLLEMAGGRRNADPNTNPNASQSYYPSWVYGQLTGEQVGETSGAADMHELQKKLCLVGLWCIQMKSHDRPTMSETIEMLEGDVNALQVPPRPFFCDGDFMPNVMDSYLHSSELTAISEDDGAIEFASN

SEQ ID NO: 198922 - protein, 160 aa, Oryza sativa
  unsure (1)..(160): unsure at all Xaa locations
  Clone ID: PAT_MRT4530_94535C.1.pep
GGDGRGDVPARVRRQLAAAAARRRRTPASSRARTGRSWTRCSPWPSRSPPPRRARAAALPPSSPPPPPTPAPRPPPSPRRAASPPRRPGTRARRRPPRPPPARTALPASPESGSHPSPRAVAGKRATTGSTSRTPAQRRXCHCRRRHRQSPRRRRLGRPG

SEQ ID NO: 198923 - protein, 139 aa, Oryza sativa
  Clone ID: PAT_MRT4530_94536C.1.pep
GGDGRGDVPARVRRQLAAAAARRRRTPASSRARTGRSWTRCSPWPSRSPPPRRARAAALPPSSPPPPPTPAPRPPPSPRRAASPPRRPGTRARRRPPRPPPARTALPASPESGSHPSPRAVAGKRATTGSTSRTPAQRR

SEQ ID NO: 198924 - protein, 101 aa, Oryza sativa
  unsure (1)..(101): unsure at all Xaa locations
  Clone ID: PAT_MRT4530_94537C.1.pep
LSDGRTITALIAEALTLPLLPSKNAGNRPFEHGANFATAGGTALDRTYFGANNFTVMPQFNIXIEHQIGWLDGMKPWVCGVKTGGQPGSTCGEHREATMSR

SEQ ID NO: 198925 - protein, 69 aa, Oryza sativa
  Clone ID: PAT_MRT4530_94538C.1.pep
CHAVGGLALCPLLFHCVLLLGPRTPVYATLCCDLCDLCVVLCALALPLRLPSSIPTVTVLTLLLRHFVV

SEQ ID NO: 198926 - protein, 91 aa, Oryza sativa
  Clone ID: PAT_MRT4530_94539C.1.pep
LLTAPFTKRDAPSQQFGNLIFRKLYSWVRLDPNFRSHCIKPSTIPEVAKDNTITQLLVGHALHSCCAMSNKISSLVLQFQFMPQKIDIKLY

SEQ ID NO: 198927 - protein, 115 aa, Oryza sativa
  Clone ID: PAT_MRT4530_9453C.1.pep
VGGAHGIFPPLPKKKSTGALGIFFDWGKNLFTPLGSLKQGKGSPSPPRDFKLFFLPVGHAGIFPTSRPGRVQVPGKGKLPPPKFGPKGGKKVPKTLGGQNPNVFFLGGISFNQSR

SEQ ID NO: 198928 - protein, 95 aa, Oryza sativa
  Clone ID: PAT_MRT4530_94540C.1.pep
LRRRPVAAAMGSGASGRGGDGLRSVRSGRRRWVREKWQRQARRRAARRTVTAFWRVWAGMAAGEWARTATGTRVGGPDDGDNDDHEEGGGGGFSG

SEQ ID NO: 198929 - protein, 67 aa, Oryza sativa
  Clone ID: PAT_MRT4530_94541C.1.pep
THPAAILELKDAVGAFQSMDMGELARFEGFPSKKLEALRMAAALYSKLDGVVATPSILNMQKKILTF

SEQ ID NO: 198930 - protein, 114 aa, Oryza sativa
  unsure (1)..(114): unsure at all Xaa locations
  Clone ID: PAT_MRT4530_94542C.1.pep
TGGRLEXXPGXRIXRAQPVLNGKLVVDIPLSSASSYLARLADERNSRVFSKYGAGIIFHGSPISSGRSHGSLFSIQFYKKNETATSPRSSSSAPNNTGITTRLEIHGEARGVTE

SEQ ID NO: 198931 - protein, 117 aa, Oryza sativa
  Clone ID: PAT_MRT4530_94543C.1.pep
KESWGAIWRINPPKPVKGPFSVRVPPEGGGKIFPGGPLPYGWKAARVFKSPVPAKWAFLARKKPGWVRSGGAAFFYIFIFLFLYFFYPIYGLRQACMHAHIFPEKFFFNEIIFKFLS

SEQ ID NO: 198932 - protein, 429 aa, Oryza sativa
  Clone ID: PAT_MRT4530_94544C.1.pep
MPTVWAALKKSLNCKSGDSCGVIEREESQGGVTAGKKSSSTSAAALRRSGCSRSIANLRDVFHSQYGGSRRQEDAVAAAAAGEGDGGCGSPRSIGSNDVLNPVTHDVLLAARSDAKCELRISTPGRGAWAGAGGGVPFPHSPLLLRCSTTPVSTRKSPSAMSPLRRADDDDDNAEAPSPAPARASCEVGIRCHRCGDRFANHDALESHHHSRHAVTELVEGDSSRKVVEIICKAGWAKTENALGRIERVVKVHNAERSVARFEEFREAVKGKAARLSKKHPRCLADGNELLRFHATTLACSLGAGDSSTLCTSGSCSVCRIIRHGFSATREIKDGVGVFTTSTSKRALECIAGDGDGDEAANAGVRKALLVCRVVAGRIHRPLENLQEVAAQPGFDSVAGKVGAYASIEELYLLNPRALLPCFVVICKP

SEQ ID NO: 198933 - protein, 190 aa, Oryza sativa
  Clone ID: PAT_MRT4530_94545C.1.pep
MVTAPTQAAAAIGSARDAMHASMRQVAQPDSPRGDGNSGANPQLRVDDGVAALQSYRGEGGLQSEEGWVGKLESKGVKKEKLPRCWNVSAFLAVVKRRDARSQRGRPEPGRLSHGGAAAVAHRRGSLPTATTHSGILAHGAAMHGGTDLLGSSAVAQWRLGRHGYSGACLKSMGPPTSWLLGVHEGILRA

SEQ ID NO: 198934 - protein, 288 aa, Oryza sativa
  unsure (1)..(288): unsure at all Xaa locations
  Clone ID: PAT_MRT4530_94546C.1.pep
MGAPARAPPQRGNATTAAPRRQPGAEAREKASGWARGSGRVKEAQGRVGARGIARGETTAARKEGKWRRSTRARFRAAGAPPGPRECIPNLRWSGGTPREVDDERRPPGQSKMAGEPRRAAAGRAGGGAXRLSWRRRSRDGAAPRACGRERRVREARGWGGAELLVDSSCSLAPRHARWKRRARTTTNGEAEMESTRERRSRGQLXSRARLALTGGRGGDGGDGREKAKRGREKGARLLADFGRAEREGRARESEALPSSLGRTRADGAGRRAVTGGVRADAAATERL

SEQ ID NO: 198935 - protein, 92 aa, Oryza sativa
  Clone ID: PAT_MRT4530_94547C.1.pep
MGGTGGNDPAIPSPSPPYYGSAPAEWPPAKPRVEGSCGVGGLSIARCCRLWRLLAMVMQGGQPDSAPLGPDLARPQSEVRVSEVKTLLRFWC

SEQ ID NO: 198936 - protein, 108 aa, Oryza sativa
  unsure (1)..(108): unsure at all Xaa locations
  Clone ID: PAT_MRT4530_94548C.1.pep
MDRPPTPHDPSXSDAAPSPDPQTPPPPSPSPPPSPSPPPSPSPPPSTSSLSPPDPAGAARIWRLSPPPPWMTPQFTGAQGERGPVAAVLVTARLCWWPLGRWRGGGGR

SEQ ID NO: 198937 - protein, 153 aa, Oryza sativa
  Clone ID: PAT_MRT4530_94549C.1.pep
MPAVLTAVAGIRHPRPPRPSPSSASVAPLPSRPRPCYFLLPTSVDALTPRRPSIAAPTAPTRAVVRPHTGGFVFFSMEGGGFDFFSEDPSVWPSQPSVTGLGHAPPHAGVDALDLNSQVPAGEDFPHLHDYGSYLQGDGEDGARRGRGKNAFC

SEQ ID NO: 198938 - protein, 253 aa, Oryza sativa
  unsure (1)..(253): unsure at all Xaa locations
  Clone ID: PAT_MRT4530_9454C.1.pep
NLVNRAYYYILDPLLSPFTHNGKKRDAERRVQIPFTKQDVERRTXNSPPAKVIAAVASVWKRVGAILCDSLRLLALHPHLSRLAFWGEYYSSSIITQNAQLRRAALSPVHSKWRSAMASEISALANNGTWVLVPPSPNYNIIGRLWVYKTKRKSDALTIFRKDYYDEMSTPIAIPHRTADEFLRRGDYGGNNPSLPVAVLFKPVGNFIIKPASTTIDGRYGHIRRLPKLNWKMVPKAYKLFVSFGSMTRFPLL

SEQ ID NO: 198939 - protein, 87 aa, Oryza sativa
  Clone ID: PAT_MRT4530_94550C.1.pep
KLSLDEQLAHFVEVIQKIHINVPLLDAMQLPTYAHYLKDILNNKRPLPTTEKFDQALYDLGASVSVVPKDVFDKLNFTMLAPTPKRL

SEQ ID NO: 198940 - protein, 401 aa, Oryza sativa
  Clone ID: PAT_MRT4530_94551C.1.pep
MGISAKWIKSLVGIKKHEKAQTSESSGVRSSTAQLLHKRKHSIDTESAAAVEELSVQTEPLACDTNIQAISNITSSPGKKGKTVVNAVPSIMCDKVLDNLSPVKMARRALRALKGLVRLQALVRGHAVRKQAAETLQCMQALVRAQARVRARRVRISLESQVTQKKASEQNVHEDHVWEIEERWCDGIGSAEQMQAKVLKRQEAAAKRERAMAYALTHQWQAGSRKQKAATLQGLEVDENQWSQNWLERWMAARPWENRLLDTNANERAPNGNDDHAEESEAKAPNKPKGKVSLSTCHPDGSNNKNGKNKKKWHYDVSSYSSRLTARMMSRGVGKGATNGRTNQSMSSKNAAKGSSKLESKQQQRPNPPNTTVKRVEYFLFALLQFCYISGDNNLVMSKII

SEQ ID NO: 198941 - protein, 116 aa, Oryza sativa
  unsure (1)..(116): unsure at all Xaa locations
  Clone ID: PAT_MRT4530_94552C.1.pep
MGISAKWIKSLVGIKKHEKAQTSESSGVLISTAQLLHKRKHSIDTESAAAVEELSVQTEPLACDTNIQAISNITSSPGTTLQVSQIELDTRENHAXIVIQSAFRAFLARRALRACE

SEQ ID NO: 198942 - protein, 58 aa, Oryza sativa
  Clone ID: PAT_MRT4530_94554C.1.pep
VVEDVQRRGFRFALLGSSPLTTGAVDVQAARTCRKGVSGHVQFDGELQSLNSDPTPTI

SEQ ID NO: 198943 - protein, 64 aa, Oryza sativa
  Clone ID: PAT_MRT4530_94555C.1.pep
SFYVFKLYYLNARKIQQEVNSLFAQLNPNFSESFILPKCSTFILLWFISEGIITTPRRIGYLEN

SEQ ID NO: 198944 - protein, 44 aa, Oryza sativa
  unsure (1)..(44): unsure at all Xaa locations
  Clone ID: PAT_MRT4530_94556C.1.pep
PRAGASASARGVPSLYXVEAPLHCGADRRGTTARRMHGKEKVDL

SEQ ID NO: 198945 - protein, 444 aa, Oryza sativa
  Clone ID: PAT_MRT4530_94557C.1.pep
MLETKPPSPGTAGAAGVAGGGYHRRWAAPLLASVLLSSLLIAASLFFSSSRALLLSFSPLPSAASAEPLFVEAKLRQQQQMRGAAASGGRGRGAVPRIAYLVSGSAGDGAALRRTLRALYHPSNMYVVHLDLEAPATERAELAAAVRADPVYSRFRNVKVVTRANLVTYRGPTMVANTLHAAAILLREGGEWDWFINLSASDYPLVTQDDLLYVLSDLPRQLNFIEHTSDIGWKEYQRAKPVIIDPGLYSLQKSDVFWITEKRSGPTAFKLFTGSAWMMLTHQFIEYCIWGWDNLPRTVLMYYANFLSSPEGYFHTVICNVPEFRNTTVNHDLHFISWDNPPKQHPHYLTLNDFDGMVNSNAPFARKFGREDPVLDKIDQELLGRQPDGFVAGGWMDLLNTTTVKGSFTVERVQDLRPGPGADRLKKLVTGLLTQEGFDDKHCL

SEQ ID NO: 198946 - protein, 44 aa, Oryza sativa
  unsure (1)..(44): unsure at all Xaa locations
  Clone ID: PAT_MRT4530_94558C.1.pep
GSPWYEPDRMLYXLGPLYGEPASYLTGEFPXDYGRDTVGLSADP

SEQ ID NO: 198947 - protein, 370 aa, Oryza sativa
  Clone ID: PAT_MRT4530_94559C.1.pep
MAGGGGAGSSTGGSGGGGGREGDWDCGGCGNRNYAFRSLCNRCKQPRLLVDPNTPPDSKWLPRAGDWICTGCSNNNYASRKNCKKCGLPKEEAAMPALSMAGMAMPAYANYIARMQGLAGFKMNMNFGMAGNSALQQQLLASANWPYALAGRYGMQAAGWPFGGNNANQFSAAPKDWRSGDWLCSCGFHNYSSRTQCKQCSAPVPSGIPSTTMKTTVPDTSSTLGTKRLASEELANEWDNKRLNPGNASYPLSTAGTDNLFGGIEQGAGSSNGQTPYSKFDNGNSIALPSGQVSAMPGLIGKGAKWREGDWMCSNCNNHNYASRAFCNRCKTQKEASVHPALHGKHDSPRVSQTAVGGVTATGRYGGYRR

SEQ ID NO: 198948 - protein, 55 aa, Oryza sativa
  Clone ID: PAT_MRT4530_9455C.1.pep
VYKVESTCKAVPCWAASRTPHAPVKAQEQKEFFLQCVMISICMNKISPLFSSKEP

SEQ ID NO: 198949 - protein, 123 aa, Oryza sativa
  unsure (1)..(123): unsure at all Xaa locations
  Clone ID: PAT_MRT4530_94560C.1.pep
HASDHAYGTVGFFAAALMAAMVAMSGSQLSESEMTFMDRQCQREVHDRPLDACRPVLDRQLTCRERFQPMFRRPGALRLHMQCCQHLHDVSRQCRXSAIRRMVRMLXDSMPMPLEHGWSSSSS

SEQ ID NO: 198950 - protein, 150 aa, Oryza sativa
  unsure (1)..(150): unsure at all Xaa locations
  Clone ID: PAT_MRT4530_94561C.1.pep
MDNILKGKEGGPNKKKPQGAQPLTPKSKNPPPKTGAQKKKVKAPKKMGKTKKKKPLFFKPPQNQPRGNKPKGKPPLKTGKPRGXKKPPTAIGPPPGFGRGGKNPPRGGFGTKKPPRGKAQRHRNPSKPRSGKKRGQTPPREHGQKTSNPP

SEQ ID NO: 198951 - protein, 180 aa, Oryza sativa
  Clone ID: PAT_MRT4530_94562C.1.pep
MAHARWVGTGPCEAASRGRPTPVEQLLDGHPYLGIHGIEEAGGVSELAVLGGDDGEADAVYRQQRGGLRPGEESQREASHRPWRSGTVVAVGMWGGGRRTAAVPRWRWRGDILCKFLRDMFGQKPAAKTYGILEFVRDKCRIRQGHILYLRIKSTGTLTNLKTRFWTCTEVKQIFQASAT

SEQ ID NO: 198952 - protein, 170 aa, Oryza sativa
  Clone ID: PAT_MRT4530_94563C.1.pep
MERGGPCDGLCRFRIHLGTRGDCPLPAGDGGVRKPSEEFGEFCQQESENIHDTTDESSNNTPALSHKPQDVFVILHMETDVERQEREAEEHRIRQQQEELAKRMVDLHQRGRTAQEAILQAMLGEHDVFMTSQHNIVVAKGLLNNIKFPEDPTINNTIGQIKPMIEAAAV

SEQ ID NO: 198953 - protein, 731 aa, Oryza sativa
  Clone ID: PAT_MRT4530_94564C.1.pep
MSGSSAAGEDIVQHLSSNSNPSSSKLAKLEARMAGKAAPVPSPPPPHHLVVPSAPATTFMDQEELPESSSSDDDNGEEFLIQKNILKRPRSPDGDHGLAVGNFEGSANEAVKHSEVMDTRPSIDISNRKKQGRGRGRGGAGRGRGSKTVDQTRATSTSSAVVANGRHDILTNMYQLNPYGDTLLLFAPSRLPLYAKEISYADQVYDGNLLHDDPSSSSKLLVSFHQESRSSAVLGNDDKAALQEELSLLRGKVAILEEELSKSRQESTEYRQLSDRLAKELKDLKEQDQQKKSKQLKVLSDLLIAVSKAERQEARIRIKQESFRLGNVGVMRAGTVISETWEDGQAIKDLNSHLKSLLETKETIERHRKSLKKRQSDKGDGSDAETSMSEEDVLLQDEICKSRLTSIKREEEQYLRERDRYELEKGRLIREMKRLRDEDGSRFNNFQILHNRYALLNLLGKGGFSEVYKAFDLVEYKYVACKLHGLNAQWSEEKKQSYIRHAIREYNIHKTLVHPNIVRLWDIFEIDHNTFCTVLEYCSGKDLDAVLKATPILPEKEARIIIVQIFQGLVYLNKRTQKIIHYDLKPGNVLFDEVGVAKVTDFGLSKIVEDDVGSQGMELTSQGAGTYWYLPPECFDLSKTPFISSKVDVWSAGVMFYQMLFGRRPFGHDQTQERILREDTIINARRVEFPSKPAVSNEAKELIRRCLTYNQAERPDVLTIAQEPYLSYAKR

SEQ ID NO: 198954 - protein, 102 aa, Oryza sativa
  Clone ID: PAT_MRT4530_94565C.1.pep
YSIAPPPLSFFLFPHKTSIYYPPALIFKRLSLHFFSSNPLTPSISILHIYLLLKLSTFITYHTHITYSIPPHNYSLTFMMQSTTIKFFIYSLLLTTLYHPSN

SEQ ID NO: 198955 - protein, 115 aa, Oryza sativa
  unsure (1)..(115): unsure at all Xaa locations
  Clone ID: PAT_MRT4530_94566C.1.pep
PVSNSQADGAPTLRLPEVQTFSWXKRPQDRGPVPEANPEGIFIHSLSSIXVSRACVSRDSALKCTXTAQRLFLCRQRPVFXGNSVPLTLGRFHTLYIHPTIMSNLRASLFAMVWQ

SEQ ID NO: 198956 - protein, 80 aa, Oryza sativa
  Clone ID: PAT_MRT4530_94567C.1.pep
MEVQACRRSWEGQDGKAGRYSHSHTHRQASRDAGRQDRSAPASLAPRPVKVSRDDKAIRDACTLMLIVQTPSKSGPGPGP

SEQ ID NO: 198957 - protein, 478 aa, Oryza sativa
  Clone ID: PAT_MRT4530_94568C.1.pep
MKQTVVLYPGGGVGHVVPMLELAKVFVKHGHDVTMVLLEPPFKSSDSGALAVERLVASNPSVSFHVLPPLPAPDFASFGKHPFLLVIQLLRQYNERLESFLLSIPRQRLHSLVIDMFCVDAIDVCAKLGVPVYTFFASGVSVLSVLTQLPPFLAGRETGLKELGDTPLDFLGVSPMPASHLVKELLEHPEDELCKAMVNRWERNTETMGVLVNSFESLESRAAQALRDDPLCVPGKVLPPIYCVGPLVGGGAEEAAERHECLVWLDAQPEHSVVFLCFGSKGVFSAEQLKEIAVGLENSRQRFMWVVRTPPTTTEGLKKYFEQRAAPDLDALFPDGFVERTKDRGFIVTTWAPQVDVLRHRATGAFVTHCGWNSALEGITAGVPMLCWPQYAEQKMNKVFMTAEMGVGVELDGYNSDFVKAEELEAKVRLVMESEEGKQLRARSAARKKEAEAALEEGGSSHAAFVQFLSDVENLVQN

SEQ ID NO: 198958 - protein, 170 aa, Oryza sativa
  Clone ID: PAT_MRT4530_94569C.1.pep
MARSTRSAATEQAYSRFAPTAASSRGRGVGGGNGFDEFDESDIWGSFEPAAEVAESPRAARHQVPAARPPGRKPAAAASKPAAHGSLPVNIPDWSKILGDEYRGHHAGDWEADDVDDDDIDAASAVAVLPPHELAWRRRAASLSVHEDGMGIGRTLKVRDAVWKKTGFQA

SEQ ID NO: 198959 - protein, 150 aa, Oryza sativa
  unsure (1)..(150): unsure at all Xaa locations
  Clone ID: PAT_MRT4530_9456C.1.pep
MACCAADAVATDRIALVKAFDETRTGVRGLVEYGVSAVPDIFRHPDPYAFVPLAPPGVYIPVDNLYLPAPLAVEAVAGAVRDWGFFYLVNHHALVPSGFTVGLLVAVRAFNELPVVERAEHYGRSEDGGVSYSYNVDLYRXDAASWRDTI

SEQ ID NO: 198960 - protein, 144 aa, Oryza sativa
  Clone ID: PAT_MRT4530_94570C.1.pep
AGRPTSGTGRPASARRQARERRPELHDLAPPPPAPPHRSARVTATASSQPRDTVSVALTRPGTRARSRSRRCPLPQSPPYASKFLIFMAFCSCSGGLIDWCACADDLCEGDAKNAHLMSLDVAAERLRLFKADPGAHISLFSAK

SEQ ID NO: 198961 - protein, 113 aa, Oryza sativa
  Clone ID: PAT_MRT4530_94571C.1.pep
WILQPQFLGRKSRHLCLVAPLSVDTGTQFLQVAAHLVRRSSQVPTPEQLVRSPRQHCLFVVGPAGPLAPAADSGRAWSARIPNRVLLFVFVASRASAFKKPPLQECKLRAHKK

SEQ ID NO: 198962 - protein, 223 aa, Oryza sativa
  unsure (1)..(223): unsure at all Xaa locations
  Clone ID: PAT_MRT4530_94572C.1.pep
MAAWLAALLWLVAAGCLGSGHGSTGSLVKQPDIGSPKGRTRQPPRVDDDDDDGRPDLFFMGWRDYQACINYDDAKNAHLVSLDVAAERLRLFKADLLDYGSVAAAIAGCDDVFHVACPVHTLAAAVTGTTNVRKACSEERLGLGRFVVVSYVSAAMXMRRRSRSLRRQRGRGRAAPAAAPSSPVVRTPAYPPRPMAGALRTSPYRRPSPSPRARRPARQLEEG

SEQ ID NO: 198963 - protein, 120 aa, Oryza sativa
  Clone ID: PAT_MRT4530_94573C.1.pep
RKRGSSSPVSLLLLFTGFFIFCCCCFLFSLSFVDLGTDMAHAALQKTFGLHSGPDLEQTFAVHPCSYMYGLLLNSELLICITVCKGRDVDRALRETWSHFDCFVTCKDNHSISNCKSNSK

SEQ ID NO: 198964 - protein, 180 aa, Oryza sativa
  Clone ID: PAT_MRT4530_94574C.1.pep
SVPATRHGREPERRDTTAARSHRRRTLEALRAGVHRAATRATAATRQCLRRRTAAGLAAACAAARCHRPRRRPVCRAAPPSASSRGSTSPPHGRAAAAWHRRSPPAPGTAARLSHATARPTGQAPPPQGQAPPPRAPPPHGHLSPPRRAARLCAAAPSLVPSRPRLAARVRRRRSPRPTP

SEQ ID NO: 198965 - protein, 72 aa, Oryza sativa
  Clone ID: PAT_MRT4530_94575C.1.pep
MRDPVYDCVRAISFLQNQVSQLQMQLAIGQGENLCIQMQHRDGNENEKNGRFAAQYRVNRPNLAISQDPLGS

SEQ ID NO: 198966 - protein, 95 aa, Oryza sativa
  unsure (1)..(95): unsure at all Xaa locations
  Clone ID: PAT_MRT4530_94576C.1.pep
SEIGRVGGRVGGRVGGEYMAKDYSDPPPAPLIDAEELTKWSLYRAVIAEFVATLLFLYITVATVIGYKHQSDPGANXSTSRAGYSFRYHSSRLLV

SEQ ID NO: 198967 - protein, 38 aa, Oryza sativa
  Clone ID: PAT_MRT4530_94577C.1.pep
MADDAYLETQAIPNVPKGGLFKVATAANFLNQQARNQG

SEQ ID NO: 198968 - protein, 385 aa, Oryza sativa
  Clone ID: PAT_MRT4530_94578C.1.pep
MPRRKKHPRFRGTLGTYKFRQALLGDPARHNRFSVLEAEATDDDSSTEPSSRMQDIEDSCGNRSTQDNSRRELVTINHYKTGHPAIMPSVFSILSFLCPNLAKSILVDLDVVFVSEIGTAVMEDVGNMNPLLRTLLEMVSEEQISEIPRHGLENLLLVAIYTTVKFNILMMLMLSLLPHGIGEGMGLHLVEENNFLYGAFTFVVTCPWIKKDTKLLSRILLRLSEIWSQPEWETNLLDFFNNAQFRTSVYNVVAFFENELTMCTAENYDGINHERKLNYSTLTTLIPLLFPLLLELLQYVHSLWTDEVASNISEELEGAKCIICSEKLCGIVEETTEIQDMNEEELLVDEIREWLEKIRQTGIPIIRCKRPLEQVMSPLAAAIHH

SEQ ID NO: 198969 - protein, 86 aa, Oryza sativa
  Clone ID: PAT_MRT4530_94579C.1.pep
MAGAAKASWMVAMSVGAVEALKDQGGLCRWNYALRSIHKAAKANAAGVSQGKKLPASAAAVAERRRAEKAEEGLRTVMYISCWSTN

SEQ ID NO: 198970 - protein, 82 aa, Oryza sativa
  Clone ID: PAT_MRT4530_9457C.1.pep
GRETTNSTLTTGVTGEELTATEPPDCVSRRVDPRENTTIRKPPTSVGGSVRGDRLHASHTLRVSIATGMAKASSSISSSCRE

SEQ ID NO: 198971 - protein, 144 aa, Oryza sativa
  Clone ID: PAT_MRT4530_94580C.1.pep
MAGAAKASWMVAMSVGAVEALKDQAGLCRWNYALRSIHRAAKANARAGVSRGKKLPASAAAVAERRRAEKAEEGLRTVIEASWMVAMSVGAVEALKDQGGLCRWNYALRSHKAAKANAPASRRARSCLLRGGVRRERAEKAEEG

SEQ ID NO: 198972 - protein, 56 aa, Oryza sativa
  unsure (1)..(56): unsure at all Xaa locations
  Clone ID: PAT_MRT4530_94581C.1.pep
QKLLNMRKIPISKLGYYPMDRVXFIGLSNITTKKSMIIHIQVVHFHLQNSHHHQED

SEQ ID NO: 198973 - protein, 88 aa, Oryza sativa
  Clone ID: PAT_MRT4530_94582C.1.pep
VATKVIRSRVNLIHATINLAIQKKYHYNSCVCNSDIVILQNYNCAFAVTFPIFPLPFPFSPSFSRFLPLSAFSLRSFSTGRTTRGAVS

SEQ ID NO: 198974 - protein, 87 aa, Oryza sativa
  Clone ID: PAT_MRT4530_94583C.1.pep
MAGAAKASWMVAMSVGAVEALKDQAGLCRWNYALRSIHRAAKANARAGVSRGKKLPASAAAVAERRRAEKAEEGLRTVMYISCWSTN

SEQ ID NO: 198975 - protein, 165 aa, Oryza sativa
  Clone ID: PAT_MRT4530_94584C.1.pep
MAGAAKASWMVAMSVGAVEALKDQGGLCRWNYALRSIHKAAKANAAGVSQGKKLPASAAAVAERRRAEKAEEGLRTVMYLSCWAKASWMVAMSVGAVEALKDQGGLCRWNYALRSIHKAAKANAAGVSQGKKLPASAAAVAERRRAEKAEEGLRTVMYLSCWGPN

SEQ ID NO: 198976 - protein, 217 aa, Oryza sativa
  Clone ID: PAT_MRT4530_94585C.1.pep
MSEGEEEEGRQVQEVVAHVYDVASSGSSEGGGGGTAILHVNRFFKDAIGLGGIFHTAIQVYGDEEWSFGYCENGTGVFSCPPCKNPMYTYPWVNRFANAGDAALEVAENTAEKLKQAKKDIAGACKAATTYLTGASSSSPSNADDSGGSTNSSLFEGTWLRSIIGISMKPSRSLMCSDSSDSSDDEKSEDERESDCQQPSGDQIEEKKDATQEQAGK

SEQ ID NO: 198977 - protein, 144 aa, Oryza sativa
  Clone ID: PAT_MRT4530_94586C.1.pep
MVQGTLEVLLVGAKGLENTDYLCNMDPYAVLKCRSQEQKSSVASGKGSDPEWNETFMFSVTHNATELIIKLMDSDSGTDDDFVGEATISLEAIYTEGSIPPTVYNVVKEEEYRGEIKVGLTFTPEDDRDRGLSEEDIGGWKQSS

SEQ ID NO: 198978 - protein, 154 aa, Oryza sativa
  unsure (1)..(154): unsure at all Xaa locations
  Clone ID: PAT_MRT4530_94587C.1.pep
RSKQWRPRRHGGLALLLCVRRRLLPAPPRAPSPAAPPRLRLPLRRSPPPARAKFGKFEASDAAPTEASAEEAESAAAAGDGAAEQKAEEDDSCLPSDLEGAIWQSGKASADFXNSGGMRTIAELLIPQVEFLNEERAQAEVWALSRIFLDTLGK

SEQ ID NO: 198979 - protein, 338 aa, Oryza sativa
  Clone ID: PAT_MRT4530_94588C.1.pep
MATSSPPCACAAPLLRRRLLPAPPRAPSPAAPPRLRLPLRRSPPPARAKFGKFEASDAAPTEASAEEAESAAAAGDGAAEQKAEEDDRSGSLPPLAELVNNRRIVMRLCLPSDLEGAIWQSGKASADFVNSGGMRAIAELLIPQLEFLNEEGAQAEVWALSRIFLDTLVKETGQKVKAIFPDAGAAALLKYQWTDAEFKCASLSDRKPVDVEDEVVVMIIPDHQMVESVERIASQLSDDPIRPLVMWNPRLVSGDVGVGFNVRNLRRNFLRKWKVFYDDPKRPNRYLLARELVSRPDATDIEIIFGGGDEQSDEAPSLMNNVMGVFSSVSRFMRVISK

SEQ ID NO: 198980 - protein, 127 aa, Oryza sativa
  unsure (1)..(127): unsure at all Xaa locations
  Clone ID: PAT_MRT4530_94589C.1.pep
LSTDFILYLYQYSCVASLSERCNGVGLVSDCSVALCHLGGYRVVFNNVDVVSRLLSIPIXAYMLRVSRGGSLMVTAQYRYSSMIVYIPKTNSWGGYFSVFSPGWTAITDCRKELGNPGWSLETPGGH

SEQ ID NO: 198981 - protein, 151 aa, Oryza sativa
  Clone ID: PAT_MRT4530_9458C.1.pep
MEYQGQHGGHASSRADEHGNPAVTTGNAPTGMGAGHIQEPAREDKKTDGVLRRSGSSSSSSSSEDDGMGGRRKKGIKEKIKEKLPGGNKGNNQQQQQEHTTTTTGGAYGPQGHDTKIATGAHGGTAATTADAGGEKKGIVDKIKEKLPGQH

SEQ ID NO: 198982 - protein, 76 aa, Oryza sativa
  Clone ID: PAT_MRT4530_94590C.1.pep
PPAGHAISRIRLSFHQYQPLNPKGKTNTETRMSLWYLTDSTSCSMHILNPQTTKQTLSRRSPTPTVATPHRYTTCE

SEQ ID NO: 198983 - protein, 336 aa, Oryza sativa
  Clone ID: PAT_MRT4530_94591C.1.pep
MTLANIPEIMESLPVETRFTEFPLRQYGGFWLLEVMLNGVAAAETSFQPRPSDILLSSFPKCGTTWLKALAFATLNRSTYPPSDEHHPLLEHNPHDLVGFLEIYPKLELYESLPSPRLLSTHLPYSMLPHRIREQETGCRLVYIYRDPKDAMVSMWHQNKKEKKNRLTFEEMFDMFCEGRCVVGPQWCHAGEYWDESQARPEKVLFLMYEDLLQDTVGNLRTLAEFMGCGFSRQEEDDGIVQQIVELCSLNNLKNLNVNKSGTTLLGISKDGFFRKGGTGDWSNHMSPEMAARLDKIVKERLEGSGHPIISRINAKATTSIGSSNHGASEAKYIKE

SEQ ID NO: 198984 - protein, 130 aa, Oryza sativa
  unsure (1)..(130): unsure at all Xaa locations
  Clone ID: PAT_MRT4530_94592C.1.pep
MLATVGGGIVVSQGLFRSVKHGDSTIEAINLYTGGTENVAHHXCTPYFEMSRHDVIKPILLEDDQIYHLVCPVYPVHYKYNPVQTLXTNVVGTLNMLGFAYRINARSLLTNTSQVYRDTLHHPEVDTYRG

SEQ ID NO: 198985 - protein, 75 aa, Oryza sativa
  Clone ID: PAT_MRT4530_94593C.1.pep
MVQPAVRPVVCRRSDQQQSSNVTELSDARSGMGEHGNGGYGSGELNDDESTVAGLRSCKASAATDSSDEDDGSGN

SEQ ID NO: 198986 - protein, 403 aa, Oryza sativa
  Clone ID: PAT_MRT4530_94594C.1.pep
MHASRMEQTTGVSGHEHIIDIPRDSGPSTSTSHSVARENHGEPNPVDRSATRALVPALQAPSAVGAPSAGHTSGARRSDNYVRRHRSPLNSGLWISIEVLVNVSQIVAAIVVLSLSRKEHPQAPLFEWVIGYTVGCFATLPHLYWRYIHRNIVNGENEPAHTLQGSSQNNSTEPSASASERRRNAARNAVLANPRINALFDHFKMALDCFFAVWFVVGNVWIFGGRSSAADAPNLYRLCIVFLTFSCIGYAMPFILCAMICCCLPCIISVMGFREDTNNTRGATSESINSLPTYKFKTKKRRHSSGNEAEGQDGGIVAAGTDKERSLSAEDAVCCICLAKYAHNDELRELPCTHCFHKECVDKWLKINALCPLCKSEIASSSGTSDTRRSDHTDIPVQEIEMH

SEQ ID NO: 198987 - protein, 134 aa, Oryza sativa
  unsure (1)..(134): unsure at all Xaa locations
  Clone ID: PAT_MRT4530_94595C.1.pep
LVMMFDQPQLFKPFLRKCVMRENIDTRSVREVCVQSGFLATRSIERLQFVDDNEHILRVKFIGSDHMLEAFDMHIGTVHFEVINIXPGTVVIELFVVDXPEGNTKDDIXYLVKNLFRCNLRTLVDVSEESLAGY

SEQ ID NO: 198988 - protein, 631 aa, Oryza sativa
  Clone ID: PAT_MRT4530_94596C.1.pep
MPASPRALAATVGLELDKVAVGSSTEKKAAVVTAWLSLPSRRPTPLPEPFLHRRRREGHHRGEPRLTDGQIRRSRFSLVVGTGSAPRRLATGVMDVELRLVANVGSGLLASCRRRIQPYCRIRDATPRWRRVRMPQEGEDIDAMPIVRAFDSMSVSDDPKHVGVGKPDVDVPNDPMSDKGVTISGVVKRRKEDVAQGVPTVAAAPGDMMAKAETSGATAGESGGGSGRARRTAAAGEAGMSGGGAAGENGGGRACPLWSSVSTSSSSVVALLAASLRWLLVAVVLFTWLPLMCPVQDCSQPSRSLPHAAAYAAAAMALLAAAYYLLPDYQVLASIVVWIASSLLRHQRRHLRRPQGSPPGAGARRGTRPGSRPTSRRGRPLPAAALAGRRSACLDPSKKTREEKKGEERRDVGLASFSLTYIALEEEEEGIIKATDQIVDRFSMARRGTEAFPDLGAQCDREDCNQLDFLPFDCDGCGKTFCAEHRTYRDHGCARAADQGRTVVVCEACGDAIERRAGDGGGDDAAVLKAHARSRRCDPARKRKPRCPVPRCKETLTFSNTSGCKGCGQKVCLKHRFPADHACAGAGAGAASKAAGAAAAARSAGQCGRDAQKKEGGGWKLPQSVRNMKIF

SEQ ID NO: 198989 - protein, 208 aa, Oryza sativa
  Clone ID: PAT_MRT4530_94597C.1.pep
TALQVSRPASSPRSSSPRWIMPASPRAFAATVGLELDKVAVGGGGEKKASVVTAWLSLPSRRPTPLPEPFLHRRRREGHHRGEPRLTDGQIRRSRFSLVVGTGSAPRRLATGVMDVELRLVANVGSGLLASCRRRIQPYCRIRDATPRWRRGGREKGGDSTGGSSSNSSSEEDERDVAAHRMSDMNQCACHRKVRTLMRCPSSVPSIR

SEQ ID NO: 198990 - protein, 87 aa, Oryza sativa
  unsure (1)..(87): unsure at all Xaa locations
  Clone ID: PAT_MRT4530_94598C.1.pep
APARCSRXPRPQXAVRGRRASSXXSTVGXRVATTTAAAASTAAATSCRSCLSRCRHHGCLSRRHHRQPPQRLPQPSSPSPASAAXVA

SEQ ID NO: 198991 - protein, 41 aa, Oryza sativa
  Clone ID: PAT_MRT4530_94599C.1.pep
ANGAGSSDGSKLKDDSTRMNERNTGNTSFERTSEQLNNGCG

SEQ ID NO: 198992 - protein, 45 aa, Oryza sativa
  Clone ID: PAT_MRT4530_9459C.1.pep
SHQVSLCPISWLMVSQMFPLWTREGGISPAVLEIPGYHACVTCAF

SEQ ID NO: 198993 - protein, 81 aa, Oryza sativa
  Clone ID: PAT_MRT4530_945C.1.pep
MEWRHGGEVASRGAARAEERRHGGGVADSRRAEERRRGLREAAAKAVAATSWRMNSSDSTYRDREMKAQSSYGSVIEDEQQ

SEQ ID NO: 198994 - protein, 127 aa, Oryza sativa
  Clone ID: PAT_MRT4530_94600C.1.pep
MVSGVARETTMVGLHQTTQEERSPQQQRGGSDARVFEVDATTGCAGLDATAATAGSMRWQRLWWARCDGCRCDLDATGCPGLDATRGRGGLDATSAAAASMRHRPWRTSCDATAAAANSMWHGGAIG

SEQ ID NO: 198995 - protein, 91 aa, Oryza sativa
  Clone ID: PAT_MRT4530_94601C.1.pep
MPYLGQPGTPRIRNPHVSPMGVNDHGRSSNQTSRSHDTACVLNDPDGATASGETYLPSSPYHPFKSIIFHQPLFNIIRLNLRFLLHVLRNI

SEQ ID NO: 198996 - protein, 80 aa, Oryza sativa
  Clone ID: PAT_MRT4530_94602C.1.pep
LYRGWSCLIQALLHIQLGVESKGNPKHAFPSKETSRPDETGLDSDPPVRPATHHRSDRPTTGGLTSQHMAVRPAMCEWFI

SEQ ID NO: 198997 - protein, 40 aa, Oryza sativa
  Clone ID: PAT_MRT4530_94603C.1.pep
IDNEIFHEKVIYIWCLNAPLPKGRYNIVLDSESFCLQTWQ

SEQ ID NO: 198998 - protein, 99 aa, Oryza sativa
  Clone ID: PAT_MRT4530_94604C.1.pep
HPLPPPKRRHRPPLGPPSATAHRSPPPPAWQQRGPPSPSPSPRRAATAPSSTAPRRGTTPPASPPPRRRTTPASPRAAAGACTCSSAPPPRAGGSRRRP

SEQ ID NO: 198999 - protein, 110 aa, Oryza sativa
  Clone ID: PAT_MRT4530_94605C.1.pep
SIMGFNLLCTRGSLIWISDLILPFAISSEISSCILIRTRKTANRQRHIKPQRRCYTSSPRPTPSLPPDPHHALLHYSASLRRGGAHRSRSRSPGRCRRRTARACQRGSTF

SEQ ID NO: 199000 - protein, 41 aa, Oryza sativa
  Clone ID: PAT_MRT4530_94606C.1.pep
KKKKKKKKKKKKKKKKKKKKKKKKKKKKKGGGRFKRNPSFT

SEQ ID NO: 199001 - protein, 64 aa, Oryza sativa
  Clone ID: PAT_MRT4530_94607C.1.pep
KFSINISKYYSSFDDKTSHNKINNIYIIRWMVKRYAKSQRRHVFHDGGSKFCGIVNMTFYIVLL

SEQ ID NO: 199002 - protein, 112 aa, Oryza sativa
  unsure (1)..(112): unsure at all Xaa locations
  Clone ID: PAT_MRT4530_94608C.1.pep
SDVVTLILKLSTSSSLIANHLLQLYGSKMDENFPMLWKAQAEPKDRFFGVLVLHQREFTAENLHIRHWSCNWICSLCSXPFENTYHLFRNCDFTKKVWYLVYDCKFFNQAGT

SEQ ID NO: 199003 - protein, 74 aa, Oryza sativa
  unsure (1)..(74): unsure at all Xaa locations
  Clone ID: PAT_MRT4530_94609C.1.pep
MPTMEEIGHGKRNTEGPSTGHXVTKSPTNRKTWYTWSINXQKPVTVGPLGVLTPVLSYVAAESVREPRGTYMSG

SEQ ID NO: 199004 - protein, 43 aa, Oryza sativa
  Clone ID: PAT_MRT4530_9460C.1.pep
PVASGCAQVASKRFKTGVVALFTTVQLDRVCAYEPINSLRNLA

SEQ ID NO: 199005 - protein, 193 aa, Oryza sativa
  unsure (1)..(193): unsure at all Xaa locations
  Clone ID: PAT_MRT4530_94610C.1.pep
MENVLLIGQVTGGGFDDYFGRRLAVAPPPPPRRSIQGSFTFAAPSPPPFQYTTYEAASLYSSLSLPLHLPYTYYAAAXXXXGXATATRXLPRMLPPLPPSATVVRRRIKKPRTPRSGEGQARAPQRRSPLERPAPLPPPAAVAEALDDLEREVTRGFVEDLLHALAPPPSSLPLPTFSLVRAAAAKAAASCAV

SEQ ID NO: 199006 - protein, 196 aa, Oryza sativa
  unsure (1)..(196): unsure at all Xaa locations
  Clone ID: PAT_MRT4530_94611C.1.pep
MYRRAPRRRRRAAARTRGARRPGRRAAAARGGRRRGPAARSPGAPGGGRPRRGRRRRSSRGAAAPAPSTPPGAHRRHRRHSPPPPPPPSPRGCAAAAWPCPRQPTTTTTRRXGSSSRSPPPRGPRPPPPPDAWXGRRRRRPLSSRRCASSPWQHTQTRRSRREEWQRRKPVPPPPPHIGIAIQVTTTTANLATPLV

SEQ ID NO: 199007 - protein, 204 aa, Oryza sativa
  unsure (1)..(204): unsure at all Xaa locations
  Clone ID: PAT_MRT4530_94612C.1.pep
YHHTTRRGNDNDERARRRRPGTTETNGEGTTSVAILGQRRDAAGTRLDDAEPRTKTTMGLRGRRGDDEGSRRQLHGDGDDGERAAANPTTEAAPRDDEPARTNDDDDDEHRRCSGGGEARPRATLPLXCRRWWWRSEXRAGEEEGAAEGTPATTRMERPAQCLTTRSPDESEGRPGWRSTRRRRGRRRRGRPTPERRGRGGLSS

SEQ ID NO: 199008 - protein, 274 aa, Oryza sativa
  unsure (1)..(274): unsure at all Xaa locations
  Clone ID: PAT_MRT4530_94613C.1.pep
PLPEPPRGRITSPRLLLLSLRRRPASSRLSLLARAPSGRAIAALGLAAASSPPXPCRAAQVRAGCAVSSLGVAASTSTPACPRFHRNAVVRVGLALRLAGVPPAAPSAVPVRRPTSPSPPPALQQQGRPRPRPRPRLPSTRTPPVSVVVFTVHPRRLVVSRRRLRRRHRSGMFLAILASVQPLPAXPRRLLAGPGRRRRRPPVVPGRRGPXVIVFVLGSASSSLVPAASRLCPRIAAEVIPSPFVPAGPPATLADGWDPPVIAYLPPRRRQPVP

SEQ ID NO: 199009 - protein, 108 aa, Oryza sativa
  Clone ID: PAT_MRT4530_94614C.1.pep
MGVSFDEDLAAAAATKIGASVVPSPFAAASCFAEACGGADDGRRAEKGVEPRNPGGCDPQRRWVGETTLVTRRARVRDADRWFDASSEFDAAVPHSIDAAPGGQQRWR

SEQ ID NO: 199010 - protein, 46 aa, Oryza sativa
  Clone ID: PAT_MRT4530_94615C.1.pep
MMRMTTRAAKRMKTMTSEPSSGQDGSSKTLRAAGVLRSLSIIIIVY

SEQ ID NO: 199011 - protein, 104 aa, Oryza sativa
  unsure (1)..(104): unsure at all Xaa locations
  Clone ID: PAT_MRT4530_94616C.1.pep
SLDPCQLFGKGPTCSYRMWSGXIGQYNLFQECPRDRSSWMLISSLVKKLASEEEWMEYEYHYSRGIRISPDIRKLLLGCIWEYMKLAYPVDGISDEKMKMCSAN

SEQ ID NO: 199012 - protein, 195 aa, Oryza sativa
  Clone ID: PAT_MRT4530_94617C.1.pep
MAPAPATLPNAAARRPHALLVPFPSSGFINPMFHFARLLRSAGFVVTFVNTERNHALMLSRGRKRDGDGIRYEAIPDGLSPPERGAQDDYGFGLLHAVRANGPGHLRELIARLNTGRGGGAGDSPPPPVTCVVASELMSFALDVAAELGVAAYMLWGTSACGLAVRELRRRGYVPLKETQVNAGAHNPLAPYEHL

SEQ ID NO: 199013 - protein, 498 aa, Oryza sativa
  Clone ID: PAT_MRT4530_94618C.1.pep
MGEYCSNAPCKWLPDLGKGGAHGTNAHNMFDGMPSQPEMSKEDQRISDPIPINSTMNKEEKWLDDALDWILENWVATNSSLIGEVLYLTATWELGDRKDMDQAPYIVTKDLPKVTPTKCSTLCSSSDIKPDLIVDVHPSCSKEMHTKCSTLGLDIKGDSNQVVLAFQTMMGISKVVPSSVQPVENFSSRTVTDIKLDTPMLNTCSLKCPSSDKRPLIEHTERNPWPPPWSAGVTRRWRLMEEAWKELYPGCKEATKVSFIVRLFQIKCMYSISNNAMEQILHLFCLLLPEGHCVPNTLDKVRKVLQDLRLDYQKIHACVNDCVLLRGEYDKMNTCPTCGESRWKNIDSGELGEGSGIGGAKKKAFVLEELVDDGKVRHPANSLAWKHVDEKFRDRFASDPCNVRLGLASDGFNPFGMLNVTYTTWSVILIPYNLPPWLCLKQSYWMMSMLVPGPRSPGMNIDVYLQPLIDELKQLWTEGVETWDAKVKKNFTLRANLL

SEQ ID NO: 199014 - protein, 81 aa, Oryza sativa
  unsure (1)..(81): unsure at all Xaa locations
  Clone ID: PAT_MRT4530_94619C.1.pep
ETAPFFVFLGANSDLVISCMEAAYGXTANSAMGKEPMGVMRTELVMKIIYPVVMISALGMYGLTIQAVIITMINIKANTYY

SEQ ID NO: 199015 - protein, 77 aa, Oryza sativa
  unsure (1)..(77): unsure at all Xaa locations
  Clone ID: PAT_MRT4530_9461C.1.pep
PPCSNRRFWGDLAIPRFFTQNHFFHHHYGLALHFHWHFGSQFRQHHFKSHFFKLPIPFPFGSDQLGKPVPKSHXNNC

SEQ ID NO: 199016 - protein, 306 aa, Oryza sativa
  Clone ID: PAT_MRT4530_94620C.1.pep
PSGRQREVRRKEQASFLTKLLVLTRRSFLNMHRDIGYYWMRLGIYLGIGICLGTIFYQVGYSYSSIQSRCEVIMYTTALVTFMAIGGFPSFVEDIKLFRRERLSGHYGVMEFVISNTLSATPYLAVIAVIPGAMMYYLTGLTRGAEHFAYFVATLCMCTLLVESMMMIIAVIVPDFLMGIIIGAGIQGMMMLNGGFFRLPNELPKPVWKYPCYYISFHKYAVQGFYKNEFIGLSFPSDQLIEANATISGLQVLKERLQVEMGYSKWVNLAILFGMMVTYRMIFFVIVKIAEELRLKLRGIRFRRLK

SEQ ID NO: 199017 - protein, 465 aa, Oryza sativa
  unsure (1)..(465): unsure at all Xaa locations
  Clone ID: PAT_MRT4530_94621C.1.pep
ACDDDHSWMLLSQSDDAWQVGFEKFIEHTFEGTYPGETAACPCTRCCCMAYGTKIEVQQHLLGRGFDKDFIKQKRSVSKPMVVDDREISEAEVDDVGSVDNLLSSLISGAIHGDIRDNNIKVPNXQQFFQFMEEARKELYPGCKEATKVSFIVRLFQIKCMYGISNNAMEQILHLFCLLLHEGYCVPNTLDKVRKVVRDLGLDYQKIHACVNDCVLFRGEYDKMNTCPTCGESRWKNIDSGKLGEGSGIGGPKKKVLRPRKILRYFPLIPRLQRLYMNETTSTYMRWHKEELVDDGKVRHPANSLAWKHVNEKFRDRFASDPRNVRLGLASDGFNPFGMLNVTYTTWPVILIPYNLPPWLCLKQSYWMISILIPGPRSPGMNIDVYLQPLIDELKQLCTEGVETWDAKVKKNFTLRAILLWTINNFPAYAMLSGWSTKGKFVCPYCHKDTEYLWLKYGKKHCYMG

SEQ ID NO: 199018 - protein, 83 aa, Oryza sativa
  Clone ID: PAT_MRT4530_94622C.1.pep
MVERLGLVPLVPTSGTRARKGHRRGVGMLCDRTVNYAEQHKPIELAERERWKKTKRRKKQIRPEEAADRANRGKRVHRVRNTE

SEQ ID NO: 199019 - protein, 78 aa, Oryza sativa
  unsure (1)..(78): unsure at all Xaa locations
  Clone ID: PAT_MRT4530_94623C.1.pep
KSSLHXPGDSSEAPEEARKREKARGGRRTTRRRRRRESHHLLLLLLPCWRDRESELAEDEGYLRGHVGHERRDGCGAT

SEQ ID NO: 199020 - protein, 110 aa, Oryza sativa
  unsure (1)..(110): unsure at all Xaa locations
  Clone ID: PAT_MRT4530_94624C.1.pep
MGPSLTSSKRPAPTGGPHESAAQEERPTVDSVHRGTGASAPRGRPRGGQAAEVAPTWRHEGTDAGXAPNGHVDGPDSPEGESSDHRRAGAGSPTGRPGNGGAHGHRWRTR

SEQ ID NO: 199021 - protein, 116 aa, Oryza sativa
  Clone ID: PAT_MRT4530_94625C.1.pep
MEEWVPAMWARWSSNRSENLGKNGGEGGGVGGDHVRTVGCARGRQEAAVLAATWGDPGCHGGCRRSGWRKGEELTGGASGPPVGEGRREEAGKGPRRMALYSAALLVMSNCSLAAY

SEQ ID NO: 199022 - protein, 196 aa, Oryza sativa
  Clone ID: PAT_MRT4530_94626C.1.pep
MNHHLSLLHLPRLSPVLHHHPRHLRLHGRTTVFQARLPSPQRTNQHRLLAVTTAPPEPEKTEEQQLLHPLQEPAEGEVSGGGGADRTCGLPTWALIGAIAAAVALSSAAAAGPAAALGPEGPLVEEFWDNMRRYALYVVTVSTGFAYTLAQPIVELLKNPVTALLIVAVLAGGGFLVSQVLNAMVGNSDFIYTYDQ

SEQ ID NO: 199023 - protein, 63 aa, Oryza sativa
  unsure (1)..(63): unsure at all Xaa locations
  Clone ID: PAT_MRT4530_94627C.1.pep
LDIQIXLYQSTPNNKRVGKSSPIFTPYHYIRKRXIMQITSSIGIFITHXSNRQGDGGQTRQQP

SEQ ID NO: 199024 - protein, 207 aa, Oryza sativa
  Clone ID: PAT_MRT4530_94628C.1.pep
WRIWRMNFVGSSNMSLQSASLILKQDVQESASGQCELCILMTDYHSNSKTVEFFEGDVDHSYAVAIAPESKYSVHNMPGFIIHRSLEAASDSSESVYKGSEDYFTFACRYGDTSPNLVSRLITGPVFNLNGQVLGIVVDDIEYKFWPKKPRKEDGSQEIIHEDLFYRAGYFLKVAMRVNNLQQDLRSMVKDNDWQNGLKKIATERRV

SEQ ID NO: 199025 - protein, 64 aa, Oryza sativa
  Clone ID: PAT_MRT4530_94629C.1.pep
RLLQIASTVNIVDDNLYRFTCPCNYVHTTEHVDAQPNELKAKPKKRRRKHSHACMHVVPIHSEN

SEQ ID NO: 199026 - protein, 110 aa, Oryza sativa
  unsure (1)..(110): unsure at all Xaa locations
  Clone ID: PAT_MRT4530_9462C.1.pep
TLGYHRFRLFGILFHCYWLIWLHISSSANTMKMVTNRLSNHQILHRRLEGKRSPLRTKLGRWLHRVSRRTDREERXPFEGAPKMSEAWTNWTFGGRTRSWPTDSSGQAKS

SEQ ID NO: 199027 - protein, 116 aa, Oryza sativa
  unsure (1)..(116): unsure at all Xaa locations
  Clone ID: PAT_MRT4530_94630C.1.pep
YELLHHNPAGVVLNHRTERSGIHPKAEIDKAAEFRQRQAIATGNDRTKTYXAPSSSSPSQLGSTCSRNSDDLPCSESCGSWPSLGSATFSGSMAAQGGDARRGGSGATARRLRRWR

SEQ ID NO: 199028 - protein, 31 aa, Oryza sativa
  Clone ID: PAT_MRT4530_94631C.1.pep
LTKPQGLGVRDHDNHHDHNDRERRVPDNTGH

SEQ ID NO: 199029 - protein, 88 aa, Oryza sativa
  Clone ID: PAT_MRT4530_94632C.1.pep
KVAQAGASAIRAATGPKYTVGSSTNVLYAAAGGSDDWALAKANIPISITMELAAGGNGFDPSTAQIQPFVNDCWIGTRAMALKVIAKY

SEQ ID NO: 199030 - protein, 77 aa, Oryza sativa
  Clone ID: PAT_MRT4530_94633C.1.pep
FHRNKKHHQQIQVNRARVYFYCSIEFTRSVNRLFTSTVPSKQETSSTDNRSTLTLTVRSKFQHIFKVTWRIDDKDSD

SEQ ID NO: 199031 - protein, 145 aa, Oryza sativa
  Clone ID: PAT_MRT4530_94634C.1.pep
GLPERLQLSLVRTLPGLENCVMLRPAYAVEYDYLPAYQCSRSLMTKKFEGLFFSGQINGTTGYEEAAAQGIISGINAARHSDGKPLIILERESSYIGTLIDDLVTKDLREPYRMLTSRSEHRLLLRADNADSRLTPFGRDIGLID

SEQ ID NO: 199032 - protein, 707 aa, Oryza sativa
  Clone ID: PAT_MRT4530_94635C.1.pep
MDRDHAGGPPPVHGTDCPDRPGGRSDGAGGGLAWLCSAQNRPAGLGERRRRAAAGDGKRRRGRRRQPARKRRRTAEDDDARADRSGAHGRERGKEGGERDSSLARTAAGAKEEGGGDNRRCGGADGRRWHPRREQRWVRGGLWISQGFINPEEDSQPEDTGLQYFNELFCRSFFQNGPSRDDDHKDKFVMHELFHDLACSVSKDECFSSGEAFCSLPENICHLSVVLPDSKSVVLTKVQRHLQSLMVVKRSASEYPGSFVPLLKILGLNDLLMKCRFLRALNLSCTTIRELPSSIMKMKHLQFLALNNTKIQSLPAEIGQLQTLQTLELKYCCCLIELPESTMNLTKLRHLDVQKEPGNVHVSMPHGIGQLTDLQTLTVFNTGDDLSHCSIGDLKNLSGLRGHVHITGLQNITASDDAKEANLVGKQFLGALTLEWCWSSQDMEDDSDKEIANQVLHNLQPNTNLQELSIRNYSGNLFPNWIQDSSLSMLVSITIDDCQDCNEIPHLGDLPFLKYLLIHKMDKYTVKYLLKKTTTDDGWNWRKYSEKDLLGSKYKRSWYRCNQKQSTGCVARKIVEPNNDDPNTWLVTYLYEHNHKQEARPCDKPSPSDLHVQLASGNTQWCVLRGFYGGVRQMTVGSNTQLHERDYTGNANHSGIIARQTWIEMLRRGCTAGHSQRRAVTYWIYCDDSSSIKDKLEIVDVDVLYQQ

SEQ ID NO: 199033 - protein, 102 aa, Oryza sativa
  Clone ID: PAT_MRT4530_94636C.1.pep
SGGKKKLRKFKPQKKQAKLASLKAKVKTLATEKWENQIHFFTGKTIMGRPKKLGGGQIGRTPQRFLPPPSGGPRGDGLIGPKNGGGGIANGDGHRGGKKRGG

SEQ ID NO: 199034 - protein, 137 aa, Oryza sativa
  Clone ID: PAT_MRT4530_94637C.1.pep
ELDSHEYELRIFEISEKKKKKTRGGARAQCPYSEAITPPTGRRYNVGLGNPDVPTDGLAGLRFFLCGILEAHPCPFELAQPMGMGPPLRHKPGVCDQPGTTSSRAFSRLLSYLWFDCPELSVASTRYCFSILSPVVF

SEQ ID NO: 199035 - protein, 383 aa, Oryza sativa
  unsure (1)..(383): unsure at all Xaa locations
  Clone ID: PAT_MRT4530_94638C.1.pep
QIETHPLSSDLSFLTLFSNSSPSSSPPPSLSFPAGLPFPSSGPATSPPPPFGQKXPPDGAVPPPPPSPXRHSPSSSYTGSAAPPPPPSSPLAVTPLLLLSPAAALPLFLMPSFPPPPLFLSSTTMDESSHRGRRSGKEVPPVGGLPCPSRRTPPPSPRRAARRWLRALPPXPELRPPPSSARSTAPPPPRASLAAGVPSAASTSRAPTAMGTSPPPXLRPPPSPPPTAPSSDTPSSCRPPAPSSARLHPEHRWLRTPPPPPRVPSSAAPSSVVPSAPSSPSSALRRPSLPPPRAPAPPPRATPSAPSSARRRPECQRLRAPPPPPRAPSSAAPSSAAPSAPSSPSSTLHGPLLSPPRAPPTLSAMGIIPPCQSKSRGLKLNQE

SEQ ID NO: 199036 - protein, 62 aa, Oryza sativa
  Clone ID: PAT_MRT4530_94639C.1.pep
VAATVVRAVQLRSRATRSGACEHHQRRLRLFARRPARMATRGKLTAVAEHTRGGGGSVERGG

SEQ ID NO: 199037 - protein, 137 aa, Oryza sativa
  unsure (1)..(137): unsure at all Xaa locations
  Clone ID: PAT_MRT4530_9463C.1.pep
MELYAVVMTTTTEPSCIFLGGPRSPRRADGDTVMLKKDGNKRMGTNRSNASSTGSGVLLARYDALQSDMCMVTRDARKARRGSGRERRPLRSGSLDGGTLIWRRHGAVLMXQRLISSVVRSAIREEALAFMAERCSA

SEQ ID NO: 199038 - protein, 190 aa, Oryza sativa
  unsure (1)..(190): unsure at all Xaa locations
  Clone ID: PAT_MRT4530_94640C.1.pep
PELRPPPSSARSTAPPPPRASLAAGVPSAASTSRAPTAMGTSPPPXLRPPPSPPPTAPSSDTPSSCRPPAPSSARLHPEHRWLRTPPPPPRVPSSAAPSSVVPSAPSSPSSALRRPSLPPPRAPAPPPRATPSAPSSARRRPECQRLRAPPPPPRAPSSAAPSSAAPSAPSSPSSTLHGPLLSPPRAPPT

SEQ ID NO: 199039 - protein, 88 aa, Oryza sativa
  Clone ID: PAT_MRT4530_94641C.1.pep
HAFLSLYSLPFAALFFVFFDFLRVLSAHKPRVFTRKYYSCKITYLPIKGYHSFLYISTFLANYLPPSINLSYFYNLLYISFLITNSFL

SEQ ID NO: 199040 - protein, 84 aa, Oryza sativa
  Clone ID: PAT_MRT4530_94642C.1.pep
RAAGIGRGFRKTEANACEGSSEITKQDEFGSSSLETDGAHRGMVHLTPARQHHAVLFHGLFSRIFRPDRLNVLCSHMASVHLQL

SEQ ID NO: 199041 - protein, 78 aa, Oryza sativa
  unsure (1)..(78): unsure at all Xaa locations
  Clone ID: PAT_MRT4530_94643C.1.pep
MMCTRVPNLPKDSDKQXFGRSRDTNRSGFLNAHALEPHNRITTSPRVITHVEMQMRPKYGDTVPGQILDVSLCSFPPL

SEQ ID NO: 199042 - protein, 232 aa, Oryza sativa
  unsure (1)..(232): unsure at all Xaa locations
  Clone ID: PAT_MRT4530_94644C.1.pep
MDHFTNPLRRRRRRSPEKRRGERGVAGEEGEAGEGAKVVVSGWLTAVLEGGFAHVALTWTLRNHVDRSFLVGLVALFASEDPRERDRLKTVYHQLYSKLTVERAFMQRTMAVALLRFVYGTSPAEPERHCGVGELLEICGSIINGFVVPLKEEHRAFMARMLLPLHRTRWXGGAAHRRARGDRRDPRPAPLRQARRXLSAPGLPAASAAAAHRLRQPAPLPISLPDRIPPSP

SEQ ID NO: 199043 - protein, 97 aa, Oryza sativa
  Clone ID: PAT_MRT4530_94645C.1.pep
PFFCVFQTCPHLMDQFSLLLYQMKNCRYCQAYNHGRNRRKYAALQIIVQGVLRQVNRFHGFYNGQVYCHVGTADNCTVPRHMCRMICSSVFIVLSWC

SEQ ID NO: 199044 - protein, 534 aa, Oryza sativa
  Clone ID: PAT_MRT4530_94646C.1.pep
MGNSCQNGTYGNNYQNSNRFQNDRFASRYVDGNDTEDCYSGSSRASLAGALRQGLNLKSPVLGYKTPNVRELYTLGRELGQGQFGKTYLCTEISTGCQYACKTILKSNLRCVSDIEDVRREIQIMHHLSGQKNIVTIKDTYEDEQAVHIVMELCAGGELFSKIQKRGHYSERKAAELIKIIVGIIETCHSHGVMHRDLKPENFLLLDADDEFSVKAIDFGLSVFFRPGQVFREVVGSPYYIAPEVLEKRYGPEADIWTAGVILYVLLTGVPPFWADTQSGIYEKVLDGRIDFKSNRWPRISDSAKDLIKKMLCPYPSERLKAHEVLKHPWICDNGVATNRALDPSVLPRLKQFSAMNRLKKLSLQIIAERLSEEEIVGLREMFKAMDTKNRSVVTFGELKGLKRYSSVFKDTEINDLMEAADDTTSTINWEEFIAAAVSLNKIEREKHLMAAFTYFDKDGSGFITVDKLQKACMERNMEDTFLEEMILEVDQNNDGQIDYAEFVTMMQSNNFGLGWQTVESSLNVALREAPQVY

SEQ ID NO: 199045 - protein, 91 aa, Oryza sativa
  Clone ID: PAT_MRT4530_94647C.1.pep
HVLTVSVVCRLHSSSSNEPVYFEVVFEVPSAQHCTCLSNRCSDPAYSHPRCFSVKFAMFYYAMWNGVSQYPAYVSPDSLIAYHHNCAKSLA

SEQ ID NO: 199046 - protein, 850 aa, Oryza sativa
  Clone ID: PAT_MRT4530_94648C.1.pep
MTWLVTTGRRDAIRGRVVLHRWMRMDGAGPPGDGGAGQDGRRQLVPASGQCRRPPTRRRPRRRPTCSTTRTLRNHVDRSFLAGLVALFAFEDSRERDRLKYVYHQLYSKLTVERAFMQRIMAAALLRFVYDTSPEEAERHCGVGELLEICGSIINGFAVPLKEEHRAFMAPSVARDIFLRHWPATKCQKEVLLIDELEEIVEIHCLLPDCPLRQQLQLTAWTSHLSRNPPIAHSDSSSAYPSPSVTPPPACLLRSRFLPATLSTSTCDRRQHPHCLLLRCRSSLPGLLLLLPAVDAYSSAHPPHALTTCLLHPPTTAAADTSDGNPAPVPVPLPPALLASLAPPIEAEAASVKWFFQEEIFGGDFGAGSLWVGDCELIYIFVGMGNSCQNGTYGNNYQNSNRFQNDRFASRYVDGNDTEDCYSGSSRASLAGALRQGLNLKSPVLGYKTPNVRELYTLGRELGQGQFGKTYLCTEISTGCQYACKTILKSNLRCVSDIEDVRREIQIMHHLSGQKNIVTIKDTYEDEQAVHIVMELCAGGELFSKIQKRGHYSERKAAELIKIIVGIIETCHSHGVMHRDLKPENFLLLDADDEFSVKAIDFGLSVFFRPEVLEKRYGPEADIWTAGVILYVLLTGVPPFWAEHPWICDNGVATNRALDPSVLPRLKQFSAMNRLKKLSLQIIAERLSEEEIVGLREMFKAMDTKNRSVVTFGELKGLKRYSSVFKDTEINDLMEAADDTTSTINWEEFIAAAVSLNKIEREKHLMAAFTYFDKDGSGFITVDKLQKACMERNMEDTFLEEMILEVDQNNDGQIDYAEFVTMMQSNNFGLGWQTVESSLNVALREAPQVY

SEQ ID NO: 199047 - protein, 318 aa, Oryza sativa
  unsure (1)..(318): unsure at all Xaa locations
  Clone ID: PAT_MRT4530_94649C.1.pep
RGEREEAAAAGARPPGDGGAGQDGRRQLVPASGQCRRPPTRRRSRRRPTCSTTRSPXWCCSRRSWPHLHLVYDVLTAAVAAADTRTLRNHVDRSFLVGLVALFASEDPRERDRLKTVYHQLYSKLTVERAFMQRTMAVALLRFVYGTSPAEPERHCGVGELLEICGSIINGFVVPLKEEHRAFMARMLLPLHRTRWVHTCHRQLSYCGSIRRPGHLPPPLVGDQLPEGGAAHRRARGDRRDPRPAPLRQARRXLSAPGLPAASAAAAHRFVCFFLRPSRHSPVRSPTVSRRCCGRRRMEAAPAQGGAAAWPSASRRRS

SEQ ID NO: 199048 - protein, 34 aa, Oryza sativa
  Clone ID: PAT_MRT4530_9464C.1.pep
LGTSRSEGFFKKKQSTRLGELHGSRGATAWAERV

SEQ ID NO: 199049 - protein, 365 aa, Oryza sativa
  Clone ID: PAT_MRT4530_94650C.1.pep
MGASGSKLEKALGDQFPEGERYFGLENFGNTCYCNSVLQALYFCIPFREKLLEYYANNKTPGDAEENLLTCLADLFMQVSQSKKKTGVIAPKRFVQRVKKQNELFRSYMHQDAHEFLNFLLNELVDILEKESNAAKDSPQSSSPEKVPNGPVQPLANGVRKEPPVTLVHKNFQGILTNETRCLRCETVTARDETFFDLSVDIEQNSSITSCLKNFCSTETLNAEDKFFCDKCCSLQEAQKRMKIKKAPHILVIHLKRFKYIEQLGRYKKLSYRVVFPMELKLSTSDDVDTEYSLFAVVVHVGSGPNHGHYVSLVKSHNHWLFFDDENVEMVEESTLQTFFGSSHEYSGNTDHGYILFYEGLGGKS

SEQ ID NO: 199050 - protein, 95 aa, Oryza sativa
  unsure (1)..(95): unsure at all Xaa locations
  Clone ID: PAT_MRT4530_94651C.1.pep
MASERPMPDASLLLPTLSLLPPTXPEPPIRAERLAFSLEVPDPFRREPDPSAVSQREVEEEEEEEGGSEEESRAVVVREPSSAARSGRARRGGPP

SEQ ID NO: 199051 - protein, 110 aa, Oryza sativa
  Clone ID: PAT_MRT4530_94652C.1.pep
MALALLCCLPSRLLEPIRHRLEIGSVYYSKADGVIFIIAIQINATSMDWKVLLLGICVTARSSEERDAADELLQSMNWSAVRSNILVDDTNAKHSLPPQTVPGQQRRSAV

SEQ ID NO: 199052 - protein, 373 aa, Oryza sativa
  Clone ID: PAT_MRT4530_94653C.1.pep
MEGRPGRRRRRRVKAPTRAAGMDWISGLPDEILHHIMSFLNARQAVQTCVLSRRWSDLWRTVPCINADFNEFDFIDYQGDDEDYNDEVAFKRFVNRMLELRDPATMMDKFWLKYKISDGYNEYKDSNVDANRWISHALQKQARVMEVVVFSFPLELDHSVFTSCYLRKIGFSCVSLHQGFFKQLDAGCPELEELFLHDCTIADEEIFSQSLKVLTIDDTEFSKANKAYISIPSVTSLTLSSPENSTPMLKDMALLTTTSVSVKFYTFSYGFDANDLRQCLWSLSGVTNLELNYEGTELTFENNLQWCPEFINVVNLTLGQWCLDANFYALIVFLQNSARLEKLTLNLAKFHIKHWGQYEEEDELPAFVRYEER

SEQ ID NO: 199053 - protein, 105 aa, Oryza sativa
  Clone ID: PAT_MRT4530_94654C.1.pep
MARQLDKEESVSEFLVPQLGSEFLAYKEAIGQSSSPRAPIMPGPSPAAAEKLPWRTSVEWSSGWAISTRNGNGVLGLISGASVRKALVPSGCVGGWPLPHVSHRR

SEQ ID NO: 199054 - protein, 948 aa, Oryza sativa
  Clone ID: PAT_MRT4530_94655C.1.pep
MKRSGDIASLFGNHEAKTMEIPESSSSSNVFIGDEAPVPEEEPRQVPTDAFPRAPPVRRNASSVSATMDRRPGRHKLRRVKAHVRAARMDRISGLPDKILHHIMSFLNTRQAVQTCVLSRRWRNLWRTMPCINADFDEFDFIAYQGDDEDYNDEVAFKRFVNQMLELRDPTAMIDTFWLSYIIWDGYNEYKDSNVDANRWISHALQKQARVIEVVVFAFPLELDHSVFTSCYLRKIGFSCVSLHQGFFKQLDTGCPALEELFLHDCIIADEEILSQSLKVLTIDGTEFSMANKASISIPSVTSLTLSIEDSTPMLKDMELLTTASVSVKFNTFIFSYGFDANDLRQCLWSLSGVTNLEFNYEGTELTFENNLQWCPEFIDVVNLTLGQWCLDANFYALIVFLQNSPRLEKLTLNLAKCIADKSPRIVGELMERSFTCEHLKIVEVKCLEDDPQVISVEDFFASNGMASVQFDIKHWGQYKDELPAFIRHHKSYIPEIKRHPVIFHMAIKVPHAHHLFDETPLRAWPPWRGVLAVARRKVKTPAHAAGMDWISDLPDEILHRIMSFLNARQAVQTCVLSRRWRNLWRTVPCINADCKEFDFFGFRRSEVEFKRFVNRLLELRDPIAMMDAFWFRYHKLDTDTTSSADTNRWISHALQKQARVLEAVMYPCHLLDLDHSSFTSRYLRRIGFSGVRLDQGFFKQLEAGCPALEDLFLHHCTIEDDKISSQTLKVLTIDRTYFLIAINATDVQKKSISAPSVTSLTMYSPEGSLHILKDMTSLVTASVSFSEFRVHFDANDFYQYLWSLSGVTNLEFNYQGPKLKIENNLQWCPEFVNVVNLTLGKWCLDANFYALTVFLQNSPKLQKLTLKLAKCTSEIHQRIIGELTERSFTCEHLKIIEVICLENDPQVIRVKDFFASSGITSVQFHIKHWSQYEEEDELPAFVRYEER

SEQ ID NO: 199055 - protein, 50 aa, Oryza sativa
  unsure (1)..(50): unsure at all Xaa locations
  Clone ID: PAT_MRT4530_94656C.1.pep
KITSEDEMLANQFMEGGRSAQRTSXGRAGNFRXRLPAGVARLSRIGSSRI

SEQ ID NO: 199056 - protein, 43 aa, Oryza sativa
  Clone ID: PAT_MRT4530_94657C.1.pep
QRKRQSSFHELNGSPSHLQRPNHFLYYTIKGYKGCLGYVSLFR

SEQ ID NO: 199057 - protein, 92 aa, Oryza sativa
  Clone ID: PAT_MRT4530_94658C.1.pep
PPDPPSSLVLVQWRQRLGISYLEKVNDLSAKFESSGARLFDVAMYIGCLPTLHEAKNISSTTNRRHRNQEFGGRQWSNREKGRHARNRVWCN

SEQ ID NO: 199058 - protein, 622 aa, Oryza sativa
  unsure (1)..(622): unsure at all Xaa locations
  Clone ID: PAT_MRT4530_94659C.1.pep
MADEPLDAAAAAAEAETPATAAAAAAASPALLLRPRRVAFEHGLLPIPKLVFPEGTLTQTLAQTKERLIAAAGGDGDASAAPRVGAAALAEALQIPRELAALVLGTLAAVLPAEEDAEDADLRDVLLLLYMQSQQRLVALAHKELAAVTAVWPAAEDADGYDFPLFLILRYFXFSIPLGLFDVVEWTAVVGLETPRLGCRALLSTLFHDSLVRSNSRRFMPSQADEEAHQLSYLQKHMVNILSLLADSVDGEGDESMVLTAETFEHLGFLFQFSEGTPLSQVATFFANSDPDMPAAPVPAAQVHDWILQNIAASLENTAEKLTAKENSQQSASDPDVTMAEAVTNSRIHSSSPTGTAVPNNQGHYRNTTFLEGFSKTSVVKQASDIKGHSIKVLNCHDSVIYILAPVKYATVYGCSDTTIVLGAVGKVVKVEHCERVQIIAASKRICIANCRECIFYLGVNHQPLIVGDNHKLQVAPFNTYYPQLGEHLVQVGVDSNINKWDQPFVLGVVDPHDSLSHPAGVSDVQAESATCLDPDLFTNFLIPSWFEAQGPTKYNPFTLPEVYWASQRKKHVSLEDIQKNIRELELDDTRKKELASALHAQFKDWLYASGNIRQLYCLQGE

SEQ ID NO: 199059 - protein, 71 aa, Oryza sativa
  Clone ID: PAT_MRT4530_9465C.1.pep
PWRVQYAASPLPLLTPSPIPPRHPQRPPPPPQLPPPQAASSSPHRDLPSEAPPAAPATQPRPRAAGGGGGG

SEQ ID NO: 199060 - protein, 341 aa, Oryza sativa
  Clone ID: PAT_MRT4530_94660C.1.pep
MEQHQGQAGMDLPPGFRFHPTDEELITHYLAKKVADARFAALAVAEADLNKCEPWDLPSLAKMGEKEWYFFCLKDRKYPTGLRTNRATESGYWKATGKDKDIFRRKALVGMKKTLVFYTGRAPKGEKSGWVMHEYRLHGKLHAAALGFLHGKPASSKVHERTVFKKSLVEVGAAGGKKAAVVTMEMARGGSTSSSVADEIAMSSVVLPPLMDMSGAGAGAVDPATTAHVTCFSNALEGQFFNPTAVHGHGGGDSSPFMASFTQYGQLHHGVSLVQLLESCNGYGGLVDMAASGSQLQPAACGGERERLSASQDTGLTSDVNPEISSSSGQKFDHEAALWGY

SEQ ID NO: 199061 - protein, 129 aa, Oryza sativa
  Clone ID: PAT_MRT4530_94661C.1.pep
KSCTYQERGENIQAAQGGSDRASNPESLQRFSGWEVRCGELGGEGSGQRSQPSQPTAGPYAGGGCKPARLAVRRANKKRKAGRKVAGRPRMAGGTNDRHAGRTLVVARQKKKERKKKRQNNKGGGPRPG

SEQ ID NO: 199062 - protein, 73 aa, Oryza sativa
  unsure (1)..(73): unsure at all Xaa locations
  Clone ID: PAT_MRT4530_94662C.1.pep
GSVQAREICTVGPTCRPLLPPPADGXRRRRNRHRCRRFPRFPRPLRPCRTPTSPPXPAVSRPRARPRMVGFIL

SEQ ID NO: 199063 - protein, 185 aa, Oryza sativa
  Clone ID: PAT_MRT4530_94663C.1.pep
THASALNSTAQPAAEDGTRSSPPNPTRTCSAEHSKRPSRVWSQADELVILRGLITYRTKRGVLPGSTQDIGKLHSYIRGQLSAKVSTTQLSDKVRRLKQKYQMLATRAKTGKEVFPTPHDHNIYQLAKKVWGTMSTAGEGGGSGYDNADAGESEEEQESEISASHYGKWQWDWDRCCECHCEREE

SEQ ID NO: 199064 - protein, 90 aa, Oryza sativa
  unsure (1)..(90): unsure at all Xaa locations
  Clone ID: PAT_MRT4530_94664C.1.pep
IMMYGAAHVXALSSILLCHSLVMHHANIQPHGNGRKSAAFGHHRRGVRRRRVXVSLGARSAXTGALDIAPRRVACTMVHIYSNQQLXIFL

SEQ ID NO: 199065 - protein, 109 aa, Oryza sativa
  Clone ID: PAT_MRT4530_94665C.1.pep
DGSVYIEIGRLIRAPARSPLRVTEPDKSRITYPDSMPFSCTGFFGMFPKQKKSKFPAVKQNNKRRLHLRKGEEPILRTIRRVRRARAPPALPGKARRVSERARVPPLLS

SEQ ID NO: 199066 - protein, 192 aa, Oryza sativa
  Clone ID: PAT_MRT4530_94666C.1.pep
MDPPPRRSAGGSEPRAKRPRSAAVASSAEHSKRPSRVWSQADELVILRGLITYRTKRGVLPGSTQDIGKLHSYIRGQLSAKVSTTQLSDKVRRLKQKYQMLATRAKTGKEVFPTPHDHNIYQLAKKVWGTMSTAGEGGGSGYDNADAGESEEEQYGRESDDDMEKSEISASHYGKWQWDWDRCCECHCEREE

SEQ ID NO: 199067 - protein, 242 aa, Oryza sativa
  Clone ID: PAT_MRT4530_94667C.1.pep
MVARLAWGSLWAVYVCVVLCSILVMAFLGGGLLVGKVVEEPIQVTETLNFDYTKPSPVAFVPVQRLVPPNQRMQLEVFLTLPESDYNRRLGVFQVRAEFLSADGKVISTSSQPCMLKFKSAHMHFIETFLRSVSLLSGYSSESQVIRLKMRGITEASEPVMGIRIILEQRAEFSPGAGIPEIYAASLKLEAELPLLKRILWNWRWTLFVWSSMGFFVFELLLALICCRPCIFPRSGHNAATP

SEQ ID NO: 199068 - protein, 848 aa, Oryza sativa
  Clone ID: PAT_MRT4530_94668C.1.pep
MALSASAAASAGRGARAEKVGRIFERFDANGDGGLDRDEMAALVVAVNPRVKFSEDQISAILDEVFRTYAEFILPGGRGLSLPGLLRTYDDGAGDVDRDFLALSLPPLESGESSPEIAAGDPAAASSPPSGAAAAASLLDDHIKPLGAAGGAPSSSSRAAAAAPAWATSPSHGIAFDSSWALLDDLEILVKRLRSKQLRRTSSIDTINGSGGAGNNNFDSFSEAGWSREISGQADSASTAAPWDETSRDYLTFVKELAVLRTRADASRSREEAFDNHMVIGRALSEHRLFRDALSSFRRACELQPTDVRPHFRAGNCLYALGRHSEAKEEYLLALEAAEAGGSQSADILPQIHVNLGIAMEAEGMVLGACEHYREAAILCPSHARALKLLGSALFGVGEYRAAEKALEEAIFLKPDYADAHCDLGSALHAIGDDDRAVQEFQKAIDLKPGHVDALYNLGGLNMDAGRFVRAAEMYTRVLSIRPNHWRAQLNKAVALLGQGESEEAKKALKEAFKMTQRVEVYDAISHLKTLQKKKPKPPKGKDDSQGEEAFVVVEPSKFKRVGRKTTLRQDLANALDIRAFEKTTKLGRCDAELLRKEMNETDVPISYSGAGNPEKSIRKAALEVILHRLLSFLKPDTFQGSVKAINERILSVLDASGSGRVDLGMFFAIIAPICSGPVDKRKRVVFDALLWRPASEGSRGQIRRSDALSYIKLLRAVYIPTHGASDMLEMHGESDPTMVSYTEFLEMFNDPDWGFGILSTLVKLEDSDHIRHGRHTCSICRYPIIGSRFKETKHSFSLCNRCYSEGKVPSAFKLDEYRFKEYGNESEALIDKCMCFNLHSKKLEADT

SEQ ID NO: 199069 - protein, 76 aa, Oryza sativa
  Clone ID: PAT_MRT4530_94669C.1.pep
TNYSLVAAVGRRVPAAPSGAQRRGWRRPAAEWWRRTAAGVVAANGGEVVALTAVPSDAWRLEGSIDREKRKHLPLI

SEQ ID NO: 199070 - protein, 171 aa, Oryza sativa
  unsure (1)..(171): unsure at all Xaa locations
  Clone ID: PAT_MRT4530_9466C.1.pep
MSGKDQKKAAALEEKLELYVLLQSQVRYESIVIEFSAAANETSILVDASKYIKELKDKVSQEPEQLGSTSSSMPMPRVSVSSVELEKKIGFRINVSMEKSQPELLTSVLEAFEELGLDVLDATXSCADDTAFRLEALGSSQSEAAERSVDEQMVRHAVLQAIKKCMDGSSI

SEQ ID NO: 199071 - protein, 985 aa, Oryza sativa
  unsure (1)..(985): unsure at all Xaa locations
  Clone ID: PAT_MRT4530_94670C.1.pep
EELDSSAFQYHPHKPHGQDYGTYTCPDGEESATLMHAVHMLSAMDAVSVERAKAAHDRENWNRGKICKLESKVYRLQKELAELKGETPPPTPKLRLTARKRTCPPPRLQLASKIRVMGEAVPDRAEPVIDIISDEEEEEDPEEREPATPEEEDPSLRSDARRTTNPVEAGDWLHAVEKKLDLIQCTEQEKVSFASHQLHGPAAEWWDHFRQGRAEGEPITWQEFTAAFKKTHIPTGVVALKKREFRALNQGSRSVTEYLHDFNRLARYAPEDVRTDEERQEKFLEGLNDELSYALMSTDFRDFQQLVDKAIRQEDKYNRMEQKKRRAAQFKAQQGSNQRPRLVTGPQAPSYPQGGSSSVVRPQRQFYNNNTGNRGNDNRNMVARPAATPAQNQPVRKEQGSKPGVCFNCGDPGHYADKCPKPRRVKNAPAPNNSNAPAPKARVNHVAAAEAQNAPDVVLGTFPVNSIPASVLFDSGATHSFLSKSFASNHGMEVISLGRPLLVNTPGNQVFSTQYCPSATIEIEEVPFPSSLILLESKDLDVILGMDWLSRHRGVIDCANRKVTLTNSNGETVSFFVSSPKSHGVILNQVALQEIPIVQDYPDVFPEDLPGMPPKRDIEFRIDLVPGTNPIHKRPYRMAANELAEVKRQVDDLLQKGYIRPSTSPWGAPVIFVEKKDHTXRMCVDYRALNEVTIKNKYPLPRIDDLFDQLEGATVFSKIDLRSGYYXLRIREEDIPKTAFTTRYGLFECTVMSFGLTNAPAFFMNLMNKVFMEYLDKFVVVFIDDILIYSKTKEEHEEHLRLALEKLREHQLYAKFSKCEFWLSEVKFLGHVISSGGVAVDPSNVESVLSWKQPKTVSEIRSFLGLAGYYRRFIENFSKIARPMTRLLQKEVKYKWTEDCEQSFQELKKRLVTAPVLILPDSRKGFQVYCDASRLGLGCVLMQEGKVVAYASRQLRPHENNYPTHDLELAAVVHALKIWRNHTFA

SEQ ID NO: 199072 - protein, 134 aa, Oryza sativa
  Clone ID: PAT_MRT4530_94671C.1.pep
MELLLSAHCNPKVQQICSREDSICTYLLIIVEVWSGPLVPWFFTPHINEVFHVNHRVPLAASSPELCQKSAGDPSDSHLEPPPEQASAPHQVIKDFRGGEQDEAAQMVFYIFTIVVPLSLLNPHQPTAWLVSAV

SEQ ID NO: 199073 - protein, 1990 aa, Oryza sativa
  unsure (1)..(1990): unsure at all Xaa locations
  Clone ID: PAT_MRT4530_94672C.1.pep
VTSWYQSHLDLRISQMMPPHSPRNLIKVLGFVRELRLMAFEVGYEVAPEYRRISHDPNEEKCRVRVTLASDREDLPSIKFEAGGRSYSHACQEAALVAIGELRQRFEEELDSSAFQYHPHKPHGQDYGTYTCPDGEESATLMHAVHMLSAMDAVSVERDKAAHDRENWNRGKICKLESKVYRLQKELVELKGETPPPTPKLRLIARKRTCPPPRLQLALKIRVMGEAVPDRAEPVIDIISDEEEEEDPEEREPATPEEEDPSLRSDARRTTNPVEAGDWLHAVEKKLDLIQCTEQEKVYFASHQLHGPAAEWWDHFRQGRAEGEPITWQEFMAAFKKTHIPTGVVALKKREFRALNQGSRSVTEYLHDFNRLARYAPEDVRTDEERQEKFLEGLNDELSYALMSTDFRDFQQLVDKAIRQEDKYNRMEQKKRRAAQFKAQQGSNQRPRLVTGPQAPSYPQGGSSSVIRPQRQFYNNNIGNRGNDNRNMVARPTATLAQNQPVRKEQGSKPGVCFNCGDPGHYADKCPKPRRVKNAPASNNSSVPAPKARVNHVAAAEAQNAPDVVLGTFPVNSIPASMLFDSGATHSFLSKSFASNHGMEVISLGRPLLVNPPGNQVSSTQYCPSATIEIEKVPFPSSLILLESKDLDIILGMDWLSRHRGVIDCANRKVTLTSSNGETVSFFVSSPKYHGVILNQVALQEIPIVQDYPDVFPEDLPGMPPKRDIEFRIDLVPGTNPIHKRPYRMAANELAEVKRQVDDLLQKGYIRPSTSPWGAPVIFVEKKDHTQRMCVDYRALNEVTIKNKYPLPRIDDLFDQLEGATVFSKIDLRSGYHQLRIREEDIPKTAFTTRYGLFECTVMSFGLTNAPAFFMNLMNKVFMEYLDKFVVVFIDDILIYSKTKEEHEEHLRLALEKLREHQLYAKFSKCEFWLSEVKFLGHVISSGGVAVDPSNVESVLSWKQPKTVSEIRSFLGLAGYYRRFIENFSKIARPMTRLLQKEVKYKWTEDCEQSFQELKKRLATAPVLILPDSRKGFQVYCDESRLGLGCVLMQEGKVVAYASRQLRPHENNYPTHDLELAAVVHALKIWRHYLFGNRTEMYTDHKSLKYIFTQPDLNMRQRRWLELIKDYDMEIHYHPGKANVVADALSRKSYCNMSEGRHLPWELCQEFEKLNLDIVSKGFVATLEAQPTLFDQVREAQVNDPDIQEIKKNMRRGKAIGYVEDEQGTVWLGERICVPDNKELKDTIMKEAHETLYSIHPGSIKMYQDLKQQFWWASMRREIEEYVALCDVCQRVKAEHQKPAGLLQPLKIPEWKWEEIGMDFITGLPRTSAGHDSIWVVVDRLTKLAHFIPVKTTYTGNKLAELYMARVVCLHGVPKKIVSDRGSQFTSKFWQKLQVEMGTRLNFSTAYHPQTDGQTERVNQILEDMLRACVLDFGGSWDKNLRSKREEYQESRYTVLQVAIYFAPCPPKCLSDSSSALFWEFRWLAAPAVQLVHQPTLVLKMVESSQKKIMSQPMSSLNTATVRTVLLPATQKLSNPAVATARIAQLPVMQXGTVSPLSPLCQSQFWRRTPPFPTSCGKQHEALNGSSDTNLARISRHRQEEDQEILERDRSWNETPVACXDFPTFQHMINNIRKDFEIFCDASRQGLGCVLMQERKVVAYASRQLRPHEVNYPTHDLELAAVVHALKIWRHYLIGNRCEVYTDHKSLKYIFTQTELNMRQRRWLELIKDYDLGIHYHPGKANVVADALSRKAYCNVAQIRPDQDRLCRXMEKLRLTVVQSGVPASLTVQPTLESQIREAQKDDEGIKELIKRIQEKKDTNFSIDDQGTVWCGPRICVPAKKELRDLILKEAHESAYSIHPGSTKMYQDIKAYFWWAGMKRDVTEYVALCDICQRVKAEHQRPAGLLQPLPIPERKWEEIGMDFITGLPRTPSGYDSIWVIVDRLTKSAHFMPVKTTFDGKELAEKTIKFYKVQWSNHSEDEATWEREDLL

SEQ ID NO: 199074 - protein, 679 aa, Oryza sativa
  Clone ID: PAT_MRT4530_94673C.1.pep
MGVAGESIASGFEGEIMIQERCTVMPPHSPRNLIKVLGFVRELRLMAFEYHPHKPHGQDYGTYTYPDGEESATLMQAVHMLSSMYAVSVERDKAAHDRENWNRGKICKLESKVYRLQKELAELKGETPPPTPKLHLTARKRTCPPPRLQLASKLRVMGDAVPDRAEPVIHVLSDEEEEEYPEERMVNTRTGSGSGAANNGGDSTLAQILAQQTQLINLLVQQAQNQQANNQNQNQPPPPQNKLADFLRLHGPAAEWWDHFRQARAEGEPITWQEFTAAFKNTHIMTGVVALKKREFRALNQGSRSVTEYLHDFNRLARYAPKYVRTDEERQEKFLEGLNDELSYALMSTDFRDFQQLVDKAIRQEDKYNRIEQKKRRAAQFKAQQGSNQRSRLVTGPQATSYPQGGSSSVARPQRQFYNNNTGNRGNDNRNVVARPAATPAKNQPVRKEQGSKPGVCFNCGDPGHYADKCPKPRRVKNAPAPNNSNTPAPKARVNHVVAAEAQNAPDVVLDLDVILGMDWLSRHRGVIDCANRKVTLTSSNGETVSFFVSSPKYHGVILNQVALQEIPIVQDYPDVFPEDLPGMPPKRDIEFRIYLVPGTNPIHKRPYRMAANELAEVKRQVGDFLQKGYIRPSTSPWGAPVIFVEKKDHTQRMCVDYSEEFSGAIIQKKKPLGSEKMN

SEQ ID NO: 199075 - protein, 56 aa, Oryza sativa
  Clone ID: PAT_MRT4530_94674C.1.pep
RGPLATTEGRLPRDQFRAGYHGPPIEKSKRLNLPLGTKVFRCRWTPDHPGAFPRGS

SEQ ID NO: 199076 - protein, 1711 aa, Oryza sativa
  Clone ID: PAT_MRT4530_94675C.1.pep
MMPPHSPRNLIKVLGFVRELRLMAFEVGYEVAPEYRQISHDPDEEKCRVRVTLASDSDDLPSFKFEAGGRSYSHACQEAALVAIGELRQRFEEELDSSAFQYHPHKPHGQDYGTYTCPDGEESATLMHAVHMLSAMDAVSVERDKAAHDRENWNRGKICKLESKVYRLQKELAELKGETPPPTPKHRLTQRKRTCPPPRLQLASKIRVMGEAVPDRAEPVIDIISDEEEEEDPEEREPATPEEEDPSLRSDTRRMVNTRTGSGSGSGSGATNNGGDPTLAQILAQQTQLINLLVQQAQNQQANNQNQNPPPPPQNKLADFLRVRPPTFSSTTNPVEAGDWLHAVEKKLDLIQCTEQEKVSFASHQLHGPAAEWWDHFRQGRAEGEPITWQEFTAAFRKTHIPSGVVALKKREFRALNQGSRSVTEYLHDFNRLARYAPEDVRTDEERQEKFLEGLNDELSYALMSTDFRDFQQLVDKAIRQEDKYNRMEQKKRRAAQFKAQQGSNQRPRLVTGPQVPSYPQGGSSSVVRPQRQFYNNNTSNRGNDNRNVVARPAATSAQNQPVRKEQGSKPVICFNCGDPGHYADKCPKPRRVKNAPAPNNSNVPAPKARVNHVAAAEAQNAPDVVLGTFPVNSIPATVLFDSGATHSFLSKSFTSNHGMEVISLERPLLVNTPGNQVFSTQYCPSATIEIEEVPFPSSLILLESKDLDVILGMDWLSCHRGVIDCANRKVTLTSSNGETVSFFMSSPKSHGVILNQVALQEIPIVQDYPDVFPEDLPGMPPKREIEFRIDLVPGTNPIHKRPYRMAANELVEVKRQVEDLLQKGYIRPSTSPWGAPVIFVEKKDHTQRMCVDYRALNEVTIKNKYPLPRIDDLFDQLEGATVFSKIDLRSGYHQLRIREEDIPKTAFTTRYGLFECTVMSFGLTNAPAFFMNLMNKVFMEYLDKLVVVFIDDILIYSKTKEEHEEHLRLALEKLREHQLYAKFSKCEFWLSEVKFLGHVISSGGVAVDPSNVESVLSWKQPKTVSEIRSFLGLAGYYRRFIENFSKIARPMTRLLQKEVKYKWTEDCEQSFQELKKRLATALVLILPDSRKGFQVYCDASRLGLGCVLMQEGKVVAYASRQLRPHENNYPTHDLELAAVVHALKIWRHYLFGNRTEVYTDHKSLKYIFTQPDLNMRQRRWLELIKDYDMEIYYHPGKANVVADALSRKSYCNMSEGRRLPWELCQEFEKLNLGIVSNGFVAALEAKPTLFDQVREAQVNDPDIQEIKKNMRRGKAIGYVEDEQGTVWLGERICVPENKELKDTIMKEAHETLYSIHPGSTKMYQDLKQQFWWASMRREIAEYVALCDVCQRVKAEHQKPAGLLQPLKIPEWKWEEIGMDFITGLPRTSAGHDSIWVVVDRLTKVAHFIPVKTTYTGNKLAELYMARVKLQVEMGTRLNFSTAYHPQTDGQTERVNQILEDMLRACVLDFGGSWDKNLPYAEFSYNNSYQASMQMAPYEALYGRKCRTPLLWDQTGERQVFGTDILREAEEKVKIIQERLRVAQSRQKSYADNRRRDLAFEEGDYVYLRVTPLRGVHRFQTKEKLAPRFVGPFKIVSRRGEVAYQLELPPSMAGIHDVFHVSQLKKCLRVPTEEADPDRIELQEDLTYVEKPVRILEVSERNTRNRVIRFCKVQWSNHSEEEATWEREDELKSAHPHLFASSSESRGRDSV

SEQ ID NO: 199077 - protein, 1607 aa, Oryza sativa
  unsure (1)..(1607): unsure at all Xaa locations
  Clone ID: PAT_MRT4530_94676C.1.pep
MMPPHSPRNLIEVLGFIRELRLMAFEVGYEVAPEYRQISHDPDEEKCRVRVMLASDREDLPSFKFEAGGRSYCHACQEVALVAIGELRQRFEEELDSSAFQYHPHKPHGQDYGTYTCPDGEESATLMHVVHMLSAMDAVSVERDKAAHDRENWNRGKICKLESKVYRLQKELSELKGETPPPTPKLRLVARKRTCPPPRLQLASKIRVMGEAVPDRAEPVIDIISDEEEEEDPEEREPATPEEEDPSLRSDARXIMQQAQNQQANNQNQNPPXPPQNKLADFLRVRPPTFSSTTNPVEAGDWLHAVEKKLDLIQCTEQEKVSFASHQLHGPAAEWWDHFRQGRAGGEPITWQEFTAAFKKTHIPTGVVALKKREFRALNQGSRSVTEYLHDFNRLARYAPEDVRTDEERQEKFLEGLNDELSYALMSTDFRDFQQLVDKAIRQEDKYNRMEQKKRRAAQFKAQQGSNQRPRLVTGPQAPSYPQGGSSSVVRPQRQFYNNNTGNRGNDNRNMVARPAATSVQNQPVRKEQGSKPGVCFNCGDPGHYADKCPKPRRVKNAPTPNNSNVPAPKARVNHVAAAEAQNAPDVVLGTFPVNSIPATVLFDSGATHSFLSKSFASNHGMEVVSLGRPLLVNTPGNQVFSTQYCPSVTIEIEEVPFPSSLILLECKDLDVILGMDWLSRHRGVIDCANRKVTLTSSNGETVSFFVSSPKYHGVILNQVALQEIPIVQDYPDVFPEDLPGMPPKREIEFRIDLVPGTNPFHKRSYRMAANELAEVKKQVDDLLQKGYIRPSTSPWGAPVIFVEKKDHTQRMCVDYRALNEVTIKNKYPLPRIDDLFDQLEGATVFSEIDLRSGYHQLRIREEDIPKTAFTTRYGLFECTVMSFGLTNALAFFMNLMNKVFMEYLDKFVVVFIDDILIYSKTKEEHEEHLRLALEKLREHQLYAKFSKCEFWLSEVKFLGQVISSGGVAVDPSNVESVLSWKQPKTVSEIRSFLGLAGYYRRFIENFSKIARPMTRLLQKEVKYKWTEDCEQSFQELKKRLVTAPVLILPDSRKGFQVYCDASRLGLGCVLMQEGKVVAYASRQLRPHENNYPTHDLELAAVVHALKIWRHYLFGNRTEIYTDHKSLKYIFTQPDLNMRQRRWLELIKDYDMEIHYHPGKANVVADALSRKSYCNMSEGRRLPWELCQEFERLNLGIVSKGFVAVLEAKPTLFDQVREAQVNDPDIQEIKKNMRRGKAIGFVEDEQGTVWLGERICVPENKELKDTIMKEAHETLYSIHPGSTKMYQDLKQQFWWASMRREIAEYVALCDVCQRVKAEHQKPAGLLQPLKIPEWKWEEIGMDFITGLPRTSAGHDSIWVVVDRLTKVAHFIPVKTTYTGNKLAELYMARVVCLHGVPKKIVSDRGSQFTSKFWQKLQSELDTRLNFSTAYHPQTDDILREAEEKVKIIQERLRVAQSRQKSYADNRRRDLAFEEGDYVYLRVTPLRGVHRFQTKGKLAPRFVGPFKIVSRRGEVAYQLELPPSMAGIHDVFHVSQLKKCLRVPTEEADPDRIELQEDLTYIEKPVRILEFPTFRRRAFPLRKVPKRLRKPKASHTDPKQPFEHVEPI

SEQ ID NO: 199078 - protein, 83 aa, Oryza sativa
  Clone ID: PAT_MRT4530_94677C.1.pep
VGRNKGLRQGQAAQAVDFRCNQASGISIDCCRRSRCRQCEPCSVSVPESSMSTTLLRVFSEWSASVDFHGRAMHLILFHLISL

SEQ ID NO: 199079 - protein, 1458 aa, Oryza sativa
  Clone ID: PAT_MRT4530_94678C.1.pep
MPKMVVEVADRYTARRDGRPNNSGEADGEVRGDVPAKPRAGRGGGRCGVAEGGDGDVGRRSGAATGAAGGDVDEEEGEAGAGDGVPAKFGRGGGDAGEEGDAAVSKEETAASIGAPAMNSSRLEGVQWHQCHWLPAGAPFRRVSGEETMPPHSPRNLIKVLGFVRELRLMAFEVGYEVAPEYRRISHDPNEEKCRVRVTLASDREDLPSIKFEAGGRSYSHACQEAALVAIGELRQRFEEELDSSAFYAMDAVSVERDKAAHDRENWNRGKICKLESKLASKIRVMGEVVPDRAEPVIDIMVNTRTGSGSGAANNGGDPTLAQILAQQTQLINLLVQQAQNQQANNQNQNPPPPPQNKLADFLRVRPPTFSSTTNPVEAGDWLHAVEKKLDLIQCTEQEKVSFASHQLHGPAAEWWDHFRQGRAEGEPITWQEFTAAFKKTHIPTGVVALKKREFRALNQGSRSVTEYLHDFNRLARYAPEDIRTDEERQEKFLEGLNDELSYALMSTDFRDFQQLVDKAIRQEDKYNRMEQKKRRAAQFKAQQGSNQRPRLVTGPQAPSYPQGGSSSVVRPQRQFYDNNTGNRGNDNRNMVARPAATPAQNQPVRKEQGSKPGVCFNYGDPGHYADKCPKPRRVKNAPAPNNSNAPAPKARVNHVAAAEAQNAPDVVLEIEEVPFPSSLILLESKDLDVILGMDWLSRHRGVIDCANRKVTLTSSNGETVSFFVSSPKYHGVFLNQVALQEIPIVQDYPDVFPEDLLGMPPKRDIEFRIDLVPGTNPIHKRPYRMAANELAEVKRQVDDLLQKGYIRPSTSPWGAPVIFVEKKDHTQRMCVDYRALNEVTIKNKYPLPRIDDLFDQLEGATVFSKIDLRSGYHQLRIREEDIPKTAFTTRYGLFECTVMSFGLTNAPAFFMNLMNKVFMEYLDKFVVVFIDDILIYSKTKEEHEEHLRLALEKLREHQLYAKFSKCEFWLSEVKFLGHVISSGGVAVDPSNVESVLSWKQPKTVQKFRSFLDLAGSEVQVDRDCEQSFQELKKRLVTAPVLFLPDSRKSFQVYCDASRLGLGCVLMQEGKVVAYASRQLRPHENNYPTHDLELAAVVHALKIWRHYLFGNRTEMYTDHKSLKYIFTQPDLNMRQRRWLELIKDYDMEIHYHPGKANVVADALSRKSYCNMSEGRHLPWELCQEFEKLNLDIVSKGFVATLEAQPTLFDQVREAQVNDPDIQEIKKNMRRGKAIGYVVDEQGTVWLGERICVPDNKELKDTIMKEAHETLYSIHPGSTKMYQDLKQQFWWASMRREIAEYVALCDVCQRVKAEHQKPAGLLQPLKIPEWKWEEIGMDFITGLPRTSAGHDSIWVVVDRLTKVAHFIPVKTTYTGNKLAELYMARVVCLHGVPKKIVSDRGSQFTSKFWQKLQVEMGTRLNFSTAYHPQTDCHARKFTSNFRTYLCIKSSSRNQPRYTN

SEQ ID NO: 199080 - protein, 185 aa, Oryza sativa
  Clone ID: PAT_MRT4530_94679C.1.pep
MSHLSLLTFKYNLEKLKSKAAGRPTGRLLSGGDRQFSDLTRIYKPDDDEMKKVFNKIAGEHDRITRKDLKGLLEKFGKADAAAEARRMICVADFKKNGYMDFEEFMEVHKSGVPLGDMRRAFFVFDQDGDGRISAEEVMQVLHKLGDSCSLEDCREMVKKIDRNRDGFVDMDDFMAMMTRSRKKP

SEQ ID NO: 199081 - protein, 52 aa, Oryza sativa
  Clone ID: PAT_MRT4530_9467C.1.pep
SSCEHQLELSSYFLLPGPTRNSVFFQVFFFLMKLDLQNTSFSGFLLLSLYSQ

SEQ ID NO: 199082 - protein, 328 aa, Oryza sativa
  unsure (1)..(328): unsure at all Xaa locations
  Clone ID: PAT_MRT4530_94680C.1.pep
GPAAEWWDHFRQGRAEGEPITWQEFTAAFKKTHIPXEKFLEGLNDELSYALMSTDFRDFQQLVDKAIRQEDKYNRMEQKKRRAAQFKAQQGSNQRPRLVTGPQAPSYPQVGSSSVVRPQRQFYNNNTGNRGNDNRNMVARPAATSAQNQPVRKEQGSKPVICFNCGDPGHYADKCPKPRRVKNAPAPNNSNVPVPKARVNHVAAVEAQNAPDVVLAFFMNLMNKVFMEYLDKFVVVFIDDILIYSKTKEEHEEHLRLALEKLREHQLYAKFSKSAARLDGDGGAPVVGGEGERAAEIPLTTAHLTAATANGGDGGGDGAAQLEIAGDG

SEQ ID NO: 199083 - protein, 1007 aa, Oryza sativa
  Clone ID: PAT_MRT4530_94681C.1.pep
MHIPAGVVALKKREFRALNQGSRSVTEYLHDFNRLARYAPEDVRTDEERQEKFLEGLNDELSYALMSTDFRDFQQLVDKAIRQEDKYNRMEQKKRRAAQFKAQQGSNQRLRLVVGPQAPPYPQGGSSSVVRPQRQFYNNNTGNRGNDNRNMVARHVATPVQNQPVRKEQGSKPGVCLNCGDPGHYDDKCPKPRRVKNVPAPNNSNAPAPKARVNHVAAAEAQSAPDVVLANELAEVKRQVDDLLQKGYIRPCTSPWGAPVIFVEKKDHTQRMCVDYRALNEVTIKNKYPLPRIDDLFDQLEGATVFSKIDLRSGYHQLRIREEDIPKTAFTTRYGLFECTVMSFGLTNAPAFFMNLMNKVFMEYLDKFVVVFIDDILIYSKTKEEHEEHLRLALEKLREHQLYAKFSKCEFWLSEVKFLGHVISSGGVAVDPSNVESVLSWKQPKTVSEIRSFLGLAGYYRRFIENFSKIARPMTRLLQKEVKYKWTEDYYDMEIHYHPGKANVVADALRRKSYCNMSEGRRLPWELCQEFEKLNLGIVSNGFVAALEAKPTLFDQVREAQVNDPDILEIKKNMRRGKAIGFVEDEQGTVWLGERICVPDNKELKDTIMKEAHETLYSIHPGSTKMYQDLKQQFWWASMRREIAEYVALCDVCQRVKAEHQKPAGLLQPLKIPEWKWEEIGMDFITGLPRTSAGHDSIWIVVDRLTKVAHFIPVKTTYTGNKLAELYMARVLKKCLRVPTEEADPDRIELQEDLTYAEKPVRILEVRTEVRKLGRISFVAAGRRSSLPTVSSNHPADRPSSGEVANPSRPVMDDVMLTRAAVPVPLLPLPCAVLAAPPLHRCSLRRYCHCCAAALPRRLPPCCAGRFALPRHATTPLSRCAVRCLVAPLLHAAAMSRTTIALSPLPPCRCVSPCHSHAAAAVCRRSATTPLAAKRNRAAALASPLPCRTTKLCRHLAEPCCSLALLAGSAEPLLPLGSRLAESRLSRCRCRVSKHDFGNIKGVAHKT

SEQ ID NO: 199084 - protein, 48 aa, Oryza sativa
  Clone ID: PAT_MRT4530_94682C.1.pep
FRLGRSYHQGSYRYCVSVHSVPKETRTQELSISLIGAPPNIIITHAGQ

SEQ ID NO: 199085 - protein, 1081 aa, Oryza sativa
  Clone ID: PAT_MRT4530_94683C.1.pep
MVNTRTGSGSGSGSGAANNGGDPTLAQILAQQTQLINLLVQQAQNQQANNQNQNPSPPPQNKLADFLRVRPPTFSSTTNPVEAGDWLHAVEKKLDLIQCTEQEKVSFASHQLHGPAAEWWDHFRQGRAEGEPITWQEFTAAFKKTHIPTGVVALKKREFRALNQGSRSVTEYLHDFNRLARYAPEDVRTDEERQEKFLEGLNDELSYALMSTDFRDFQQLVDKAIRQENKYNRMEQKKRRAAQFKAQQGSNQRPRLVTGPQAPSYPQGGSSSVVRPQRQFYNNNTGNRGNDNRDMVARPAATPAQNQPVRKEQGSKPGVCFNCGDPGHYADKCPKPRRVKNAPAPNNSNAPVPKARVNHVAAAEAQNAPDVVLGMPPKRDIEFRIDLVPGTNPIHKRPYRMAANELAEVKRQVDDLLQKGYIRPSTSPWGAPVIFVEKKNHTQRMCVDYRALNEVTTKNKYPLPRIDDLFDQLEGATVFSKIDLRSGYHQLRIREEDIPKTAFTTRKGFVATLEAQPTLFDQVREAQVNDPDIQEIKKNMRRGKAIGYVEDEQGTVWLGERICVPDNKELKDTIMKEAHETLYSIHPGSTKMYQDLKQQFWWASMRREIAEYVALCDVYQRVKAKHQKPAGVGKPGRTSALAAGRRSPVAAADHPISGEVANPGRPLMILRSGEKSVWVAGESMPLVVEGVIMIQIEILGVTASEPYTRKKGLSLLDVVGVHYAVCPFDLSIALRVRNRGEANLDSQSNTVILEVSADELRAVVCYDAVRQSISAEYPFDKLDGIIGLDFSCGRCLNPLGEFVDGHKQELVAALSSWEWSEYVEPQHENGQEEMFAVVGRDAFEKYSVWSLFVQIFADHTVDFGLSGYLLSFSVVFGQLITTQQLNERGPPVFRGLDIGNDPRERARGPGPREWGPHVSLSVHGGPGARGWRRPAPWVPRVSRTRGRGRLTAGPYLAAAGRARRRPFPAQPTGDGAPAPRWSPPGDHRRGGTAPERAERGTKGRSTAHPGSTATTGTAAEAEEGGGAVRDDEDDGAPTVGGRNGGADEVDEDAAKPMEVTPRREEARGDGGMRRIRRRRRR

SEQ ID NO: 199086 - protein, 997 aa, Oryza sativa
  unsure (1)..(997): unsure at all Xaa locations
  Clone ID: PAT_MRT4530_94684C.1.pep
MSAGQSQRSVVSSARLRQDAELTAAEERERVAAKTAAMTARASRLAAAELAVARAEVEAAAATDAARAAAAELKALRGSSTSSSVSAYGSTDDELMREAAREQAEQKRTAKEAWDAIAAAHIGSDRARKSTLQALRKEWENLAFKPGEDADDFSLRLNTLLQKMVQYDGDNYDEERVVENIFRCVLEKYXEQWEACQDDERKGESSSSTGGRKQRKAHGGVQLQWARRRVEGGACRGAQGGAAGNHKLARDDACRNCGKLGHWAKYCRQPXRGQAHVAQVEEEEPALLLAHASIELPPAASAAAALLHLDEPKAHAFLGDGSSNDKTDGWYLDTGATHHMTGLQEFFTKFDSSVRGSVKFRDASGVEIKGVGSVTFTAKSGEHRLLTGVYYFPPLKNSIISVGQLDENGSRVLVEHGVMSIWDRRRCLLAKVAXTGLPSHPLGRRGVAVARALRAAPLRGSEAAQCQGDACSRTASSSGTTRRLWGXARALLKQREMLAVFWXEVVVMAVYILNRSHTKALNDRTXYEASHCRKPAVSHLRVFGCLMFAKEHDHIGKLDDRSTPGVFIGYAEGSKAYRILDPETQRVRTXVVFDXGRGWAWDKAVDDGSTLTYDDFTVEYVHFEGAGXVGSCSSSPSIPTPVPEFPPTPAATHSQATTSVATSSSPTPPQSATPRTPAPTTTLMGTSTPMPARVEHSPVEFTTSLXSTTRSKSTRTTMASRCGTVRWRTFSATSRCRDWCLVTXRRNCTLCAMISEMDAIEENRTWELSDLSRGHRAITLNWVFKLKRDEAGAIVKHKAHLEGRCVHHMDVKSAFLNGDLKEEVYVHQPLGFAIPSKEGKVLRLHKALYGLRQAPRVWNAKLDSMLKGMGFEQSPHEAAIYRWGNGGNALLVGVYVDDVVITGTKDAETRAVELRVDSKSALALARNPVFHERSKHIWVRYHFIRGCLEEGSIKASYINTKDQLADLRTKPLGRIKFLELCSRIRMAQLSYKTMHKT

SEQ ID NO: 199087 - protein, 189 aa, Oryza sativa
  unsure (1)..(189): unsure at all Xaa locations
  Clone ID: PAT_MRT4530_94685C.1.pep
MVQYDGDNYDEERVVENIFRCVLEKYNDEPQPFSGHTTIGGKLHLTQEQWEACQDDERKGESSSSTGGRKQRXGARRGAQGGAAGNHKLARDDACRNCGKLGHWAKYCRQPXRGQAHVAQVEEEEPALLLAHASIELPPAASAAAALLHLDEPKAHAFLGDGSSNDKTDGWYLDTGATHHMTGLQEFFT

SEQ ID NO: 199088 - protein, 1001 aa, Oryza sativa
  unsure (1)..(1001): unsure at all Xaa locations
  Clone ID: PAT_MRT4530_94686C.1.pep
MTARASRLAAAELAVARAEVEAAAATDAARAAAAELKALRGSSTSSSVSAYGSTDDELMREAARGATLSHGIQAVNRDVSPGSGWPTLTKTNYVKWAAVMRIRIQFSLSRKRTAKEAWDAIAAAHIGSDRARKSTLQALRKEWENLAFKPGEDADDFSLRLNTLLQKMVQYDGDNYDEERVVENIFRCVLEKYXEQWEACQDDERKGESSSSTGGRKQRKAHGGVQLQWARRRVEGGACRGAQGGAAGNHKLARDDACRNCGKLGHWAKYCRQPXRGQAHVAQVEEEEPALLLAHASIELPPAASAAAALLHLDEPKAHAFLGDGSSNDKTDGWYLDTGATHHMTGLQEFFTKFDSSVRGSVKFRDASGVEIKGVGSVTFTAKSGEHRLLTGVYYFPPLKNSIISVGQLDENGSRVLVEHGVMSIWDRRRCLLAKVAXTGLPSHPLGRRGVAVARALRAAPLRGSEAAQCQGDACSRTASSSGTTRRLWGXARALLKQREMLAVFWXEVVVMAVYILNRSHTKALNDRTXYEASHCRKPAVSHLRVFGCLMFAKEHDHIGKLDDRSTPGVFIGYAEGSKAYRILDPETQRVRTXVVFDXGRGWAWDKAVDDGSTLTYDDFTVEYVHFEGAGXVGSCSSSPSIPTPVPEFPPTPAATHSQATTSVATSSSPTPPQSATPRTPAPTTTLMGTSTPMPARVEHSPVEFTTSLXSTTRSKSTRTTMASRCGTVRWRTFSATSRCRDWCLVTXRRNCTLCAMISEMDAIEENRTWELSDLSRGHRAITLNWVFKLKRDEAGAIVKHKAHLEGRCVHHMDVKSAFLNGDLKEEVYVHQPLGFAIPSKEGKVLRLHKALYGLRQAPRVWNAKLDSMLKGMGFEQSPHEAAIYRWGNGGNALLVGVYVDDVVITGTKDAETRAVELRVDSKSALALARNPVFHERSKHIWVRYHFIRGCLEEGSIKASYINTKDQLADLRTKPLGRIKFLELCSRIRMAQLSYKTMHKT

SEQ ID NO: 199089 - protein, 103 aa, Oryza sativa
  unsure (1)..(103): unsure at all Xaa locations
  Clone ID: PAT_MRT4530_94687C.1.pep
XKXRMRXKGMXTXXXXDISXIXXXXVXAXXNXTGXGAXDADNXXSXSXGDXXISQEQPXFPDXXQDXEVRXVXGRWRXXXVRIGXEXXRCAXEXXHXWXXXYR

SEQ ID NO: 199090 - protein, 483 aa, Oryza sativa
  Clone ID: PAT_MRT4530_94688C.1.pep
MSRIRLVYEWDKNLELTQQTRPKFTSLCMRAKEEAACRNWARCFGAGIMFAYVITLCHDDDIRVVSGSLDVVSRLRDIIIWGYMLRMRGGPLLVTAQYRFININMIAKTDDVRLGDNNTKYYHLIANGKHRKKRIFSLRSRGRIDDIPQVTEAENDHLIAPFSDGRFFQTKKGLRQGDPLSPILFNIIADMLAVMIQRANNAGQLVGVVPHLIDGGLSILQYADDTVLFMEHDLEKACNLKMLLNVFEELSGLKINFHKSELYCFGEAQTTQDQYSNLFQCEVGSFPFRYLGIPIHHRRLRNSEWKEVIERLEKRLASWKGKLLSLGGRLTLINSVLTSLPMYMMSFLEIPKGVIKKIDYFRSRFFWQGDGHKRKYRLARWDIICRPKDQGGLGIQDLEIKNKALLSKWLHKLLTTDGVWQQMLRNKYLGSQPLSQAQWKAGDSHFWASLMKAKPDFLRFGSFNIKDSSQVRFWEDKWLGMPV

SEQ ID NO: 199091 - protein, 720 aa, Oryza sativa
  unsure (1)..(720): unsure at all Xaa locations
  Clone ID: PAT_MRT4530_94689C.1.pep
LVAQLLREEEIKWYQRAKTDDVRLGDNNTKYYHLIANGKHRKKRIFSLDQEEGKIEWNEAIKNYITEFYKKLFGPPDASTLSFDANRIDDIPQVTEAENDHLIAPFSEEEVREAIFDMETNKAPGPDGILAEFYQKFWHVIKHDLLTMFNEFHAGELPIFSLNFGVITLIPKVKEANRIQQYRPICLLNASFKIFTKVATNRINSVADRIVSPTQTAFMRGCNILDGVVVIHETVHELHRRKLSGVILKIDFEKAYDKVKLPFLLQTLRMKGFSPRWISWIESFISGGSIAIKVNDDVGRFFQTKKGLRQGDPLSPILFNIIADMVAVMIQRAINAGQLVGVVPHLIDGGLSILQYADDTVLXMEHDLEKGCNLKMLLNVFEELSGLKINFHKSELYCFGEAQTAHDQYTNLFQCEVGSFPFRYLGIPIHHRRLRNLEWKEVIERLEKRLASWKDKLLSLGGRLTLINSVLTSLPIYMMSFLEIPKGVIKKIDYFXSRFFWQGDGHKRKYRLARWDIICRPKDQGGLGIQDLKIKNKALLRKWLHKLLTTDGVXQQMLRNKYLRSQPLSQAQWKAGDSHFWASLMKSKPDFLRFGSSNIKDGSQVRFWEDKWLGNACLREQYPCLYNVVRHKHATISEIFQTSHLSFSWRRDLTGSKLVAWNHLLSRIANIILSHDQDEFKWNLTTDGRFSVKSLYLALVQTDVPNINKRIWKIKAPPKD

SEQ ID NO: 199092 - protein, 179 aa, Oryza sativa
  Clone ID: PAT_MRT4530_9468C.1.pep
RTREAASRDYNIAPRIDYRTVVEVDGPLVVLDNVKFPKYAEIVNVVLGDGSVRKGQVLEINGKKAVVQIFEGTSGIDNTHTHVEFTGDVLRMPISEEMLGRSFNGSGVPIDKGPQILAEEFLDIQGMPINPYNRTYPKEMIQTGISTIDVMNSIARGQKIPLFSANGLPHNDIGAQICR

SEQ ID NO: 199093 - protein, 93 aa, Oryza sativa
  Clone ID: PAT_MRT4530_94690C.1.pep
SPPGGASLLTSRLARRRRAQPTSPPSPSAARSGEHGGRRRRGRATAGGGRRGGWKRRGGSAAAGRRGRRRGSGRQRPPRGRPRRRSSSARKTP

SEQ ID NO: 199094 - protein, 590 aa, Oryza sativa
  unsure (1)..(590): unsure at all Xaa locations
  Clone ID: PAT_MRT4530_94691C.1.pep
PKINARQHKKAIPILCHVGEWVTTESNKLRLVHDFFLDIMGRXSSPSSSIDLDGIDLPHFDLSKLDIEFAEDVKKAVLEMPTDXASGPDGFTNEFYKRCSELIKGDLLTILALVXASEFXHLHLLIALFPKKEDSIQLSNYNPMSLIHSFAKIFSKIMATRLAAQMGELVGPAXSAFIKKRHIQENFIYVQGRSXLLHWSKXPTILLKLNITKAFDSHLGFGGKXCRDGIAIMLGRASTIISINSYNAKXIGLTMGIAVGRSILFPLLFVLVMEAFGALCSTPVQRGVLSPLVDDVMPLQVSLYANDTILFFHPSTQDVVVVXLQLMGRVSGLVTNLAKSSMTIIHCSDDQIVEVATILSCQVKDLPLTYLGLLFSVRKPTKAQVQPMIDRLTKHTAKSEKNXCGFLWKGDGKASGEHNLVVWDKLCLPVEYGGLGIRNLXLAGVALRARWXRLRKAQPERPWTSLSXIKESSTVIVGNGKGTFFWTDNWLPKEGSIVNCALILASFVKKRSRRVATALHDNAXVADITGALSPQGLAKYFMVSEMVSRVQLADDIDDKVYWAPTVDGLFSIRSTYASYAPPRRNVASER

SEQ ID NO: 199095 - protein, 252 aa, Oryza sativa
  Clone ID: PAT_MRT4530_94692C.1.pep
MENSSKKTQEFFPKGGNGGYAEQLELLLKQLRFPNKPIHHAEQVIKGFRKDWTMKIYIQAREEKCQGHVFKSRHLRANKEAALQDASREAFMRLCKIYSIEVASTPFFLHPFRECGDRRCHIRKFRGFEEQSPIHFSMWMWAADEAYEEALEELDMLRSKIAGWEERYNHLAKEHTTRGQLLEAIKLHLQWYFRTPSQAQIQRTLPPPPQRVTRSDGEDYSQINAQQACLERSEVKLDRATSQDYLQGYKPP

SEQ ID NO: 199096 - protein, 274 aa, Oryza sativa
  Clone ID: PAT_MRT4530_94693C.1.pep
GLQVILGLVAVHTLADGLGAAQFITAVAELARGMDKLRVAPVWDRSLIPNPPKLPPGPPPSFQSFGFQHFSTDVTSDRIAHVKAEYFQTFGQYCSTFDVATAKVWQAPRVPVGYKPEIQVHVCFFANTRHLLTQVLPKDGGYYGNCFYPVTVTAIAEDVATKELLDVIKIIRDGKARLPMEFAKWASGDVKVDPYALTFEHNVLFVSDWTRLGFFEVDYGWGTPNHIIPFTYADYMAVAVLGAPPMPKKGTRIMTQCVENKCIKEFQDEMKAFI

SEQ ID NO: 199097 - protein, 173 aa, Oryza sativa
  Clone ID: PAT_MRT4530_94694C.1.pep
MNNPRVYPVDGPAMFGTQNYNSRVNASMQRNHMRAAMSKKPAQTCEPIACGAPFTICYNCYEVLQLPKKSPVPGKDEYKLRCGSCSHALVVKLDGSRLDVSAPSPISHISGGSKISSNDGQGSNANSAPHERVLPLYSFSAASHGSQDLPSNSSEAEKMQGISSSCSISEDEN

SEQ ID NO: 199098 - protein, 612 aa, Oryza sativa
  Clone ID: PAT_MRT4530_94695C.1.pep
GGRAAARSSSRGQEVAGAVGDDDDGDEAEAWPRTQAQAQAQGEGEAQPVRLGAAAGAAGEGRRRRVRGARAGGRGADHPRLRVTDKYQLGRELGRGEFGVTHLATDRATRERLACKSIPKRRLRTAVDVADVRREVAIMASLPDHPALVRLRAAYEDADAVHLVMELCDGGELFDRIVARGRYTERAAGGAGRTVAEVVRACHAHGVMHRDLKPENFLYAGKAEDAQLKAIDFGLSVFFRPGERFREIVGSPYYMAPEVLRRDYGPEVDIWSAGVILYILLCGVPPFWAETEQGVARAILRGAADFDREPWPRISRAAKSLVRQMLDVDPRRRPTAQQVLDHPWLHHAARAPNVPLGDVVRARLKQFSLMNRLKKKAMRVRGVRALLLMSSPATASPFLCLTAQRCTQVIAEHLSVEEVEVIKDMFALMDTDNNGRVTLQELKDGLTKVGSKLAEPEMELLMEAVSFFTLLQDSNGGNGEFLILHWQADVDGNGYLDYGEFVAVTIHLQRLSNDNHLRTAFLFFDKDGSGYIDRAELADALADDSGHADDAVLDHILREVDTDKDGRISYEEFVAMMKSGTDWRKASRQYSRERFKTLSNSLIKDGSITMAR

SEQ ID NO: 199099 - protein, 81 aa, Oryza sativa
  Clone ID: PAT_MRT4530_94696C.1.pep
MAFVITAMPPSALPLIHHLQVPRSVGKKSLLDLAVWIRKRGSKEALTPSQCTAGYVVRSDRAVIASQTGLYCAVRPAQPVV

SEQ ID NO: 199100 - protein, 527 aa, Oryza sativa
  unsure (1)..(527): unsure at all Xaa locations
  Clone ID: PAT_MRT4530_94697C.1.pep
KVDDGFDDQKKKKTLFEWQGGRSIMSQXENEFGPMESVGGSGAKPYANWAAKMAVGTNTGVPWVMCKQDDAPDPVINTCNGFYCDYFSPNKNYKPSMWTEAWTGWFTSFGGGVPHRPVEDLAFAVARFIQKGGSFVNYYMYHGGTNFGRTAGGPFIATSYDYDAPIDEFGLLRQPKWGHLRDLHRAIKQAEPVLVSADPTIESIGSYEKAYVFKAKNGACAAFLSNYHMNTAVKVRFNGQQYNLPAWSISILPDCKTAVFNTATVKEPTLMPKMNPVVRFAWQSYSEDTNSLSDSAFTKDGLVEQLSMTWDKSDYLWYTTYVNIGTNDLRSGQSPQLTVYSAGHSMQVFVNGKSYGSVYGGYDNPKLTYNGRVKMWQGSNKISILSSAVGLPNVGNHFENWNVGVLGPVTLSSLNGGTKDLSHQKWTYQVGLKGETLGLHTVTGSSAVEWGGPGGYQPLTWHKAFFNAPAGNDPVALDMGSMGKGQLWVNGHHVGRYWSYKASGGCGGCSYAGTYHEDKCRSQHAAT

SEQ ID NO: 199101 - protein, 715 aa, Oryza sativa
  Clone ID: PAT_MRT4530_94698C.1.pep
MSGGAVAFLLLVAAAAVANAAVTYDHRSLTINGQRRILISGSIHYPRSTPEMWPDLIQKAKDGGLDVIQTYVFWNGHEPVQGQYYFSDRYDLVRFVKLVKQAGLYVNLRIGPYVCAEWNYGGFPVWLKYVPGISFRTDNGPFKAAMQTFVEKIVSMMKSEGLFEWQGGPIILAQVENEYGPMESVMGSGAKSYVDWAAKMAVATNAGVPWIMCKQDDAPDPVINTCNGFYCDDFTPNSKNKPSMWTEAWSGWFTAFGGTVPQRPVEDLAFAVARFIQKGGSFINYYMYHGGTNFDRTAGGPFIATSYDYDAPIDEYGLLRQPKWGHLTNLHKAIKQAETALVAGDPTVQNIGNYEKAYVFRSSSGDCAAFLSNFHTSAAARVAFNGRRYDLPAWSISVLPDCRTAVYNTATVTAASSPAKMNPAGGFTWQSYGEATNSLDETAFTKDGLVEQLSMTWDKSDYLWYTTYVNIDSGEQFLKSGQWPQLTVYSAGHSVQVFVNGQYFGNAYGGYDGPKLTYSGYVKMWQGSNKISILSSAVGLPNVGTHYETWNIGVLGPVTLSGLNEGKRDLSKQKWTYQIGLKGEKLGVHSVSGSSSVEWGGAAGKQPVTWHRAYFNAPAGGAPVALDLGSMGKGQAWVNGHLIGRYWSYKASGNCGGCSYAGTYSEKKCQANCGDASQRWYHVPRSWLNPSGNLVVLLEEFGGDLSGVTLMTRTT

SEQ ID NO: 199102 - protein, 566 aa, Oryza sativa
  Clone ID: PAT_MRT4530_94699C.1.pep
MSMNADLGKPRELTGLQQRRALYQPELPPCLEGKAIRVEFGDSTTTIDPTCANMVVQEFPNTFGQPLVHFLKPNKMDAQANDEHPPIRVGVVFSGRQSPGGHNVIWGIYDAMKTQNLQSVLLGFIGGTEGLFANQTLEITDDVLSAYRNQGGFDFLGRTVDQIHTTEQVNAAMSTCCDLDLDGLVIIGGVTSNSDAAQLAETFANHNCKTKVVGVPVSLNGDLKNQFVETTVGFDTVCKVNSQLISNVCLDAISAGKYYHFVRVMGWKASHVALECALQSQPNMVILGEEVAFSKLTLKEIISKICDGVQARAAQEKYHGVLLISEGLIESIPEMFALIQEINILHSNKVPENNIPSQLSPWATALYNYLPPFIRREIDTEQLLAHLVEAEMNKRMKEGKYIGRKFSSVCHFFGYQARGSLPSNFDCDYAYAMMSVKRHSRSPGAVPTGKPVIHPSPVDLQGKAYALLREKASSFLLDDFYRTPGGIQFDGSGTNVKPITLTVEDQDYLGDIELLQDYLEKVRNIVKPGCSREILKAAISSMSSVKDVLKVMSAPFYAELPLFNLN

SEQ ID NO: 199103 - protein, 378 aa, Oryza sativa
  Clone ID: PAT_MRT4530_9469C.1.pep
MASSPTSRERDMAAAVVVEEEVGDAQPRQEWIMLAAVPDVRRSSRMFPPGTDFVLALKKPPHVSHVTVAARIAPGLPATPTRFPYVVAVDAGGAFLLCVTQRAREPPLATGADASVGRARRRREFARVPAYFLCDAHTGVASRVPDPPVGGPLSDFHRVGLISRPCGGGGGGGGGGGGEGVAYAIAELVPMLGTDHATLRLYWSATGLWLSKEVKYAGLGHPDSWANDAVISHAQKLWWVDLSCGLLACDPFTEHQDLLFVPLPDGCVPPVAGTENDLIKHRCVTSSGGKLRYIQIHSRLGVPIISVWVLADPEHATWDCECHLPFSEIWSRRWVSRITRKKSLMVAAAHPVHTGMLFFVHGPRQEPIHSGCESKKDD

SEQ ID NO: 199104 - protein, 101 aa, Oryza sativa
  unsure (1)..(101): unsure at all Xaa locations
  Clone ID: PAT_MRT4530_946C.1.pep
CPRRHKYVTPTSPLIGVIVFTPGRLVCHRVVSSLPWLCDSTTTGGHHRLHRQXASSATDSCPRLHGSATLNTADGCHRFHRRLTRLPPDWCHCLHGSTTPP

SEQ ID NO: 199105 - protein, 104 aa, Oryza sativa
  Clone ID: PAT_MRT4530_94700C.1.pep
ATTDSDGRWPATRFKGRRGTVHGGDDFPAMCGDNRGVAGFGLTATMELRWILASGRWLPGFSSLLRCRQWIRRGPATTESTAKLACNVVTGKTLALPNLIALQH

SEQ ID NO: 199106 - protein, 83 aa, Oryza sativa
  unsure (1)..(83): unsure at all Xaa locations
  Clone ID: PAT_MRT4530_94701C.1.pep
PWYRLAFFVFWSCSYVPFQWVLHACGAISWWXYPFLDLSPSGAPLWYLAMAIVHIPCFFLYWSIVKAKQTYFPRLFPHAYVRN

SEQ ID NO: 199107 - protein, 184 aa, Oryza sativa
  Clone ID: PAT_MRT4530_94702C.1.pep
MHDSGAATAERIKYTGERQRSGGCRRNNAIGGHREKEEATAILTNTYATTDSDGRWPATRFKGRRGTVHGGDDFPAMCGDNRGRAMTGGAAGLRRRSKRDGELRVDGDDGAPVDFGFGEMAAGLLLTAAMPTVDTAWSGDHGVDGKACMPAAHPPFASWRNSEEARTDRPSQQLRSLNGEWRLM

SEQ ID NO: 199108 - protein, 51 aa, Oryza sativa
  Clone ID: PAT_MRT4530_94703C.1.pep
MAFRLANEEILPFNCLSYTVELEAYTKVADIRMKLMEQPSDALHGTMQSQL

SEQ ID NO: 199109 - protein, 39 aa, Oryza sativa
  unsure (1)..(39): unsure at all Xaa locations
  Clone ID: PAT_MRT4530_94704C.1.pep
GGVFFXGGNVLDFTIYVRNNCSKLISWHLGCQQLNINAL

SEQ ID NO: 199110 - protein, 114 aa, Oryza sativa
  Clone ID: PAT_MRT4530_94705C.1.pep
NAGTEVVEAKAGAGSATLSMAYAAARFVESSLRALAGDPDVYECTFVQSELTELLFFASRVKLGKNGVESIISSDLEGVTEYEAKALESLKPELKASIEKGIEFVHKQQAAATS

SEQ ID NO: 199111 - protein, 64 aa, Oryza sativa
  Clone ID: PAT_MRT4530_94706C.1.pep
VEKTKHRGGEHIYRSHFNTGALRGNQRGFGGPTMPKTKKKGGGLGGANLFNYRAGFPLKKTKPP

SEQ ID NO: 199112 - protein, 65 aa, Oryza sativa
  Clone ID: PAT_MRT4530_94707C.1.pep
SPTTAHESAGGGYDQAFLTSAPWTNLVVAVPLLSSRRCFYFSGGHFSLSLDSRPVINIIIALCPL

SEQ ID NO: 199113 - protein, 38 aa, Oryza sativa
  unsure (1)..(38): unsure at all Xaa locations
  Clone ID: PAT_MRT4530_94708C.1.pep
LKSIPQARRCHINSNXKAAVTEHLGPHRXSSTVQPQPY

SEQ ID NO: 199114 - protein, 467 aa, Oryza sativa
  Clone ID: PAT_MRT4530_94709C.1.pep
MSKWDGYWMARWFYHTIPFEAGSDSAKALLCRRQGDCIEPETQDRHGRRYGGTVCSATKRRVPASSDSDADDEDDVEEPDGEEEGEEEEEAEAVAEKVTNEAAEDRVDTPGYTPTPSPGHNETGVESNSSPLRRKDLEGAKTLVAFSSGKAAKGGPVKKISKRRGLVDVARVFSDDESSDETPTSPAGRSLDLSTAPILSLGADGAGGSAAAEVSASAEWIVTAATRVFGSPSRQPVVSPLILAAHCSTERIVRARLDGFKNRLRAKDDEIGRKNLEMEALANTLKEAKTENRRLQSEFEKGNEARAEVDRLKAELEKEKAHSAALTDYYNLTEPKMEALRLKVSKAEASAVEESQRFSREMAKTTESGKTACQTLRLALTDMGAKFGCEHVAEFPNYAKGDWEISAQNISPAFRAWRKHFWQKEGRSTAKARLLEQLAKAGAAVRCEEEDAADKEGGGDAQDHPEV

SEQ ID NO: 199115 - protein, 481 aa, Oryza sativa
  Clone ID: PAT_MRT4530_9470C.1.pep
MEERIPLLSKRFPADGTAGVGGGREEEGGDRWWSGLAREAGKVGSMALPMAAMSVAQNAVQVASNMMVGHLPGVLPLSASAIATSLASVSGFSLLVGMASGLETLCGQAYGAKQYDKLGVQTYRAIVTLTVVTIPISLLWVFIGKLLTLIGQDPVISHEAGRYIVWLIPGLFAYAVCQPLTKFLQSQSLIFPMLWSSIATLLLHIPLSWLLVFKTSMGFTGAALAISISYWLNTFMLAAYIRFSCSCKVTRSPPTIEAFRGVGLFLRIALPSALMLCFEWWSFEILVLLSGLLPNPELESSVLSICTRVANELGAGNPEGARSAVHLVMSIAGTEAVLVTGMLFAAQRILGYAYSSDEEVVTYFTSMVPFVCISVAADSLQGVLSGIARGCGWQHLGAYVNLGSFYLVGIPVALLLGFGFKMEGKGLWLGIACGSVLQFLLLAVIAFFSNWQKMAEKARERIFGETPSEKQHLVLDATNSV

SEQ ID NO: 199116 - protein, 58 aa, Oryza sativa
  Clone ID: PAT_MRT4530_94710C.1.pep
MAMLLWVGDVCFGGGLARRGRAPRGPSCYHPLSPGIPPARGNMGRKTWQGKEKKEKDD

SEQ ID NO: 199117 - protein, 571 aa, Oryza sativa
  Clone ID: PAT_MRT4530_94711C.1.pep
MAPRKPNPSLVKGPDPGRIDDDSTAYLGISLMDDDELAKLVSAGALAEGQAFAPGKAVVPKPVDNRTVVFAVFFEAGLRFPCNALLPEILRLFQVELPQLSPSALVRIAIFDWAYRTSGFEPSAELFGAILSATVNSKTVITPVGTKKTVFGSVNFNVRPERFDLWPVNAAMSKWDRHWMARWFYHTIPFEAGSDSAKALRCRRRAIAPNRKPKIAVDGAMEARFALLLLTLDQAEAEAHRMIGDVSVVEYSQLLTRQAAGRANRVYNGELPPRANPHKADDDTGPSRKRTRGQVKLAPRKRRVPASSDSDADDEDDAEEPDEEEEGDEEEEAEAVAEKAVNEAAEDRVDTYGYTPTPSPVHNETGVESNSSPLRQKDLEGAKTLVAFSSGRVAKGGPVKKISKKGGLIDIARVFSDDESSDETPTSPTRRSLDLLTAPILSLGADGAGGSAAAGVSASAERIVTAAARIFDSPPRQPVASPMVKTKGKGAAAETSASEYSLAAPHFASGDFKTRADLIPFVEGILAAHCSTERTVRARLDGFKNRLRAKDEEIGRKNLEMEALANTLKEA

SEQ ID NO: 199118 - protein, 49 aa, Oryza sativa
  Clone ID: PAT_MRT4530_94712C.1.pep
PLFQMAKGPPKIFGGFPFPSKCLVSPLLNFEGKLGPLFPKQEGTGAICG

SEQ ID NO: 199119 - protein, 345 aa, Oryza sativa
  Clone ID: PAT_MRT4530_94713C.1.pep
MAPRKPNPSLVKGPDPGRIDDDSTAYLGISLMDDDELAKLVSAGALAEGQAFAPGKAVVPKPVDNRTVVFAVFFEAGLRFPCNALLPEILRLFQVELPQLSPSALVRIAIFDWAYRTSGFEPSAELFGAILSATVNSKTVITPVGTKKTVFGSVNFNVRPERFDLWPVNAAMSKWDRHWMARWFYHTIPFEAGSDSAKALRCRRRAIAPNRKPKIAVDGAMEARFALLRKVCSRLSCHDLVEEFCMLRIFPLSQSWQVAVDQGKESDGLPKLVLPEGTNMLTLDQAEAEAHRMIGDVSVVEYSQLLTRQAAGRANRVYNGELPPRANPHKADDDTGPSRKRTRGQ

SEQ ID NO: 199120 - protein, 743 aa, Oryza sativa
  Clone ID: PAT_MRT4530_94714C.1.pep
MKRSKSKSIDASDGKVVGASAFSTTGASSHAVIGSISSDMAYRDCNVPLSPVIAMIDDDNSKDNSFDHNDDMSNSMPSGDEAATGGTSDASTGDSSGKRRRGKKLKVSPKVATVKGRKRSTCWNNFTEVKVPSKVTPGETETKAKCKYCHSLYAYKAGGATTHLVRHMNKCTPYLNQLAKKRAQAVLNFTAEKGDSDIPLIVTPSEYNHEETRKLIAKMIIVHEYPFRMVEHTWFNVVMRYLNPSYQFIGRKTIRSECLKVFHFEKENLMKSIRSVELISLTCDLWTSNQNLCYMALVAYYIDKNWTMQCRVLNFVELDPPHTGNVIGQAIFDCLAEWKIEDKVITITLDNASNNDTTVKGLKAKLAARRSSCYNAKYFHVRCSPLASLTKNIRSTVKYIKKSPSRIHKFVEICRNLAMELGEGLKLDVTTRWSSTYHMLRTCIAYQQALDSYAETDLNYEWKPSTEEWDLYASIEPILGSLAEVTTAFSGSTYPTANIFYPHIVNVKVALRDACASEDANLKNMGKAMLDKFDKYWNVKNNAMVLATVLDPRYKLRFIEWCFKKIYPTEFEKELAEVRTELNTLYDKFEKDHREKMATSKGKSLRASSSVSTFDINKSLPSVSSNFQSYLQSSSEDASKSEMLLYLDERNEDLANKAFDLLVWWKLNAHRYPVVSMMAKNFLTIPASSVSSESTFSAGGRVLSDYRSSLRPTMATEEEEDVESITFPQSVVQSNYCYLVPNY

SEQ ID NO: 199121 - protein, 71 aa, Oryza sativa
  Clone ID: PAT_MRT4530_94715C.1.pep
MVRRSDDGVGCGVVGVLGGGGVGLGRGGAAATAKGRGAFELYYTKSWLLAKVAVAFEPFGWLLAFAKAKAG

SEQ ID NO: 199122 - protein, 117 aa, Oryza sativa
  Clone ID: PAT_MRT4530_94716C.1.pep
VPENCVFFVNIHEPIIWRLHEMIQNLKFDRISSSESSAVSVDPILKIGLLNISEIRFRVSMAMSPTQRPRGVLGFWSSLMTALGNMEHMPVRIAQRYREELCMRQSALMSSAMSNIQ

SEQ ID NO: 199123 - protein, 737 aa, Oryza sativa
  Clone ID: PAT_MRT4530_94717C.1.pep
MTSPRRHVANRSTTVHASHRNDEPRMKRSKSKSIGASDGNVVGASAFSTTGASSQAVVGSTTSDMAYKDCDVPLSPIIALIDDDNSKDNSFDHIDDMSMSMPSGDEAATGGTSDASGGDSLGGRRRGKKLKVSPKVATVKGRKRSTCWNNFTEVKVTSKVTPGETETKAKCKYCHSLYAYKAGGATTHLVRHMNKCTPYLNQLAKKRAQAVLNFTAEKGDSDIPLIVTPSEYNHEETRKLIAKMIIVHEYPFRMVEHTWFNVVMRYLNPSYQFIGRKTIRSECLKVFHSEKENLMKSIRSVEVISLTCDLWTSNQNLCYMALVAHYIDKNWTMQCRVLNFAELDPPHTGNVIGQAIFDCLAEWKIEDKVITITLDNASNNDTAVKGLKAKLAARRSSCYNAKYFHVRCCAHIINLIVNDGLAPLASLTKNIRSTVKYIKKSPSRIHKFLEICRNLAMELGEGLKLDVTTRWSSTYHMLRTCIAYQQALDSYAETDLNYEWKPSPEEWDLYASIEPILGSLAEVTTAFSGSTYPTANIFYPHIVNVKVALRDACASQDANLKNMGKAMLDKFDKYWNVKNNAMVLATVLDPRYKLRFIEWCFKKIYPTDFEKELAEVRTELNTLYDKFEKEHREKMAASKASSVSSESTFSAGGRVLSDYRSSLCPTMVEALICASSWIRGAPMITAAEEEEDVESITFPQSVVQSNYIYLLLYITSWLEPARALKRAEPSCTFCSFN

SEQ ID NO: 199124 - protein, 251 aa, Oryza sativa
  Clone ID: PAT_MRT4530_94718C.1.pep
MKWAGEHQLYHSSANAAGQIQLQEGPMAPMKVYGWVVSPWMARVLVALEEAGAEYEVVPMSRSGGDHRRPEHLARNPFGEIPVLEDGDLTLYQSRAIARYIFRKYKPEFLGLGEGGSLEESAMVDVWLDVEAHQHEAAVRPILWHCIINKFEGRDRDQGVVDESVRKLEKVLGVYEARLSGSRYLAGDRISLADLSHFSNMRYFMATEYAGVVDAYPHVKAWWEALLARPTVQKVMAGMPPDFGFGSGNIP

SEQ ID NO: 199125 - protein, 83 aa, Oryza sativa
  unsure (1)..(83): unsure at all Xaa locations
  Clone ID: PAT_MRT4530_94719C.1.pep
LMVFSQFFFRFFGKRHFXKXPPXFPFXFXYSRTNFGFXKREVQGPVXVLAFRPPIVEKRIQXEXIXLRLCIRXCXXXXKKKKK

SEQ ID NO: 199126 - protein, 129 aa, Oryza sativa
  Clone ID: PAT_MRT4530_9471C.1.pep
GRVGSPPTIEAFRGVGLFLRIALPSALMLCFEWWSFEILVLLSGLLPNPELESSVLSICLTTTSLMYTIPYGLGGAASTRVANELGAGNPEGARSAVHLVMSIAGTEAVLVTGMLVAAQRILGYAYSNG

SEQ ID NO: 199127 - protein, 187 aa, Oryza sativa
  Clone ID: PAT_MRT4530_94720C.1.pep
HEDGKGGGFLSWDRRYRIAVEAARGLCYLHHDCSPMIVHRDVKSNNILLGDNFEAHVADFGLAKFLRSGGGATASSECMSAVAGSYGYIAPEYAYTLRVDEKSDVYSYGVVLLELITGRRPVGDFGEGVDIVQWTKRVTDGRRESVHRIVDRRISTVPMDEVAHIFFVSMLCVQENSVERPTMREVV

SEQ ID NO: 199128 - protein, 93 aa, Oryza sativa
  Clone ID: PAT_MRT4530_94721C.1.pep
RGEARSGGRGGAGAPAARRRRRRRWRSQSRRRFCVESAAPQKSSRHRSSWLARVASATATPTRSPLPPTPISCACAAGGRSRWAPDPPRARSS

SEQ ID NO: 199129 - protein, 95 aa, Oryza sativa
  Clone ID: PAT_MRT4530_94722C.1.pep
KNKLKRTKYVACGTFQSSTKKLLSSRTQSCKRNLEVLISPNPVKLGRIGCNFLCTCPWIYYLPDSESGGASHAGTLLLPCRFACAMVAGGRRQRG

SEQ ID NO: 199130 - protein, 66 aa, Oryza sativa
  Clone ID: PAT_MRT4530_94723C.1.pep
PTRPPTRPRTRGRRRRRPGPFTGPGPFTSPSGPATDTSTTEPAVTKTVQTLPKSCVLDPSRLINLL

SEQ ID NO: 199131 - protein, 329 aa, Oryza sativa
  Clone ID: PAT_MRT4530_94724C.1.pep
MATDRMPDSHFMASSNGGACYQNTHGTPITMGVPNLGCLVASIGIAPSSSLMPERGLATANYNLVANFPEDAAVVPQQQQLQAASSNSNSGLIKGGWTREEDEVLRQMVRHHGDRKWAEIAKSLPGRIGKQCRERWTNHLHPDIKKGIWTEEEDRKLIKAHQTYGNRWSAIARSLPGRSENTVKNRWNATKRSLNSKRRLRKKNNEQAVPRQPSLLEEYIRSCQHPLPNETAPPASFDIGGYGTGGTIGASPTPPTVHALGGSTPLGLVMFLDLLNQATPHPPQPDLNLLNITPVVPHLNTSEYCLQLDARGNCSMASCRCNPTGSAPR

SEQ ID NO: 199132 - protein, 176 aa, Oryza sativa
  Clone ID: PAT_MRT4530_94725C.1.pep
MDVDSDPAAKGKPTQIDLEDQASMHLQVSVIDRLQECSEFVEFSAPQLTIMGEAATPARQEDVVQFIGWSFLLWCFCLPWQGQQDGMRLQLASGDGDEIRNLLLLIISVVGPDLHCYISAGIDRLNNGNEKNGIMPRNRAVNEPSSSELVCLGSSSIQARAEPIKCSSFLTGSARA

SEQ ID NO: 199133 - protein, 388 aa, Oryza sativa
  unsure (1)..(388): unsure at all Xaa locations
  Clone ID: PAT_MRT4530_94726C.1.pep
MEMLATIIFVPLVIFQLLSTSAAGQQQCLSATFQNGQTFLKCNPLPVLGASLHWTHHAENGTADVAFRAPQQSSGWVAWGINTRGTTMPGSSVFIASQDGSGSVSVLMTVLENTSPSLTNGSLSFDVLSPPTADYTNGVYTIFATIALPNNSTTQNTVWQAGPGSTGNVGQHATSGPNVQSMLRLDFSSGQSTGTASNSRLHRRNIHGILNAVSWGILIPMGAMIARYLRVFEAADPAWFYLHITCQLSGYILGVAGWAXGLKLGSESKGITYSAHRNIGIAIFCLATLQVFALLLRPDKKNKYRFYWNIYHHSVGYSAIVLAAVNIFKGLDILKPASGWKRSYIAILATLAGVALLLEAITWVIVLRRKKSDKSSSPYGATNGNGRA

SEQ ID NO: 199134 - protein, 94 aa, Oryza sativa
  Clone ID: PAT_MRT4530_94727C.1.pep
MVAGVASSSSSTLPSSPLSPGGGGGGCSVAYSSAILPSGPSLPVEEDRSGRPDPMATTERTAGPPRSGSDSGEDHGGHQQRWQPFSYASASSPQ

SEQ ID NO: 199135 - protein, 799 aa, Oryza sativa
  Clone ID: PAT_MRT4530_94728C.1.pep
MSRRLLLPRRSLCSTSAAAAATHLHELASLLAAGRFHASVDLAKSLLLTAQPPAASVVPDLYHALAAVAAAAASASASASPGDPHPASSFLCDAASALVVASARLRLPDGALRLLSDLADEARAPLPSLSSCNLLLEALLSLGRHADVRRAFGILASAGARPDTFAWNKAVQACVAAGDLGEAVGMLRRMGRDGAPPPNAFSYNVVIAGMWRAGRGGDAVEVFDEMTERAVLPNHITYNTMIDGHIKGGDLEAGFRLRDQMVCHGLKPNAITYNVLLSGLCRAGRMGETSALLDEMASQKMVPDGFTYSILFDGLSRNGDSKAMLSLFGKYLKNGVTIGDYTCSILLNGLCKDGKVSIAEEVLQSLVNAGLVPTRVIYNTLINGYCQTGELEGAFSTFGQMKSRHIKPDHITYNALINGLCKAERITNAQDLLMEMQDNGVNPTVETFNTLIDAYGRTGQLEKCFIVLSEMQENGLKPNVVSYGSIVNAFCKNGKIPEAVAILDDMFHKDVLPNAQVYNAIIDAYVEHGPNDQAFILVEKMKSNGISPSIVTYNLLIKGLCNQSQISEAEEIINSLSNHRLIPDAVSYNTLISACCYRGNIDKALDLQQRMHKYGIKSTFSCVPLRNGMLQRLPVYFVYGDGSIFQKRNLATQRAGQGLLLFLGADIHCFANWPATAVVALYDDPWSGGGGGNAGWRGWRQRRWMADDGRAAGGDVGCGRGRRRRRRQGRGAMTTSRCRCSLHALDAGGRRAGGLGNARRRAVPPPHPNLRTRVVQGERKLYAWDPRIAMLFGLAKFGH

SEQ ID NO: 199136 - protein, 306 aa, Oryza sativa
  Clone ID: PAT_MRT4530_94729C.1.pep
MDAAAPAPPASPPLAVHLVTGGGSSPEHALLLRSLAAARVVALDAEWKPRRRGPAVADDPSAAAAATPPPLQFPTVTLLQVACRGDGDGGGAAAAEVFVVDLLAVPLAELREPLRELFERPEVLKLGFRFKQDLVYLSATFAAALGSSAGFERVEPFLDVTNAYYYLKGHDMQKRLPRETKSLATICEELLGVYLSKGLPPWDPSAGGDGCPKFLCDVMVIDTFQLKISEDKLMSRCTKCNGRFIQKPLTLDEAIEASKGFQIIPSCLFKRNLEFWKCTDCNQLYWERSAKLQRLSDLWGFSRPGW

SEQ ID NO: 199137 - protein, 78 aa, Oryza sativa
  unsure (1)..(78): unsure at all Xaa locations
  Clone ID: PAT_MRT4530_9472C.1.pep
MGSAMDPTFPASRASPLHHLSPPSSSLPPPTPAVPSAGNRFESRETAFGVCVSALVGGGVXMGEDSRDQRRDKTGVMG

SEQ ID NO: 199138 - protein, 80 aa, Oryza sativa
  Clone ID: PAT_MRT4530_94730C.1.pep
WCSVRVRSLSNGPLVVCPWSWSRIVQSSFLDVYGEISTDSWFDSPRLRVASWPQLRCCGSPRASSSNHHLLPHACAHAST

SEQ ID NO: 199139 - protein, 57 aa, Oryza sativa
  Clone ID: PAT_MRT4530_94731C.1.pep
LIRYVCVAELFLLRIEKENRLYYIDSFHSTSHIRMDAAEAAGRTTKPPYSPRSQSQV

SEQ ID NO: 199140 - protein, 198 aa, Oryza sativa
  Clone ID: PAT_MRT4530_94732C.1.pep
SGAAKKPLLSTAVNLSTVVADAAYVGFSSASSIVLCKHYVLSWSFRLGGGAAAPALDYAKLPKLPRIGPKPRSKALTVALPIVTTAIVLTAVAVGFLLLRQRLRYAELREDWEVEFGPHRFSFKDLYDATGGFKDKRLLGAGGFGRVYKGVLPRSRTEVAVKRVSHESRQGMREFIAEVVSIGDSTRTRAIVGYCGAK

SEQ ID NO: 199141 - protein, 53 aa, Oryza sativa
  Clone ID: PAT_MRT4530_94733C.1.pep
ADFAEDVQLLQERTDEEGPVHPVLALPNRRQCVDHRGQETPRVLVQDSILLSF

SEQ ID NO: 199142 - protein, 98 aa, Oryza sativa
  unsure (1)..(98): unsure at all Xaa locations
  Clone ID: PAT_MRT4530_94734C.1.pep
QSMSSCACACLGGHMCSAMGVRKPAHMFMNKLGLTSHEHEDYVVINHSWLFTSTGMSRLLARPNLXLINAVSVEDLITKDGRVXTTTTNWALASTNHD

SEQ ID NO: 199143 - protein, 43 aa, Oryza sativa
  Clone ID: PAT_MRT4530_94735C.1.pep
WWHATVVATSYVSIDNTCHAATVFELAQAGSVTFTSMHSSSGI

SEQ ID NO: 199144 - protein, 222 aa, Oryza sativa
  Clone ID: PAT_MRT4530_94736C.1.pep
MEQQPPPLPPSACRRYRSSARRSRRFYFSLAAQPPPTPPSAPPSCASQPHRLFFFLRTVQPPPSPPSTTATVVVPTLAMEWHEALGGTGSASPPLPRRSRRSGLAGLKMARAASTASRWRASAEQGSGEDDYGGSVVPDAGFLGGGRDGGDFVNLKNLLAQYSKMLIGVREPSPEKKSTRTSMAEATRMKESDADDPLKLYKMGLTRLSKKTKSKPTSEERS

SEQ ID NO: 199145 - protein, 115 aa, Oryza sativa
  unsure (1)..(115): unsure at all Xaa locations
  Clone ID: PAT_MRT4530_94737C.1.pep
PAAAAADXRVVPHRLQPSSQPMEARGACTAKSKXALTPLPLPAMAAKKGEEHQRRRRPFPNLYQSLASLLHIILAVITDTSSVVSNTRISKYKHFSVFFKIFPNISPPIHFEKHA

SEQ ID NO: 199146 - protein, 74 aa, Oryza sativa
  unsure (1)..(74): unsure at all Xaa locations
  Clone ID: PAT_MRT4530_94739C.1.pep
PPPPPPHHDRRANPPNRLHFPPHRAKFPPPPPPPPPPHXASTSSPLPPPRHGQPPPPFGGVAEECGGGNRKFAR

SEQ ID NO: 199147 - protein, 103 aa, Oryza sativa
  Clone ID: PAT_MRT4530_9473C.1.pep
MRKRTFSSVKPSTHQPSQPSRLNSPRRSSEPAGDSERKQPATKCEIASYRASPATATAATLAGEKKRFPLLAPSRLRVRAQGNKKAKREARPTEAKKDPNPGG

SEQ ID NO: 199148 - protein, 52 aa, Oryza sativa
  Clone ID: PAT_MRT4530_94740C.1.pep
FSQSQRYRASFQVGLFYLFSVAVAAPQFVRTRPVRSVGRRACGGGHLIRSKR

SEQ ID NO: 199149 - protein, 483 aa, Oryza sativa
  Clone ID: PAT_MRT4530_94741C.1.pep
MARRADARGGGGGGGGKFMSRMVTGQKPIHVRPPRPEKERVDMVPRDVVERCIVALFEKRGSTREAAMEDLVGALEGHVSAREVSCKYTTIVSRCVFSLKKGSVREARLAYRAIGILALTLGGGGDDTAGAKDVLAEAFPFLAKTVEASHDMAKVLAAIDGLAVATFAGEDGDDEIERSMDAIWGGVIDPSSAGPGGSRLAAGDARKTTPEALAAAVSAWAFLLTVVHDRYEAEEGESCKDKIALLAKLLDDHDDRGVRVAAGEAIAACVELKLAHDTPPEDMEALNATVSYLATEPSGKGAGDKRRHAGQKDIFRQIEIFLDDGEAPTKSVRTSSSRQSVLKVTTWTKLLQLNFLTRYLGNGFHSHLQHNPLFGETFEVDGDEVEGLPAARKMMSRKQREKKRTLERRRCREAVWKEKNKFGLPEEEPERGTTALMLLPALACCHHMLPPVHRQPHLLPPTAPATASHMLPPVQQPILLLEY

SEQ ID NO: 199150 - protein, 1196 aa, Oryza sativa
  unsure (1)..(1196): unsure at all Xaa locations
  Clone ID: PAT_MRT4530_94742C.1.pep
MEEIEGNLLESSIGWLADTIVENLDNDKFGAWISQVGLADDTEKLRSEVERVEVVVGAVKGRAIANKPLARSLGRLREVLYDADDAVDELEYYRLQHQLQGGXRVHKKYIVLPFFVTQDVVPSSETELXAGIASSSGGKKRSKAWEDFDITEKENGKAVKARCIHCHTVVKCGSDKGTSVLHNHLKSDNCKKKREAIGPPPDPSSAGEGAPNAPGNSVGRKRMRMDGTSTLHEAVSTHPWNRGELSNMIQHMTHQLQEAVNGVMRLCGYASLNQRCESTPLAPNAITSSYPLEPKMYGRDAEMESIKNLIMGNKSNDITVLPIVGIGGIGKTTLSQHVYNDPEIGNQFEIKIWVHVSDKFDVVRITREILGCVSNRSYQGISNFNMLQQDLEKHMKSKKFLIVLDDVWDVTTEDCWNKLLGPLRPNHVNASEVTGNMIIVTTRILTVAQRCGTAGSINLEALEDGDIWSLFKAYAFSTDQHGSNQNLENLGRKTIKELKGNPLAAKTVGSLLRRNLTEDHWINIIENKEWQSLKHTDGIMHVLKFSYDYLPNQLQQSFSYCSLFPKGYSFSKAQLIKIWIAQGFVEKSSEKFEHKGWEYLTELVNSGFFQQAESWWSSSVVFVMHDLMHDLARLVSQTECATIDGSECRELAPSIRHLSIVTNSAYCKYQNGKLSRNEEFEKSLMKVMSRSKLRTLVLIGQYNHHFFKSFQDAFREAQHLRLLHITAAYADLDSFLSSLANTTHLRYLRFKNKESHGALPHALSKCYHLQVLDIGSYGSPLIPDDINNLVSLRHLAQKGVCSSIASIGEMASLQKLTNFKVENSIGFEITQLQCMSEPVEPGVSRLENVTTQQEASGASLKSNHCLEGLHLFWKGVRNGYDSDGNRYDSGGSSMHSETEGERLQMSDSNGAPSLDHILDIASEELEGLEPHHNLKYLRISWYNGTKAPTWLSTSLTYLQTLRLENCAEWHTLSLEGLSLLRKLVLIEMKNASVLSIRSPQDIILIGMQNLHTCSCTSMVDFNSSLRILKIKRCPVLKVFPLFENCRNLGCSWLPHLSNLTIDDCPDFTVPHPFPPSTTVSEFFINGISTLPTMSDQASVHDYSLQTALPCFIGKPVRLKKLLVQNNASLECLQLQCCTALEELEIRECSQLTKIEVSQSLCNLRFLKVYKCPSFHLPIAGQILPSSPPPLLRNSEE

SEQ ID NO: 199151 - protein, 74 aa, Oryza sativa
  Clone ID: PAT_MRT4530_94743C.1.pep
MGVINIGINGFGRIIRLVVNVALYSEDVELVAVNDPFITTECMTYMFKYDTRHGQWKHHQVKVKDSKTLIFGTK

SEQ ID NO: 199152 - protein, 492 aa, Oryza sativa
  Clone ID: PAT_MRT4530_94744C.1.pep
MASTSGTAKDQPVHGRATQRRESTSTSTAAAEGGAVASQPPRPPQPRPGTTRPPLWRPPRWPWGSSSSAATAAAPGGASTAAAAQGGGSAASRPPRPPRPPLPPRPPRPPLPPLREPGEGGGRGDGRGATGTGSSSAAAAVDRKGKKKVDEGDRDPEQALRKSGPLEGKLLQSSIRAYQGPPAAEKPSGAPPAATPPARNTGRLGLSDREADDALNDIDLAMARQLPVVDTTVQKEEEEKEKEKEKEEEEDDDDDEEGELLSHVSRRKNPLRSRIDGYISMDMNGKRRAILEIPVLFPCYIGVYKFHAFPVSLEQVLDREDTDEEQRLLAALEIEVKPMAMQIDYPEWATAFSWGHEVFKKLIENIIGWKNPASTYRSLAATWICSHKDEYEQYVDDLGDDYPLEFWCATNLLPPRLYTDHVPMRALAAAFRVPLQVENLHNGPAQDIYTADGVDVPRVTLLYTGAHYDILYPRPPGERSRRRAAGWLCRFW

SEQ ID NO: 199153 - protein, 175 aa, Oryza sativa
  Clone ID: PAT_MRT4530_94745C.1.pep
MVRGSVVVINDQGGIGAVTGDRHPKNVLVRPISWNTQSQPKGEQGGSGSLLSMLADEEEQGGGVSLLSVLADEEERRATTAAELEPHAQPAEARGGRRARQLGGGGKARQPARPSVAAVPSPQTGMPTSTLTKHLRGLPLLLNRRRPRHVVSPTAAPLCCLRRATPLLPLCEAYA

SEQ ID NO: 199154 - protein, 118 aa, Oryza sativa
  unsure (1)..(118): unsure at all Xaa locations
  Clone ID: PAT_MRT4530_94746C.1.pep
MCGILGVLGAADWSQAKRANVLSCYRRLKHRGPDWCGLHQCERNFLAQQRLAIRSPLYGDQSVCNADRTIVDLATGEIYNHKKIRKQXLSKHTVSTCRDSEDIMPMYEEYGQDFGGML

SEQ ID NO: 199155 - protein, 511 aa, Oryza sativa
  Clone ID: PAT_MRT4530_94747C.1.pep
MPPCRGGQVVAYGSGGGSALVEADGMEESLARPSLTVEAHSTEQRHRRYGVREVAVHLRPLPVSSSPKREQYKLRSASLQPPLEEHRLGSALENGLVAWGRPPWWARVGSMGAITRVRRTGAATDPHPIRSPNPMLPTVVDDPSAAAAAAVGAAASSSFPDADVYGNGDSDDIDFPSDPNHATTQAFSSAAAAAAAAGPGGGGGAGSGSGGERRPLFQRLWTEEDEIVILRAFAEFTAQRGTAFASHQYDTDPFYEDMRRRLQLDFSKSQLVEKLRRLKRKYRNCVDRLRATGQSFSFRSPHEQAIFEIARGIWRPTSDKHGRDADSDDDALPDAAAAVAVPAPANGEVRSPSSTRAQQRRGRRRRTAAAAAATATAADASEPPQPYPPAPAPAPVKAEDALPHFFPQGAAVTATAHVHGVDPASAAASAAANAEGGILAPLFKEMVRAMLTAGMAPPSLEPPAPGIPMKGERWRQQRILELEVYLRRIDLLQDQVRTALEELKSTPPATQ

SEQ ID NO: 199156 - protein, 221 aa, Oryza sativa
  Clone ID: PAT_MRT4530_94748C.1.pep
MSPSSPPVLLTLVIAPMLPTRAHQGGLPHATNPFSKAEPNRCSSSGGCNDAERSLYCSRLGEDETGSCTARTVVGSTKIGMMGRRKRTKGGEGEEQPRSHLLPKLLLLLLATIGIRPAAPVVDARPPPEHRISGAAAPCCEPLQKEISQKPFAYVDTSIWEAMCEATSFGGINVRLADSRKQMRKSIHFTVSKGSFQVWCIGISLSVHNTPCHAKCRATIY

SEQ ID NO: 199157 - protein, 89 aa, Oryza sativa
  Clone ID: PAT_MRT4530_94749C.1.pep
GELHKKGGEHKEGVVEKIKDKFTGVQGVGGDFKEKKGRKNNKEIKLGEEGYHHGGHIRRSSVSFLAVAPPHWPGGWVHSGGHGDDWRSL

SEQ ID NO: 199158 - protein, 55 aa, Oryza sativa
  Clone ID: PAT_MRT4530_9474C.1.pep
HHDDHHSIVQLFFFFFSFLSFPHFFFLQIYLIKRREHDCPREKIFYLNVVSLSLR

SEQ ID NO: 199159 - protein, 104 aa, Oryza sativa
  Clone ID: PAT_MRT4530_94750C.1.pep
PRVRGRVGAHVHGVDPASAAASAAANAEGGILAPLFKEMVRAMLTAGMAPPSLEPPAPGIPMKGERWRQQRILELEVYLRRIDLLQDQVRTALEELKSTPPATQ

SEQ ID NO: 199160 - protein, 284 aa, Oryza sativa
  Clone ID: PAT_MRT4530_94751C.1.pep
RFPLPPLSQSALSPASPRPRAPNWPRIRAPLAAGFRSVQDSMVFSHNKNSNQFDPLSYVNLSGLDADSQSVSFTDMNSRDAPSNSHVTDVGKENMLNNPEESKIASTGLKPGSPISPENFSFSSLPGSSCHLSTLDHGKRPLSDVRPFQVACKRPKQIDENTWSTSTFETSFSDLADETREPDYIYHNSGISACNTSSSIPYSNLEQLIGEENLYLPDWVTTFPGYTGDFWPAPVADQVDDIDSPIHDHLPRKAVAIGPDHQADIPEWRPRISMTVPYGSGSLC

SEQ ID NO: 199161 - protein, 282 aa, Oryza sativa
  unsure (1)..(282): unsure at all Xaa locations
  Clone ID: PAT_MRT4530_94752C.1.pep
MSNEVNHVGKAPMFNGTNYSTWKIKMSTHLKAMSFHIWSIVDVGFAITGTPLTEIVHHNLQFNAQGMNALFNSLSXEEFDRVSNLETAYDIWNKLAEIHEGTSEYKDAQLHFLKIQYETFSMLPHESVNDMYGRLNVIVNDLKGLGANYTDLEVAQKMLRALPEKYXTLVTMLINSDMSRMTPASLLGKINTNDMYKLKKKEMEEASPSKKCIALQTEVEDKSKGKVNEGGQEAERERERETEKEKERKEKKREREKGEEKKRERMEKKRKVIINLLKFIVT

SEQ ID NO: 199162 - protein, 64 aa, Oryza sativa
  Clone ID: PAT_MRT4530_94753C.1.pep
SFAMYVPFCLVGKTVAGASLCLFGLQAVLIAEFGSRCHSSWRWKRPHMLLYNYLSWAFVVLRVY

SEQ ID NO: 199163 - protein, 358 aa, Oryza sativa
  Clone ID: PAT_MRT4530_94754C.1.pep
MLPHESVNDMYGRLNVIVNDLKGLGANYTDLEVAQKMLRALPEKYETLVTMLINSDMSRMTCRDRENCLFPNASVLIPVPGKAGTEPQTKPYPLDMWKYGSALQQRPELNPYSGRGATSHNWHAPKPHRKQGEQGNNNNSNNNVITKPRERGARTGSTGSGAHASAPRSTVDRAHAAGGGRDMTPASLLGKINTNDMYKLKKKEMEEASPSKKCIALQAEVEDKGKGKTIEETRAGGTYREIRNMARNECEGSTSSTPVQMYEAGWEPTGDAPGWTQAPCHSIGGSGWESARIQSLSRTLSKSQAWGEMSLPPPRVSALSKIEYEQPTIIQEPKIFFMLYDQDHIPTYLHMFNSYTGS

SEQ ID NO: 199164 - protein, 638 aa, Oryza sativa
  Clone ID: PAT_MRT4530_94755C.1.pep
MAAGSSAADSPSSGSSLPLPTLFKRSPCLPPPFPPLAVLSPRRNRARAVVLSLPFQCPSSRNKWRGRWFYLQIEDSDPVFIVLEEQPDKIPSWTAKPALTPSLQSFIDIIDDLRVRGLSGYEVTANFIGRRIQPLQARAHPAFGYSGPEDATRVSPRGLSGATMEHHVAQVMISGPTTTSNVPTPFCEREAVEREAAINALPLTDVIGPLVDHQTAASLKEDVAREASDAAVAAAAATTSGGKIPKTGRKFSSVLGNRWKMPTPSASDASPPPPRRQRLVTLGEKARAKVAQDGSGANSSASPAVASTEVVVMPRSRKVTPSGPASDIAAGRGLPAAVLTWEELQVEMGCILEAGARGISHKIAEARAVAEAAVNERADRLTRDLAEVRKDLQKMRELVAGNERQRQGLERHMSELENNLLEIRGSLRVTYTGLHQLAGECGVKTTISANPNEFSLTSSLAELATAMEAIPSKHAARIGEETSNGIYTGACHVLACVRLAHPELDLQKILDQGAASDARKDVMEEVFACWADLESVLADRDRRIQYWRTKFEVAELERTILEVKRDRAVEMLRGREVWFNSYLRSCCTTMAVVCRELRVPCGGPEESAAGYISWLNGACAQLEGIGGRIDEALKQECR

SEQ ID NO: 199165 - protein, 158 aa, Oryza sativa
  Clone ID: PAT_MRT4530_94756C.1.pep
TSGSPGLQEFGTSSCRIRHEQTLAASRFFSSSPRPRHLTSTRRRTHGVRHRHVRLPCRDQPAAVPRHQHLLLQQGRSSSRELISKFLPVHWDKITVPKAFTDSNKLRIPTRELSFHICPRTRASQPPFRSSNHWFSALTKFGTLSDNLRVPSPQVPGD

SEQ ID NO: 199166 - protein, 279 aa, Oryza sativa
  Clone ID: PAT_MRT4530_94757C.1.pep
MADGAKLLLWLLLLSSSPWCFCSELDVQCLETLYRSVIDSNGILQSSWTFVDNGTDGYICKFTGVECWHPDENRVLSLRLGNLGLQGPFPQGLQSCTSMIGLDLSSNIFSGPIPADIATQVPCLTSLDLSYNSFSGPIPASISNMTYLNTLNLQHNQFSGEIPRQFDSIGRLISFNVADNLLSGPIPSSLQKFSASNFAENQGLCGAPLDNCPRRRRWRLRLHRINDESSIGAAVGFVVGFVVAFYFPHWFVFSKRLHPYIFQIWSIPSGNLSANLRRT

SEQ ID NO: 199167 - protein, 203 aa, Oryza sativa
  Clone ID: PAT_MRT4530_94758C.1.pep
LAEISIAPRIMTDVDGALKAKQMRAQVDEYLKRPEGSLFLTNLKQKLLLPQNEANVAGTRYNVPLVNSLVLYVGIQAVQQLQQNKANASAAAAAQISQSPQMDIFQIETATEMFRNLVMTMDTEGRYLILNAIANQLRYPNSHTHYFSFIILYLFAEATQEIVQEQITRVLLERLIVNRPHPWGLLITFIELIKNPRYSFWTR

SEQ ID NO: 199168 - protein, 154 aa, Oryza sativa
  unsure (1)..(154): unsure at all Xaa locations
  Clone ID: PAT_MRT4530_94759C.1.pep
GADAAHTWRPRGSRAGGXLDGPDLPPGRSDXWRRLAAGRARARPKPTRRPWRAAAQRDTTASQGGEGPTVESSGDRRRVAAHGERRRRGPEWKGSGAKRERXKTTGRCSPGFSRHEGAMANGAEAGRGEVDGTTRTTASATALMARLGTVASGG

SEQ ID NO: 199169 - protein, 73 aa, Oryza sativa
  Clone ID: PAT_MRT4530_9475C.1.pep
WARVSKTPPWGSQDLIERNFSPPLTGPQKTAGCLQGKNLPEDPTRPIPHSRPRVIPGKLRTAPRLTSTFKIGT

SEQ ID NO: 199170 - protein, 36 aa, Oryza sativa
  unsure (1)..(36): unsure at all Xaa locations
  Clone ID: PAT_MRT4530_94760C.1.pep
IXXYDIYTMLXDVAFVHISCMILSVLINXIMRFAKC

SEQ ID NO: 199171 - protein, 115 aa, Oryza sativa
  Clone ID: PAT_MRT4530_94761C.1.pep
GPRAFRSSIFAKGPPRVPWKQRRRRRRSREQPKAAEGTGRPQKKRRRRSTWRPCPSASRRTRAPPPSARTPLTPSAPLVPPTPRRLAGPKAFAQSAKTTRGLSFFLFCFYNPRSE

SEQ ID NO: 199172 - protein, 188 aa, Oryza sativa
  unsure (1)..(188): unsure at all Xaa locations
  Clone ID: PAT_MRT4530_94762C.1.pep
MATSFQGTTTKCMACDKTVYLVDKLTADNRVYHKACFRCHHCKGTLKLANYNSFEGVLYCRPHFDQLFKRTGSLDKSFEGTPKVVKPEKTVENENAIKVSSAFAGTREKCVGCNKTVYPIERVTVNNTMYHKSCFKCCHGGCTISPSNYIAHEGKLYCKHHHIQLIKEXRGTSANLRMTMRRHHNLDL

SEQ ID NO: 199173 - protein, 140 aa, Oryza sativa
  Clone ID: PAT_MRT4530_94763C.1.pep
MHHPRARYPPGYTSGGGGGGGGGGGGGRGNGGGGFEEGGGGGGGNHGYYGRGPQPQPQQQHYHHQAQQLHQHQQQQQHAQRNSSSQQQQWLRRDQATAAAASGEVAARTAAQLEAVDSSSEDWKAQLNLTAADFFYRTED

SEQ ID NO: 199174 - protein, 103 aa, Oryza sativa
  Clone ID: PAT_MRT4530_94764C.1.pep
NSSRKRASQSRTSRKGKGRSQRTKEKGFNKKKCGKRSKGLFRNFTKSNKKRGGLKKPGGNKKSLKKDKGGGGENPEKNEAAKKVPGGGPRKTRPEPWEKKSFY

SEQ ID NO: 199175 - protein, 469 aa, Oryza sativa
  unsure (1)..(469): unsure at all Xaa locations
  Clone ID: PAT_MRT4530_94765C.1.pep
MHHPRARYPPGYTSGGGGGGGGGGGGGRGNGGGGFGGGGGGGGGNHGYYGRGPQPQPQQQHYHHQAQQVGQHQQQQQHAQRNSSSQXQQWLRRLQATAAAASEEVAARTAAQLEAVDSSSEDWKAQLNLPAPDTRYRTEDVTATKGNEFEDYFLKRELLMGMYEKGFERPSPIQEESIPXQVCKELGKYLNIQVMVSTGGTSLKDDIMRLYQPVHLLVGTPGRILDLTRKGICVLKDCSMLVMDEADKLLAPEFQPSIEQLIHFLPANRQLLMFSATFPVTVKDFKEKYLPRPYVINLMDELTLKGITQYYAFVEERQKVHCLNTLFSKLQINQSIIFCNSVNRVELLAKKITELGYSCFYIHAKMLQDHRNRVFHDFRNGACRNLVCTDLFTRGIDIQAVNVVINSDFPKTSETYLHRVGRSGRFGHLGLAVNLITYEDRFNLYRIEQELGTEIKTIPPQIDLAVYCQ

SEQ ID NO: 199176 - protein, 1525 aa, Oryza sativa
  Clone ID: PAT_MRT4530_94766C.1.pep
MVAGWSCERRRSAGKAAPGAGRQRRRAQGDNGVERGPRRWLDLAPGNSVVGSGWHRASNMVGQGHSGQCGAVGIGGRSRTEGGWREADLARVGMVGAVGSRHDDGGGSGVVRPSGVTSIPVSQKSTNPFQGLDLAGERQGQQSCASLLLQAKRRRRIWGGRAFLAVYDRLVPDPQFASMELATGAMRSLLPKLLQLLEKEYGLQTGIGDVPSEQVDELVKLWARDVREASYEMEDIVDTFLVHDDGPDPTDPHMLLRLRKKLGKLFKKSKARRKISNLIQDINKKFEQVKARHVKYTVDSVVLKSLAATTIDPRLQNLYKRATELVGIDGPRDDLINKLSLGGDVDVSDKKMKVISVVGFGGLGKTTLAKAVYDHFKPHFKCRASVPVDQNPDMNKAFDDQVEPHFECGAFVPVGRNPDMKKVFRDILIDLDKEKYTNPNMMVLDEKQLMDELKEFVKEKRCFIVIDDIWDKESWKLIRCALQESDCGSRLVITTRISEVATHAGEAYKIQPLSRDNSEKLLYARIVDGEWKYFDNPSAKACEKILKKCGGVPLAIITIASLLASKPGEDWSEVYNSVGFGHEDNDDVDCLLYLCVFPEDHVIEKNSLIWKWIAEGFIHEELAAGLGLFELGERCFNELINRSMIQPVETKHEGYVDGCCVHDMVLDMIHSLSSEENFVTVLNGDERQKLPGSIARRLALQRVLVHKDGQLANITLKNVRSLIASQCFGSLCLHTPVLRVLDVINCAESETPNVLEDRDKTMPSHLGSLLHLRYLGLVDTYITKLPREVRYLKFLQTLDLRGSRIKELPEEVGLLTQLVCLRADWEIMVKIGLIGKLTSLQELWIEPAAAVYDDDAASVDDDDDAAAVDDTTKSTMKFVNELGLLRELRVLRTYFEDLNESMERALLESLSKLHNIRDLHIEGPPLVTRRVTSSARSVSCLHLRYLCLNCFVFSGLPAWIKSSLAPNLSCLDVVVLIVKEQDMETLARLPELRCLVLRLHETELVSIKIHTEDVGYFRKLRILRILGTSIWFDLHGSKCNITDNRSLASIIMPSLEFLEFAVHMRFLKDATQLGFDKLLSFEKLGRSSLQKVTIVLKCGDARLSEVEEVAAALMNSAAVHPKHPTVQTKWQDEQAVLSPYQEAYMHVSRTPELVNEAWKANIVSSGRIRALRMPVTEASSSKVICLLYRKSGKGLLALSSNAVHKLWKWESNDKNPAGMSTTSVPPQVWQPESDILMNDTANGNPEEAAACSLLSKNDCYLISASGGKVSLFNMLNFKTMTTFIAPPPSATFLAFHPHDNNIIAIGTDDSSILLYNIRVDEQHDKILTYLNRIAQVKWVLKGHQKKITGLLCVWSMEDWAKKKSRYIQPPSNHSGALVGDIMVQFHYDQKRLLVVHESQLAIYDEELECLCSWFPSDPLSAPVSSAVYSSDGLLIYAGFCDGAIGIFQVESLMLQCRIAPSAYIPSSVSSGGEIVYPMVVAAHPWKPNQFAVGMSDGAVHVLEPLDTPDDIISNSIQQGRFGDSG

SEQ ID NO: 199177 - protein, 119 aa, Oryza sativa
  unsure (1)..(119): unsure at all Xaa locations
  Clone ID: PAT_MRT4530_94767C.1.pep
MAAATLAAASMGVVTEVLGSDVVDEVDQPIIDYIANVLADEDFDFCAPDGHGIFDALGDLLIDARCVADXEHCLEVCSKICEKFGKHGLGKPKQAMLSLFTSFRLNDGMDYYGVPQKQA

SEQ ID NO: 199178 - protein, 170 aa, Oryza sativa
  unsure (1)..(170): unsure at all Xaa locations
  Clone ID: PAT_MRT4530_94768C.1.pep
KVSLFNMLNFKTMTTFIAPPPSATFLAFHPHDNNIIAIGTDDSSILLYNIRVDEVKWVLKGHQKKITGLVFSLSMNVLVSSXCVWSMEDWAKKKSRYIQPPSNHSGALVGDIMVQFHYDQKRLLVVHESQLAIYDEELECLCSWFPSDPLSAPVSSAVYSSDGLMIYAGI

SEQ ID NO: 199179 - protein, 210 aa, Oryza sativa
  Clone ID: PAT_MRT4530_94769C.1.pep
MALLVFTSRGGAARRGGGGGRVDERQREREREKAEKVLRPQEVGSRSRFVTVARSAEVACGARVAFSSFPCHGLGAPEVYAIRNPLYPFTPTDGWGPRSPGSHKSSTWRGDTCGPRGRGGQSPAHQTGMETGVSHVREGERGGGGGAHRVRDRPDRPSMQHGTGPRTIGFSVWARRVSFDGVVSRRPALCSWTRSTLSPARQTVRDPTGQ

SEQ ID NO: 199180 - protein, 1401 aa, Oryza sativa
  Clone ID: PAT_MRT4530_9476C.1.pep
MAELLSALLPALLKKAGESLSTEFSFIGGIEHRRSELYTLLLAINQVIYGAEEQASKKPAVKSWITKLKLAACDADDALDELHYEALRSEALRRGHKINSGVRAFFSSHYNPLLFKYRIGKKLQQIVEQIDQLVSQMNQFGFLNCPMPEDERMQTYSYVDEQEGIGRHKERDEFTHMLLSAKSDKLLILPIVGIGGLGKTTLAQLVFNDVKVKAHFQKHMWVCVSENFSVPDIVKGIIDTAIGNDCGLKSDNLELLQQRLREELSQKRYLLVLDDVWNEDEQKWEALRTLLCSCKMGSAVVVTTRNSNVASVMGTVPPLALEQLSQEDSWTLFCERAFRTGVAKSCEFVEIGTKIVQKCSGVPLAINSMGGLLSRKHSVRDWLAILQNNTWEENNILTVLSLSYKHLPSFMKQCFAFCAVFPKDYEIDKDDLIHLWISNGFIPSKETSDIEETGNKVFLELLWRSFFQNAKQTRSRKEEYIYGYKDVTTCKIHDLMHDLAVSISGDECYTLQNLVEINKMPKNVHHLVFPHPHKIGFVMQRCPIIRSLFSLHKNHMNSMKDVRFMVSPCRALGLHICDNERFSVEPAYMKHLRYLDLSSSDIKTLPEAVSALYNLQILMLNRCRGLTHLPDGMKFMISLRHVYLDGCSSLQRMPPGLGQLSSLRTLTMYMVGNESDCRLHELKDLELGGKLQIHNLLKVTNPLQAKEANLENKKNLQQLALCWDSRNFTCSHCHSADEYLQLCRPEEVLDALKPPNGLKVLKLRQYMGSNFPMWMEDGVTLQNIVKLSLRGSVMCVKLPPVWQLPFLEVLRLKRMERLKYLCYRYPTDEEYGNQLVVFQKLKLLSLEWMESLENWHEYDTQQVTSVTFPKLDAMEIIDCPKLTALPNVPILKSLSLTGNKVLLGLVSGISNLSYLYLGASQGSSRRVRTLYYIYNGEREGSTDTKDEHILPDHLLSWGSLTKLHLQGFNTPAPENVKSISGHMMSVQDLVLSSCDCFIQHEGLQSPLWFWISFGCLQQLEIWYCDSLTFWPEEEFRSLTSLEKLFIVDCKNFTGVPPDRLSARPSTDGGPCNLEYLQIDRCPNLVVFPTNFICLRILVITDSNVLEGLPGGFGCQGTLTTLVILGCPSFSSLPASIRCLSNLKSLELTSNNSLTSLPEGMQNLTALKTLHFIKCPGITALPEGLQQRLHGLQTFTVEDCPALARRCRRGGDYWEKVKDIPDLRVTRTLASFLSCSEILQHIQIWRPGVLKTYHESFAGDLELVPCKPEFVRGLRYDSLLLAGHDRRRGAQRPRECYGRGLYYSGILQFLRKYLELDVKQHYGCDSGEHALTEKTWKGTGMLAGAVCHAHYLQVDLIFMVGNLAIGELIWKATAPARVKFVWLAVKGRCLTADILLKRGMAS

SEQ ID NO: 199181 - protein, 364 aa, Oryza sativa
  Clone ID: PAT_MRT4530_94770C.1.pep
MAEIGKGLVFSPSDDQLTDGYLRSYLVRTSLDDLPSAATSYFHVADVYSAPPDQLVAGLAPAPGTGDGDGRVWYVFTPVRVLGSRGARKARTVGGGCGECWHAEGGPKDVKGSAAGGKLQKFSYKIKTALGAVVKPGWLMVEFSFPGSDHLALCKVYRSPRTSRYGAPSPPSSAASSPSRAAPPPVSSTSGRKRKAEEESDHPEAPASSAPRRTLPASEQHVDVDAAAASEPDQGGYLSTDQLDSVAAFVQEHEAFVQEHEGDEEFCKSLGFDERSDPQCWTNFFLSALEEFGPAPETDAAAVAVAAVEPGPCPEYEEHDDTATTAASSHAYDSATAELVNLSDKEFYDIIFSGDQQGGAAVAG

SEQ ID NO: 199182 - protein, 102 aa, Oryza sativa
  Clone ID: PAT_MRT4530_94771C.1.pep
MVASCLSRSVKYPLSYGFAYSYVLTPVVHGERLRPLEARDLHRLRLKANGPKWVQVNNRAGLENRQASKLCRRGRESTKASRPETNRGRRKRKQQQCGVLKA

SEQ ID NO: 199183 - protein, 1794 aa, Oryza sativa
  Clone ID: PAT_MRT4530_94772C.1.pep
MSASGFGRDAGPLNRGPGTAPFAFGAGAAAASTPPAPAPFPSARPVAPIGPPAATAAASRFPSPRPQLAATPRPPATSPVPVPSSSAPRGPAFAHGAANPVRFPSSRPAIDPGVPAATARHVGRHLQPQPRPAASSIRSPVRPVISSRSRSTSPLSNQRIDSPADYDNGMGKRRVVNYADPLFENGSAPIEDMRTQPSEFGKTARSPTSNITSKFRPPSGFQNYHPVQAANPLEYKPNVTPAMFGNQNLHDVRAAPSPALNNNRLVPGSGRLRPALGGGASPTVLGDASQYDNSTQSVMARQEMSEHMRPKRFLASFQSRSLDHNISKRSRSPTLSHQDADGAEAHQDAGVNARRLIDYTDSLFDDGMVETSKRMKSPSLEFTSMVKSPSSDIRGDTRPSPAGLRSNSAAQNLRSSVDIQKASSSVPKVGNQVQFRIGDVRSPPYQIDPYSNEQNTAAVSPPKPSILGASKRIGTSLLDFTDDDNMIPSTESEREKQAKAKRLTRFSVELSRPVDNINDFVKAQKGSADKQKQASSMGKVPTGSKDDIDERSMADADSPGLAAIIGLCPDMCPEPERAERERKGDLDKYERLDGDRNQTTELLAYNRTAERDADLIRPLPVLQKTMDYLLSLLDHTYDDNFLGLYNFLWDRMRAIRMDLRMQHFFNQDAISMLEQMIRLHIIAMHELCEYNKGEGFSEGFDAHLNIEQMNKTSVELFQMYDDHRRKGVLFPTEKEFRGYYALLKLDKHPGYKVEPAELSLDLAKMSREIRGSPDILFAREVARACRMGNFIAFFRLARKATYLQACLMHAHFAKLRRQALASLHSGLQNTQGIPISQAVEWLAMEDEDIESLLEYHGFGLRQYEELYLVKEGPFLNSETDFPSGCSQLVHLKKSQRIINDVSSGPVCAPTSQKEALASNSGGFALTRGHVHPQPSLLVKREFGLSFPGPVSPTSGRQTTSLYSGSFSPKAGNKQSSLPSSSPMSPTSGKKESVHVPFSTPPHTTKQAILPRTGWIDEQKVASPKAESNTKAADDFIPEDQDGGLVGFPRGQPDVPWTQANIQQDSALEETKFSPPLADGVSLDYSNMHGEENEFRPDGSSIDADMDEESPSHREVNFIQPESFVGSHLSDSDHKEYDDHNIGDRAADNMLPVVVSPKKIISNERLKIILRKWRHRAMDKRFIREQKNALAIAALSSLSLGPPVHQTAVVPVHAVHDLDISHAFKERHSRQQLSLSPLNVSELAGPILTERNPDARCICWKLLVLVPPGTMEFTSNYASKWLLKKLMGSGNEDAGLLFSSADLSIWTKWNSSPDTCCLSIARAIDQQVIGNDIANGTNCIIFLVSETIPWEMQKARFSSLLASIPAKSNLPLLILSGDTYNEEYDYASQSVIDRLGLGCLSEEKIASCLVIFLVADDMEGYANGFFDDEKLRGGLKWLTRNLPPQPDVTLVKTRELLLNYLNPSLDLLNSRAAPEVCPEHCISVFNKSVNQLTEEISAAAYTASNQWPAPEINLLERSSSERIFAEMFLPSIGWSLPSRIQPLVAAIKSCKLPEFSYDMSWLNKGSYMGSQIQDQKLYLEECLTKYLTKSAHLLNEAQAATEVKVMVQKGVGLELRGSQYHLVPRWVTIFRRIFNWRLAKLSTGEFSEAYVLSQHLYQTPAADSLPNGGTQHDLSASSNTTDEAAPILEDRGMAPSVSSRLSLDEIIEISCDLDAVSALPPAKPLPPQPPTQVRYEPQPPGGVNGVLGAGDGVRMPRRTELRDLVPIERDDKLARLLEQCSKLQDRIDGTLSIYF

SEQ ID NO: 199184 - protein, 88 aa, Oryza sativa
  Clone ID: PAT_MRT4530_94773C.1.pep
KMAGLLASQVSTLVGSGAVRLRSIEQTCDRDGSSQLIPFRLEYTRTCTIGPGVFLLVGLFLNLMGFAGWAGLPRVHEWGDIQGKTWLS

SEQ ID NO: 199185 - protein, 90 aa, Oryza sativa
  unsure (1)..(90): unsure at all Xaa locations
  Clone ID: PAT_MRT4530_94774C.1.pep
FVKKAQKKVCAYIAFKPLPNFMVSHMQGKSSISRSLRNVVLANAYRISREEAQRLKHNKAIVFGAFSXFLFWCYXXCFFANNFIGGTACV

SEQ ID NO: 199186 - protein, 143 aa, Oryza sativa
  unsure (1)..(143): unsure at all Xaa locations
  Clone ID: PAT_MRT4530_94775C.1.pep
CGSGCGGXCXXGGSAPMAVESSKDDVHAKCAGCGSGCGGGCXGGCGGGMVMEASKAGHVKSGGCGSGCGGGCGGGCGGGMVMESSKAVHVKSGGCGGGCGGGCGGGVAMESSTVGHAKSGGCGSGCGGGCGGGGCGAMLHAST

SEQ ID NO: 199187 - protein, 230 aa, Oryza sativa
  Clone ID: PAT_MRT4530_94776C.1.pep
CHFKILCLVVYRNSFVRPVVGYQLSKNPETYSNRILRIQYAVSLIIQGGYPFPCSIKKFVYIKHVVMTIGLNTWGLVLYNNLEAFMLFPLEMLLTGELNQMKGDNAKVTNWLSSDVILPVALSCLFGLSISFFGFSCRRAISATGFTVLGIVNKLLTVVINLLIWDKHASFVGTIGLLICMSGGVLYQQSTTKPKAPKAEPKEENDEEQQKLLEMQQGLESSSTQKQASS

SEQ ID NO: 199188 - protein, 930 aa, Oryza sativa
  unsure (1)..(930): unsure at all Xaa locations
  Clone ID: PAT_MRT4530_94777C.1.pep
MDGEQEARWLAAQGVAVGADMVAAALRQLEFLAAVDRRRWLYEGPLLERAIHRYKSCWLPLLSKHTQAAVVDGPLVVPLDCEWIWHLVRLNPVQYLKDCKRLYGRILDNRNAPSSETAVAARPSGRVPPDRHAKDPLAPVXAGSSGYGGMAAESGADDVAYDGVASVGGYASLLYAIXDQLSQLRRCCHGAPFWTSWCSXVIKSNSQQIKMRLKKKTYDVDVIWHTHQLHPATYCHDMLKLIGRVLEHDDTDDDRSEGKKLDTGFSGTTKQFENAFGARYWKAGAMYRGNLPSPVTSNPQMFISEVDGEFSVGKAESQITILETTVIELFLQIVDIKNLPPAIPKENVYIWFTKNQPDMFISDGGRLDISTKTGKSIGASIQCEPTGELILTVLVDRESSSKKPKKIGKISIPLQEFTWSDSKLSFERWFELKPHDGHASSPIVSLRVAASSTVPVKAQQVLSMIRTEPFSLKSFLSPNSIKDQKMSCWTHFVYDCNTELIRLQIRDQKAKNGMVVARELVGVTKSSKKPFKLAEFVDNKWSLSNSNLCITNDMKPSKDGSILELKCDNKTIKLYQGKRLEFQRKCCNNHAEENASAITAVKFSAEHPYGKAVALLDTKSELIMVNEDRFLLPWIVMSFLFQDINVEDGSKLIGGAIAQKGAISEPDTAAMAMSAETVAAPANCGTCGTACDSNMAGDKVVAAARCKAARCKAVAASGGGGGQAESAGCGSGCGGGCGGGVAKVVEATKAGVGGHGKSGGCGSGCGGGCGGGGCGAMAVESSKDDVHAKCAGCGSGCGGGCGGGCGGGMVMEASKAGHVKSGGCGSGCGGGCGGGCGGGVAMESSKAGHVKSGGCGSGCGGGCGGGCGGGMVMESSKAVHVKSGGCGGGCGGGVAMESSTVGHAKSGGCGSGCGGGCGGGGCGAMLNAST

SEQ ID NO: 199189 - protein, 873 aa, Oryza sativa
  Clone ID: PAT_MRT4530_94778C.1.pep
MDGEQEARWLAAQGVAVGADLVAAALRQLEFLAAVDRRRWLYEGPLLERAIHREVILKMCIFQVQYLKDCKRLYGRILDNSNVESSIRAESKHQSEKVWAEQYPKEPFELENTSSSDNSIYANAGAAEDISYDLVAAVKRQSSFFYQVDTPTMHDQRFLEEALARYKGFLYLIKTNQENKMKLFRVPTYDVDVMWHSHQLHPATYCHDMLKLIGRVLEHDDTDDDRSEGKKLDTGFSGTTEQFENAFGARYWKAGAMYRGNLPSPVTSNPQMFSGEVNGEFSVGKAESQITILETTVIELFLQIVDIKNLPPAIPKENVYIWFTKNQPDMFISDGGRLDISTKTGKSIGASIQCEPTGELILTVLVDRTSSSKKPKKIGKVSVSLQEFTWSDSKLSFERWFELKPHDGHASSTPVSVRVAASSTVPVRAQQVLSMIRTEPFSLKSILSPNSVKDQKMSCWTRFVYDCNTELIRLQIRDRKAKNGMVVARELVGVTKSSKKPFKLAEFVDNKWSLSSSNLCITNDMKPSKDGSILELKCDNKMIKLYQGKRLEFQRKCCNNHAEEDASAITAVKFSAEYPYGKAVALLDTKSELIMVKEDWFLLPWIVLSFMSQDINVKDGEKLILIGGAMAQKDAISEPDTAAMATSAETVAAPANCGTCGTACGSNMAGDKVVAAARCKAARCKAVAAGGGGQTESAGCGSGCGGGCGGGCGGGVAKVVEATKAGGGGVGGGHGKSGGCGSGCGGGCGGGGCGAMVVESSKDDVHAKSAGCGSGCGGGCGGGCGGGMVMESSKAGHVKSGGCGSGCGGGCGGGCGGGVAMESSTVGHAKSGGCGSGCGGGCGGMAAKSGGCGGGCGGGGCGGGCGAMLNAST

SEQ ID NO: 199190 - protein, 889 aa, Oryza sativa
  Clone ID: PAT_MRT4530_94779C.1.pep
MSSSANPSVAPSAVYAEHLSNLVAIPSLSHENYYFLGPVGNPDTTEFIIGETNMIPFRLANPDLSHWKNTFKSWSSLEKSLPEKSWSTWFKRMSASKRVHWDEIGIGQALDLTIANSAKDEPLMAAASYFWSNTINAFLFNQGPMTLTLVDITMITGLDVTSLANPMNLKTRNQYDFKTKSIGGWSGYVAAYMGQGSVTPQEHVAFLLMWLEKFLFRGSSCGPTTNWQFVAEALETKRQFPLGKILLGYLYQMLNNASAKIAVGSVVGVGGPWWLLQSWLNLVVMKFVNRPSVTEAEFPRLEPVVDDDGEERTHRRCTSYGEYASTPADAGAKLSAKLLKDWFCSFYDCFLKEARIWFLYENSALLENPLDFRFEDINHERYQKSREVFSTTISPCILPVGIHQGRNIQVSYEFYHPTSSARQLGIGQLPISLFFADKIQCRGEISSTLMMDRLLNLQVHPLGSIENIELATFRSKAFDRWWGEWKLHLFHQSASMYMTDLFPNVIPQTTKFSPPHQSNSGKNIEYAPGLIPNGDGSSPPVIDYHAPRTSTLLQGFIREPADAGKKRRTRSSVVDTSAPAPKKKAKLKKPKPTDDLPALDPSIEQALDEDEIGEDVDQATDEKKRVAVKKKSATTTLTPARPPPPAPSSPVQQPSSNQTPSAVGSHHVEEEVQPAAPAIPVLADLFSFNIGDYLDETEEDTTSKAIAPLSDDVKKILEDISHRLEASSLDSLVVDCGSIRTRLHEVQALIPDELADVLTPAVYLEQHQFKLKKAKLRLAERRECKDIEATIQVNRQLVHEEKAKLDQLSEGPIKSNIDRLEARKIELLAQLQECNAELDIEHKKLADLPKSVEEQKARLKSAIKNVADLTKSLKVIPGTDAQDAQPLKK

SEQ ID NO: 199191 - protein, 80 aa, Oryza sativa
  Clone ID: PAT_MRT4530_9477C.1.pep
PTPSEKKKGRGKKKKKKKKKKKKKKKKKKQKASKYKMILLFANTLNYNLFGLFFNNILYWIKPWRLLGETPFIKPFFHLV

SEQ ID NO: 199192 - protein, 441 aa, Oryza sativa
  unsure (1)..(441): unsure at all Xaa locations
  Clone ID: PAT_MRT4530_94780C.1.pep
PAPPPPPPVENPPPPRMAAAGGAAQPPRQYKLAPQSELRVEVPPDAPVRVRLVAGTAEVFGTELPPEGWVPVPPRSKIAIFTWHGATVELDGVSESEYTSDETPMVVYVNTHAILDARRARARAAAAQGALPESSQGPRVIIVGPSDSGKSTLCKMLLSWAAKQGWKPTYVDLDIGQGSITIPGCISATPIEKPIDIVDGIPLEMPLAYFYGHPSPSVSPDVYRALMKELAQTLDKQFSGNSESRAAGMIINTMGWVENLGLELLHNSIEIFKANEKLWKMLKDAAKNKPNIDVVKLHKSKGVVPRNPKFRQKTRSFRIKEYFXGIANDLAPHSNVVNFSDVSVYKIGTHQAPKSALPIGAEPVADPTRLVAVNISTDMVHTVLAVSYAKEPDEIVSSNVAGFIHVTDVDIQRKKLTYIAPCPGDLPSKLLIASSLTWYEA

SEQ ID NO: 199193 - protein, 661 aa, Oryza sativa
  Clone ID: PAT_MRT4530_94781C.1.pep
MGRLSCIKRLPRFALRRGVSDAFLRPLLRTAFLLRRRRRLSTAESTHPPRRGRFRRDPDSDESKLVSLARQRGAAAARAMFDGMPRRDDAVAYAAMVGIHLWDRDLPHAEALYRAAPPDCRGIHLDTVMLDGYVKAGQVDRARRLFDGMAVKNVVAWTCMVSGYCRAGLVDEARRLFDLMPYRNVFSWTTMVQGYAHNGMLREAREMFDKMPERNVVAWTVMVKAYVDNGCIQEALELFNRMPQMNSYSWNAMATGLMSAGKVDDAVQLFDKMPHKNVVSWTIMVTGLAQNGFVSRAREFFDRMPKKDIPAWNSMITAYTNDGQVNDAQRLFDIMPSKNLVTWNIIIDGYSMNNLKDEALRLFLLMLRSAVSPDSTTLISVLVVSESTMEVRQIHGLSTKLGYQPETNLGNTLVSMYSRSGDLSSAWLAFRRLNEKDAITWTSMIQALANHGCAPCALQGFAQMLRCGYKPSSTTFTAVLSACNHVGLVEKGRKIFKSISHVYGLGPTIEHYSCLVDLLGRAGYVREAKEVVDGMQRDMCDEAILGTLLGSCMTHNEVEVGRAVGEDLVKIDPSGSGGYTLLANVFASGGMWNEVASVWKIMKGSKVKKTPGFSQIEVNARNHVFYSRDQMHSQRTEIYEMLNSRLVPQMKGSSSLGTDFY

SEQ ID NO: 199194 - protein, 149 aa, Oryza sativa
  Clone ID: PAT_MRT4530_94782C.1.pep
FLCGNTAISWRSVKQTLVATSTNHSEIIALYEATRECVWLRRMIGHIQKSCGLNIDNTPTIIYEDNAACVAQIHMGYVKSNFTKHIVPKFFYPHELQKSGEINVLQTKSCENLADLFTKSLPASSFHRCVRGIGMRRLSELQGSGGAKN

SEQ ID NO: 199195 - protein, 859 aa, Oryza sativa
  Clone ID: PAT_MRT4530_94783C.1.pep
MATATASSLSLLFAHPHSSNPRPFAGGPHLRRPLRAAPHRARCASDAATTATRHRRPAEENIREEAARLRGPGNDFSAWYVPFPPTPEDDPDERYSLDEVVYRSSSGGLLDVCHDMEALARFPGSYWRDLFDSRVGRTAWPYGSGVWSKKEFVLPEIDSDHIVSLFEGNSNLFWAERLGREHLGGMTDLWVKHCGISHTGSFKDLGMTVLVSQVNRLRRAPLSRPINGVGCASTGDTSAALSAYCAAAGIPAIVFLPADRISLQQLIQPIANGATVLSLDTDFDGCMRLIREVTAELPIYLANSLNSLRLEGQKTAAIEILQQFDWQVPDWVIVPGGNLGNIYAFYKGFEMCRVLGLVDRVPRLVCAQAANANPLYRFYKSGWTDFQPRVAETTFASAIQIGDPVSVDRAVVALKATDGIVEEATEEELMDAMSLADRTGMFACPHTGVALAALFKLRDQRIIGPNDRTVVVSTAHGLKFTQSKIDYHDRNIKDMLCKYANPPVNVKADFASVMDVLQNKLKVDELGVSQPGEARRRAVVGRGGRCEAAGQGGARRPGEVGGRATARRGGWRAAAGRGGEAPMTPLRRSTSRRCAPRHTKVEMALAVEADGLAHHVLLLVLVARANQRDGELHGQAVPCLPLASSAMATPTAAAPPPLFAHPHASNPTRPPRPSLPARRPSPPRGRRHPATNARARRPSGEPCTNGPRRSPPRGTPSAACAGNPRTPENVPHGRFGSRWASAPSSTSALPAVPPRRGSRSTVSRAPRGSTSSTTTRGCPGRPRRQGLCIRPGSYTPLCARTASAHHASPHPESRPPARSQLLFNRRRDNRVVRQQRVGVGDSVVLAPRDGHSSHRAAAS

SEQ ID NO: 199196 - protein, 65 aa, Oryza sativa
  Clone ID: PAT_MRT4530_94784C.1.pep
MADSGDSSPHSTAAIDDEHHQLSYANGETKILSLKRPLRFANFTTRLVGRRLPLACRREVNCSEL

SEQ ID NO: 199197 - protein, 451 aa, Oryza sativa
  Clone ID: PAT_MRT4530_94785C.1.pep
AEATAEVGAIPNAKLGQPSAAALAEQALLGSDASLAVHAGNHDQSPLRSIAFPPLLRFFSDPFRAFDIPIEGERLGRRIATDAITTPVVNTSAYWFNNSQELIDFKEGRHASFEYGRYGNPTTEALEKKMSALEKAESTVFVASGMYASVAMLSALVPAGGHVVTTTDCYRKTRIYMETELPKRGITMTVIRPADMDALQNALDNNNVSLFFTETPTNPFLRCIDIDLVSKMCHSKGALLCIDSTFASPINQKALTLGADLVIHSATKYIAGHNDVIGGCISGRDELVSKVRIYHHVVGGVLNPNAAYLILRGMKTLHLRVQCQNNTAMRMAQFLEEHPKIARVYYPGLPSHPEHHIAKSQMTGFGGVISFEVAGDFDATRRFIDSVKIPYHAPSFGGCESIIDQPAIMSYWDSKEQREIYGIKDNLIRFSIGVEDFEDLKNDVVQALDKI

SEQ ID NO: 199198 - protein, 65 aa, Oryza sativa
  Clone ID: PAT_MRT4530_94786C.1.pep
MTINRSHVVSFLAGAALPALLLFFLASDRGSSDVSDLAGHGFEKEDYPVVDHESDLQTAMPTTVR

SEQ ID NO: 199199 - protein, 165 aa, Oryza sativa
  unsure (1)..(165): unsure at all Xaa locations
  Clone ID: PAT_MRT4530_94787C.1.pep
QRPRPFVWLWKTKCVMKIKVFAWLPFTDRLNTRDKLDRRHCAKEDDDLSCVLCNGGHRETRLHLFFTCPFSIECWQHFLGFRGMLHWSFSXMIVLARVNFGRKGFLEICFIALWHIWKXRNGLIFQNVPPSFQSWRSLFKNEILLHMCKMKDPMKQIVFDWLQTV

SEQ ID NO: 199200 - protein, 48 aa, Oryza sativa
  unsure (1)..(48): unsure at all Xaa locations
  Clone ID: PAT_MRT4530_94788C.1.pep
SNSSQKGSFGPFPPTVSSLPATSLLTTLTLASDPHIDSLXLKPQFICQ

SEQ ID NO: 199201 - protein, 114 aa, Oryza sativa
  Clone ID: PAT_MRT4530_94789C.1.pep
SLTRWPRAVVLSLLVVVAVHPAAADAGGDWYGKKSIEETVRKEVEKAIKHNPGVGAALVRLVFHDCWVNGCDGSVLLDKTPYSSSTEKAAANNIGLDGFDVIDAIKSKLGADVF

SEQ ID NO: 199202 - protein, 175 aa, Oryza sativa
  Clone ID: PAT_MRT4530_9478C.1.pep
PSLRPPAATVAPSVPDPSPSGHVTIRPSELSRREAQVLRARLTGELSRVRALLSDIDGWEARRRRPAEPPRQRGHVSPPPALQAAMRKRCTQILTRLRKQKISVWFNSPVDVERLKLHDYHAIIRNPMDLGTVKENLAFGRYPSHEAFATDVRLTFSNALRYNPADHHVHRFTRG

SEQ ID NO: 199203 - protein, 109 aa, Oryza sativa
  Clone ID: PAT_MRT4530_94790C.1.pep
PQPQELVPSSEPVVAEMAPASSVRPSVRVPLHPHQWLVWLWWALSTIGRLLQRCLLARRSLKTWIMNRRRIPGSVAVLPLSCLPLNPTPRRLGVPVYNPLPEPNFLPSQ

SEQ ID NO: 199204 - protein, 106 aa, Oryza sativa
  unsure (1)..(106): unsure at all Xaa locations
  Clone ID: PAT_MRT4530_94791C.1.pep
KSSSSWPNLAXXNSLANCGPHSDRHPSPLSLSATGVVEXXRHTPLLPRSSLPGAASSVRHHRRRRRCQLPSSAPSLATVATVVGSVARSAIAAEVAVRYRRIRGRX

SEQ ID NO: 199205 - protein, 76 aa, Oryza sativa
  unsure (1)..(76): unsure at all Xaa locations
  Clone ID: PAT_MRT4530_94792C.1.pep
VYEFPRVXSVHLWGVVPLASEDAISLMSGLCSWDPRRRPTAVEVLQHPFFQRCCYVPPSLCFKSSGYASTPPSSGG

SEQ ID NO: 199206 - protein, 113 aa, Oryza sativa
  Clone ID: PAT_MRT4530_94793C.1.pep
MSKFSEVLKKKNSDVDTWVTQNHKIYGLSYKDLKKSNQLSPTNSIDQAFFILPNEITNAEGSITNLIKHVVTISIEELAIIKSFKCIPKLSLITPLKVTNLQFTNRPFSHHHY

SEQ ID NO: 199207 - protein, 72 aa, Oryza sativa
  Clone ID: PAT_MRT4530_94794C.1.pep
LRNPPSELASISLLCHSAAPQRTCISDLAGCNELINNVPTAVVLPLNVPLYAQLIIQKLENCSCMVPPFFFS

SEQ ID NO: 199208 - protein, 136 aa, Oryza sativa
  Clone ID: PAT_MRT4530_94795C.1.pep
ESTASTNPNLQHHQPWASTHHVSQHTFQHHRSLHASCPTPPISKLALPARHTSFTAHTHQHPSLQGAQFLTHHAVLSHATTLALAQKAKSLKVPISSHRAHPSAQALQWSSRPAKRLPQGAQLRQESTIAGNPKPA

SEQ ID NO: 199209 - protein, 88 aa, Oryza sativa
  Clone ID: PAT_MRT4530_94796C.1.pep
NRYAYLSDRIARIGYEYGYFLPDTDTDMVSGFPSDTDNNLDIQKICFRIRVRTYSILIHIRDNPYLFPYLSYPYSFSWYVYHKTINLA

SEQ ID NO: 199210 - protein, 59 aa, Oryza sativa
  unsure (1)..(59): unsure at all Xaa locations
  Clone ID: PAT_MRT4530_94797C.1.pep
MARKLAVEVLSEGPIGLAGQTGVEWAVRPASARSDRXYGSVGSVSAIPSSIISASRGPV

SEQ ID NO: 199211 - protein, 71 aa, Oryza sativa
  Clone ID: PAT_MRT4530_94798C.1.pep
NVNTSRIIWVLIGYTKQTGLIVPTTTCSTAWPLVQHHSPDVFNLGSSAKHLQSLSCSMYHQPPAYGNESNK

SEQ ID NO: 199212 - protein, 260 aa, Oryza sativa
  unsure (1)..(260): unsure at all Xaa locations
  Clone ID: PAT_MRT4530_94799C.1.pep
MDTHLRMRLRRWEDGVLGGEAEEEGGRLGCGXIGGGGGWGEEEEEEEDGGGVGVPRKSRSLLCFPLASAPREGRRGEEEERRRRRRESACAWPACSLRWVGAAGLAWLSRLAAWQRYTRQPTETIRHRGVRVWGASRRDGPRVVMRSCARASHGLTAHVWRQPERREENPSYGGFPSCQKYASASNFSAPLTIRVVSADATRAFGLLGRHESFRSLARRRSGQVASPRRAADGCRFGGYSTVSASSVNQREEQIKRKSFL

SEQ ID NO: 199213 - protein, 164 aa, Oryza sativa
  unsure (1)..(164): unsure at all Xaa locations
  Clone ID: PAT_MRT4530_9479C.1.pep
QEVAYLKWIWKSSCTMKVKVFGXLLLIDRLNTRDMLDRKFCTPEGSDLTCVLCSTGERETLHHLFFSCSFSTECWAQFGIVWNLSLSFENMLTHAKNSYQSSHFLEKVLYVAWNIWKQRNSFIFXNVQPSVASWMTFFKNDLSLLVYHLRLDEISAFCSWINHL

SEQ ID NO: 199214 - protein, 101 aa, Oryza sativa
  Clone ID: PAT_MRT4530_947C.1.pep
MKSSTLMVILVLQAVLVMGIFAAVAKENAVGESKGNTETNGGKLKCCSNCNFSFSGLYTCEDVVKKCDPVCKSCAVVKTHPVKKFKCTDTFLGMCGPPCKH

SEQ ID NO: 199215 - protein, 84 aa, Oryza sativa
  Clone ID: PAT_MRT4530_94800C.1.pep
PLPSVRAQLKQHIWIIFHRFFFFLQGPHRICAVGGDQDPTPLIQGENALGGNHSFTFLAPPAVAKTKGGVPPFGIVRGAPAMPV

SEQ ID NO: 199216 - protein, 69 aa, Oryza sativa
  Clone ID: PAT_MRT4530_94801C.1.pep
SAGRGPAIFRKMGGLINWPWDRRRRPRPGRYCRKAPRTCPFWGAWSIGTLAPWGNTLCTRFATFTGLLP

SEQ ID NO: 199217 - protein, 547 aa, Oryza sativa
  Clone ID: PAT_MRT4530_94802C.1.pep
RRTGEELAGRPREGEEPASHPASSPPIRAQREEVAGRPRAGEEVAGVRAGGGLRPSAHRGRRSPAVRARARRSPASARRGGGRRRPRAGEEVASRPRAGEEVAGRPRAGDEVAGVRARGRSSPPAVRALGTRSPESAHGGGGFGGSDEARAEMRRPTIEEKLATYSMFQVRQGSTVPITAREWLDSVMAGVGSISLAVRGAGSISAAAGAGDGACSSSVAVAGTGSISAARAGDGPFSSSVAGAGAGSISATAGAGHGAGSSSVAAAGSGEAPARRKRTPGRWRRIPRTLPHPCLRKRPMTWEELLADSLDMSDEVHCFREEDKPAFRKSKAQMARFYQRMIDIENNKIKQIFRPRVPSDTHEQHLTAEEMEAEFAGKKVSSQACHFANLAINHYNNIEENIVKIELCTVLLSNCFHEICGSTYAHVNFTARAEDDDQAKKRLYFAELKLNPDLLAKRRERFVELSLDPNIVGCADDIEPMCVVSIHNLQGSCFGGCHEINRRIDYVMIRNQDYERCHACSDRIKHPYGTEFIAGHDSSKIPYYTAG

SEQ ID NO: 199218 - protein, 183 aa, Oryza sativa
  Clone ID: PAT_MRT4530_94803C.1.pep
MRNNASIIGFFGRGDLYVNAIGVYINPEQEKIEQEAGITKIGPWGGNGGNAQDIDITMQPQRLESITISCGAVVDSLAFTYADKNGHKHAAGPWGGNGGRIHKIELGPSEFVTKVYGTIGPFGKFSSVITSIHFTTNADRYGPFGQGTGTRFEAPMHSDGSIVGFFGRTSSYVDAIGFYVVPV

SEQ ID NO: 199219 - protein, 574 aa, Oryza sativa
  Clone ID: PAT_MRT4530_94804C.1.pep
RRTGEELAGRPREGEEPASHPASSPPIRAQREEVAGRPRAGKEVAGVRAGEGLRPSAHRGRRSPAVRARARRSPASARREEGRRRPRAGEKVPSRPRAGEEVAVCPRAGDEVAGVRARGRSSPPAVRALGEARAEMRRPTIEEKLATYSMFQVRQGSTVPITAREWLDSVMAGVGSISLAVRGAGSISAAAGAGDGACSSSVAVAGTGSISAAGAADGPSSSSVAVAGTGLISAAGAADGACSSSVAVAGTGSISAARAGDGPFSSSVAGAGAGSISATAGAGHGAGSSSVAAAGSGEAPARRKRTPGRWRRIPRTLPHPCLRKRPMTWEELLADSLDMSDEVHCFREEDKPAFRKSKAQMARFYQRMIDIENNKIKQIFRPRVPSDTHEQHLTAEEMEAEFAGKKVSSQACHFANLAINHYNNIEENIVKIELCTVLLSNCFHEICGSTYAHVNFTARAEDDDQAKKRLYFAELKLNPDLLAKRRERFVELSLDPNIVGCADDIEPMCVVSIHNLQGSCFGGCHEINRRIDYVMIRNQDYERCHACSDRIKHPYGTEFIAGHDSSKIPYYTAG

SEQ ID NO: 199220 - protein, 63 aa, Oryza sativa
  Clone ID: PAT_MRT4530_94805C.1.pep
FRRVGRQSSWGASEAYAGSMVLVTTPVPGSPDIKSIDSPSRRQLACHSPTVAAPYEPAQILGR

SEQ ID NO: 199221 - protein, 158 aa, Oryza sativa
  Clone ID: PAT_MRT4530_94806C.1.pep
MPRHACLLQSDRIFFIATEECRRRRRQGGADAGAGGRGGGRRCWAEAAEAAHMAAAAAHRAAAVHRAACGSSTVAVGLRELHRRRLCSTCTGDGDGDRMLMQRNDSSNSKWMLSRRAFSPFHVSAKFAWEVQESLLDGGSTWFCLGSSAYFVAVKYDW

SEQ ID NO: 199222 - protein, 47 aa, Oryza sativa
  Clone ID: PAT_MRT4530_94807C.1.pep
QVGVVYFDQTQAQAQALLSLNLPSICGIYPNSYIAPTSIPTVGGVWY

SEQ ID NO: 199223 - protein, 58 aa, Oryza sativa
  Clone ID: PAT_MRT4530_94808C.1.pep
QFFRVFPNGGVQYPPPKGGVFPEKVNPGRQGVGQNFPSIGKKVNPLEVKFPGKKVFDI

SEQ ID NO: 199224 - protein, 101 aa, Oryza sativa
  unsure (1)..(101): unsure at all Xaa locations
  Clone ID: PAT_MRT4530_94809C.1.pep
ANEGGMNLQSLEIINQSFNIGDVKPANMEELTEEITCAEFHPAYCNTLDYSSLXGLEKARLYTKASXCCGGLRPGAEEHEPPGSRSXFFTEIIASVSDLKF

SEQ ID NO: 199225 - protein, 156 aa, Oryza sativa
  Clone ID: PAT_MRT4530_9480C.1.pep
PRVRWGKGNNSFVVADPFVFSQTLLPAHFKHNNFSSFVRQLNTYVSLVTPSSISSSHHTPPLSALHIMLPWILSGTQLKVSSEGLRPWPMDLSYMVLEFVCACVLGDSLEDEIKNCCGGWHVDFVDLERQEVRGEDNRVWDPSFIGVALNCTYALL

SEQ ID NO: 199226 - protein, 179 aa, Oryza sativa
  Clone ID: PAT_MRT4530_94810C.1.pep
MRGGRMRLVGAAMLALLYMVASFQGASGAAAGGSPSSGGGRSSGGSSSSGSSSGGSSTRSPVGSASPSSGRNPATTGSPGGVRSPATARAGSPGGGTGTTLAGAGSPGGGRSPVGGGTIPAGAGNQGSGADSRPPIGPRGTAPLAPSGFSAGEVSHVFVPFPQPSDDISTVTKVQRISM

SEQ ID NO: 199227 - protein, 43 aa, Oryza sativa
  Clone ID: PAT_MRT4530_94811C.1.pep
KIGFYNKFLGSIKSKKPGSVGYKTPKFAFECICKIHLGFLLSS

SEQ ID NO: 199228 - protein, 68 aa, Oryza sativa
  Clone ID: PAT_MRT4530_94812C.1.pep
ARGHMLNTFQDNSYWQKRRKEREEDVHTTRITKAARYISLCWYSGSLQIHMFSIKIKRNYHDHALVRS

SEQ ID NO: 199229 - protein, 829 aa, Oryza sativa
  Clone ID: PAT_MRT4530_94813C.1.pep
MSSSSAASIGPPQPPPPPAPPEEEKKCLNSELWHACAGPLVCLPTVGTRVVYFPQGHSEQVAASTNKEVEGHIPNYPNLPAQLICQLHDVTMHADVETDEVYAQMTLQPLNPVRRLGFLHDVCSAEVLMQEQNDAYLPAEMGIMSKQPTNYFCKTLTASDTSTHGGFSVPRRAAERVFPPLDFTQQPPAQELIARDIHDIEWKFRHIFRGQPKRHLLTTGWSVFVSAKRLVAGDSVLFIWNEKNQLLLGIRRASRPQTVMPSSVLSSDSMHIGLLAAAAHAAATNSRFTIFYNPRYMGTITEVSDADPVRWPSSYWRSVKVGWDESTAGERPPRVSLWEIEPLTTFPMYPSLFPLRVKHPWYSGVASLHDDSNALMWLRGVAGEGGFQSLNFQSPGIGSWGQQRLHPSLLSSDHDQYQAVVAAAAASQSGGYLKQQFLHLQQPMQSPQEHCNLNPLLQQQILQQASQQQIINPDAQNIQTMLSPSAIQQQLQQLQQMQQVQNDQKQKIQPDQSYQVPTSAVLPSPTSLPSHLREKFGFSDPNANSSSFITSSSSDNMLDSSFLQGSSKAVDLSRFNQPVASEQQQQQAWKQKFMGSQSVSFGGSVLHNSPTSKDGSVENKIGRDVQNQSLFSPQVDSSSLLYNMVPNLTSNVSDGNLSTIPSGSTYLQNAMYGCLDDSSGLLQNTGENDPATRTFVKVYKSGSVGRSLDITRFSNYAELREELGQMFGIKGQLDDPDRSGWQLVFVDRENDVLLLGDDPWEFINIYMNVRNAKKSYIMKRREYNTLVSWFPQLIAYRGKTVLPSIICVGQSLHVDAQLPKTLRESKHQT

SEQ ID NO: 199230 - protein, 49 aa, Oryza sativa
  unsure (1)..(49): unsure at all Xaa locations
  Clone ID: PAT_MRT4530_94814C.1.pep
PNGGRFLKVKSTXKLLPGVEVKGEIPKVKKSLTGILKTPKAYLISKPEV

SEQ ID NO: 199231 - protein, 822 aa, Oryza sativa
  Clone ID: PAT_MRT4530_94815C.1.pep
MSSSSAASIGPPQPPPPPAPPEEGGWLEKKCLNSELWHACAGPLVCLPTVGTRVVYFPQGHSEQVAASTNKEVEGHIPNYPNLPAQLICQLHDVTMHADVETDEVYAQMTLQPLNPQEQNDAYLPAEMGIMSKQPTNYFCKTLTASDTSTHGGFSVPRRAAERVFPPLDFTQQPPAQELIARDIHDIEWKFRHIFRGQPKRHLLTTGWSVFVSAKRLVAGDSVLFIWNEKNQLLLGIRRASRPQTVMPSSVLSSDSMHIGLLAAAAHAAATNSRFTIFYNPRASPSEFVIPLSKYIKAVFHTRISVGMRFRMLFETEESSVRRYMGTITEVSDADPVRWPSSYWRSVKVGWDESTAGERPPRVSLWEIEPLTTFPMYPSLFPLRVKHPWYSGVASLHDDSNALMWLRGVAGEGGFQSLNFQSPGIGSWGQQRLHPSLLSSDHDQYQAVVAAAAASQSGGYLKQQFLHLQQPMQSPQEHCNLNPLLQQQILQQASQQQIINPDAQNIQTMLSPSAIQQQLQQLQQMQQVQNDQKQKIQPDQSYQVPTSAVLPSPTSLPSHLREKFGFSDPNANSSSFITSSSSDNMLDSSFLQGSSKAVDLSRFNQPVASEQQQQQQQAWKQKFMGSQSVSFGGSVLHNSPTSKDGSVENKIGRDVQNQSLFSPQVDSSSLLYNMVPNLTSNVSDGNLSTIPSGSTYLQNAMYGCLDDSSGLLQNTGENDPATRTFVKVYKSGSVGRSLDITRFSNYAELREELGQMFGIKGQLDDPDRSGWQLVFVDRENDVLLLGDDPWESFVNSVWYIKILSPEDVHKMGKQGNDPRYLS

SEQ ID NO: 199232 - protein, 925 aa, Oryza sativa
  Clone ID: PAT_MRT4530_94816C.1.pep
MSSSSAASIGPPQPPPPPAPPEEEKKCLNSELWHACAGPLVCLPTVGTRVVYFPQGHSEQVAASTNKEVEGHIPNYPNLPAQLICQLHDVTMHADVETDEVYAQMTLQPLNPVRRLGFLHDVCSAEVLMQEQNDAYLPAEMGIMSKQPTNYFCKTLTASDTSTHGGFSVPRRAAERVFPPLDFTQQPPAQELIARDIHDIEWKFRHIFRGQPKRHLLTTGWSVFVSAKRLVAGDSVLFIWNEKNQLLLGIRRASRPQTVMPSSVLSSDSMHIGLLAAAAHAAATNSRFTIFYNPRTSPHYLWEFYNWASIKIHNILMRPMHTLMKHRYMGTITEVSDADPVRWPSSYWRSVKVGWDESTAGERPPRVSLWEIEPLTTFPMYPSLFPLRVKHPWYSGVASLHDDSNALIWLRGVAGEGGFQSLNFQSPGIGSWGQQRLHPSLLSSDHDQYQAVVAAAAASQSGGYLKQQFLHLQQPMQSPQEHCNLNPLLQQQILQQASQQQIINPDAQNIQTMLSPSAIQQQLQQLQQMQQVQNDQKQKIQPDQSYQVPTSAVLPSPTSLPSHLREKFGFSDPNANSSSFITSSSSDNMLDSSFLQGSSKAVDLSRFNQPVASEQQQQQAWKQKFMGSQSVSFGGSVLHNSPTSKDGSVENKIGRDVQNQSLFSPQVDSSSLLYNMVPNLTSNVSDGNLSTIPSGSTYLQNAMYGCLDDSSGLLQNTGENDPATRTFVKVYKSGSVGRSLDITRFSNYAELREELGQMFGIKGQLDDPDRSGWQLVFVDRENDVLLLGDDPWEFINIYMNVSNAKKSYIMKRREYNTLVSWFPQLIAYRGKTVLPSIICVGQSLYVDAQLPKTLRLGQMFGIKGQLDDPDRSGWQLVFVDRENDVLLLGDDPWESFVNSVWYIKILSPEDVHKMGKQGNDPRYLS

SEQ ID NO: 199233 - protein, 172 aa, Oryza sativa
  Clone ID: PAT_MRT4530_94817C.1.pep
ESGSRMITLKSNEGKAFVVTEVSARQSTTIGHMIDDDCTREAVPLPNVDSKTLEKVIEYFDEHANTRERAMAAAAAAAAEEEEEKESGSSRMITLKSNDEKLVEVDKASLIDVIMAANYLNIQGLLDITCQRVADTIGSATAEKIREAFDIEDDLTEAEKKEIREENAWAFD

SEQ ID NO: 199234 - protein, 198 aa, Oryza sativa
  Clone ID: PAT_MRT4530_94818C.1.pep
MAQKAVLGMSDVHPSSTVTTTITIDALYDKWDPYVNLYYTSSTPFPPYISLFRFFLPSTSDAVRQLAGGGPREATTDSGGDSWARKATAGMGGGPGESSERRAEKAPSRWAALQRTVARRQKSALEADGEACRCAALSSPFSLGFSSAQPRADLVAEKIPLEAGGDARRRDNGEPEAEATLIVVLPYRRALFPPRNLA

SEQ ID NO: 199235 - protein, 77 aa, Oryza sativa
  Clone ID: PAT_MRT4530_94819C.1.pep
MEERSRWESECGREMWALRYGVRRENRYIWPKSTRFGASSIFGGLNAVSVGGPFSSRICHISDGGPDEGSPGDALRR

SEQ ID NO: 199236 - protein, 202 aa, Oryza sativa
  unsure (1)..(202): unsure at all Xaa locations
  Clone ID: PAT_MRT4530_9481C.1.pep
MAGGDAEEEEEEEEETYTTDDALTRAGFGRFQALVLAYACVGWVAEAMKVMLLSFVGPSVKAEWGVSGAAEGLVSSVVFAGMLIGACLGGLISDRYGRSFLIATLQSKYIYFNFGIGFLSTAVVTGIFGLLSAFSPNYASLLVLRFVVGLGLGAGHVLSTWFIEFVPAAKRGXVMPVLGWRWLLALSSAPCFILFIFFPVTP

SEQ ID NO: 199237 - protein, 269 aa, Oryza sativa
  unsure (1)..(269): unsure at all Xaa locations
  Clone ID: PAT_MRT4530_94820C.1.pep
MEEKPIAKGKVAVEEEEYEDRDDDDGAQLGNGGVILVLFETPTGFALFSYDGIKLLRPHALMHPVWLKDFQAFEDKASALSLDTGVSEQLAGMIRRFIXMVTRSIIEATGLLYETDYHVRKHGESMRYAGKHLKKISGINAEDWDLLKLATAIMMLCYPNGEYKLVGNLPELFGDDYSKLVDDAPKYKGIFRKLSCLRAYAEMVRSRRIRSKAARRLDSLVTAAERIYDELGSTSAARSDQTRVTLHCSYYARLHLHALVFDADIKSVW

SEQ ID NO: 199238 - protein, 99 aa, Oryza sativa
  unsure (1)..(99): unsure at all Xaa locations
  Clone ID: PAT_MRT4530_94821C.1.pep
TTQHRLALRRYNVSSNQRPAAAGQKHARGRQHKGRKRTPPSILCFLKSYGQXQNXADTPQDRKRGKKKKGGRPSSPPDRXWVDPXRIRGPGYPXXAYQP

SEQ ID NO: 199239 - protein, 476 aa, Oryza sativa
  Clone ID: PAT_MRT4530_94822C.1.pep
MRTKTFVLFPSLGVGHLNPMVEMAKHLRRRGLAVVVAVIDPPDNDATSADATARLAAANPSITFRLLPAPPSPDAAAHPARRALDALRLANPVLREFLRSLPDAADALLLDAFCVDALDVAAELAIPAYFFFPSGASALAALLHLPYYYPDVPSFREMGMALVRLPGMPPLRAVDMVATVQDKESDATKVRLYQFKRMAEAKGVLVNSFDRLEPKALNALAAGVCVPDKPTPRVYCIGPLVDAAAGKNGERHPCLAWLDAQPRQSVVFLCFGSKGAFPAAQLKDIARGLENSGHRFLWAVRSPPEEQSTSPEPDLERLLPAGFLERTKHRGMVVKNWAPQAEVVRHEAAGAFVTHCGWNSTLEAIMSALPMICWPLYAEQAMNRVLMVEEMKVAVALDGGEVGGALVAVAAEEVEAKVRLVMETEEGRKLRERVVETRDMALDAINGGGSSEIAFDEFMRDLEKMNSLENGGGRSC

SEQ ID NO: 199240 - protein, 77 aa, Oryza sativa
  unsure (1)..(77): unsure at all Xaa locations
  Clone ID: PAT_MRT4530_94823C.1.pep
FFAAELMAAMVAISGAQMSESEMMFRDRQCQREVHDNPLDAVPQDANRQLTGRXRFQPMFHRTGALGLRMQCCQQLQ

SEQ ID NO: 199241 - protein, 186 aa, Oryza sativa
  unsure (1)..(186): unsure at all Xaa locations
  Clone ID: PAT_MRT4530_94824C.1.pep
RTRGITRQKREPCTDSLGAGLAEDMSLAMTGSTTSWSHITPDDYVNLHNSTRGADGACPGSXDRKAIRFEQRYTGKRAGDCRLQHSGWPNCEIIFWGSAGRAXSATYTVASRAGEKKIYHXYDTDTSDPXKVCGHYTQELWLKSVHMLCTRIXCTANPSVLITCXYDPPNDFHVERPILTLNTEDK

SEQ ID NO: 199242 - protein, 82 aa, Oryza sativa
  unsure (1)..(82): unsure at all Xaa locations
  Clone ID: PAT_MRT4530_94825C.1.pep
YHYWVPGRSTLDGHSMFGWIFXVTSLVHEDHLSLYVKLLVHLSRRVTLLVNSSVDKNGTLVXHTEEELHLSGTWRIPSNGDX

SEQ ID NO: 199243 - protein, 146 aa, Oryza sativa
  unsure (1)..(146): unsure at all Xaa locations
  Clone ID: PAT_MRT4530_94826C.1.pep
PLVPTDSTDTHVECWHTKIRKVRQYLRGWNKQTSGIYKKEKXGEKKLNFVGKKVLIFLIKKHNQLIWLXYRLYLRKRLSYLIRXEEIKWYQRARTKNILEWYSNTKYFHLVVNGLFGPYEASSLTLDESQISDIPQVSSLTLDESQ

SEQ ID NO: 199244 - protein, 445 aa, Oryza sativa
  Clone ID: PAT_MRT4530_94827C.1.pep
MAVGNGLILYHILGLASCIALVYFSLGEVDLRDALPSLPFSGGASRAAAASLPFVERRGKRLFLDGRPFYINGWNSYWLMDLAVEPNTRPRVSSMFRTAVSMGLTVCRTWAFNDGSYNALQLSPGHFDERVFKALDRVVAEASEHGVRLILSLANNLDAYGGKRQYVRWAWEEGVGLTASNDSFFFDPAIRDYFKVYLKTLLMRKNHLTGLEYRDDPTILAWELMNEPRCTSDPSGDTLQRWMEEMSAYVKSIDKKHLLTVGTEGFYGPTSSQEKLNINPGEWFPNNYGADFIRNSKIQDIDFASVHVYPDNWLQHASLDEKLKFMTRWITAHVEDGDGELEKPVLVTEFGLSHQVEGFEDAHRDVLYRAVYDIVHGSARRGGAAGGALVWQLAAEGMEEYHDGFSIVPSERPSMMRLIKEQSCRLAAVRYGEEGARKVLKTVCA

SEQ ID NO: 199245 - protein, 562 aa, Oryza sativa
  Clone ID: PAT_MRT4530_94828C.1.pep
MVYAENKEMPAPLTIGIRLRGVLPIPGCSARGTSILVAEVEIMVSIEERFVREVNFWVMQPDYRPSNSSCEMRVSLLAFRLCRSHFPSALGLLHLLDADGGADARGPHHPTRPHTATSPGNRALQPPGLAIDIEADSNNVLSFAVTARDAGPKNSVFQFGVDTGDMNEAVGRAERWRVRLTAVLARVEPGFAPAEFMMIDPVPEELEIPKADEIGMGVCVYAGLPAPGGCDDWGDAIPEARMEIKVTGEKRFVQEVNFGVTLLTSDSDSDGRLIDMLACAAVEADGSVSRARKRPRIGVSAEPARPTAPMLGSEPPWLVLRLVGPFLDAESLAAASCVSTACREAFTAEDLWSKLLRSQYPSALGLLPMQGNGDDASGRSSSPYRRLFALFRSASARRRALPPPRLALDDVTFAIDIFAASGENTLSFVVAARDAIAKTGRFQFEVDLTGRNAAVGRGEFWSVRWTALRAGLIGFAPLAVEMMDAKAPAARARALFGGATGETWATGCLPAPGCGGATVEAEVVFEVSSEERLLEKVRFGVMAQCRYVSIDDGLRYLQHFLL

SEQ ID NO: 199246 - protein, 243 aa, Oryza sativa
  unsure (1)..(243): unsure at all Xaa locations
  Clone ID: PAT_MRT4530_9482C.1.pep
MSSSDLGSQQFNTIQPSTFPLSVACAAMAGGDAEEEEEEEEETYTTDDALTRAGFGRFQALVLAYACVGWVAEAMEVMLLSFVGPSVKAEWGVSGAAEGLVSSVVFAGMLIGACLGGLISDRYGRSLISDRYGRRIGFLSTAVVTXIFGLPSAFSPNYASLLVLRFVVGLGLGAGHVLSTWVHRSLFPAAXRGTWMVVFPIAXWTVGXQIFGKLCLPGAVMPVLGWRWLLALSSAPCFILFIF

SEQ ID NO: 199247 - protein, 311 aa, Oryza sativa
  unsure (1)..(311): unsure at all Xaa locations
  Clone ID: PAT_MRT4530_94830C.1.pep
MAASTFSTVKVSNVSLKASLRDVKEFFSFSGDIVHVEMQSSDELSQVAYITFKDNQGSETAMLLTGATIVDMAVIVTPATDYELPASVLAALEPKDSKPSALQKAEDIVGTMLAKGFILGRDALDRAKALDEKHQLTSTATARVSSFDKKMGLSEKISVGTSAVNDKVKEMDQKYQVSEKTRSALAAAEQSVSTAGSAIMKNRYVLTGAAWVTGAFNKVANAANDVGTKAKEKIASEQEHKTVELESAEPNSSEGHGTQKDVDGEFAKIQVSESPEDIPISTTATVXLLMRIPVRRLHLPPLPKSQNLRRG

SEQ ID NO: 199248 - protein, 978 aa, Oryza sativa
  unsure (1)..(978): unsure at all Xaa locations
  Clone ID: PAT_MRT4530_94831C.1.pep
MRPRAKRKRKRKRRERERERGFARVELRCPRALDPRPSWTLGDVLTELDALEATRRTAQPTPLKQPPEWASSGSVREKAFVMRVEEEDDTDEDDYDSDGESRALVAKATGARLLCTDIESGDAEESKDVMDGTFAPYHLMVXRSLEKSILLELEREHHLKDQGEVRSKLSALEVCHQSEIQRTVSAFARLQKYAELRKEIKRWLVVHVXRYITEVLYKHLYMVQRDQLRKSQIVERRIRDHVWGKNQAFHVLNLWLEPVGYXVSSRLGGRISVGISFFGIQFGQIYSSQTGKEAAEAQKAAAEVSKSSQNSQNNVAGTMRANKSEIKSELPGIKVFADHSALEAELRRRALLDQVPANIHSSKEFSRYDRQIAKSIGKLMPTTDSVKARAGELIKALDGQDCPRPIACRIFANKIISIVKSRNTKDKTFGNLAFACGYVMLLVTSQVPDAMDYLLAEFHRVCMYTVPKHLHALNAQVRNRDYYRLIGYQEENGQLESTESYLTYVAAYVKLYAAMIQTEIRGVRHPHGLAEGWKWLAMFLNTLPATTATACALHAFLKVAGFALHKKYGSQFMKLLDVILRCFLPALKEQGSRIQAEAASNLQNYLTDKVYLEEPEGQYLAQQLLSKELFTKTFHTVQMEQPARLYDGREGQNRPEEMSWIAPPRKANVVAIPCAATATAYFSIAASRRAPSMSMSREKTQCAAVADGRAHDTAVRTELAQEWPIYQAGPGQAARRAKILDPLWDVPAQVPTVGLIHDDGAAAPPSPLGLARRVSGAGAATPAAAWSSSCRSRRLRPRLLPSKRWSGVVRMGAAVGGEQEGEDEEVKLAKEMAAARRRWETLIREQKIKTLTPREAGYTFKLTDKVLLDVRPSNERQKAWVKGSTWIPVFDVDTSFDLGGAGKKFTNYVMGGWWSGSSTMTVNKNFVQQVEEKFSKDTDIIVVCQKGLRSLAACEQLYGAGFQNLFWVQGGLEAAEEE

SEQ ID NO: 199249 - protein, 441 aa, Oryza sativa
  Clone ID: PAT_MRT4530_94832C.1.pep
MAKKNKEPASDDAAAIRTLFSADNPFRRKPSDDQPAPPAPTAAAPRGKHPEPEVAEPSAKSRRDEPRRKRKRDEVEAGHERRRLGGAPAPPLPVVGEKRKVPEEVAAAAGAGQEEEEAFDDESKLLRTVFVGNLPLKTKRKALTKEFAAFGEIESVRIRSVPLTDTKIPRKGAVIKGKINDSVDNVHAYIVFKDEQGARAALSHNMALFDGNHVRVDMACPPRKKLKGEGPLYDRKRTVFVGNLPFDIKDEEVYQKFCGSSGSEGDVEAIRVVRDPDTSLGKGIAYVLFKTREAANTVVRKQDFKIRDRLLRLAHAKSADATPKKTTDAGKTKGGSKHKTALTPSSKSHEGSDKTKRKASTLSYQGLRASKSGVVKKAKVSQRPSYQGKQQGRTSETGHDASSQKAKRPAVAARKAKQLAKKRKLDAQTPENTHRSKKAKK

SEQ ID NO: 199250 - protein, 59 aa, Oryza sativa
  Clone ID: PAT_MRT4530_94833C.1.pep
LLVHLNVISGLTNQIHGNKSGYRVKKLNRHSGHHYAKKGKKEKIYIAIGLSLYFQVSNK

SEQ ID NO: 199251 - protein, 869 aa, Oryza sativa
  Clone ID: PAT_MRT4530_94834C.1.pep
MDDDKASKGRPLKSPRKDLDPLAAATPDPECGETAPPEVSKPKEKAAAPTSNTEEGLCPHLERFEEDMAMFVSRLMASKFTPSCQRLMCDSKVDKSSIMVCIDCSLPFCIGDGTMNKPQGHAQEHAQFYAHLEKHCVAALFSKPDTLYCFICERCLNLEMSDMEAESDSSSDQVGCEHFVLDEEEITLIVSEIFASKNVPACQHPGCTITGNTHIMVCTGCNKHFCTRAEAMKKPYGHARLHAQKCEHHWVGLWYSNPYMGYCFKCEFELILGAPNAERGMVFGKEAFDQESGLAKRHGCVIRGIPNLGNTCYVNALLQCLFVLEKLRARMLASDAPSGFVGSALKELFQEVNSVNNAQRPLNPTKFLDRVRVLNAQFVGSDMQDSHELLCFVLNELDKEEKSMVPPVSPTVVDSIFRVQLSATISCSHCSYNSVSHEVMYELSVPLPSRNISCMSREKIGIKLFPKVDMSNTEIVHAIAEGRDSHITGLDLGDVDKEKPSEPLEVDSVEVEQHSQSKDGVHVPSQIQKDEVPGEIIQAPTKADDLGKNYNAGLEYTPSEPEVSIEAKKNVCSVEGSAEDKGKAQFSNMAYGKAKDNNSLASIEECLELHFEAEMVEWKCENCSEIARRRSTTSGKDSEQMMASTSENKIVDGDQTEQSDKIACQSEQSSNLDSGEQDLASDNTANKKNECHEGVQEVVPSCLAAEELANQLSGQGQNASSLDQVKLDHSADQVGPNQKEREDRYQGGIQTRFINKLPPVFAIHLKRSQLTGKVRGHVSFEEILDVGQFMDPSSEDKDNSSYHLVGVIEHIGPSTRSGHMVAYVRPNQEQPHGGPSPWYCASDTNIRQVSLEEVLKCEASLFFYERIGG

SEQ ID NO: 199252 - protein, 128 aa, Oryza sativa
  Clone ID: PAT_MRT4530_94835C.1.pep
MARLAAPAIALVMVAYCAALWAAELVGSTASIFLPDSGAVALLLTVAVLFFLAVALLQLQVAATGGDDDDAPSSVRVQCSRNHRGNVAVRRLAVVIYLHGYGRSLHYCRAVHGRVPVYVFFLHHEVHA

SEQ ID NO: 199253 - protein, 276 aa, Oryza sativa
  Clone ID: PAT_MRT4530_94836C.1.pep
MATSRRPSPHSGGGGGCGQGQAGVQHDAGLRVSDYNRVWTSDRLTNRGWQNNGQRPLYRGEDETAFHLVAECRYSKRIWRLVADWVQLNLWHWEMTQTIKDWWEMLAASAGIPKKGLRTLILHIVWEIWNNPPCPISRGQPGAGGRQPAAAAPAPRGLLATAVARSSGKREAVSRGVGADAWPLDLGIARDFGAVRRRRSEDVGGRRWQSRHGACAGARSGGASVRLRAYGLPYWARPEPEDPALLHVNDLFMYVDYSKKCKNFELVTNQPTNHFL

SEQ ID NO: 199254 - protein, 283 aa, Oryza sativa
  unsure (1)..(283): unsure at all Xaa locations
  Clone ID: PAT_MRT4530_94837C.1.pep
TRSPLASRSXPPVXLLGIDSAXATGXAHVPPPSTSLHAXFSLPREGSXQPPPGAASXXSQPDSPSRAQPSSRSRSPKHPSAAGSQRGPPPRCAFLPSPPLSPGSPPRSSPSPAXGXFGSPPAPXQVRPVPTRQLSSPPXPHAPXIVSPXSKTPARPRENFSPCGXAPPPPPPWGQKGGLARLATPRARPPFNRFWGVPSREFSPQFISGPFLPFSSPFVGPFSLPHTRKHPHTTNLRSRVAKIRNSQFNRSVSPTAAPKHRNTPTSPKPTQAPAHKRSTLTTS

SEQ ID NO: 199255 - protein, 102 aa, Oryza sativa
  Clone ID: PAT_MRT4530_94838C.1.pep
MTLIGDKVWLRPVKGGVDNDTFKTMLRDIEDPGYNKRDYGKFIRMVGNFETPLYAGCVVKHTKLSAILDLIKFKTSNERKDKSFTQLLRLLKDLLPVENTLL

SEQ ID NO: 199256 - protein, 52 aa, Oryza sativa
  Clone ID: PAT_MRT4530_94839C.1.pep
FCFFFFFFFFFFFFFFFFFFFFLGLLKEQIFFKLDERGTQAIIYRGGAFYKL

SEQ ID NO: 199257 - protein, 86 aa, Oryza sativa
  Clone ID: PAT_MRT4530_9483C.1.pep
MDIASDGQHGVSPSGEPIHEGPEKPIEPPGPPSHNLHAAVTENEGIAGDVHDKVTSSKDDPSHTRPVEEDGSSGRGLSASSKKELP

SEQ ID NO: 199258 - protein, 80 aa, Oryza sativa
  Clone ID: PAT_MRT4530_94840C.1.pep
MARSVASSSSISTMPSSSAAAAAAALEAVQVLVTSLADESPVARDAALAALREIAPMNPLLVLDCCATVSRGGRRVRSCA

SEQ ID NO: 199259 - protein, 70 aa, Oryza sativa
  Clone ID: PAT_MRT4530_94841C.1.pep
AVLAAALVRGVACDASCVLVAASLSAGPSLGPFFLPSPLSVPSLVPRLWLGGLEPFVSKSPRSVARVASI

SEQ ID NO: 199260 - protein, 76 aa, Oryza sativa
  Clone ID: PAT_MRT4530_94842C.1.pep
MAVRRRCGAAARQHADEARGRRRDNTMMRGTSDEASGRETDAVSCCGEEATQRRSRASEGSGREVGYGAGGAQRRG

SEQ ID NO: 199261 - protein, 50 aa, Oryza sativa
  Clone ID: PAT_MRT4530_94843C.1.pep
QCLSLSLDLLLACSLIDGLGQVFYVSAYGFLWLEWLLFLQPSLLTRLMFF

SEQ ID NO: 199262 - protein, 52 aa, Oryza sativa
  Clone ID: PAT_MRT4530_94844C.1.pep
MAAPDVEYRSLLGDLSCAIDYLYLEADFYTYEHILDYKIITDWETERPRGFG

SEQ ID NO: 199263 - protein, 328 aa, Oryza sativa
  Clone ID: PAT_MRT4530_94845C.1.pep
MGFWRRCTPSTSACAGVCVVALLLVALACCPTRARGAAPAVYVLGDSQADVGNNNYLPATLPMYKANYPHNGVDYPGGKPTGRFSNGYNFVDYLADSLGVASPPPYLSISNTSVYLRGVNFSSGGSGVSNLTNMGQCISFDEQIDQHYSTVHATLVEQLGPRQASTHLAESLFSVAIGGNDIINRVLLSQLVGTQDQFISSLANSLKRQLQRMYDLGTRRLLFVGAAPLGCCLMLREQSPTKECHAEANYLSARYNNAVTMLLRDMSAMHPGMSYAFFDTYTALLQYIRQPEAYEKPTKDLEIFLLSDCFSAHPLKPNPPFLFLSAQP

SEQ ID NO: 199264 - protein, 386 aa, Oryza sativa
  Clone ID: PAT_MRT4530_94846C.1.pep
MACSLLLTILPEELVVEILIRLTDLADLARAASACKPLRRLITSRAFLARLHALHAKPLLGLLLLERDRCGFLPAATAVAAAVARASDFAFSFLPDHAAGWRLRDVRHGLALLSSSSSSSYLSPLGDRGFFPDVVVCDPMRRRHVRVPPIPDDLTAGVRRIAVEHFDYLLAPAGRDGSSFRVVCRPKLPKQCDVTVFVFSSGAAFWRAAVLDACAATEKLFLPQSVHGYVYWRTHSSGTLLMLDTRDMDFFFVNIQTNKCVIGEAEEVGRLAVFNTIVDVGVHKVEILSKAIRGGADEPWRHDRTIPLLPGYKWRAARMAEGYLLLHGIVGNNSWSTPGIQLQHFTLDLKTLKLESLCDSISRGRHHHPQFDLYRSFPPPLSLSSI

SEQ ID NO: 199265 - protein, 80 aa, Oryza sativa
  Clone ID: PAT_MRT4530_94847C.1.pep
GWSCPLQALLHVQLGVETKGNPKHAFLSKETSKPDETQSDSDLPVRLATLRRSDWPSTGGLTAQHTAVRPAHSEETGRLL

SEQ ID NO: 199266 - protein, 72 aa, Oryza sativa
  Clone ID: PAT_MRT4530_94848C.1.pep
RFRVRIAPGFFAMEYLPSCAPLALWICYPGWVFAVRSFSPVQQVPLEWVPPPFFLNTEVCNLDPQINRKPKL

SEQ ID NO: 199267 - protein, 96 aa, Oryza sativa
  Clone ID: PAT_MRT4530_94849C.1.pep
LSREPRGGREWRRCSGGWETTMPAAEYVPECGATREGGRGTARQGIDALDCGDGGSNHGDDSGRLLLALHAAGLALPPLPSTTSPAAAPCYFFVCV

SEQ ID NO: 199268 - protein, 2338 aa, Oryza sativa
  Clone ID: PAT_MRT4530_9484C.1.pep
MARRAEGATSVAGSGSAWVAVVVAHNRRERTAELCQKPRYTSRLQLQVEDMEKQNVDFGKLLMEIQESLVLLNRAQGETQAAVVKLDQDTNNWRPQVEAAVQESREEVGELRVQLDLERKAPLLPTPPSSSQVAAAEGGSKWANSRLQSHEHRGRVLGMATTLGPTPVKGTYEFPSTSMKKFDQSEFGNGECDGDQFGRQYNHRVPKLDFPKFDGTDPVDWKMRIATIYFSGRASSWLRSSKAHVRYPNWEHFCIAVSNKFDRDLHEMLIRQMDNIKQVGPGLRREIRNAVLLQRPKDLEAALAIASLQEEVILESASNLKKSDNGLQVRPHPAFKGALPLPLPPNRVLNSGSLTRADDRKASMEESDNQGLMAISVQAVHGSEAVGYMRIVFDHSIPLIPGAMPVNVRPYRYTPAQKDEIESQVQEMLNKGIIQPSSSPFSSPVLLVKKKDGTWRFCVDYRHLNAITVKNKYPLPIIDELLDELSGARWFTKLDLRVGCHQIRMQAMDEHKTAFKTHHGHFEFRVMPFGLTSAPATFQGCMNSILSPLLRKFVLVFVNDILIYNRTLSDHVQHLQSVFQILTEHHLKVKRSKCSFAQQRLAYLGHVISPNGVSTDEDKILVVKNWPTPTNVKELRGFLGLTGYYRKFVRYYGVLSKPLTNLLRKGQSYIWTATTEQAFQSLKQALMTTPVLAMPDFTEPFVVETDASDKGIGAILMQKQHPIAFLSRALGPRHQGLSTYEKESLAIILAIDHWHPYLQHSEFFIHTDHRSLCFLDDQRLTTPWQHKALTKLLGLRYKIIYKKGSENGATDALSRFPSVSELTAISSMVPDWIQEIIAGYANDSDALSKLQTLCISANVVPDFTLKECVLYFKGRMWIGTNSFVQQKILANLHSSPVGGHSGITITYQRVKSLFASPHLRTIVVQFANACSICQRAKSEHVKYPGLLQTLPVPEHAWQFVSLNFIEGLPKSATFNCILVVIDKFSKYSHFVPLAHPFTAFDVAEAYMQNIHKLHGLPQSLISNRDRIFTSTLWTTLFRLAGTQLRMSSSYHPMGKRKGWLALAEYWYNTSFHSALGTTPFEVLYGRKPKYFGLSVNALCQSPELSDWLQERDKMQNLIRDHLLRAQARMKVPADKHRSERSFVVGDWVYLKLQPFTQQSVVTRANCKLAFRFYGPYQILDRIGAVAYKLALPATSLIHPVIYVSQLKKALAPTEFVQSQLPILQSKDEGLTAVPSQVLDRRFVRKGSKMVEQLQVRWSGNDPQVITWENGQELRRRFPHSEAWGQASSQGGGNVTVATSPDDNAGQATEAQLGSRSSGIAIDETTDIDNSETINPGIKCDCSYDNTTVCHITKLRVYALDVVGPIPAELENLTYLANLNLQQNYLTGSLPAFIGEMTALQYLLVGINALTGILPRELGNLNNLLALGISTNKFVGPLPEVLENMTKLEELYIDSCGLSGELPSALSKLRKLKILWASDNDFTGRIPDYIGSLSDLTELRIQGNNFDGPIPTSFSNLVNLTSLRIGDLVSGSSSLAFMSNMTSLIVLTLRNCRISDNLASVDFSKFVGLYYLFLGNNSLSGSLPDTKGASLKVLDFSYNELSGKFPSCILSSGLNCLQRNTPCLPASPDDSSFAVDSGGTRPIIGSDKSYYEPDDTNLGEASYYVSNSTRWGISNTGKFMEAANFSFIVYTSRQFTNTLDSVLFQTARTSSSSLRYYGIGLKNGFYNVELQFAEIFFPDNTTWTSLGTRIFDIFIQGELREKDFDIKKQTNGKSYTVVLRQYVVRVTENFMEIHLFWAGKGTCCIPRQGSYGPLISALSVSPYGGNNKVDPGPIKNSAGRHCENVSRLKDTLRNRGKLYDGRMVAVKQLSPTSHQGKREFMTEISTISTVQHRNLVKLYGCCIESKAPLLVYEFLENGSLDQTIFATGKTNMNLDWRTRFDICVGIARGLAYLHEESSTRIVHRDIKTSNVLLDGDLNPKISDFGLARHYEDNMTHLSTGVAGTLGYLAPEYAMMGHLTEKADVFAYGVVAMEIIAGRPNFDESLEDDKKYLLGWAWRLHERSQTLEMLDPKLARFDEEEVVRVINIILLCTVGLPEQRPPMSKVVSMLTEDTEMSEVDMSMWPSYVPQWQRKSGSDSFFTSSMQQSSGTESSVPSSSGNNTKSQGETFPLVLSANSISEFAEGRSQQFYIVCNNCTSVKWGRSNTVKPRSLQDLHTHLEEAAEVGFHVDGRHSTHLCHEATGIGVICRNGHGTGGGVGVGVTDALNGLDGCGMEDNVVEDGVEPRRNNLVAPCKPTTRLVLGLSLAGTTPLARLHGAEWALAQPPPPVATDDVLCTRT

SEQ ID NO: 199269 - protein, 119 aa, Oryza sativa
  Clone ID: PAT_MRT4530_94850C.1.pep
MKGFDATNGFGFITPDNGGEDLFVHRSSLKFDSYRSLNDGDVIELSIGSGDDGRTKAVDITALGGGAHTGGSRPSCGQIPTAASRRLSTSPRCLLALDVLLLPAPRRSPPLVIPSSSPG

SEQ ID NO: 199270 - protein, 114 aa, Oryza sativa
  Clone ID: PAT_MRT4530_94851C.1.pep
MTHGYAFAAVDRTLRDIRRTSANDTGSNPHHRLEIAETLENPEDWFNAEEIPTVSLSGSVYYYEIPQALLERGSAPLRLIAFLAQMKFVPVHAVAELRIKSLRKANPWGIEIPV

SEQ ID NO: 199271 - protein, 64 aa, Oryza sativa
  Clone ID: PAT_MRT4530_94852C.1.pep
TSTNVHKPIKYKLEISKFFFPFAERERGFFYTQAAHGHEGAGAEKEPPKSQPLNRRRPGVRPGG

SEQ ID NO: 199272 - protein, 498 aa, Oryza sativa
  Clone ID: PAT_MRT4530_94853C.1.pep
MTTTTATAATASPPPPPSPCSSPPRVSTHRKSIQKHPRSRTNPPHAMASRAAAAMVLAGALPVFPGRPLVAAGARCCDGGIRGRVSCSSHRRSDHPSCAAEEGGVVELLKGAVAALAVIAQISVSLPADAILYSPDTNVPRTGELALRRAIPANPNMKTIQESLEDISYLLRIPQRKPYGSMEGDVKKAMKIAMDNKDAILASIPVELKEKGSKLYTSLLEEKGGLQTLLKYIKENDPDRLSVALASSLDTVAELELLQEDDYTPAMIGLLKGGNFFQQAPGLSFLLPQQYLEYPRLAGRGVVEFSVEKGDGSTFFPTAGGEPKSVATIQVVIDGYSAPLTAGNFAKLVLDGAYDGIKLKCASQAIIADNENGKKGYTVPLEVMPAGQFEPLYRTPLSIQDGELPVLPMSVYGAVAMAHSVDSDEYSSPSQFFFYLYDKRNSGLGGISFDEGQFSVFGYTTDGREVLSQIKTGDIIRSAKLVQGRERLVLPPEAPAES

SEQ ID NO: 199273 - protein, 42 aa, Oryza sativa
  Clone ID: PAT_MRT4530_94854C.1.pep
STRSTLFSSNFWLVNLGLSTAYLISSVHDFCSLYDWGTMSCA

SEQ ID NO: 199274 - protein, 76 aa, Oryza sativa
  unsure (1)..(76): unsure at all Xaa locations
  Clone ID: PAT_MRT4530_94855C.1.pep
ELTGINHIKNKLKRTKYVACGIFXSYTEKLLSSKTQSCKRNLEVLIXAELGCNFFCKCPCIYYLPDSESRNRNGGG

SEQ ID NO: 199275 - protein, 120 aa, Oryza sativa
  Clone ID: PAT_MRT4530_94856C.1.pep
PLPRHAGHAGGRPHCSLALKSWTKFPEAAVDGGQRPALKRLVYEVEKDCMKVLRFCGSYCDHGPAADIKKLFRISTDRHPRHGHRQRSSPAANMKGRGDAEMSTWDERAANNDWLRWQEI

SEQ ID NO: 199276 - protein, 118 aa, Oryza sativa
  Clone ID: PAT_MRT4530_94857C.1.pep
MRQQQAGGVGDGVSPGNVPVCYYGPGGRVPSSLERRARAAEVLLRCAACGLAVLAAALLGADRQTRVFFSIQKVARYTDMQSLVLLVIANGMAACYSLIQCARCLVSIVRGGVLSKRP

SEQ ID NO: 199277 - protein, 86 aa, Oryza sativa
  Clone ID: PAT_MRT4530_94858C.1.pep
MTRRAGRPSPPFSLSALAGWLTRELQEERRIARRERGEGGADAPWRLSGVPHYCHVGRRLSQSNKVGVMSAKTVIQITEGLRLHRF

SEQ ID NO: 199278 - protein, 940 aa, Oryza sativa
  unsure (1)..(940): unsure at all Xaa locations
  Clone ID: PAT_MRT4530_94859C.1.pep
MIKVSRDFIRSNSNKYRSPSYSLSXEGNNVGILYSPTVGVNLVSESFAFAYLGNKAITLANKFFKHPNGTIIEGFGIVQDVPVCFEIQDFDILIGPPIEQLLINTPRLDSLKITLGGNEFSVPFSRARITLTDTLPENEFAEEVMAVPPHESPETLLENEVPNFIKQEPEPGETDELPIMELPPRPPLELKPLPEGLCYAFLHNDKEAPIIISYKLSEEETQRLLSVLEKHRAVLGYSLXGLRGINPALCTHRIPIKPESTPSKEPQRRLNNAMREVIKKEVLKLLHAAIIYPVSYSEWVSPVQVVPKKGGMTVVANARNELIPQRTVTGWRMCIDCRKLNKAEKKDHFPLPFIDEMLERLANHSFXCFLDGYSGYRQIPIHPEDQTKTTFTCPYDTYAYRRMSFGLRNAPASFQRCMMSIFSNIIEDIMEVFMDDFSVYGKTFGHCLLNLDKVFQRCQEKDLFRSYLVGAKVIIYTDHVTLKYLLTKKDAKARPLRWILLLQEFNLEIKDKKGVENSVADHLSRLQITGTQEQPINDFSRDDMLMTVRDSIPWYANIVNYMVSKYIPPGENQRKLKYVSRHHIWDEPYLYGVCSDGLLRRCVPTEEGLKIIEXCHASPYGGHYGAFHTQAKIXQCDFFXLTMYKDSKELVRRCPSCQRQGGITARDAMPLTYNLQVEIFDVWGIDFMGPFPKSRNCEYIVVIVDYVSMVISDGGSHFIDKTIRDLLGDIAAKHNVATPYHPQISGQAETSNQQIKNILXKTVNKMGTGWKEKLPDALWAYQTAYKTPIGMSPYQIVYRKSCXLPVELERRAYWAIRNWNMDFEGVGEWRKMQLAELEEWREKAYHNSKIXKERMKRCHDERIKIKKFKPGGKVLMFNSRVKLFGHGKXRSKWEGPFNVINTASHGAITLRDDSGNIFMVHRLYQSSEHLLPPPEKSYTS

SEQ ID NO: 199279 - protein, 72 aa, Oryza sativa
  Clone ID: PAT_MRT4530_9485C.1.pep
IRWIPLDSSTCWNNQDGPWLNHIMPPLLLEAQIACGPCRHVGERILDVLVLPDESASLMIHDAVSWQKPRST

SEQ ID NO: 199280 - protein, 126 aa, Oryza sativa
  Clone ID: PAT_MRT4530_94860C.1.pep
MPHLASRLPFIEKLMAAAPTFFSFCSVKPLLHSASPVARNTCRTSRNRGFFRPPPGIYPGWEPASHELLHDFDLQESLVNVQALLHQHPKSRRAMLTTVDHLKRLCIDHYFQDEIDNVMDACVDLV

SEQ ID NO: 199281 - protein, 77 aa, Oryza sativa
  Clone ID: PAT_MRT4530_94861C.1.pep
KKQCLALGTRVRPKYKIHYQFFRVFPNGEGQDPPPQGGVFPEKVKPGRQGVGQNFPRIGKKVSPLQVKFPGKKGFDI

SEQ ID NO: 199282 - protein, 124 aa, Oryza sativa
  unsure (1)..(124): unsure at all Xaa locations
  Clone ID: PAT_MRT4530_94862C.1.pep
MAETIDDKVIYFQAVTGISDHSLCTEILAAHDWDLQLVVSSITANPSSLDPAPXSPREADLVTPHPSPPPPSQQQPRIAWKLMTLPFYVVSGGVGLIVSSICLVAWVAEAIAGEARRRQAHLLL

SEQ ID NO: 199283 - protein, 92 aa, Oryza sativa
  Clone ID: PAT_MRT4530_94863C.1.pep
NQLFFCLWGFFFHLPLFFFFFFFPFPAAPKGGLKINGLAHCLPFFPKDPIFQPFKNPAPFFSRARPLPLLPPRYPKYKRSPSKESPCLPRGH

SEQ ID NO: 199284 - protein, 102 aa, Oryza sativa
  unsure (1)..(102): unsure at all Xaa locations
  Clone ID: PAT_MRT4530_94864C.1.pep
MAAPDVEYRWSRGGLTWATDDRKXVAIFYTYGKILDSKIINNGKTVRSRGFGFVTFSSEQSMRDAIQGMNGKELDGRNITVNEAQSRRSGGGSGGYGGGGGG

SEQ ID NO: 199285 - protein, 586 aa, Oryza sativa
  Clone ID: PAT_MRT4530_94865C.1.pep
MGVEDRSWMYSGWNDNGCHSEEWVRNTNAFVDRAFGRVQNAEKFGVECPCSSCRNRIRRKKEVMSMHLCQRGFMPDYTRWIKHGEHPVRLFEPEETYNIADPLGDMLGNFGDAMDTDFSEDEPTADAKAFYAMLAASQEQLHSFTQVSRLTAVTRLMGIKSQHNISSECMNNLLSLIGDILPSGHKMPANLYECKNLLSGLKMPYVKIDVCINNCMIYYKEDALKEKCDICNENRYVAIEEEHKGRKRKPVPRKVMRYLPFIPRLQRMYMEPRTAKHMRFHKDGTRANPNIMVHLSDGEAWKHFDRHNPNFALDARNVRLAVATDGFNPFGFGAQYSCWPVFIIPLNLPPALCMKDENIFLSLVIPGPNHPGKNLNVFMHPLVDEFKQAWQGVVTYDSSVKQNFNMRAAYHTSIHDGPALAMFSGWSTHGGLSCQECMADIHTTWLPNGHKYSWFDCHRRFLPPNHPFRGQRNAFSKDTVMHDLPPRRLTGEEVEAYIKNTFDNSFEGYGTTHNWTHMPIWWELPYFSTILVRHNIDVMHNEKNVAEAIWSTCKNISDKTKDNVKARLDQELMCSRVHLNLVEKPN

SEQ ID NO: 199286 - protein, 132 aa, Oryza sativa
  Clone ID: PAT_MRT4530_94866C.1.pep
MSWQRVGALLLGAQSCLPVPGVPAVGRIGSVLLSMARMGWKLCHVFRPYTVVMAGSITRRGLDLTGFVLELRGMCVVLGYPHCRDRENYLFPNASVLIPVPGKAGVHRTNMIQKAHLYYIDNIYIITKALKA

SEQ ID NO: 199287 - protein, 104 aa, Oryza sativa
  Clone ID: PAT_MRT4530_94867C.1.pep
MLLGVFRSLDEGDKVQVQLSAGKALARLTTDSQANCHAIIREKDVLKDFKRMLSGQHGASCRVVVANILRNLCAYAKPDSMKEFSLIPIAMQHTPHLEMHPDQL

SEQ ID NO: 199288 - protein, 75 aa, Oryza sativa
  Clone ID: PAT_MRT4530_94868C.1.pep
MAKAGKPRRYSESKGILGELQRLRHNEFGIKEAQQDTPLQATGAPNAGSNATIEGCVYTRGEKFCRVTLYIRTHI

SEQ ID NO: 199289 - protein, 57 aa, Oryza sativa
  Clone ID: PAT_MRT4530_94869C.1.pep
KKKKKKKKKKKYIKSIQTVQKDRGIKLYGPPFLRNQSYLPGPSKNLLFFFCRTLKFR

SEQ ID NO: 199290 - protein, 2427 aa, Oryza sativa
  Clone ID: PAT_MRT4530_9486C.1.pep
MARRAEGATSVAGSGSAWVAVVVAHNRRERTAELCQKPRYTSRLQLQVEDMEKQNVDFGKLLMEIQESLVLLNRAQGETQAAVVKLDQDTNNWRPQVEAAVQESREEVGELRVQLDLERKAPLLPTPPSSSQVAAAEGGSKWANSRLQSHEHRGRVLGMATTLGPTPVKGTYEFPSTSMKKFDQSEFGNGECDGDQFGRQYNHRVPKLDFPKFDGTDPVDWKMRIATIYFSGRASSWLRSSKAHVRYPNWEHFCIAVSNKFDRDLHEMLIRQMDNIKQFDELMNQLLAYDPDLNMRYLTHRFTKGLRREIRNAVLLQRPKDLEAALAIASLQEEVILESASNLKKSDNGLQVRPHPAFKGALPLPLPPNRVLNSGSLTRADDRKASMEESDNQGLMAISVQAVHGSEAVGYMRIVFDHSIPLIPGAMPVNVRPYRYTPAQKDEIESQVQEMLNKGIIQPSSSPFSSPVLLVKKKDGTWRFCVDYRHLNAITVKNKYPLPIIDELLDELSGARWFTKLDLRVGCHQIRMQAMDEHKTAFKTHHGHFEFRVMPFGLTSAPATFQGCMNSILSPLLRKFVLVFVNDILIYNRTLSDHVQHLQSVFQILTEHHLEVKRSKCSFAQQRLAYLGHVISPNGVSTDEDKILVVKNWPTPTNVKELRGFLGLTGYYRKFVRYYGVLSKPLTNLLRKGQSYIWTATTEQAFQSLKQALMTTPVLAMPDFTEPFVVETDASDKGIGAILMQKQHPIAFLSRALGPRHQGLSTYEKESLAIILAIDHWHPYLQHSEFFIHTDHRSLCFLDDQRLTTPWQHKALTKLLGLRYKIIYKKGSENGATDALSRFPSVSELTAISSMVPDWIQEIIAGYANDSDALSKLQTLCISANVVPDFTLKECVLYFKGRMWIGTNSFVQQKILANLHSSPVGGHSGITITYQRVKSLFASPHLRTIVVQFANACSICQRAKSEHVKYPGLLQTLPVPEHAWQFVSLNFIEGLPKSATFNCILVVIDKFSKYSHFVPLAHPFTAFDVAEAYMQNIHKLHGLPQSLISNRDRIFTSTLWTTLFRLAGTQLRMSSSYHPMGKRKGWLALAEYWYNTSFHSALGTTPFEVLYGRKPKYFGLSVNALCQSPELSDWLQERDKMQNLIRDHLLRAQARMKVPADKHRSERSFVVGDWVYLKLQPFTQQSVVTRANCKLAFRFYGPYQILDRIGAVAYKLALPATSLIHPVIYVSQLKKALAPTEFVQSQLPILQSKDEGLTAVPSQVLDRRFVRKGSKMVEQLQVRWSGNDPQVITWENGQELRRRFPHSEAWGQASSQGGGNVTVATSPDDNAGQATEAQLGSRSRETRIVTLRPRPPVPPGMPGRRGRSGRCRCHPPGGRAREWLTVAALNAILGRWGTKPPTTWNITGDPCSGIAIDETTDIDNSETINPGIKCDCSYDNTTVCHITKLRVYALDVVGPIPAELENLTYLANLNLQQNYLTGSLPAFIGEMTALQYLLVGINALTGILPRELGNLNNLLALGISTNKFVGPLPEVLENMTKLEELYIDSCGLSGELPSALSKLRKLKILWASDNDFTGRIPDYIGSLSDLTELRIQGNNFDGPIPTSFSNLVNLTSLRIGDLVSGSSSLAFMSNMTSLIVLFLGNNSLSGSLPDTKGASLKVLDFSYNELSGKFPSCILSSGLNCLQRNTPCLPASPDDSSFAVDSGGTRPIIGSDKSYYEPDDTNLGEASYYVSNSTRWGISNTGKFMEAANFSFIVYTSRQFTNTLDSVLFQTARTSSSSLRYYGIGLKNGFYNVELQFAEIFFPDNTTWTSLGTRIFDIFIQGELREKDFDIKKQTNGKSYTVVLRQYVVRVTENFMEIHLFWAGKGTCCIPRQGSYGPLISALSVSPYGGNNKVDPGPIKNSAELLSVVGRPDVFSYGEIKSASNNFSQDNILGRGGYGLVYKGKLYDGRMVAVKQLSPTSHQGKREFMTEISTISTVQHRNLVKLYGCCIESKAPLLVYEFLENGSLDQTIFATGKTNMNLDWRTRFDICVGIARGLAYLHEESSTRIVHRDIKTSNVLLDGDLNPKISDFGLARHYEDNMTHLSTGVAGTLGYLAPEYAMMGHLTEKADVFAYGVVAMEIIAGRPNFDESLEDDKKYLLGWAWRLHERSQTLEMLDPKLARFDEEEVVRVINIILLCTVGLPEQRPPMSKVVSMLTEDTEMSEVDMSMWPSYVPQWQRKSGSDSFFTSSMQQSSGTESSVPSSSGNNTKSQGETFPLVLSANSISEFAEGRSQQFYIVCNNCTSVKWGRSNTVKPRSLQDLHTHLEEAAEVGFHVDGRHSTHLCHEATGIGVICRNGHGTGGGVGVGVTDALNGLDGCGMEDNVVEDGVEPRRNNLVAPCKPTTRLVLGLSLAGTTPLARLHGAEWALAQPPPPVATDDVLCTRT

SEQ ID NO: 199291 - protein, 157 aa, Oryza sativa
  unsure (1)..(157): unsure at all Xaa locations
  Clone ID: PAT_MRT4530_94870C.1.pep
VHGPTGQPITLTHPQITLEARVFSSLLVFPKSRRAPAMEQRRQQQMPHPEEPRGGGDLHGGRRTAPPVLAEDEGAEGGGGAXAHRSLLAKAADSAXTGSARCGGXSRTGGEEEAGEVXTGLGCFHLRSGALFFDEGLRKEXGRPKAGFFFQGFGTPR

SEQ ID NO: 199292 - protein, 61 aa, Oryza sativa
  Clone ID: PAT_MRT4530_94871C.1.pep
KQLDTKAHCIGSTLTSHGERKRKTICKLCQTGSMIQKTCNVPYVLVLVSWPQKHTTETTFN

SEQ ID NO: 199293 - protein, 172 aa, Oryza sativa
  unsure (1)..(172): unsure at all Xaa locations
  Clone ID: PAT_MRT4530_94872C.1.pep
GAEVGSGRNGREEAGSGGGSRRCRRGQRLRRGCGGTLPRDPYVQLAIGKRERKRGGGKAGEGGRNGAPRVVGRQLHAAAADAPPPAADAHAAAAADVPPPAALAPSHARADEPRRSRHRHTPCESRESPATAARLPAPTPLPLIPLGLGLXGGAAARRSRRRLRLSTVVVAV

SEQ ID NO: 199294 - protein, 292 aa, Oryza sativa
  Clone ID: PAT_MRT4530_94873C.1.pep
MRDVCMEVLPPMDHYASRGNWFMARKWSPEENKQFERALAGLDLRCPDWDRVARAIPGRSALEVMNHFRDLELDVQQIENGMVPFPVYGAAAAGGAFTLQWDGAHGVGDFRNAYRFGGGGGGKRHFGRTPEQERKKGVPWTEEEHKLFLLGLKKYGKGDWRNISRNFVQTRTPTQVASHAQKYFIRLNSGGKDKRRSSIHDITTVNLTDDRPPSPSQSSLISNQSNTSTLTAAVAPFSSTADVKPQNAANASFNSPSRTLGMAGYGMGLQDQGLQCGGPLHDQLAASRSILF

SEQ ID NO: 199295 - protein, 469 aa, Oryza sativa
  Clone ID: PAT_MRT4530_94874C.1.pep
MSTAAAGRKKKGGTPEASDAAAAAPARTLGCGVGSATAALPFSRGGRGVGLAPPPRSLGRGGGPAVAAIPPGGFPSYSASMDGFPFPPPFDGSYRGGFPSSSAWLDASGGDESSPGSWDKDVHPRGGFMSYFGNHAQNSHLVGAPIYIADASSPPEVEILQGNDDGNGNGNVRTEKRILWTEEEDIRLMSAWIEHSTDSTCGADKGGGQYWGEVVESYNKTTPPLRKRNLKQCKDRWHKINRWTDLFECAYVKARRIFTSGYSNQMWIDAAHKFYVDDNKEAKLGPFVLMEVWKICREVSKWKTYNDNLRNARKRKSFHLEGDSEEADDTFDEMPKRPMGQKAAKKAALDAKIKSNGLGSSDDGHSKESPIQLDKFDRYSKFQEENNDKRMKLLDRQEKISSEKLEATKIAHLTAQEYKEGRKLEKESKMMETYNSLISQDTSSMSAEEKAQRVSMMKCLMKTLFPESD

SEQ ID NO: 199296 - protein, 44 aa, Oryza sativa
  Clone ID: PAT_MRT4530_94875C.1.pep
KNVNSHSKNSPATVLYLFTFFYQGKKNARFDTVIFEVVHASTVI

SEQ ID NO: 199297 - protein, 354 aa, Oryza sativa
  Clone ID: PAT_MRT4530_94876C.1.pep
MQPDSASHRIARVAAHLSPSPRPQMEEGVRPAPCRAKGGAPGFKVAVLGAAGGIGQPLSLLMKLNPLVSVLHLYDVVNTPGVTADVSHMDTTAVVRGFLGPNQLEAALTGMDLVIIPAGLPRKPGMTRDDLFNKNAGIVRSLCEGVAKCCPNAIVNLISNPVNSTVPIAAEVFKKAGTYDPKRLLGVTTLDVARANTFVAEVLGIDPKDVNVPVVGGHAGVTILPLLSQVHPPCSFTPDEISYLTKRIQNGGTEVVEAKAGAGSATLSMAFAAAKFGDACLRAMRGDAGVVECSYVASAVTELPFFATKVRLGRAGAEEVLPLGPLNDFERAGLEMAKKELMESIQKGIDFMNK

SEQ ID NO: 199298 - protein, 548 aa, Oryza sativa
  unsure (1)..(548): unsure at all Xaa locations
  Clone ID: PAT_MRT4530_94877C.1.pep
MSHNHGDTIPLHPSSAQSDMDEIESLIYAAPSATVLPARPPSPPRASIPVSTSPAPLPAPAKPSLPGASVEDGXPTIVPQAPPVLHGVSDPNAFPLLRPLRPNPRLEIXVLTTWPASLRETSILLSCVRAWCGRMAEPSKVIHIRNVGHEISESELLQVVQPFGTVAKLVMLRAKNQALVQMEDLASAVNVIQYYNTIQPSVRGRNVYLQYSSHQELTTDQSSHGRNPDQGDRAVSCYSPLSXHAPRFRLEAGRLSSHNCMTFKPSYNISHVKVQYKLMVLYILSELQVHYNNDRSRDFTNPSLPTEQRSRSSQPSYNDPSSLFGFQQPGDPYAQMSKAAMIAAAFGGTLPPGVSGINDRCTLLVSNLNTDKIDEDKLFNLFSMYGNIVRIKILKNKPDHALIQMADGLQAELAVLYLKGAMLFGKKLEVNYSKYPTVTADPDARDYSTSHLNRFNSNVVKNYRHCCAPTKMIHISALPQDITEDTIHSLVGEHGTIANSRLFETNGKTQALVLFESVEEATEALVEKHASKLDRTNIRISFSQMQNI

SEQ ID NO: 199299 - protein, 138 aa, Oryza sativa
  unsure (1)..(138): unsure at all Xaa locations
  Clone ID: PAT_MRT4530_94878C.1.pep
RSGADQPDVLANLDGCCSNIKKIHPDKLXNQGSYAAPDACLCEDRDNNAACETCTKTGAFHFFPPTTXKWAGNLGKNGRXTFRPAIKKXXDVNLHADHCTVLANIQHHTPDIAXQGEHSHFTTRPEDIGPCDQGHMFG

SEQ ID NO: 199300 - protein, 297 aa, Oryza sativa
  unsure (1)..(297): unsure at all Xaa locations
  Clone ID: PAT_MRT4530_94879C.1.pep
MAEPSKVIHIRNVGHEISESELLQVVQPFGTVAKLVMLRAKNQALVQMEDLASAVNVIQYYNTIQPSVRGRNVYLQYSSHQELTTDQSSHGRNPDQEEPNRILLVTIHHMLYPITIEVLHQVFSPYGFVEKIVTFQKSAGFQTLIQYQSRQSAIQAYGALHGRNIYDGCCQLDIQYSNLSELQVHYNNDRSRDFTNPSLPTEQRSRSSQPSYNDPSSLFGFQQPGDPYAQMSKAAMIAAAFGGTLPXGVPGINDRCTLLVSNLNTDKIDEDKLFNLFSMYGNIVRIKILXNKPDHAL

SEQ ID NO: 199301 - protein, 221 aa, Oryza sativa
  Clone ID: PAT_MRT4530_9487C.1.pep
MRGSRRRARLSSSSLDLRVREAKATREPVPFEKEREARGRQSADAGGPQVPLPSDAGRRTLRSMPRLPLARLRTVASASAFVSSKMASCVGALLASKVKAPRRDWFNLSGGSGYEQVKGQSQLATQEGYRCRAAVGKGPTVGPTNCAISVPFALALINHRTNGSTYSPGESRKHHAFPGTDYSDSDASKVRKAMIAAANRHQNFDSENAVSQQQCADGPRD

SEQ ID NO: 199302 - protein, 132 aa, Oryza sativa
  unsure (1)..(132): unsure at all Xaa locations
  Clone ID: PAT_MRT4530_94880C.1.pep
MPVATRGGCRWQFAEEKGDLAMVAATWKRGARCWPRPFIGWPGRRAHTAATVELGGGKGDSRHDDDLPWSARWRRRQEDHGRWRHAVGSGAPIGEREGRXGFGWAGSARLCANWAVAREEKKWREGEKRNGL

SEQ ID NO: 199303 - protein, 49 aa, Oryza sativa
  Clone ID: PAT_MRT4530_94881C.1.pep
MGTQESGGGPSIRDAIDDGGLLEHNFLIKYHNFIIGDLFNRYVGDAPKY

SEQ ID NO: 199304 - protein, 234 aa, Oryza sativa
  Clone ID: PAT_MRT4530_94882C.1.pep
MSSSTAASIGPPQPPPPPTSPEEEKCLNLELWHACSSPLVCLPSVGTRVVYFPQGHSEQVSWLSAMGCSLLSRGNHQRPWWIALPSSCWCFFSKTLAEREAFYYVVDNAAVMDFITVNTSGSILINMLKPEYRKFGEWGNRCIWFTTIQFSVISKDLASYISIQPVSGQTICVGLLWEYIIGHFLSSTALVSFICCSKTHGYIASAFYNAPQELKKDIELMIVMTRSYLRKKNK

SEQ ID NO: 199305 - protein, 203 aa, Oryza sativa
  Clone ID: PAT_MRT4530_94883C.1.pep
MRSWCTIASGSHRDAEEAEQSRRDAPKNLIARLPVQVSQADGVPEAPARPGSVRARDQNWGRQSSSTGNKRGSAIGGGSARDGEWNRSSVAVVRRRKCERQRAEPELCRGGGSASQEVRETKSGTGALSRWWERFLSVTGVTVMPALNQIQFPSREVRETESRTGALSRWWGRFSSSNVGALLVCYWSNSRARIGSVRDGEQN

SEQ ID NO: 199306 - protein, 119 aa, Oryza sativa
  Clone ID: PAT_MRT4530_94884C.1.pep
INTPNLQGARAGTFNELTKVTNSFSNANDIGTGGYGKVYRGDLGNGPRIATKRSELGYMYGNLEIPRAIELLCKVDHKNVGRRVGMSLDQSEHMLTYEYGPNGALIDSLKRIVVVLLQW

SEQ ID NO: 199307 - protein, 175 aa, Oryza sativa
  Clone ID: PAT_MRT4530_94885C.1.pep
MSPMPSLLLVFLVASSAAGVAAGGGGGELKHIHLYMHETFSGPNATEGGVVASPFNTTFGQVAVFDNELRTGEDRAASPLVGRYQGFIVGTGRSSPGYLTSATVAFTAGELNGSTLSLEGPFFGFAGTAERSIVGGTGKLRLARGYYLLKLIGKTSPETAVSEIDFFVLMYSSTH

SEQ ID NO: 199308 - protein, 104 aa, Oryza sativa
  Clone ID: PAT_MRT4530_94886C.1.pep
RDTFQIGRSIGAGATLGQHTGTLLAATMARLGPKQLLLSSLQKELAARTSKGTCTEDTHSSMEQSSTTAEQSQKTEAEEEKTPLVTPQGAPDQVSESHKTKPEI

SEQ ID NO: 199309 - protein, 64 aa, Oryza sativa
  Clone ID: PAT_MRT4530_94887C.1.pep
GKKKLKKHSAYQMIQVHNEQGMHLTIRKSKAIDNPQKQTTSNTRRIGKYMLLEQDINLHHVERN

SEQ ID NO: 199310 - protein, 156 aa, Oryza sativa
  unsure (1)..(156): unsure at all Xaa locations
  Clone ID: PAT_MRT4530_94888C.1.pep
RHQYFHWHHPNEIGQLKALQLLNLSSNRLSGEIPESIYKLTNLQVLDLSSNNLTGTIPDGLNKLHFXSAFNISNNDLEGPVPNAGQLSTFPSTSFDGNPKLCGPMLARHCGLAQTPFVSTKQNADKVVSSFVFMISFGTFFAVGVLYDQIVLSRFF

SEQ ID NO: 199311 - protein, 128 aa, Oryza sativa
  Clone ID: PAT_MRT4530_94889C.1.pep
MHILQSSTRGKVVHDQCGTQAVHIQLSSHPIDPDVSLRGSLCTELLPSVVFIVPPLGLASTYRSIPMAQEDLLMAPGHLHHHRLCYSSARYRGGATAVRTSCEKHTTRKTIFAKRDPSIFLGGYHFRN

SEQ ID NO: 199312 - protein, 221 aa, Oryza sativa
  Clone ID: PAT_MRT4530_9488C.1.pep
MPMPPAVRYYVPCEEADDIHDLGEEEQFCPLPLSPPYSPAQPSPPPTSPPASPTLLPTSPLSDDHADHTTDSLITFASTVDVAADDDFYFDFDFDADDDAMDEKHAEYLAECALKHYNGDAANEAKYELVAASATASGFMDCRGAFHFHVSFFARAAGAGAAEAAPRFFLAELHHRIAMLPTTCVVSLNNDDEIQMDPQPSGCFDDEPFDVIIKHPKGLNK

SEQ ID NO: 199313 - protein, 46 aa, Oryza sativa
  Clone ID: PAT_MRT4530_94890C.1.pep
MAVASCCSLPIGSQPMRVAVGSQRSVKTGSASYEVSSPGGCRFGLS

SEQ ID NO: 199314 - protein, 376 aa, Oryza sativa
  Clone ID: PAT_MRT4530_94891C.1.pep
MDVAEAASPGVGAWAAIRGYFTPATLFLVVNIVIGTIALTSRTHQRRRRQVYQYHHDGEILHHDQLQPPPPLLHQQYYGGGEHQQMMMQETLYAPPPAPAPLARTSSVLDRLRSFGLYRFRSGDFPPEYATAAAAATSQLHHQRTEEVVSSSPVDEVKLQGHYARSRSEPAAAPAQEERKAASRLRNSSSEVRRAEVVRAPARVVEAFPEEAAAAVDATAEDDFTPKQQRDLPLQQEYVPPPAPAPAPLARTSSVLDRLRSFTLYSFRSGDLATDDIPADAAAAATPAQAHYGRTRSEPAREQDKKAKKQAASEAKTMTKSSSEARKDTAAEDADDGGVDARADDFINKFRQQLQLQRLNSLLNYKEMLNRGSSKQ

SEQ ID NO: 199315 - protein, 85 aa, Oryza sativa
  Clone ID: PAT_MRT4530_94892C.1.pep
VSLFQIFNSISYSSCFALELCFMYIAIALICMCIYASSHIAIFIYLGSFAMLVSRFMESRICMVLVCFGFGSGMYIMYIQSQKKE

SEQ ID NO: 199316 - protein, 94 aa, Oryza sativa
  Clone ID: PAT_MRT4530_94893C.1.pep
MAAPCVEKVPMARREEHATTATTPHRKEARAAMAPRGEEASAAGAWYEQEVMAQLSGEGSIWRGSDSDISAAKRREGDDENGGSVLGVGGHGST

SEQ ID NO: 199317 - protein, 253 aa, Oryza sativa
  unsure (1)..(253): unsure at all Xaa locations
  Clone ID: PAT_MRT4530_94894C.1.pep
MDSSATPVGLSPPLLSLVLRNEPCCTKAVHGNERPRSFHPKRTAEIDRSTAGPRRXGNDDVGDDVITYGDSGLQTRRRTTARRRERRAPARRGRRGELTGDQNGGGRSTDGDGVEEEAAALFGLTTATVLRRSXRRRRGGRGRRRDGDHDGDLPERRRRPERRRRTAGATVTMVARGYTVLGRFRRRETKARVATGSGDTGGPFIGARRQRRRPTATGDEKESLGLGGERSIRIELESSNFQTKLADDSKREK

SEQ ID NO: 199318 - protein, 495 aa, Oryza sativa
  Clone ID: PAT_MRT4530_94895C.1.pep
MSVWEGGTDIGRSSQQAGSSASGQNASSSSFTLTSPGLRPPTHAASTPPPPPWLDDADHHHDNAFLHWVINDHHHPLLDLDDVDLDYAKPAPFFFADRGLHHHHPASSSFPNPKPTADDNTSTVEQLVQAAKLTEAGDVLAARHILARPAINYRLPASAAPPLLRSALYFKDALRRALISDDDSSSSSTPPPPLHEPHPHDLLLKLTSYKSFSDLSPLLHFAHFTCVQAVLDELAPSASCIHLLDFDIGVGEQWASLMHDLAHRHPGVALKVTALNVTASSSSHHPLQLQLIHDTLSTFAADLSVPFRFAAFNLDATDLTPLLAVAAATDAIAVHLPVGSVHATAVPSVLHLVRRLGAKLVVSVDRGCDRGELPFAAHLLQALRSTVSLLESLDAMGTDSDVAAKIERFWVQPKIQECVRAAVGVGGDKTAASAWRATLASAGFVPVQVSSMAEAQAESLLKKLPVRGFRLERRAGSLFLHWQRGELASVSAWRC

SEQ ID NO: 199319 - protein, 209 aa, Oryza sativa
  unsure (1)..(209): unsure at all Xaa locations
  Clone ID: PAT_MRT4530_94896C.1.pep
GDTGGGGARVDGGSSPRAMEWTGGVAAGAWHDAANPKAASARCGXRLEWRWRAAGGGGRGGGSLGVEGGNGRGEHEGALYRARGGGIGPERGGNQPATWGREREMWEAATWPDFAGRVGENGADVGDDRVHARAGEAATWDADVGEVELNLAPKIGEKWGKMWRSWRGTGFTWFGCEGASGRAPDLAGRGRQPPTMAASAWEAEGRRRA

SEQ ID NO: 199320 - protein, 50 aa, Oryza sativa
  Clone ID: PAT_MRT4530_94897C.1.pep
LWFSLLWGLRSASMGLFLLATQQLVFCLARSLFGFFVFLQFLASFPFKQI

SEQ ID NO: 199321 - protein, 99 aa, Oryza sativa
  unsure (1)..(99): unsure at all Xaa locations
  Clone ID: PAT_MRT4530_94898C.1.pep
PPGFKCGINYHPPXVVPGGGLAQVQRAVCFISXPPRVGGVFSPLAPKFALLFSKGAFFPWFFPKGMEEGDFSGAPGAPPPLGKDSQGVGPQFSHGSKGF

SEQ ID NO: 199322 - protein, 111 aa, Oryza sativa
  unsure (1)..(111): unsure at all Xaa locations
  Clone ID: PAT_MRT4530_94899C.1.pep
QYLPPKKQFNPHFLKKPLALPPWLASRAQPLPPRTXXPFKPNGPHPKKHRVFFGLKTPKPVRFPLFLAPPPPRRRGAGNGTGHGASASLKGRGPPPPPPGAPPPGGQDPPP

SEQ ID NO: 199323 - protein, 90 aa, Oryza sativa
  Clone ID: PAT_MRT4530_9489C.1.pep
MLAFALVFCMFLLEKSVEAYKIYILRLKTEGGQGPTLSRDPGPHLPLLRKARKPVSGPRPSLALIDNTSLLERSVETYKIYILRLRLREA

SEQ ID NO: 199324 - protein, 91 aa, Oryza sativa
  Clone ID: PAT_MRT4530_948C.1.pep
MAGRFVFPKLASHLSSKSTRSLFPRTAEASRNFNTFPSAHPKLKINCPTTGLPSVDHTNHLIKPLGCARDANTTALYSTTVKDRLTPIVRE

SEQ ID NO: 199325 - protein, 38 aa, Oryza sativa
  Clone ID: PAT_MRT4530_94900C.1.pep
RGWLNPWFGRTASGASHPGLPHGCPRLLPNGCYARLSP

SEQ ID NO: 199326 - protein, 86 aa, Oryza sativa
  Clone ID: PAT_MRT4530_94901C.1.pep
LLVVFWPALAPPIVSVALTLQRQLKGGLAANSPPPLPPRSRSFWCRLALCFFSSVLSDSGLCALLCRRVSFSLSLAFGCSWGLFRI

SEQ ID NO: 199327 - protein, 96 aa, Oryza sativa
  unsure (1)..(96): unsure at all Xaa locations
  Clone ID: PAT_MRT4530_94902C.1.pep
VPRACRLSYASSIWVTLIFIFTGPVGFTYVGDWGKILGGYPNFISACAGAXXPLSPAWRYYAIDGPHPIGPFPTCCACREWAIWGPRPGMRPHYSA

SEQ ID NO: 199328 - protein, 103 aa, Oryza sativa
  unsure (1)..(103): unsure at all Xaa locations
  Clone ID: PAT_MRT4530_94903C.1.pep
NDFYGRHFEKLDICWCKVHHRSLNLYYCVIPVPKLTNRPFRSSNLFDCVIPVSKLADHSFRSSNXFSCITPVPKLGFEYHLGQIGRSKEQTLYQTCSPQGCRN

SEQ ID NO: 199329 - protein, 389 aa, Oryza sativa
  unsure (1)..(389): unsure at all Xaa locations
  Clone ID: PAT_MRT4530_94904C.1.pep
MGSMSCINDFAFHPGXAYRFGSINFITDEFGKISLLDSDSNQSGXDNLSAPFGLPNAAEIYSKAFSLEVASNHSGGIASTTSFSPSSFYQEMPEYPPVTMXLSPSLAAMFGSRSPSLRRSRSNLASTKIGSSSREVGVLLQPLGLCSPTTLAPHKTASTXDTEIGDGSDFDDDYTPLLIGVFIANAETDTQIAACLVDEETVKVEQEQRTRREQKELLHREEEERKRKEDKNRVXDAGRMVRDLIGETDVDNTNFFLTHQQNAVRAVTPVNTLLNAHFTQRRTAGAPAHVTPILNKVKTMGAANIPDGEGGSRRATESTAQTPAGNRLPHLQPREYREPGRSRTNSRAPHGDRRRQDQSVHSPASNNSERMFKLPRMPPKCTPLDLQLK

SEQ ID NO: 199330 - protein, 105 aa, Oryza sativa
  Clone ID: PAT_MRT4530_94905C.1.pep
LGVAAPRLSEDAGLGAADGGLGEEEFRGGGAGLGGGRHRSVEPAPGSVEAAGSVSAAAGSVAAVAVSVAVAAREDDGGEVGVGGGARVLRRRETVAGLRKIFDPI

SEQ ID NO: 199331 - protein, 88 aa, Oryza sativa
  Clone ID: PAT_MRT4530_94906C.1.pep
FFGHQFSMETKVRMSCRLGTMVALVLVGVVLAAILQEATVDAASSSSDSPAAKSGTGYLDYGNLKAKLPPPGVAVTKRPCIAKEKCRG

SEQ ID NO: 199332 - protein, 207 aa, Oryza sativa
  Clone ID: PAT_MRT4530_94907C.1.pep
MEENGVLVVVNDGRPPLTSHWKRHIRRWLLTTARKKWRQQQRQGRSGGSGGGNGEVRSVGSSGAVALFSPDLAAGFEWPYPASGSLWLTELARRVAMSMTTAVRGVEANDGGRARRGGDDGGLAPCRGDDDSEGTERTPEKVNIYTFEMYHTEYKEKRWATHAGRNHCEGCRSWATMVIGEAASKGVPLGNWCGAGQSNDHGKECHG

SEQ ID NO: 199333 - protein, 172 aa, Oryza sativa
  Clone ID: PAT_MRT4530_94908C.1.pep
MGKSMAPLPAAVTATASSAVTPADDEAHSLLPSTPSNEEDDDDLEERAYEATEKVIVSISDFPDADDDEEESGLATSTAASGIPPFSWRKLWLFTGPGFLMSIAFLDPGNLEGDLQAGAVAGDTLLWLLLWATSMGLLVQLLAARVGVATGRHLAELCRDEYPSWARRALWL

SEQ ID NO: 199334 - protein, 74 aa, Oryza sativa
  Clone ID: PAT_MRT4530_94909C.1.pep
WFVGHVERLIDGDAAGTLGQLKRVNDWLDGAPAPPSEAAERLKKKIFGYLLDHVESAVVALNGGAAAGGYAGRK

SEQ ID NO: 199335 - protein, 91 aa, Oryza sativa
  Clone ID: PAT_MRT4530_9490C.1.pep
MAPAHLTSGSHGRLPHVAMWPFMAKGHTIPLIQLANYLRHHRLATVTFFTTPGNAAFVRGGLSSGDDDDDVAAVVELDFPVDAPGIPVRFP

SEQ ID NO: 199336 - protein, 50 aa, Oryza sativa
  Clone ID: PAT_MRT4530_94910C.1.pep
MACFSKATLVQAPASILPLVVVGWWLRFTPTSAAMEVSVGHFFYFRRHHL

SEQ ID NO: 199337 - protein, 139 aa, Oryza sativa
  Clone ID: PAT_MRT4530_94911C.1.pep
MCYTKRFQNYYDKTFKITIDCPLDIKTTLSNSRRMFQWQPAPPRQISTCSLDVSSRRPSGTASPCMYEQPELLTCRGLLSCLRRTSLDGALVEARPKRRHGPRLLGAELVHGVEVQGRLLLRLPTGQEDDGGHGSGSVL

SEQ ID NO: 199338 - protein, 68 aa, Oryza sativa
  unsure (1)..(68): unsure at all Xaa locations
  Clone ID: PAT_MRT4530_94912C.1.pep
LHXEXGXRGSPXKGPESXGIXGGXXYRGIHXXXQHXTXXTFPQPVXPRRERSFFFXLSAFRVAFSFFF

SEQ ID NO: 199339 - protein, 358 aa, Oryza sativa
  Clone ID: PAT_MRT4530_94913C.1.pep
MSAYCGKYKDELIKNAAYIGTPGKGILAADESTGTIGKRFASINVENVEENRRSLRELLFCTPGALQYLSGVILFEETLYQKTKDGKPFVDVLKEGGVLPGIKVDKGTIEVAGTEKETTTQGHDDLGKRCAKYYEAGARFAKWRAVLKIGPNEPSQLAIDLNAQGLARYAIICQENGLVPIVEPEILVDGPHDIDRCAYVSEVVLAACYKALNEHHVLLEGTLLKPNMVTPGSDAKKVSPEVIAEYTVRTLQRTVPAAVPAIVFLSGGQSEEEATLNLNAMNKLSTKKPWSLSFSFGRALQQSTLKAWSGKAENIEKARAAFLTRCKANSEATLGTYKGDAVLGEGASESLHVKDYKY

SEQ ID NO: 199340 - protein, 146 aa, Oryza sativa
  unsure (1)..(146): unsure at all Xaa locations
  Clone ID: PAT_MRT4530_94914C.1.pep
STGRGGRRCDFWTPDGLQDSCCTPSPPTPTTSSSSPAPGRSSPALEGWLGEAATRWWVADRAGGDRAXGWRRAVGRRWWQGHLAADGSRRKEGRRGEEEGEEAGRGGLAGAIDALRPAGKAGGGGGGRSGGAAREREGRGTGGEEV

SEQ ID NO: 199341 - protein, 291 aa, Oryza sativa
  Clone ID: PAT_MRT4530_94915C.1.pep
MAVRVENVEFNVRTGNYPEFMNNLRDRLAEHPDLDDVYAGCPVLAMQRCPKQPARWMYINLVGNGDDRATLAVRDDNVNLIGFRNLKGQWFHMGFSGMSKPILPEPSTFLGCDGSYPSLLGGRDEDDVKNMLVNDIDLRQVVLLDAVHKLSGYEQPPDPYGAADDDTKLDLVHLTVVFCEGARMALHYDAVNDGQISLNERQVDYLRNWWLMSRALLQDETTPWPRRLSSETGINDDEQARRVVLLVLNTSTTVHVHGAAERRPLVEKLFVVPARNPPLVPVSKPGVPIRD

SEQ ID NO: 199342 - protein, 263 aa, Oryza sativa
  Clone ID: PAT_MRT4530_94916C.1.pep
MSKLVSAGWSPDLAMDAYLHTLQLCKEQQQDDARGSGMVMEPRSMEYIAALAAGNQARHLLDVASSAGGGGASSSSSSSPATAVALAIAAARTGGRLVCVRDDQQGLDGVRRHLRRLGLATSAVDFQLAPSPSAAVRRLRRVDFAVVDAGVERCGEVLGAVDVDPMGAIVVVTNVFQEERTSWSSRSGHGDGSRVCSYGQVVGKGRSMVLPIGHGGMEVTKLGLGRRVGGGGLIGAHLQWQRQQKKKLVSTPKRTFLVCDGSS

SEQ ID NO: 199343 - protein, 85 aa, Oryza sativa
  unsure (1)..(85): unsure at all Xaa locations
  Clone ID: PAT_MRT4530_94917C.1.pep
RQSGGGRANPRCAAPVLLPPLCSPPLAPQQPRHGPLLAGGGGPAPAAKELHRTILEMQAAXQKPVLAVVHGACVGGGVEVLAACA

SEQ ID NO: 199344 - protein, 74 aa, Oryza sativa
  Clone ID: PAT_MRT4530_94918C.1.pep
KLARRRVLGVRRAKFVTATTSSSTAASRWAKTSSEIHRALLEVLEFIRQSIARHVLISVLSVHRQVCHGVACCG

SEQ ID NO: 199345 - protein, 51 aa, Oryza sativa
  Clone ID: PAT_MRT4530_94919C.1.pep
PLRINPTSATKNGDSWIEPKRVTDDAMPLPYHLVVPWSTLFCLWLKDHFRS

SEQ ID NO: 199346 - protein, 92 aa, Oryza sativa
  unsure (1)..(92): unsure at all Xaa locations
  Clone ID: PAT_MRT4530_9491C.1.pep
MGKDCGKHGDDDFRQGCRRFITVLVVLAILVGINCLIVYXVLRPTHPCFYLQDATLRQLDLSNFSSTVGGVLSTTIQVTCCFRIPNDPCGVY

SEQ ID NO: 199347 - protein, 525 aa, Oryza sativa
  Clone ID: PAT_MRT4530_94920C.1.pep
MAEVKPEDMVHHPPMDQLQGFEYCIDSNPSWGEAIALGFQHYILSLGTAVMIPTMLVPLMGGNDHDKARVVQTLLFVTGIKTLLQTLFGTRLPTIIGGSYAFVVPILSIIRDPSLAQIADGHTRFVQTMRAIQGSLIVSSSIQIILGYSQLWAICSRFFSPLGMVPVVALVGLGLFERGFPVIGRCVEIGLPMLILFVALSQYLKHVNVRHVPVLERFSLLICVALVWVYAHILTASGAYKHTALLTQFSCRTDRANLISSALWISIPFPLQWGAPTFSANHAFGMMAAVVVSLIETTGAFMAAARLASATPPPAYVLSRGIGWQGIGTLLDGLFGTGTGSTVSVENVGLLGSTRVGSRRVIQISAGFMIFFSMLGKFGALFASIPFPIFAAIYCVMFGIVAAVGLSFLQFTNMNSMRNLFIVGVSLFLGLSIPEYFSRYTTSAQQGPAHTKAGWFNDYINSVFSSPPTVALIMAVLLDNTLDVREAARDRGMPWWARFRTFRGDSRNEEFYTLPFNLNRFFPPS

SEQ ID NO: 199348 - protein, 719 aa, Oryza sativa
  Clone ID: PAT_MRT4530_94921C.1.pep
MPQDDDWFWGRPTPVVVGDGETTSKPKPPVAGKTKKVEEQHPRRPGEPDCSYYVKFGSCKFGISCVYNHPDPRPQHGADDKKPAEQFPRRPGEPDCSYYVKFGSCKFGMNCRFNHPPRMPVPPQQEYFSGNACHCHHIEGKSKVEQVKLNVLGLPLRPGTGLCSYYMNRGICKFGTNCKFDHPDPGSDHEKWVVSSNANQVSSQVNIYSVLDHGESNEHTFTSEEVHQPGIPSFHQRISYTRDQLLQLCQNVEVPKDILKFCQDINVELNGEDKISGFGAEKDHVSILPFSYVIMAEIVCAALINVPQRCKVLYFIVQTPSYKRFDATDSRDWHSWSAQTNWEQKFWDNFSEAKEPYSLGWKQEKFNKPDQSSFHFDSKDQRGIISGKDEVLKTLKSILNTFSPKMFDLQKGQLIETRISSADILKDVINLIFEKVVAEPAFCSTYAQLCTYLNQNLTPFPPEDCDCEEITFKQALSNKCQEIFESAHTVCSEIGKLIGQDREMEQRDKERVVKLETLGNINFIRALLKKKLITNKIIDHIVQAVMDCCKFRFEPLGKVDLLNIIFEGMLDSDSAGDESNICVNAMIGGNKSSIASNDVEMTRKNVNRQNEEAILQKSYDEVPNNKMDPQKNYADGAISYLIEKEKPTNLESSVRICRGGCSISEIMELVVDAGAVEGSDEHFMATLLFIKPEYREIFLTLDTREGRLGWLKRMYKVKE

SEQ ID NO: 199349 - protein, 2410 aa, Oryza sativa
  Clone ID: PAT_MRT4530_94922C.1.pep
MSHRALPPMPDTLSDAFAAAVLMSSTDKPDTLPPGRLSPVSPLTHSSSSKLPTPSSSSGSSGSLSVSRAPASALASRRSHSGEIPLPSDGPPRGSRPGHRRTGSGPLIFTSCSSSATSPLTNALPAGNICPSGRLAKPLSSCSAAATPPAPTPPRAARHDVLGSGTANYGHGSIVRSRSGGVVVAEEDAVVRRAMSSADPEELKKAGNEQYKKGYFEEALRLYDRALALCPDNAACRGNRAAALIGLRRIGEAVKECEEAVRIDPSYGRAHQRLASLHIRLGHIEDAQRHLSLATPQPDLLELHKLQTVEKHLGRCMDARKVGDWKSVLRESDASIAAGADCSAMLFASRAEALLRLNQLDEADLAISSASKLDYSSSCTSDNKFCGFLANAYLFYVHAQVDMALGRFDHAVSSVDKARIIDQGNVEVVTMHNNVKAVARARSLGNELFNSGKFSEACLAYGEGLKHHPVNPVLYCNRAACRFKLGQWEKSIEDCNEALKIQPNYPKALLRRAASYGKMERWAESVKDYEVLRKELPGDTEVAEAYFHAQVALKSSRGEEVSNMKFGGEVEAITGMEQFQMATSLPGVSVIHFMTPLNQQCCKISPFVNTLCTRYPSISFLKVDISESPAVARAENVRTVPTFKIYKNGLQLSRKRPLASQDKAVTEHSTQDTNVADDCCWLSKAHNLAKTSKQTKPTLSNFDNAKVCQNLALPKCGVVDVEYSYVDGFLPALFNIMEGFSSRDLTSLGQVIGSRLGGQFKKISFCYDNLRLSLGQGSAPCTSSLKTILQSRNSNLRLSCLFGVLMASSAGGGDKGIITAMVAHPKPARGGEIVMANQREEVLNKGTLAIGVATPDENQTTMEGAGTAVEVDSTTHQGPAAFIEGEVVEEDEDAIEVVIEEEEVQKAGQWTILARFYSLKSPNLAALFEDMRRAWRLRSDMTYKSLRDNLFIISFGAEGDYRFVIQGGPWIHRGDALLVAEFDGITCPSKVTLDVIPVWVRIYDLPLVLMTKARGEIYGSKLGRVREVDVGDDGRNKHDFFRIRVDLSVKRPLKDKLTIKISAQGRVETRSFALRYERVPHFCFICGFMGHADKDCDKRGANVENPFRFSADLRCSPLKPFERKVNKRDVEQWDEAIPPRVDAHDNFDDKEKEGDSSVDEQLALQANLMNMAGTEGIDKEHDDSQDDWSGGNRKRTQDTTEINNPGRVQQALVIYQSATVKDPADSREAGKDTRALKRSRKTEGGSEVSNSEATSHGVAVRDLIALVKEANSQVVFLSETRQKIERIRRLRSRLGLKGFVGCNSDGLSGGLALFWHESIFMDVKSVNERYVDAYMHLSPEDPLCHVTFVYGEPRVENRHRLWSRLLDLKQSSPLPWMIIGDFNETLWQFEHFSVSKRGEAQMRAFRDVLQICELVDLGFSGVPYTYDNRREGRSNVKVRLDRALADNSWRDIYSNSQVVHLTSSCSDHCPILLKFAADSRQSNRKKCLHYEICWEREPASTEVISLAWAEAGEKRTLGDINFALGKVMGALQGWSKVKFKNVSRAIEKARKDLATLVSHNADYSEIRRSSDVLNELLYREEMLWLQRSRISWLKEGKGFPEMNVDLCKDFTEQEIADALFQIGPIKAPGPDGFPARFFQRNWDAIKKDVVSAVKSFFETSIMPEGVNDTAIVLIPKVDQPMELKDFRPISLCNVIYKIVSKCLVNRLRPILDELVSQNQSAFVPGRMITDNALLAFECFHFIQRNKNANKAACAYKLDLSNAYDRVDWVFLEQTMCKLGFAPRWIKWIMTCLSSVRYSIKFNGTLLDTFAPSRGLRQGDPLSPFLFLFVADGFSRLMEERVAAGDIAPVKICRGAPGISHLLFADDTLLFFKADCEQARLIKGVLNEYALGTRQLVNPNKCSILFDDTSPAETQDAIKNLLQIVCHNFEDKYLGFPTPEGRLNKGKFQSLQEKMWKRIILWGENYLSSGGKEIMLKAVIQAIPVYVMSIFRLPESDGSWDVQKVSRVFLPIDADEILKIRTSVRLEEDFLAWHPDRLGQFSVRSAYKLAISLDYADESSSSSGQNPQKIWDLIWKCNVPQKVKVFCWRAANNCLANQENKKKRNLERSEICCICGNETEDVSHALSRCPHAVHLWEAMKATGSLSLNVAGNATGGSWFFDQIENTPAEERMMLCMMLWRIWFVRNELYHGKVPPPIAVSKRFLESYCSSLLEIKQHPHADVVRGKHVVQQPTRMRSEANHLRRVVPARWEKPQMGWMKLNVDGSYDSNSSKGGIGVVLRDSVGTVIFSACGFLERCSSPLESELLACKEGINLALQWTLLPIILESDCLIAVNMIQSAKKEMSQLAYLVRDIRELMMGGRDIRVSKIQRSQNNVSHFLANRGRTNSCSVFWPDESCNLISQTVHDEALAE

SEQ ID NO: 199350 - protein, 51 aa, Oryza sativa
  Clone ID: PAT_MRT4530_94923C.1.pep
WNGAENFSSIISPSCIPQEDRLFGGKELKMTKNDHNTLAYSNTYFRVSTKT

SEQ ID NO: 199351 - protein, 1254 aa, Oryza sativa
  Clone ID: PAT_MRT4530_94924C.1.pep
MGPLSVNERYVDAYMRLSPEDPLCHVTFVYGEPRVENRHRLWSRLLDLKQSSPLPWMIIGDFNETLWQFEHFSVSKRGEAQMRAFRDVLQICELVDLGFSGVPYTYDNRREGRSNVKVRLDRALADNSWRDIYSNSQVVHLTSSCSDHCPILLKFAADSRQSNRKKCLHYEICWEREPASTEVISLAWAEAGEKRTLGDINFALGKVMGALQGWSKVKFKNVSRAIEKARKDLATLVSHNADYSEIRRSSDVLNELLYREEMLWLQRSRISWLKEGDRNTRFFHNKAKWRAKKNRISKLRGPDGTVVKSTHEMEKIATDYFKDMFTADPCIDQSRVSRLFQEKVSPEMNVDLCKDFTEQEIADALFQIGPIKAPGPDGFPARFFQRNWDAIKKDVVSAVKSFFETSIMPEGVNDTAIVLIPKVDQPMELKDFRPISLCNVIYKIVSKCLVNRLRPILDELVSQNQSAFVPGRMITDNALLAFECFHFIQRNKNANKAACAYKLDLSKAYDRVDWVFLEQTMCKLGFAPRWIKWIMTCLSSVRYSIKFNGTLLDTFAPSRGLRQGDPLSPFLFLFVADGFSRLMEERVAAGDITPVKICRGAPGISHLLFADDTLLFFKADYKYLGFPTPEGRLNKGKFQSLQEKMWKRIILWGENYLSSGGKEIMLKAVIQAIPVYVMSIFRLPESVCEDLNKLARNFWWGADKGKRKTHWRAWSCLTKPKHNGGLGFRDFRLFNQALLARQAWRLLDKPDSLCARVMKAKYYPNGSLVDTAFGGNASPGWRAIEHGLALLKKGIVWRIGNGRSVRIWRDPWIPRDHSRRPITTKRNCRVKWVSDLLGQDGSWDVQNVSRVFLPIDADEILKIRTSVRLEEDFLAWHPDRLGQFSVRSAYKLAISLDYADESSSSSGQNPQKIWDLIWKCNVPQKVKVFCWRAANNCLANQENKKKRNLEHSEICCICGNETEDVSHALSRCPHAVHLWEAMKAAGSLSLNVAGNATGGSWFFDQIENTPAEERMMLCMMLWRIWFVRNELYHGKVPPPIAVSKRFLESYCSSLLEIKQHPHADVVRGKHVVQQPTRMRSEANHLRRVVPARWEKPQMGWMKLNVDGSYDSNSSKGGIGVVLRDSVGTVIFSACGFLERCSSPLESELLACKEGINLALQWTLLPIILESDCLIAVNMIQSVKKEMSQLAYLVRDIRELMMGGRDIRVSKIQRSQNNVSHFLANRGRTNSCSVFWPDESCNLISQTVHDEALAE

SEQ ID NO: 199352 - protein, 1710 aa, Oryza sativa
  Clone ID: PAT_MRT4530_94925C.1.pep
MANEGKKQSNKNLATGPHRKHEWYEFATVELEATVVAFELLPLPPKARSGFSPALFNIMEGFLSRDLTSLGQVIGSRLGGQFKKISFCYDNLRLSAGGGDKGIITAMVAHPKPAGGGEIVMANQREEVLNKGTLAIGVATPDENQTTMEGAGTAVEVDSTTHQGPAAFIEGEVVEEDEDAIEVVIEEEEVQKAGQWTILARFYSLKSPNLAALFEDMRRAWRLRSDMTYKSLRDNLFIISFGAEGDYRFVIQGGPWIHRGDALLVAEFDGITCPSKVTLDVIPVWVRIYDLPLVLMTKARGEIYGSKLGRVREVDVGDDGRNKHDFFRIRADLSVKRPLKDKLTIKISAQGRVETRSFALRYERVPHFCFICGFMGHADKDCDKRGANVENPFRFSADLRCSPLKPFERKVNKVRAMQNTGAARNLFFRGAGSAGSSSSKQRDVEQWDEAIPPRVDAHDNFDDKEKEGDSSVDEQLALQANLMNMAGTEGIDKEHDDSQGPKLKSGSNVVALAGSTGEAIPSKEMIHAIANLQQQASFGDGSSDDWSGGNRKRTQDTTEINKPGRVQQALVIYQSATVKDAADSREAGKDTRALKRSRKTEGGSEVSNSEATSHGAAVRDLIALVKEANSQVVFLSETRQKIERIRRLRSRLGLKGFVGCNSDGLSGGLALFWHESIFMDVKSVNERYVDAYMRLSPEDPLCHVTFVYGEPRVENRHRLWSRLLDLKQSSPLPWMIIGDFNETLWQFEHFSVSKRGEAQMRAFRDVLQICELVDLGFSGVPYTYDNRREGRSNVKVRLDRALADNSWRDIYSNSQVVHLTSSCSDHCPILLKFAADSRQSNRKKCFHYEICWEREPASTEVISLAWAEVGEKRTLGDINFTLGKVMGALQGWSKVKFKNVSRAIEKARKDLATLVSHNADYSEIRRSSDVLNELLYREEMLWLQRSRISWLKEVKSTHEMEKIETDYFKDMFTADPCIDQSRVSRLFQEKVSPEMNVDLCKDFTEQEIADALFQIGPIKAPGLDGFPARFFQRNWDAIKKDVVSAVKSFFETSIMPEGVNDTAIVLIPKVDQPMELKDFRPISLCNVIYKIVSKCLVNRLRPILDELVSQNQSAFVPGRMITDNALLAFECFHFIQRNKNANKAACAYKLDLSKAYDRVDWVFLEQTMCKLGFAPRWIKWIMTCLSSVRYSIKFNGTLLDTFAPSRGLRQGDPLSPFLFLFVADGFSRLMEERVAAGDITPVKICRGALGISHLLFVDDTLLFFKADCEQARLIKGVLNEYALGTGQLVNPNKCSILFDDTSHAETQDAIKNLLQIVCHNFEDKYLGFPTPEGRLNKGKFQSLQEKMWKRIILWGENYLSSGGKEIMLKVVIQAIPVYVMSIFRLPESVCEDLNKLARNFWWGADKGKRKTHWRAWSCLTKPKHNGGLAFRDFRLFNQALLARQAWRLLDKPDSLCARVMKAKYYPNGSLVDTAFGGNASPGWRAIEHGLALLKKGIVWRIGNGRSVRIWRDPWIPRDHSCRPITTKRNCRVKWVSDLLGQDGSWDVQKVSRVFLPIDADEILKIRTSVRLEEDFLSWHPDRLGQFSVRSAYKLAISLDYADESSSSSGQNPQKIWDLIWKCNVPQKENKKKRNLERSEICCICGNETEDVSHALSRCPHAVHLWEAMKAAGSLSLNVAGNATGGSWFFDQIENTPAEERMMLCMMLWRI

SEQ ID NO: 199353 - protein, 617 aa, Oryza sativa
  Clone ID: PAT_MRT4530_94926C.1.pep
MEFFSDPVTSFAGFSPALFNIMEGFSSRDLTSLGQVIGSRLGGQFKKISFCYDNLRLRFRDVRIRKGKKCHVQSNLLESVSVKDSVVQCYKLESLGQGSAPCTSSLKTILQSRNSNLRLSCLFGVLMASSAGGGDKGIITAMVAHPKPAGGGEIVMANQREEVLNKGTLAIGVATPDENQTTMEGAGTAVEVDSTTHQGPAAFIEGEVVEEDEDAIEVVIEEEEVQKAGQWTILARFYSLKSPNLAALFEDMRRAWRLRSDMTYKSLRDNLFIISFGAEGDYRFVIQGGPWIHRGDALLVAEFDGITCPSKVTLDVIPVWVRIYDLPLVLMTKARGEIYGSKLGRVQEVDVGDDGRNKHDFFRIRVDLSVKRPLKDKLTIKISAQGRVETRSFALRYERVPHFCFICGFMGHADKDCDKRGANVENPFRFSADLRCSPLKPFERKVNKVRAMQNTGAARNLFFRGAGSAGSSSSKQRDVEQWDEAIPPRVDAHDNFDDKEKEGDSSVDEQLVLQANLMNMAGTEGIDKEHDDSQGPKLKSGSNVVALAGSAGEAIPSKEMIPAIANLQQQAFFGDGSSDDWSGGYMKRMPDTYEINKPGRVQQALVIYPNATGEACA

SEQ ID NO: 199354 - protein, 130 aa, Oryza sativa
  Clone ID: PAT_MRT4530_94927C.1.pep
FNCRLGHIEDAQRHLSLATPQPDLLELHKLQTVEKHLGRCMDARKVGDWKSVLRESDASIAAGADCSAMLFASRAEALLRLNQLDEADLAISSAYKLDYSSLCTSDNKFCGFLAHAYLFYVHAQIDMALG

SEQ ID NO: 199355 - protein, 140 aa, Oryza sativa
  unsure (1)..(140): unsure at all Xaa locations
  Clone ID: PAT_MRT4530_94928C.1.pep
QDLPIDYPGFLPVVFGVLGVMFRYKGCLWVPFIFWGQFLVNIKNFXNVFNPFSLAFFFSVLGLVTNFFGPPCPGPKRLSGCPLCPCFRVSLVFFCSQNFWPRSPFLIFFGPVAHPVIPSPPLLGAKKCLIPHNFILRGWG

SEQ ID NO: 199356 - protein, 582 aa, Oryza sativa
  Clone ID: PAT_MRT4530_94929C.1.pep
MVKNLRLALTRLDETAAGVGTFLHLTSRFGSALLPDHAEKINQETSSTLVATEIFGRDTEKNEVMRWLVDNIEGDSNTPGINRVPVSAIIGMGARITKNILEALTKQKPNANTLEALQHILKENLESKKFLLILDDVWEDSNWGEWQKLMAPFQNRPHNGSRILLTTRMTSVADMVTSVMRSNNDYMNLNGLDEYHNFMMFKKYAFYGMKTEDYEHLLPLAENIAKKFQGCPLVTKIASEHLRSNLCFRYCSIFPKGYEFKKDEIVKMWMDSGLILIDSGTERPEDIGERYLVQLARKSFFTFATVGDPCSKFYAEYYVMHDLVHELACSVSVGECLRLESSGYMQHKCTVRHLWIANFNKLTTEEIKAISSFENLRSLIIEDSYHVNDVWIAALEEVVQLLRGLRLLSLKGITKLCLAKEVVNKHLRYISFSGMQDIDGISKLYHLQVLTAVKRISTAPKQVNNIENLSHLRYVSYGSNGFGEFFVGRLTSLQELHNFEIQLKEGYRISSLRNLSSICKLQICNFENVGTHEEIIEAKLRDKSYLRSLSLNWSETTNVLSHILILKIWKYQGIMVFDFQLG

SEQ ID NO: 199357 - protein, 214 aa, Oryza sativa
  Clone ID: PAT_MRT4530_9492C.1.pep
MALVAAAAANPKQKQKQQKASIGRRAWRLLRLAVLWARKGSAVHSLRLLSNLRRAGVGLGVVGRGDRLGYGEREYSIEETPAFRFRTPSARVLRLIPCIAPAVPDTPGLYGDEDRYFFARRDTEPECGGGVGYYDYNGEPGECGGVDDESFRDGAMEEQLLELSMLEASAAAVTEDAGVDAKAEEFIAKFHAQMKLQRQISWLQYNEMMERSLR

SEQ ID NO: 199358 - protein, 176 aa, Oryza sativa
  unsure (1)..(176): unsure at all Xaa locations
  Clone ID: PAT_MRT4530_94930C.1.pep
FREPHRYSVIADPFLLQLRXKSGGAQAHRRRGREGFSGEGGGERRAPPRWRRGAPATPPPHVXASRRRRAAEAASVSVHSVAVVVGDGGGDVGGGEAEVSEEDDGGVWPRRRFERRSSTAXRKRSSSSSSSSEAEPQQQRRLSIELSMPEMRKEGGDEDGNGDSVREETEKGARVA

SEQ ID NO: 199359 - protein, 71 aa, Oryza sativa
  Clone ID: PAT_MRT4530_94931C.1.pep
METGIFIQVRAPELSGQRFVFLKESQQSGSNRFWPTKTTHYYEYDCWLQFAPPPGNGTPAVTGGVKCGKHK

SEQ ID NO: 199360 - protein, 76 aa, Oryza sativa
  unsure (1)..(76): unsure at all Xaa locations
  Clone ID: PAT_MRT4530_94932C.1.pep
SXTYAPIPYLFDYSTTYAPILQTCTRAEPRVHDQFARAANETLSDERATKPVTASGFTDTTEQIDRSHTNRTKPRR

SEQ ID NO: 199361 - protein, 132 aa, Oryza sativa
  unsure (1)..(132): unsure at all Xaa locations
  Clone ID: PAT_MRT4530_94933C.1.pep
RHNHKGNISNCKANAYGADFGQSKFFDGELANQRIXFLVQSGISIENQTHWWQMSLRIGKVASRTCGARTIATAMSNKTRIKTTEGPKGNGFRYQSRSVNLLFKYQSRSVSIEKKSGKLPEIHDDDQISSRH

SEQ ID NO: 199362 - protein, 125 aa, Oryza sativa
  Clone ID: PAT_MRT4530_94934C.1.pep
TISNNFNLNPSSFSFSSWNAGSSNRATGAAEALHGLHVVVGGGGLQRGFCKSPSPTRLPPLPPPPASLRPPPVRPLSPSRPRRRWLAPRPPPSRCPPQEPGSPPRASVPPRRRAPPRRAATPAPS

SEQ ID NO: 199363 - protein, 78 aa, Oryza sativa
  Clone ID: PAT_MRT4530_94935C.1.pep
IIFFFFFFGCSFNKIVFFKKNFYVKVHIMVLIGVNKHVHLPRNFGLKHLHFLFSARKSPWEGLPSSDSCKILKMINWG

SEQ ID NO: 199364 - protein, 761 aa, Oryza sativa
  Clone ID: PAT_MRT4530_94936C.1.pep
MVLLVRMSILTVLSMKPSQFCQLYITRTEAMPPHPKLLFVSPTANFNSTAVYKCSPSKPIDDLLFTLDDVRGNYVEVAPSPCHGLTLLYNAVAPAYYVFNATTRAITRLPPYQDVIHATAGVGFDARTKEFKVVRLFRGKSHEIHSVKCEIFILGGEEGDHWRPTAGGVPFRFCSFALSAIRNAVANKLQPVFVNGFLHWLINPSFLLKAPRAAIISFSLTDETFRWIRSPPFEVSRVHLAELDDQLCMVRDLRNGLPTGSMFEIWRLNDYNSGDWSLDYRIGLTGNLPRDLLEPRIVKVIGSFGSYRSSKKIIIATSKHKGMLCAVLSNPVADKLDIWKWDHVDPIDGKASQQQNPGVNRNFHIARCQDVPKKFSQWKLLLAPCEKFANPSSASSGKNPFYSRDQSKELNSAGVSVILPVPRRTGTGTGTGGEMADWDGVPARERRQMEEILQLDMEELNVEMVNDDGSSSEEANGGDDGADAFLSPAGVVLFPGATLPLRLIQGRFVAAVEKALRQVDAPCTIGVIRQLGRMDDGSLNVVARGQQRFRLKRHWMDVDGVVWGDVQIIEEDTPLRTPRDAFAQLASYLWRQIITHPSMDDYVRKPDLLSFSIGSKLPVSESVRQKLLEIDGISYRLRREIQLLKAFNLIKCRCCKSLIAKRSDMVVMSTDGPLGAYVNPHGFVHETITVSRATGLALDGNPSTVHSWFPGYSWTIASCTDCESNIGWLFKATKKNLRPRSFWGIRSSQIADDAQELDQDE

SEQ ID NO: 199365 - protein, 817 aa, Oryza sativa
  Clone ID: PAT_MRT4530_94937C.1.pep
MTPRSKRRKFVPFGEGAVLPEEMLTEEFCQLYITRTEAMPPQPKLLFISPTANFNSTAVYTCSPSKPIDDLLFTLDDVRGNYVEVAPSPCHGLTLLYNAVAPAYYVFNATTRAITRLPPYQDVIHATAGVGFDARTKEFKVVRLFRGKSHEIHSVKCEIFILGGEEGDHWRPTAGGVPFRFCSFALSAIRNAVANKLQPVFVNGFLHWLINPSFLLKAPRAAIISFSLTDETFRWIRSPPFEVSRVHLAELDDQLCMVRDLRNGLPTGSMFEIWRLNDYNSGDWSLDYRIGLTGNLPRDLLEPRIVKVIGSFGSYRSSKKIIIATSKHKGMLCAVLSNPVADKLDIWKWDHVDPIDGKASQQQNPGVNRNFHIARCQDVPKKFSQWKLLLAPCEKFANPSSASSGKNPFYSRDQSKELNSAGVSVILPVPRRTGTGTGTGGEMADWDGVPARERRQMEEILQLDMEELNVEMVNDDGSSSEEANGGDDGADAFLRDTDREGVASTSGQFTFNTSLASLHTYLGGVVLFPGATLPLRLIQGRFVAAVEKALRQVDAPCTIGVVLMYKRHSTRHYANASVGTTAEIRQLGRMDDGSLNVVARGQQRFRLKRHWMDVDGVVWGDVQIIEEDTPLRTPRDAFAQLASYLWRQIITHPSMDDYVRKPDLLSFSIGSKLPVSESVRQKLLEIDGISYRLRREIQLLKAFNLIKCRCCKSLIAKRSDMVVMSTDGPLGAYVNPHGFVHETITVSRATGLALDGNPSTVHSWFPGYSWTIASCTDCESNIGWLFKATKKNLRPRSFWGIRSSQIADDAQELDQDE

SEQ ID NO: 199366 - protein, 357 aa, Oryza sativa
  Clone ID: PAT_MRT4530_94938C.1.pep
MARIVLVVAFAAVVVVQAAMAQRPGMPPAVVPPSLPTTTPPAPTVVAPPLPTTPPPAVVAPSPPLPPLTPPPAIVPPALPPPPPLPAIVVPPALPPTPAIAVPPALPPIPAIVPPSLPPTPEANLPCVAELAPCSEFYRNATAKPTGACCAPLKKAYESELGCLCSVLTNPAMAATVGVDTKKGLDLFGRCDVKVPADVCSSHAPAPVRVYNFVKYRSFGSLKFGKVLLQPAVLPQRLPQIFTLSPPTDAKEAAQPLPPCCMNDVAACRSPIASPSPMAGAPYQCTIATYPLSWSLISLRLSSVKRQERYSSRVLNCSILNHSFPDFLNFLHSGLVLHAFILMSKNMIWYSINVDPY

SEQ ID NO: 199367 - protein, 368 aa, Oryza sativa
  Clone ID: PAT_MRT4530_94939C.1.pep
METLSMLKVGYTLLRSETPATDLVNAFMDWAARRSLLLLAVFVPPYLAYRLASSALAAASPEDVAGKVVLVTGASSGIGEQVAYRYARRGARLALVARREASLGEVAARARALGSPDVLAVPGDVARPDDCRRFVQATVEHFGRLDHLVNNAGLANVCWFEEVPDVANFKQVLDVNFWGTVHPTHAALPHLKASRGKIFVNSSASAVLAMPRMSFYNASKAAVHNFAETLRMELHGEVGVTVATPGWVDSEMTKGKHLSSHGAMEVDQDTRDAQVGVFPVERGERCAEAIVDAVARGRRRVTSPAWYGALFLWRTMAPEVADACQRVFYHRRSSAAGGGGRARAALEATGAKAVLQPPSLRSSEIKVE

SEQ ID NO: 199368 - protein, 144 aa, Oryza sativa
  unsure (1)..(144): unsure at all Xaa locations
  Clone ID: PAT_MRT4530_9493C.1.pep
MVRRQQRSRGNHTPAPRPPAPPPPRHSEIPTQSSXPTPSPPPNPPPXPHPNPHPPPGAVNNGHTPHGPTPAPSARPNHQPLLDAVPTPCPRPPPPHPXPPQRSPNLLPARPGAARPPPRQPPSWRPRRPSPPSSPAPSSPTTSI

SEQ ID NO: 199369 - protein, 384 aa, Oryza sativa
  Clone ID: PAT_MRT4530_94940C.1.pep
MRGAGFLLLVVFAVAVAGGAVAAAADLDGGDGGGGVAAEWRFPSSRMRDAYVALQTWRREAIFSDPGNLTADWVGPDVCNYTGVFCAPLPWDRREVAVAGVDLNHGDIAGYLPPELGLLADLALLHLNSNRFCGVLPATLRRLRLLHELDLSNNRFVGRFPEVVLDMPALRFLDLRFNDFEGGVPRQLFDRPLDAIFLNHNRFRFDLPDNFGNSPVSVIVLAHNSFGGCLPASLGNMSGTLNEILLINTGLSSCLPPEVGMLREVTVFDVSFNRLAGPLPSAVAGMRKVEQLDVAHNLLTGAIPQAVCELPRLKNFTFAYNFFTGEPPSCAHAVPRYGDRRNCLPNRPAQRTLRHIETVCVAVVLKGIGKWWGCGDLEDLGTYD

SEQ ID NO: 199370 - protein, 51 aa, Oryza sativa
  Clone ID: PAT_MRT4530_94941C.1.pep
ENQNTLKFATTQNENYKLKQIKWVFLKKKKNQNIENIHKLNVHFFVKNTIL

SEQ ID NO: 199371 - protein, 88 aa, Oryza sativa
  Clone ID: PAT_MRT4530_94942C.1.pep
VMVSWWIMITGSINTHQALLDIHIPLHDQQLVYICMLCTCSRSPLLSFLIKSRYLVAICICCWCASWDRYVTHGVYHTRQRTRGVLDR

SEQ ID NO: 199372 - protein, 46 aa, Oryza sativa
  Clone ID: PAT_MRT4530_94943C.1.pep
HEPRAEFGARRELARKFGQCNKTCLYFLDLNAWKERKFSTWRSICY

SEQ ID NO: 199373 - protein, 45 aa, Oryza sativa
  Clone ID: PAT_MRT4530_94944C.1.pep
WHVGTRQRRGPWRRRFRQGIKTPRKIMARATRFVGMSSKIRSSSG

SEQ ID NO: 199374 - protein, 59 aa, Oryza sativa
  Clone ID: PAT_MRT4530_94945C.1.pep
MAMDFPSLQRKSWGSRQMYMEPVTAKHMRFHKESACDNPDIVVHPFYGEAWKHTFQVLH

SEQ ID NO: 199375 - protein, 101 aa, Oryza sativa
  unsure (1)..(101): unsure at all Xaa locations
  Clone ID: PAT_MRT4530_94946C.1.pep
WRFVSTQYGIPGKPLLXNAAGVCNWRNNQVWQHAAXGWRKQSHYQDINMVAAIAQQLQLQQFGDLTWMRNLAQAQAXLLAFNVPSEIWVSYPRVLGCTQYQ

SEQ ID NO: 199376 - protein, 219 aa, Oryza sativa
  Clone ID: PAT_MRT4530_94947C.1.pep
MGSEGPSVVTVHVTGFKKFHGVAENPTEKIVGNLKSFVEKKGLPKNLVLGSCTVLETAGQGALGTLYKVLESAIAERENGSSAQGQVIWIHFGVNSGATRFALENQAVNEATFRCPDELGWKPQRVPIVPSDGAISRTRETTLPVNELTKSLRKTGYDVMPSDDAGRFVCNYVYYHSLRFAEQHGIKSLFVHVPLFLTIDEEVQMHFVASLLEALAVLN

SEQ ID NO: 199377 - protein, 173 aa, Oryza sativa
  Clone ID: PAT_MRT4530_94948C.1.pep
MGELASSPPPAAVLPVVFVDGDQTVDLGTVTVQPSLGVRKLQAVVADRVGLAAAADPGLSSLLPPPAALPVLPLEEWDLTRLLRRARGLLACYVLACLRLVPALQELQRQRDVVGHGGGGCSVIGTWGWGMLARWTRHSGQPSRSGGGVTASSCTECEAGAGDDAGAGVPLFF

SEQ ID NO: 199378 - protein, 92 aa, Oryza sativa
  Clone ID: PAT_MRT4530_94949C.1.pep
EGPSVVTVHVTGFKKFHGVAENPTEKIVGNLKSFVEKKGLPKNLVLGSCTVLETAGQGALGTLYKVLESAIAERENGSSAQGQVIWVGIHLP

SEQ ID NO: 199379 - protein, 85 aa, Oryza sativa
  Clone ID: PAT_MRT4530_9494C.1.pep
IFQNNQGSSIIKDKQAATKQAKVGIRIHTLQGHMQSHQDEKLVHGDKKSSLLAPDLITPKQEQEEHLLTNQSVLSTREAISARTA

SEQ ID NO: 199380 - protein, 52 aa, Oryza sativa
  Clone ID: PAT_MRT4530_94950C.1.pep
INPLGESFCPRNGVFFCYKQGVFLGWLLFTFGYFGVIVLKVVCVLKVCCICR

SEQ ID NO: 199381 - protein, 231 aa, Oryza sativa
  Clone ID: PAT_MRT4530_94951C.1.pep
MGSEGPSVVTVHVTGFKKFHGVAENPTEKIVTNLKSFVEKKGLPKNLVLGSCTVLETAGQGALGTLYKVLESSIAERENGSSAQGQIHFGVNSGATRFALENQAVNEATFRCPDELGWKPQRAPIVPSDGGISRTREMFRTPIFSVYKLIIKETNTTLPVNELTKSLRKTGYDVMPSDDAGRFVCNYVYYHSLRFAEQHGIKSLFVHVPLFLTIDEEVQMHFVASLLEALS

SEQ ID NO: 199382 - protein, 140 aa, Oryza sativa
  unsure (1)..(140): unsure at all Xaa locations
  Clone ID: PAT_MRT4530_94952C.1.pep
RPPARRGGARLGCVCGGDGGVGHGIGGLDEIKNHAHYLXNIPIEEVFXQLKCTLXGLCSHEGNRCIEMIFLNKLYENNESKILKFLQFMWNPLSWVMDMAVMMGILLVNGGGKLPVWNDLLRIITLLDINFTISXIDENN

SEQ ID NO: 199383 - protein, 138 aa, Oryza sativa
  Clone ID: PAT_MRT4530_94953C.1.pep
MKKLFEANVLKSAKRKCAGASVDSSSYMSDEDISFSKLTKTPVLMCFMSTKRQNILDSALMQFMAKAIGVEPKSLSSVFEGQARGLRMNYYPPCLKADKVLGLSPHTDLDGLTLLLQVNDVQGLQINKDGKWFSDNFV

SEQ ID NO: 199384 - protein, 54 aa, Oryza sativa
  Clone ID: PAT_MRT4530_94954C.1.pep
AFQVGRLNIHWNHYWINSGQRVAALLVKNKHRIVFQKARRFTTSSIQKQRYYRY

SEQ ID NO: 199385 - protein, 288 aa, Oryza sativa
  unsure (1)..(288): unsure at all Xaa locations
  Clone ID: PAT_MRT4530_94955C.1.pep
MARWRIWRPRSPAVPFLSLLLLAPLVFTGLKAVNKIGLSSERNYSRGHVTFVTVFTTYNSDPAEASKLPSNVVTVGKHSYSKVGRSMAILNTFIGFIQVSIPRSLALILPDPKARWTDMGDHEVPLAASSRCASLXARLPSPKAAVELVAVEGSVHCEVRLTGGAVPMLASCSPRRGCSWPGRPSXFLALPSRDAPGQPLNSGFVAVRGTRDGIFKAIEFFKEVLEAYYLKYMEASRMLGDQLALAWVVKSYLPSAFSKFSKHEAFTVYNWTPPEGAGQFHGMPLDVK

SEQ ID NO: 199386 - protein, 49 aa, Oryza sativa
  Clone ID: PAT_MRT4530_94956C.1.pep
HTTSGSNVPKRGRKFSSVPGTRRKAMSPADLGASPPPQRKQRLVTVGEK

SEQ ID NO: 199387 - protein, 107 aa, Oryza sativa
  Clone ID: PAT_MRT4530_94957C.1.pep
MAWTNEDDAPWKKMPENRFTPSPPPRDAAIHLSHGAAAKKRRLGRYPAEGEKPPLSPTRARDCLCCRGMHETPRAHDAGCARVVAGTGHVRVHVPAPSAPPPPKSPH

SEQ ID NO: 199388 - protein, 544 aa, Oryza sativa
  Clone ID: PAT_MRT4530_94958C.1.pep
MATLSDSAGGGGGGRAGAELMVPQFHLKALHAILAVRAPRPLAAAPAPAASFRRRDRWFHLPLHAPPPPASAEHLPEPSPGEPLVVDVYLTPSGGGGGAEAVVERWTVSCEPWSAGARGGGGAAASGEGLAVNRAYKRCITLLRSVYTALRLLPAYRVFRLLCASGQAYNYEMGFRVGSFAAPFTRAEEAAMSTRRFAPVETQLGRLVVSVQYLPSLAAFNLEICSLAPAMLITDYVGSPAADPMRAFPASLTEAASSAPAFPPRRPNSWAPSPAPWPYTPGQQAKFSPPPALYASPTPSPPTFAGGYLQSRLSGETAPMIIPGGGRGPVHNRNMSDPVRGFMLPPPSPKNIRGDSGGHETPMETGRTGIRMADLYTNLPSVPKIKIKDSRDESGRFSGVFSSSGSPRLGFSRSSSRLSMQDDTDDLDFPFAVDDVDTPDSRPGSSGGKDVGDQASSSSHKSQDAAVGYLVHMLKSARPLRDSSNSPLTSRVESVEGGNVSSFMSRRTSDALEELESFKEIKENLLARSRSRMQESLDKSLRHS

SEQ ID NO: 199389 - protein, 942 aa, Oryza sativa
  unsure (1)..(942): unsure at all Xaa locations
  Clone ID: PAT_MRT4530_94959C.1.pep
MQLVLLSIIASTVMLVASGAPPPTAASLAPCPKTCGEVNIWYPYGIGPGCFRQGFELTCDTTSKPLKLFLGNTMTQVISLYPSGTVLASIMYTIPMIHGVDTYNLSWDSPGRNLNVETYNYLAFLGCGIGVYLFHPDTGNLVGHCTIKCASMEEMHMATEGGICNGMGCCTVTFPVLFRGFRVTIVKSNETIPQPFNNITIKAFLTFRPYIFSIADLLSNKINASTIGASMAYLSTVIADEPNCPTARLDNKTQFACGSNNCIDVANGGYSCACPGNSDDGNPYLLDDCKQEFNPTPKKNCSRSCGSTNIPFPFGLEPGCFAKRRFQLSCASNRTLIGRPPAKYEVTNISLDEGLLYVNKLSEFEDANTKYLSVYYGGSGYFGQQLIYGLEKSDLSEEYGVWKWSVTNLTCEDAKSKSAYACVSTNSECLDVTHGKLYIGYRCKCSLGFEGNPYVQNGCTGAWRYGISEESDMLSNDFHSVEVVVNXIDECSIPNYCNGTCYNFKGSYSCCPHXNFSIAAITPVGLAIGISSGFGVLALTLIAAILFKRWKRSTRKKIRRAYFRKNKGLLLEQLISSSNNVTPNTRIFSLEDLEKATNNFDPTRILGYGGHGTVYKGILSDQRVVAIKRSKIVEQSEIDQFVNEVAILSQIIHRNVVKLFGCCLESEVPLLVYEFISNGTLHGLLHGDLSTNCLLTWDDRMRIALEAAGALAYLHSSAAMPIFHRDVKSTNILLDGTFTTKVSDFGASRSISIDQTRVVTIVQGTFGYLDPEYFYTSQLTEKSDVYSFGVILVELLTRKKPIFLNCLGEQKNLCHCFLQSLRDKTTMDILDSQVVEEASHREIDEMASVAEMCLKTKGAKRPKMKEVEIRLQLLRAARSRAYKEDLQRSSEIKPLLTPKYKCTSLNSTKNVEMGLVANPESQVVSRCYTMEREMMYSSQFPR

SEQ ID NO: 199390 - protein, 87 aa, Oryza sativa
  Clone ID: PAT_MRT4530_9495C.1.pep
ALIAAIDASKNPKLLLEGHQAYRVILKGEAKWLWRREIPPTASSSSISSCRWPSRAILPLRPRTQPLGATSRPTTISVGSAGLLRHL

SEQ ID NO: 199391 - protein, 139 aa, Oryza sativa
  unsure (1)..(139): unsure at all Xaa locations
  Clone ID: PAT_MRT4530_94960C.1.pep
ARRRSPSPTGSRPCRRRPGRPSRRRRRRRRTTTRRRKTITTARTRRSRRRPVRVPPMPQQATRSPVRSRRRTRPSTXATSTGRRSGRRSRTRRRTRRRSRRRRRRRRLRHRRRLGRLLRHRASMTRHTSRPWGRTQKRS

SEQ ID NO: 199392 - protein, 128 aa, Oryza sativa
  Clone ID: PAT_MRT4530_94962C.1.pep
PKPGGGEFSCKSSRKGFHIKRVWHFRPKANPPPNLKLVPRLLSLKKWGGFKWVISNEMKPANLLGVLKRGVPVFWGPPFWFKKKNLWGEFSPIFFGSRSGGFLVFFGGNICFSRFLGYFPRKRFVSPP

SEQ ID NO: 199393 - protein, 93 aa, Oryza sativa
  Clone ID: PAT_MRT4530_94963C.1.pep
GRGWTRVMTSKALKLAAHQREPFIGVAGRPVGGDRAVAPVDGEHDGRFSWLTVLGFDFLTFNSCMANYRSDGDLADATFGTLYYMDLQLLFGW

SEQ ID NO: 199394 - protein, 143 aa, Oryza sativa
  Clone ID: PAT_MRT4530_94964C.1.pep
RQVVFLVVRTLNFGIFPFKCPSIIIPDIFFALSSAFLVPEYGFLAIQCHSVLSHLDLIVLKVLYGGGLYCCSLDHSLHGLGSHCCCGTFSIGTISPTCFRPTCFLFWPRPLVLRPWGVRTGRWCSGLWGYFQCEGCLGLGLGL

SEQ ID NO: 199395 - protein, 186 aa, Oryza sativa
  Clone ID: PAT_MRT4530_94965C.1.pep
PPAAQPPPSAFRQPAPRASRRARPPTGPDPITSDPPPPPPPSTPTQFSVLRKVPTGPDPITSDPPPPPLSEFPVLREVPSGPDPITSDPPPPPPPLSEFPVLREVPSGPDPITSDPPPPPPPLTEFPILRKVPRGPDPITPGPPPLPFPSPPHPHDDTWPPPPPPPTPARRTSSSSPAPPASPDPA

SEQ ID NO: 199396 - protein, 331 aa, Oryza sativa
  Clone ID: PAT_MRT4530_94966C.1.pep
MQFPFAAGDYPADQVDPDYLYFLRHIRPDGDSYTLELPSDGVSPPSLVKYEAPADTGSTDGECVSDPSPGRASTNRPPEEKESSVEVDAEPPAPAWIDSLVDIDEDYRLFLKHTRVVNDNMVLEIDGAVVTYPCAASSESSSEVEDAREKEVAMDSDEPVVILPDPKVCDWVAVGDASVRTLDSKKKRKMSSSNSNNAGPSIPPGSQGVIWPAHINSRPDSDFKQRLLDALSKPFSRKEYIKLFDMASIRTPLVKLRQVRNDVKFYPTQEMGNSYFDHYPDLVDQVMHTSFPNGLALMRGFFFWLQNNAHEDQFRPWVDVSKDHEVIPLID

SEQ ID NO: 199397 - protein, 39 aa, Oryza sativa
  Clone ID: PAT_MRT4530_94967C.1.pep
MAFTMRAVKVPPNSASLEEARHPMFYFFRHACYALLSIM

SEQ ID NO: 199398 - protein, 114 aa, Oryza sativa
  Clone ID: PAT_MRT4530_94968C.1.pep
NPSDDRFGCTRKSNAPVFPLSIKIADVNGNASAFDLCLSMRTFCIWYLFSRISRLIDHNEYYCSLHLRCFLNSCSRSRFQLESRGGYLGGLSAMFCGCGGTWILHLWLVKHHAN

SEQ ID NO: 199399 - protein, 82 aa, Oryza sativa
  unsure (1)..(82): unsure at all Xaa locations
  Clone ID: PAT_MRT4530_94969C.1.pep
LNNXRALXSAAIPCHSLSEGCRQFQNLACKTGKPLLTLPPSCLPACLKNRPPQNTTQRCFQDHKMFWATKKCFIFFRLYTFL

SEQ ID NO: 199400 - protein, 82 aa, Oryza sativa
  Clone ID: PAT_MRT4530_9496C.1.pep
SGGGGQIPTGGVYIKRGGVIKTGRRPHNSILTVSGHIHTVLIRECVNELRNKLFNKLHIFHVHISPSLTYLITQNTLSLQLQ

SEQ ID NO: 199401 - protein, 92 aa, Oryza sativa
  Clone ID: PAT_MRT4530_94970C.1.pep
QLAFECQAQPIHRIQSELRNYTVRHESASTLTTLFDELLLAHGGIPVNQPKFETDGFEVVDTPLTTDSDDKRLDSTTTQVDERCSECDCGGT

SEQ ID NO: 199402 - protein, 72 aa, Oryza sativa
  Clone ID: PAT_MRT4530_94971C.1.pep
GIHICATQQHIVAADTTLTSRQREIRRNKNKSIALSVKTKDDERTENTRNRVEDINQSKRNCEARLYTTTTR

SEQ ID NO: 199403 - protein, 93 aa, Oryza sativa
  Clone ID: PAT_MRT4530_94972C.1.pep
TIPSVLCLSQDTNNCSLSLSLSLSLSLSLLHFSACVVLLFIRKNICKLYIYVYNSLFPLLFRSITCIFHCSFFLTSSLIHANFCKVLGWKLIN

SEQ ID NO: 199404 - protein, 1752 aa, Oryza sativa
  Clone ID: PAT_MRT4530_94973C.1.pep
MLAVVFSSGHRLLPLPVLPGTFTTPPPPPPPPLLSPRRPLLAPRRRRCLCGGGGGGLLLLRAVAARRAGIVIDVDEVGEVGDRDLPVDVSFTRRLPPVLTLGDGLAALRRAGEEVKACPPAAAASGVIRFEVLVPPSTKALKWLCTQFKRSSLFPQFYLSRKQTTDSSIQLEISGAGSAICFHGSSRVDNGFDLISRYLSFNSHLIRAYGSVGVKYDKELLSLEERIGSFYFFIPQVELSEFDGYSMLSSTIVWDDSVSHTFEDSVCLFESCFSQIWSSYDSSATICYENMVTSYIGESRMSESRNTQLVYLDAEFLAVIDGKAVTEKENCPTSDQSFVRFSPQFLFCANMDLCLQSNKIESFIRRCSNINLAWASFIVEEFVRLGFTYFCIAPGSRSSPLALSASVHPLTTCISCYDERSLGFHALGYGRGSRKPAIVITSSGTAVSNLLPSVVEASQDFVPLILLTADRPPELQDVGANQAINQVNHFGSFVRHFFSLPPPDDHIYARMVLTTVDSAAYYAMQAPQGPVHINCAFREPLDYGYQDWSVDCLKGLDKWFINREPYTRYLGMKMVSALGNYSCSVREVLEIVKNANQGLLLVGAIHTEDDIWAVTLLARHLSWPIAADVLSGLRMRKVQKSIPGLDKSICFIDHIDQILLSESVKSWKTPDVIVQIGSRITSKRVGTYLESCSPSSYILIDAHPCRHDPSHVVTHRIQATITEFAASLCQCNFQTKTSRWSDILMVLNSAVSQEIMFQVHSECSLTEPYVAHVIGEALYGDATMFIGNSMVIRDLDMFGKGWIDHSTNANNAMMHHFPGFLGAPVAGNRGASGIDGLLSTSIGFAIGSNKHVFCVIGDISFLHDTNGLSLLNQRTQRKPMTVIVINNHGGAIFSLLPVAKTASLQILEKFFYTLHDISISKLCAAHRCFLLRLLPVTLLVMESAVDTTNNFLVAILHPQHSHELYFRIKHILVQTKAELHDALVKSHEGHVDCVVEVENRIVDNANFHRIISMFTDHSATMHLAYLLGGPYCKDGVNGFSVGRIHAAEYMFYRIQLAAPRTSGISESSFFHEGFILKLCVGDSIVGFGEVAPIEIHEEDLLDVEEQLRFLFHRMKDAELDVVPLLRGSFSNWIWTTLGIPPSSVFPSVKCGLEMAILNLLESQRIDRSYGIFTGSNVVEYNQSSTANIQICALVDSCGTPMDVTLAVVKLVAEGFTTVKLKVGRRENPAEDAAVIQKVREIVGYKINIRADANRKWTYEQAIDFGSRVKGLCLQYIEEPVDSVNDIIKFCENSGLPVALDETIDNLTGDVIPKLHQFSHPGIVALVIKPSVVGGFETAAYIAKWAHMHDKMAVISSTYESSVGLATYIQFAHYVDRQNDITSRIKNRGSCGNVAHGLGTYQWLREDVSDQKLKIHAPPLGDGIRASAEDAHGYLQHLVINDKKIERTYSEEKLRSYFIQVDGDNFSYQVKLQEGGDCTHEKVILFLHGFLGTSEDWVPMMKALSPSARVIAVDLPGHGESEILQHDVENSNQISFSVQSVADLLLKLIRNITDGAVVVVGYSMGARIALHMALNQNHKISGAVIISGSPGLRDEASKRRRSAIDRSRAHFLSSCGLENFLETWYSAKMWASLREHPKFDSLVRTRMKHNNIKALSKVLADSSIGTQKSLWEDLKHLKSPLLIVAGEKDPKFKEISQQMCREIRKHKDRESDGLCEMIIIPDSGHAVHVENPLPLVRAIRKFLVRDIPDVISK

SEQ ID NO: 199405 - protein, 1117 aa, Oryza sativa
  Clone ID: PAT_MRT4530_94974C.1.pep
MATRSAAARLLSSSSAAAAASPLWSRRRRRHPFLHPPSRSKTTSSSSSSSKPPRRPPPRKDGGGPRPCLFQELSGLVAPSASDDPAFQPRRDGQERCGLLGHDTAQCAEGARRITPEGAAAASGSFTGSVPNNDALGFLPDGGIGPRSTATGGAPDSEQSIQEVGDGNAGDVENISEVVHRVTEVLRAEVPGLSVEQRLENLGVTYTPRLVSLVLNRCFKKRHLGFKFFDWVRQVPGFQHTTETYNAMLYIAGEERNFGAMEKLMDEMDKEMCLKDIKTWTIVISSYGKARQIGKMLSTFQAMGKSRHVAADSKVYRTILHALCNSAKSELALEFYKDMARNTEVGSDIFRLLLCCLAGSDNAEGVFYVRDDMIKSMKYPEEYCYLEALRSFCVSGKIEEAQKIFQQMMNKSIASSSAFEGLLWGLCKDGRMDKALQVMEYMKSNSSASSATFGSLIDGYLRKGERMKALEVLQEMREYGCVPLASSYTQLMQHLFAFDQHEAACRLYEEMQENGIEPDVVAITALIGGHVRNGHISEAWDAFRNINENGQKPTLKAYTVFIQELCKASRPLEALKLLKEMLESDFRPSEQTFSRIISTLYDNHYLEEASNIERMRASFNCCSPIEELQRRTLDQVDYTDKFEKSSGSGPEEKERTVEFVGHPSYKDCEVSGSFPCDDTQDLEQAKDYNNEDVEQICRILSSSDCWSSIEQALEMTSISFTPDLVDAIMKRCKANSRAALQFFSWVGKRSYYMQTTKTYNTAIKLAGSAKDFKHMRHLYREMIWAECCPTVDTWNVMICQYGNAGLTEMALETFYQMKQGGFQPDKTTYSHLIMYLSRRKGRKVDAAVKIFHEMCRAGYIPDNGMVCTYLSVLCECGMIDRAESSVVLLCKHGFSIQAGYSILIRSLCRSDRMAEALSLFDNIKNYGCSRSAYMYGSLIHALLRRDRFEDASAKLAEMKNLGIAQSTHMYTSFMIYYLGKRDVSKAMDVLKEMTENGCEPTVVTYSALIRGHMAMGMVSEAWDVFQRMKLKGPVPDFETYSMFMSCLCKAGRSEDGLQLIHDMLNSGIIPSAVNFRTVVHGLNMEGKYKLADSVLQSKWQLRNRRTFSDSFIVNSSA

SEQ ID NO: 199406 - protein, 278 aa, Oryza sativa
  Clone ID: PAT_MRT4530_94975C.1.pep
MCMYMYEHHIRAAAKCVKTPRGNKNASNQSHMYWQVEGGTIVISRIIQLGVLLSACAPHSHCTFVRYDSPNGTISPPPPLELTCNDWTVPHVAAVTDEYPTHCDRNYFLGRRGRGTSTSSSTTMATSQTRRYFVPHSLAGSPPAQIQEQPMATPVPEGRAGHAVPPDHLTYSQGHVRAQGLMPVPAKSLKTLTLLAGIGIGWNYPIGLSADRLIDLLFVYLPVIALIHHNHTNTMFGVAYLSIVDMAAMKPSRSRQQGQSKDVRIHFVDRQCQSNISW

SEQ ID NO: 199407 - protein, 56 aa, Oryza sativa
  Clone ID: PAT_MRT4530_94976C.1.pep
LRVPGRDSPGGPPCSEKNCWVCWLVYGCVHFGLAPVFLYAIIFFPFVRGVSKTLCV

SEQ ID NO: 199408 - protein, 273 aa, Oryza sativa
  unsure (1)..(273): unsure at all Xaa locations
  Clone ID: PAT_MRT4530_94977C.1.pep
WRRPAEASAGAVAAAGQRSECELLQHKPAGIVLNHRTERSGIQPKAELDKTADFRQRHAIATGNDRTKTYWATSSSSPSCGGGTAYRRQRQWWRRTVAATAVAHGGCDGGGERGTAKARRGAAASWRRRGGSXATTRRRGGGGAAAWRRRRGGVGRGEEVRMEGKSGNSGVYIGEGKRXGGEGRGETRRRRGARGGGGDATGERQRRRAARRGAXATRQRRRRASDGDGARRCDGDGDGARRGARDDGTARQAXRRGGARDGDVTGERRRRRP

SEQ ID NO: 199409 - protein, 116 aa, Oryza sativa
  Clone ID: PAT_MRT4530_94978C.1.pep
MAGRGWGIGAVVAQKDFVTREARAEGIEALGLLLYVPREGAGVWRLWHRSASGGGGVGWGGAKRGRAVAASSGDQQGRRRAGPNGRRSAGRGDPAVKASFRPAATPTAAIHTRRID

SEQ ID NO: 199410 - protein, 241 aa, Oryza sativa
  Clone ID: PAT_MRT4530_94979C.1.pep
PDAEEEGDVAMPCGTPMLRTGWGVCDAIQARCTCSYSEEQKYWEEMRMRRGRGRRADAEKWKEQCGWLGGQQNHVSGASGGGVEEGVGGALGPKAQAAVTGGSGARAGHRQRMGPHGASDRDWRRRRGSGASAAHGATGRKRRHGTSPPPMPRASRRSSSAPNRESDPKLLLPSSRRRRRARTPAQPAPPAHDGCLVWVGLKTMDFGWRRGALTGEGQGKLPPRRRLAEHGCADAARSERR

SEQ ID NO: 199411 - protein, 42 aa, Oryza sativa
  Clone ID: PAT_MRT4530_9497C.1.pep
FKLDQSVFKPIKLIGIACMDTSVQLSTVTLFSITNLELLGTS

SEQ ID NO: 199412 - protein, 117 aa, Oryza sativa
  Clone ID: PAT_MRT4530_94980C.1.pep
RPYLLQVDASCRRPSWRCKSGDDGDAEAEGEDKGSSRFCPPRGDYSPAHTRPTRAASHSGAARGGELEGDPAEVPSLSSSAAGDDDDDPFLPAGFFSARPSSERERKRERGEREREG

SEQ ID NO: 199413 - protein, 85 aa, Oryza sativa
  unsure (1)..(85): unsure at all Xaa locations
  Clone ID: PAT_MRT4530_94981C.1.pep
VPPRRRLRSRHAVAPEPPHRASPPCAAAQPEGVADPSEGQDPQDFEQGKSSLFLEHVDPNCEIILYTNKXIACNDEYPTCDYAMP

SEQ ID NO: 199414 - protein, 386 aa, Oryza sativa
  Clone ID: PAT_MRT4530_94982C.1.pep
MGDAAAGGRKAAASGGGARLHVAMLALQLGYAGFHVVSRLALDMGVSKLVFPVYRNLIALFLLAPFAYFLEKKERPAMTASLAVQFFFLALCGITANQGFYLLGLENTSPTFASAIQNSVPAITFAMAAALRIERVRLSSRDGLAKVAGTLLCVAGASVITLFKGPAIFNTHHNHQPQPQQLAVAVAAGNKSWTLGCVFLLGHCVSWSGWLVLQAPVLKRYPARLSVTSYTCFFGLIQFLAIAAFLERDAAAWAVRSGSELFTILYAGFVASGVAFAVQTWCIHRGGPVFVAVYQPVQTLLVAVMASLLLGEQFHLGGIIGAVLIVAGLYLVLWGKSQERAIAAAKEASAAAAIADHQQQPASAAAADSCLKQPLLPASTVASENV

SEQ ID NO: 199415 - protein, 105 aa, Oryza sativa
  Clone ID: PAT_MRT4530_94983C.1.pep
FFFFFKKKRTAQDSEVRVSCIIKRISIECSSRNDEHADTIIYHNPCMHGPCIHHAPPTCCSGRSSPGPPPLIDMHACRACGITSFPWLFRASSSLRPKASRSRKS

SEQ ID NO: 199416 - protein, 75 aa, Oryza sativa
  Clone ID: PAT_MRT4530_94984C.1.pep
MWPVRPCYCATARKLAVEVLSEGPIGLAGQTGVEWAVRPASARSDRHRLGLTDYGSIGSVSATRSSTIPASSGPV

SEQ ID NO: 199417 - protein, 326 aa, Oryza sativa
  unsure (1)..(326): unsure at all Xaa locations
  Clone ID: PAT_MRT4530_94985C.1.pep
WRDLVDDRALLLPHSAHGVVISYVDHHRPHLFSRPSSSSSSSAAAASDGPSLCLPRAAVRNWQWHVIDHCGGLLLLSXWGGELRVCNPATRRRATLPPPPQRACRDDVTAIPVGEYLVFEPAVSSPSPHYEVFLIPTWDQQLFCLMCWQVEYQYLSAEWPPPSYKIDAFSSRTGRWEERVFVREGETATTLEDMKPWNYVYAGPWQGCSVLWQGALYVHSGGACVTRFSLSNDKYQMIRAPINILDNKFDKPYLGKSKMGVSFGFIHDWQLSIWILKESTYQHDLQAIANQLDSIDSHIDQINGPWIVEEDDTDIPLNTETLSQRF

SEQ ID NO: 199418 - protein, 92 aa, Oryza sativa
  Clone ID: PAT_MRT4530_94986C.1.pep
MAGDPYVPLPTVPEIALIFNYPDKSAPRRWQRRRDVERGPHGVAGEEGALGGHRAAATPCHIQAARALTKSLRPPAPRDVSHPGHVHASAKR

SEQ ID NO: 199419 - protein, 64 aa, Oryza sativa
  Clone ID: PAT_MRT4530_94987C.1.pep
MAYIQMKSIVACVLEQFSLRWPNESLDTAWPSTTKAWSEISQSGRARPLVAPTTQYDTGCAMLV

SEQ ID NO: 199420 - protein, 253 aa, Oryza sativa
  Clone ID: PAT_MRT4530_94988C.1.pep
MERTTTRRTSSKGAAAAPAPKVVAVLAGLLERAAARGDADADARGGSAAAAAATAFRGRTRPEISVRRYAERIYRYAGCSPACFVVARVYLDRLAGRSPEEESSPSPSPPATAAAAVCVDSYSVHRLLITSVMVAAKFMDDIHYNNAYFARVGGVEVAEMNGLELELLFALRFRLNVTPATFATYCAALEGEMAADDGPLPSPSPSPEEEGNDRRQPPPRRKDGITNKVAAAVDRSALLTAAHHRVVVVEITQ

SEQ ID NO: 199421 - protein, 696 aa, Oryza sativa
  Clone ID: PAT_MRT4530_94989C.1.pep
MSPFHILFVLPWLCIAVLASDPPPSCERNCSGIEIPYPFGLELACALPGFNLTCNTTEGKLYAGNVELLNISLLEGWVRMRMPISNYCYNDTLHSMDENYIGWGLDLRDTPYRLSNVGNMFTVIGCRTLAYIDNLDTAGNLTTTGCVATCWQGNYSSLNDGDCFGIGCCQMNIPKGLQYYQISFDPRFNTTEIYNFSPCSYAALVESSRFKFSKNYSTSSAFNDYYGGQAPLRVDWAIGNKTCEEARHQANYSCISTYSDCFNSLNGPGYICNCSKGFYGNPYLKSDDPDIDECKEPNKYPCYGKCRNKLGGYNCTCPFGTRGNAYNGPCDGICATLLVALTSLLGIEWIKYKQRIKRHDLMRKRGEYFNLHGGQLLTDMMNIENNISFKLYDRDEIELATKGFDKMSIIGEGGQGTVFKGYNLDQVNNPVAIKMCKGFDENSRTEFTQELLILSRVNHENIVKLIGCCLQFEVPVLVYEFVPNKTLHYLIHSQNDPSIRTLEIRLKVAAESAEAFSYLHSLDHPILHGDVKSMNILLSNNFIAKISDFGCSKIRAADGHDDVVKGTIGYLDPEYLLKFELTDKSDVYSFGVILLELLTRRTPLSKQKVSLASVFQEAMKEGLFLELIDTEILHEDNMGLIGDLARLACQCLAMTSESRPTMSRIAEELRRIEKQVRQHRGILGQPPTTRDCNFCA

SEQ ID NO: 199422 - protein, 115 aa, Oryza sativa
  unsure (1)..(115): unsure at all Xaa locations
  Clone ID: PAT_MRT4530_9498C.1.pep
LDECARSAQEFEATIHRRIEVLDRNQCEQDGRSREQAQXARELEEHARVQTTLAAEASVAHRAKGLRLREEACRERDTALAAREAEVNRREVAARRLGEQLAKREEAVAGREARH

SEQ ID NO: 199423 - protein, 87 aa, Oryza sativa
  Clone ID: PAT_MRT4530_94990C.1.pep
MWLDERRRLIPRASAWRDPADEEGRDPAAAAATLVKGRFTQDKAAFFTQFVKSIVKLSKVPRPGGNVGEIGDARSGLSNTGSSPSKG

SEQ ID NO: 199424 - protein, 57 aa, Oryza sativa
  Clone ID: PAT_MRT4530_94991C.1.pep
QLPPFDDLSFDRNWGQVQPQALLAVTSPSKKGSTPGSRRAPSSLAPLGAVLAPVLPV

SEQ ID NO: 199425 - protein, 84 aa, Oryza sativa
  Clone ID: PAT_MRT4530_94992C.1.pep
MPTMCLYWPRHVGPAFLELAGQPPHGQRGEPASGRQERAKHHGEGCLNQVVISREEGSSGNNSGLGMTGLIMEPAATRSSSGRL

SEQ ID NO: 199426 - protein, 303 aa, Oryza sativa
  Clone ID: PAT_MRT4530_94993C.1.pep
MEKPRQVVRKFLARPQHEGVGAVVRRSIGRFELRYFDPFLVLDEFSVSAPAGFPDHPHRGFETVTYMLEGAVTHEDFEGHRGTIKAGDVQWMTAGRGIVHSEMPAGPGTSRGLQLWVNLSSHNKMIEPGYQEIQSKDIASTTSDGVTVRVIAGQSMGARSPVRTRTPTMYLDFTVRPHAAARQPVCATWNAFAYVLEGEGVFGGGGGDKAGAHHLLLLGQGDGVEVWNRSDKPLRFLLIAGEPIGEPVAQLGPFVMNTEEEIDMTINDFEFSINGFEKAKHWKSQALCHVNVKWDNEQVKPFT

SEQ ID NO: 199427 - protein, 522 aa, Oryza sativa
  Clone ID: PAT_MRT4530_94994C.1.pep
MTEFKVGSLDARATKIRNVPIAVTPEGFWCCPSQAVLQKTMKNQNQQAKPKGGASPLASKASSVQRAPTISSERRAHSTPTRSRINSDEQKCAPAENSTPNPPKVANDRPQKQHKISVGFGQLEMSDLKVVLYGKDGVAVKMSVHRNILAENSTWFADKLSRQSPMSSMEVPDCEDVEIYVETVGLMYCNDAKQRLIKQSVPRVLRILKVAELLGFQACVLSCLEYLEAVPWVGEEEENVVSSVQHLQSGNYGVSPILKRVCSDLTSPPNDTFVHIIELVLKSGEDRGRREMKSLVLKLLKENSSCTSTSVDIYAETLYSSCQNCLESLLTLFRQATADDFAEQSLDLKEPVFRQIALEADNLLWLTEILADRNAAGEFAVMWSNQGELAELHSKLPTKSRHLVSCVTARLFVAIGKGDMLPSKDTRKLLLDVWLQPLMDDYNWLQHGCRSFDRKVVEEGIGRTILTLPLEDQQTILLSWLGSFLKVGDSCPNLQKAFEVWWKRTFVRPYVEQGNQSQPGRS

SEQ ID NO: 199428 - protein, 96 aa, Oryza sativa
  unsure (1)..(96): unsure at all Xaa locations
  Clone ID: PAT_MRT4530_94995C.1.pep
DYSWWGVWLISXTKVSVIKPISRITQVPKANCAACCGGQGNSEAPTAVRIEAWGARSSTSTLGLVLPGFTTNGPTSGPIDRXNIPMEGVKFQPAAF

SEQ ID NO: 199429 - protein, 93 aa, Oryza sativa
  unsure (1)..(93): unsure at all Xaa locations
  Clone ID: PAT_MRT4530_94996C.1.pep
PSPPPPPXXPPPXGGVATLLGAVAHLEGGRRRTCALKGSPSPSRKFPSGHGHPRSGGVSGHGSGKKVVLHSASPATTIWSISHEMRRAPRCSA

SEQ ID NO: 199430 - protein, 96 aa, Oryza sativa
  unsure (1)..(96): unsure at all Xaa locations
  Clone ID: PAT_MRT4530_94997C.1.pep
DYSWRGVWLISXLRFQLSKPISRITHGPRANCAACCGGRWNSEAPTAIGIEAWGARSSTSTLGLVLPGFTTNGSTSGPVDHTNVPMEGVKFQPAAF

SEQ ID NO: 199431 - protein, 74 aa, Oryza sativa
  Clone ID: PAT_MRT4530_94998C.1.pep
LPPVTGASDWGSPTAVPALSLFLSPLPPSPSFSPPFPVFISVSPSEARPCPFAPGSSGPPPRSLLASPPTGLLL

SEQ ID NO: 199432 - protein, 131 aa, Oryza sativa
  unsure (1)..(131): unsure at all Xaa locations
  Clone ID: PAT_MRT4530_94999C.1.pep
NVRVADKAYLLSYELWNMPIRYTFTYTDCFHAHRLGXSQIMENISTSQAISIVLLGIFLGGQDDLRYKRDPQEGXKASNSIADTPTIVXEAGVPXAKSPGDLVELIDYDLIVVPTYHNTQLIWSTTITRRQ

SEQ ID NO: 199433 - protein, 80 aa, Oryza sativa
  Clone ID: PAT_MRT4530_9499C.1.pep
TTRAAAFSPSSSSSSPAPASSPTRFPAAQVCVLVPLLPSAPSDFSSVCMNYQCCTVAAGVHKARSSFLFPGFSLFHLASI

SEQ ID NO: 199434 - protein, 110 aa, Oryza sativa
  Clone ID: PAT_MRT4530_949C.1.pep
MEFSVEAAVEASALSVMGLVSENFLDPSTCVPPRASDDSSFESPDASFDPEDPTCVLSSSTSADRISVLPLGRRCPAGGVEGPTSSPAAFLLGPARSSGILPPAGVHGAK

SEQ ID NO: 199435 - protein, 41 aa, Oryza sativa
  unsure (1)..(41): unsure at all Xaa locations
  Clone ID: PAT_MRT4530_94C.1.pep
IWGNTYTFFTRGANARYPMFHWKPTXGVSCLMDHKATLVSG

SEQ ID NO: 199436 - protein, 98 aa, Oryza sativa
  Clone ID: PAT_MRT4530_95000C.1.pep
GAKTGTLLILFKKGENFGSPPPGKDWALKSAKKTGLVLLRAPPMENKKTGVRGPLKKFEGPGPVKKNPVFFKIQNWPGPYGKGRKIALICPSKKKKKN

SEQ ID NO: 199437 - protein, 129 aa, Oryza sativa
  Clone ID: PAT_MRT4530_95001C.1.pep
MAANRRCCLLPFIFFFFFFFFFFLSGCLRAGAGDRGALDPVLLYGVDNAHSMVSSVHSLPAWLACVVLAAGHTPLQDVPPPSPLHADHALLFLPPSNGEKERNKEESKCDGKLDGSDKNGVMGLFRDIR

SEQ ID NO: 199438 - protein, 82 aa, Oryza sativa
  Clone ID: PAT_MRT4530_95002C.1.pep
MGDVSTRKRARALGSPISPESERWPGRTWTAEGRIMRPGKPGKAGVVFRVDVADRWIVWRHRTGRAIHSSTPLSTAAYGRDG

SEQ ID NO: 199439 - protein, 58 aa, Oryza sativa
  Clone ID: PAT_MRT4530_95003C.1.pep
ERWTPRHRLGHATRAPLRSLPVGGGEVDSCCRLGRSVLLTICRRRKRRDGAPPTADAA

SEQ ID NO: 199440 - protein, 48 aa, Oryza sativa
  Clone ID: PAT_MRT4530_95004C.1.pep
MAATRINDTRTGILLPLDHGALQEDDGIYPAMIGRIFQTHAHMGCILK

SEQ ID NO: 199441 - protein, 247 aa, Oryza sativa
  unsure (1)..(247): unsure at all Xaa locations
  Clone ID: PAT_MRT4530_95005C.1.pep
EYDRAIRCCALDKDMENFPHGDLTEIGQRGLNMSGGQKQRIQLARAVYNGADVYLLDDPFSAVNAHTAATLFNDCVMAALENKTVILVTHQVEFLSKVDKILVMENGEITQXGTYSELLQSGTAFEQLVNAHKDSKTILDTDDRREGAKELGAFQYQVPLIQQNSEAEISTGNLKSVQLTEEERRELGDIGLKPYKDYVSVSKGWFLLSMILVTQSAFFGLQCLATYWLAVAIQNQQIQCWGCDWSL

SEQ ID NO: 199442 - protein, 77 aa, Oryza sativa
  Clone ID: PAT_MRT4530_95006C.1.pep
SVSPSHFHPSRVALDSFFFFPFIFLDVKQVEAALLNSHFVTKLKRCARCFCNCNYYIKLYTSFNFYKSVHYALNTVV

SEQ ID NO: 199443 - protein, 95 aa, Oryza sativa
  unsure (1)..(95): unsure at all Xaa locations
  Clone ID: PAT_MRT4530_95007C.1.pep
SHEPPXFCPYSXTDVCXTXFHETPDVRSTRPVSSPDAGWPSPLVGVDQHADGGGSSFRGPGGGGIGARPSSAGAESCSLITCGPRRAAMAGGGGG

SEQ ID NO: 199444 - protein, 177 aa, Oryza sativa
  Clone ID: PAT_MRT4530_95008C.1.pep
MLYENGSRERTAEIDPSKTDGRDRSVHDRLTGEGDDDVGDDVTTGGGGSAARTAHARWRTAALRHERRAPTGRGRRGELTGDQRSGGGATDGDGDEVETAAEIGSTAAMVLRRSSAMAKRRTRTATTWRSRRWPSRATTTTGTAAAHGWSDGGDGGAKLHGARALRTMRGEGEGGGR

SEQ ID NO: 199445 - protein, 170 aa, Oryza sativa
  unsure (1)..(170): unsure at all Xaa locations
  Clone ID: PAT_MRT4530_95009C.1.pep
MNHAIRKEKGIYCVSGXGFAVNRVHGNGSRERTAEIDPSKTDGRDRSVHDRLTGEGDDDVGDDVTTGGGGSAARTAHARWRTAALRHKRRAPTGRGRRGELTGDQRSGGGATDGDGDEVETAAEIGSTAATVLRRSSAMVKRRTRTATTWRSRRWPSRATTTTGTAACHD

SEQ ID NO: 199446 - protein, 107 aa, Oryza sativa
  Clone ID: PAT_MRT4530_9500C.1.pep
STTICSCLRSSLQNGVSPLYMKMSTGEELTAEGALLEKVVDLGDVLLVHVEHGGRHRCAAPLHAYDDGVAELASKLASKQGPGLGTSGKREQNCPPQSWHCTVKDHQ

SEQ ID NO: 199447 - protein, 90 aa, Oryza sativa
  unsure (1)..(90): unsure at all Xaa locations
  Clone ID: PAT_MRT4530_95010C.1.pep
APIPWQGQTKAGGFXFREGTGTVVFRTGLGGPSCETPTDWLHQFTCLEQGPGWRDPPANHQRQLLHHAAAAGHDGIGELLILFTQSSSST

SEQ ID NO: 199448 - protein, 61 aa, Oryza sativa
  Clone ID: PAT_MRT4530_95011C.1.pep
MKCTNVLFTKMNLPNLLPCMDMNVQSEYADGMSDKLWHACRINFIYMLAIFTVLSPNGKPS

SEQ ID NO: 199449 - protein, 72 aa, Oryza sativa
  Clone ID: PAT_MRT4530_95012C.1.pep
MEVSTTYCEIVFLSRLPLPLATRKALKIKSVIRNAPSIALCAVLVCRPPSLLYDHASHDVGALHLMAIHHPL

SEQ ID NO: 199450 - protein, 314 aa, Oryza sativa
  unsure (1)..(314): unsure at all Xaa locations
  Clone ID: PAT_MRT4530_95013C.1.pep
MAATFRYTRSLLHSTLQLMGCKPRHAFEISGRVFDEIRGHMGGDMAMGGGGGVQRYELAADAEAASPRQFQFELYKRRTTLLIPRPLFLRLVCHALALYKYVAPDQRSDLHRACRIRERKESVTILLCGTSGCGKSTLSTLLGSRLGITTVVSTDSIRHMMRSFVEEKQNPLLWASTSHAGECLDPVAVADAKARRKAKKRSGISTTSTIDFDKTRPLNDKPDGKPIGKKQMAIEGYKAQSEMVIDSLDRLITAWEDRKESVVVEGVHLSLNFVMGLMXKHPSIIPFMIYISDEGKHTXRFXVRAKYMTLXPQK

SEQ ID NO: 199451 - protein, 121 aa, Oryza sativa
  Clone ID: PAT_MRT4530_95014C.1.pep
HQCGPLGDCKNSSLCKPQLQSATVKSNLYSIWQITKIIRKNGDIYKRTYTKLINKPRFYNYITGYGTKLSSRYAGVKPQPIKPLKIKNQTAEITTSCLSRRLPWIWQAFFWRFPCGVALRG

SEQ ID NO: 199452 - protein, 58 aa, Oryza sativa
  Clone ID: PAT_MRT4530_95015C.1.pep
VVLMTPHISHPQPNQTHGSYRLSYPTKMVYYPYPYPSYSPTYSEVFPEATDPSYSLGC

SEQ ID NO: 199453 - protein, 46 aa, Oryza sativa
  Clone ID: PAT_MRT4530_95016C.1.pep
HSSPGRTSFFRHPLVHPTPSVCARRVLFRSVMPSLQSHDLVKLVNV

SEQ ID NO: 199454 - protein, 31 aa, Oryza sativa
  Clone ID: PAT_MRT4530_95017C.1.pep
ILHSFNFFFFTCLNIIKSYLVTEAKSEGLYI

SEQ ID NO: 199455 - protein, 103 aa, Oryza sativa
  Clone ID: PAT_MRT4530_95018C.1.pep
HEGRKQRQQGGFAKGNDDGPDLNFEGDEGFKQSKKKRPGVSPGDRSGGLAKKGKQGKNRKSRDSKFGHGGRKGLKKQNTAETTNDFRGFNQMDKSQNKRRKMG

SEQ ID NO: 199456 - protein, 122 aa, Oryza sativa
  Clone ID: PAT_MRT4530_95019C.1.pep
SFSPDFSRGFKASGMEGIFWGKAQELSPLNGGGFLFGGERKKGLPFFFLMGFPPRAFFSFGPRPLILLGCSFWGGLFCHEFVFPGPQLLLKGGFLGPSAIPFPPMVLGLFRNKFPPVFFFLG

SEQ ID NO: 199457 - protein, 244 aa, Oryza sativa
  Clone ID: PAT_MRT4530_9501C.1.pep
MEMAAPVSPAPRTVEDIFKDFSGRRAGLVRALTVDVDEFYGFCDPEKENLCLYGHPNGRWEVALPAEEVPPELPEPALGINFARDGMHRRDWLSLVAVHSDSWLLSVAFFFGARLNGNERKRLFSLINDHPTVLEALSDRKHGRDNKSGADNGSKSRHSGKRANDVQTKTSRPAVVDDGYDEEEHSETLCGTCGGRYNANEFWIGCDICERWFHGKCVRITPAKAEHIKHYKCPDCSSSKKSRQ

SEQ ID NO: 199458 - protein, 103 aa, Oryza sativa
  unsure (1)..(103): unsure at all Xaa locations
  Clone ID: PAT_MRT4530_95020C.1.pep
TCRRRGRSPPPCRTPPRPPPAASXSPPSPTRPPRRRPRRRRRRRTSSVSSRGSARRRRRRRLLGTRWPARRGQRRRRAPSARRRPPPLGGGRRPAPAPERCPA

SEQ ID NO: 199459 - protein, 113 aa, Oryza sativa
  unsure (1)..(113): unsure at all Xaa locations
  Clone ID: PAT_MRT4530_95021C.1.pep
FRLRDSAPVVGXNXTXSXXVLXKNGGTATKXAKHQLITATVXDXKLXICKAQAGDKXKWFKGRQENSSKSATSSFSVMIVQNLYLSFSIPNNQINPILLKKCHCTCVLRVCFL

SEQ ID NO: 199460 - protein, 105 aa, Oryza sativa
  Clone ID: PAT_MRT4530_95022C.1.pep
GRVGGSDIVTEGTKGTLRRREAFRYLSVYYLKMFLLNVPSTTMALGLLFFMDELTGFETIISHLAKPLGPIITWIDALPVILVIAQSITYAIKNDVLILKVPCAN

SEQ ID NO: 199461 - protein, 78 aa, Oryza sativa
  Clone ID: PAT_MRT4530_95023C.1.pep
MGFGLPAAAGAAVVDIDGDGSFLMNIQELAMIHVENLPVKVMVLNNQLGYPSSSHLFVLSIFFNNQLVLFMCISYSRS

SEQ ID NO: 199462 - protein, 717 aa, Oryza sativa
  unsure (1)..(717): unsure at all Xaa locations
  Clone ID: PAT_MRT4530_95024C.1.pep
MGEAAADERGLAAAAAGEDEEETSPIEEVRLTVPAGDDTALPVWTFRMWSIGLLSCALLSFLNQLFFYRXTEPLIVTQITVQVASWPVGYFLARXCAFGSGSAYAVMIVDIIRAFYGRSISLFPAWLLITTTQVLGYGWAGLMRRYVVEPAQMWWPGTLVQVSLFRALHGKGEEKEENKEGSGGGMSQAKFFLIALACSFLWYAVPGYLFPTLTSVSWVCWIFSKSVTAQQLGSGMKGLGLGAFTLDWTAVSAFLYSPLISPFFATANILAGYVLLMYVVVPVSYWGLDLYNARRFPIFSSHLFTATGSTYDITAIVNDRFEIDMDGYHRMGRINMSTFFALSYGLGFATIAATVTHVALFHGKEIYRRFRASQRDKPDVHTRLMKSYRDVPSWWFYAMLALSMAVSLLLCTVLRSAVQLPWWGLLFACAMAFVFTLPISIITATTNQTPGLNIITEYVIGLMLPGKPIANVCFKAYGYMSMSQAVSFLSDFKLGHYMKIPPKSMFLVKLVGTVVASTVNLVVAYWLLGSIPNICQDALLPADSPWTCPNDRVFFDASVIWGLVGPRRIFGPLGNYGALNWFFLAGAVGPVIVYLLHRAFPSKTWIPMINLPVLIGATSYMPPATAVNYNSWLIIGIIFNFFVFRYRKLWWKRYNYILSAALDAGVAFMAVLLYFSLSMENRSISWWGTAGEHCPLASCPTAKGINLGADSVCPVVL

SEQ ID NO: 199463 - protein, 117 aa, Oryza sativa
  Clone ID: PAT_MRT4530_95025C.1.pep
TGPFKLNGVPLRRVNQSTVIPTSTKVDISGVKAEALNDEFFNRIKVKKTKKSEEAFFAAGAVEKTQAEKDQIAQRRKAQTEVDTPILAAVKKTELLRQYLKSRFTLSRNTRPHELLF

SEQ ID NO: 199464 - protein, 42 aa, Oryza sativa
  Clone ID: PAT_MRT4530_95026C.1.pep
KPVVGRGLKKCSLVPARQIGVSNVSLVQHKVSIVHGGISMAE

SEQ ID NO: 199465 - protein, 224 aa, Oryza sativa
  Clone ID: PAT_MRT4530_95027C.1.pep
MTAPIPDLLLLPRLHCNLFVGLFFLYINMPNTGTGAIGGSIGNDSGIAGRDGTENDNTNGDNTIALSSTGAFSKLKIPIYDHIFNTVLIYNSSACAGRLRAAACLPRPPHRCPVRPREIKSSLNLRYMIITCGYLATCGAVPCTAAPEPNWYYKRSTRRAVQRRRQGEPRRVRACNTGTRTKARKRGSLPFLWMDWTEESWAYGQDFNSEDVLGIGNMGLRPRY

SEQ ID NO: 199466 - protein, 148 aa, Oryza sativa
  Clone ID: PAT_MRT4530_95028C.1.pep
MEGNGIRGEAEVDDNGEGTVGDGALATGTESSWTRGAHPLRRPAPLLPAALHPTPSGEEVEFAVANDGAMHIACTAVTRPDAVRDNVRSEGSRLELTMTTASSLLSPIVVDETVSAVKEAAVAVASSNPTAPTSNLLKWHQRSFEVWG

SEQ ID NO: 199467 - protein, 280 aa, Oryza sativa
  Clone ID: PAT_MRT4530_95029C.1.pep
MAAATVSVRFHPAASAARCGGGSRRSRRLSGVIRAQSAPASAAAAALTQDDLKRLAAVRAVEQVESGMVLGLGTGSTAAFAVAEIGALLASGKLSGIVGVPTSKRTFEQAQSLGIPLSTLDDHPRIDLAIDGADEVDPDLNLVKGRGGALLREKMVEAASDKFIVVVDETKLVTGLGGSGLAMPVEVVQFCWKYNQVRLQDLFNDEGCEAKLRLDEGGKPYVTDNSNYIVDLYFKTPIKDALAAGKEISALEGVVEHGLFLDMATSVIIAGTDGVSVKTK

SEQ ID NO: 199468 - protein, 387 aa, Oryza sativa
  Clone ID: PAT_MRT4530_9502C.1.pep
MALPAATARAAALCRIAACASASSAAAAATGGRRGAEKLPFSLAERGMVVGGHRGMGMNAVGAPPGARIEAVRERENTLLSFGRAAAHAAVAFVEFDVQVTKDGCPIIFHDDFILTQETDAVYAKRVTDLLLEEFLSYGPQKNSHEISKPLLRRTSDGRVVNWSAKDDDSLCTLQEVFERVSPRLGFNIELKFDDDIFYERSQLDRALQAVLQVVSQYASNRPVFFSTFHPDAARIMRELQSLYPVLFLTEGGTAQHKDSRRNSLDEAIRVCLEYELHGLVSEVRGVLKNPSAVLRAKESNLALLTYGQLNNVWEAVYIQYLMGVNGVIVDLVEEISNAVADFSKPVLNQSMLGSGVDLVGAKHQAFSQQQLGFLLWLIPELIQQPH

SEQ ID NO: 199469 - protein, 102 aa, Oryza sativa
  Clone ID: PAT_MRT4530_95030C.1.pep
PAPRLFCFGLLACWSLGIGTHLHFPPGTPFYPPIFRIFFICIKGNLCRLWSRFSYFQVGPSECSSFGPGEGPRGGKNTFFVSVLEGPKRPIFFFFSCDLLKF

SEQ ID NO: 199470 - protein, 91 aa, Oryza sativa
  Clone ID: PAT_MRT4530_95031C.1.pep
HEADLALGGVDPPHYHPRVSDMVTGLEGTAYACYETYNLLSGADRLYAKVLREGDIFRVPQGVVRLLLIVSRSPAVSQDAFVSAQPLFSQA

SEQ ID NO: 199471 - protein, 43 aa, Oryza sativa
  Clone ID: PAT_MRT4530_95032C.1.pep
LSLSLSPIEVELSRVCYLDKFLRSNVHDIRSHHMTNLNGRKVE

SEQ ID NO: 199472 - protein, 306 aa, Oryza sativa
  Clone ID: PAT_MRT4530_95033C.1.pep
MAAVRATGGTQGGVKEGTQMGIGNRAWWTRETVAVVTGANRGIGLALAARLGEHGITVVLTARDAERGEAAAAALRARGLHVVFHRLDVADPASVQAFAAWLRDAIGGLDILVNNAAVSFNEIDTNSVEHAETVLRTNFYGAKMLTEALLPLFRRSPATSRILNISSQLGLLNKVSDPELKRLLQDEERLTEAEVEGMASRFLAQVKDGTWRGQGWPKVWTDYSVSKLALNAYARVLARRLQARGDRVSVNCFCPGFTRTDMTRGWGKRTAEEAAEIGARLALLPPGELPTGTFFKWCTPQLYSKL

SEQ ID NO: 199473 - protein, 39 aa, Oryza sativa
  Clone ID: PAT_MRT4530_95034C.1.pep
YPLPPLGGVLVTDVSSHHVLVVSEVKNYTPQTIIICRPL

SEQ ID NO: 199474 - protein, 103 aa, Oryza sativa
  Clone ID: PAT_MRT4530_95035C.1.pep
MRQARTGLADPWFWFEPIQGHHLFTDLLPEIDMDDLYEDYGNTLNYSSKKKPRPKHKTFEEGILNVVIVYHQETTWFLHDASLEKENLQVDIKNEGHAMPKNT

SEQ ID NO: 199475 - protein, 52 aa, Oryza sativa
  Clone ID: PAT_MRT4530_95036C.1.pep
VGGSLVQAQLLVCLHPIVLVGYLRNDVCYFVDSLLVRTCFVICLYFPKTPTH

SEQ ID NO: 199476 - protein, 1048 aa, Oryza sativa
  unsure (1)..(1048): unsure at all Xaa locations
  Clone ID: PAT_MRT4530_95037C.1.pep
MESPAKEEAGGELAMEIESTVTAEDWRRALALVVPSVVVLRTTAPRAFDTEVAGASYATGFVVDKSRGIILTNRHVVKPGPVVAEAMFVNREEIPVYPLYRDPVHDFGFFRYDPGAIKFLKYDEIPLAPEAASVGLEIRVVGNDSGEKVTSLQLVGSETVDMCQSMVSILAGTLARLDREAPYYKKCVRNXFGTGVVIYHSDCLGSGGFVFLHPVHNFALVAYDPSALGAGASVVRAAKLLPEPALRRGDSVYLVGLSRSLQATSRKSIITNPCTAVNIGSADCPRYRAINMEVIELDTDFGSAFSGILTDEQGRVQALWASFSTQLKYGCSSSEDHQFVRGIPIYAISQVLEKVISGTPGPFRIINGVRRPIPFIRLLEVELYPTLLSKARSYGLNMFCGSNVVWLDIIQKIAGEDIENLGDLIACISKLSRGARVPLEYVKYTDRYRNNLVLVTIDRHEWYAPPQLYTRNDATGLWTAKSAIPPESPFIASAHHAGPIDANSNSVSSLPESSPMDLKCQHESENLTDGCIKTQTDDEINVDGSHSSGDWQMVNLLGCGPSIXNGKPRVLTLKQDLHYWPTWELRFEPETSTWKRGIIKALQSTVXDQLCLCLNSSCSQRVFLREPKHGGAEMGNACPTAHVGKLESCVMQDGMVGIRIGCLKLKDIVIHRKIYGFIAWLSRSLQATSRKSIITNPCTAVNIGSADCPRYRAINMEVIELDTDFGSAFSGILTDEQGRVQALWASFSTQLKYGCSSSEDHQFVRGIPIYAISQVLEKVISGTPGPFRIINGVRRPIPFIRLLEVELYPTLLSKARSYGLSDSWVQALAKKDPVRRQVLRVKGCLAGSKAENLLEQGDMILAINKEPITCFLDIENACQKLDQSVDSDGVLNMTIFRQGKEIDLIVGTDVRDGNGTTRMVNWCGCIIQDPHSAVRALGFLPEEGHGVYVARWCHGSPVHRYGLYALQWIVEVNGKPTPDLETFIQVVKGLENGEFVRVRTVHLNGKPRVLTLKQDLHYWPTWELRGCSLGSLSMEVRKWGMRAQLPML

SEQ ID NO: 199477 - protein, 65 aa, Oryza sativa
  Clone ID: PAT_MRT4530_95038C.1.pep
MSNNRGSTSGVTVLFGASSSVPWSAELCPFPHRCVWDHGGVSGYLQEEGQDVVDTDLVMAMLWST

SEQ ID NO: 199478 - protein, 70 aa, Oryza sativa
  Clone ID: PAT_MRT4530_95039C.1.pep
MKIEVVPVREYGNYRFPGKHAQAQHLLQAGVVVRNYPYPHGATAAAAFASPSYSYERTVDQRGVENEGDD

SEQ ID NO: 199479 - protein, 74 aa, Oryza sativa
  unsure (1)..(74): unsure at all Xaa locations
  Clone ID: PAT_MRT4530_9503C.1.pep
GTEATTPXLXXAXVXDNKXXSLAXCXYXKVSKTSXVXAXLAHSFXSNEXTFYLRGKYPWTNFTTCLRCFQPSFG

SEQ ID NO: 199480 - protein, 72 aa, Oryza sativa
  unsure (1)..(72): unsure at all Xaa locations
  Clone ID: PAT_MRT4530_95040C.1.pep
ASITELKGKTLEELIESGKKKLSXVPTGGAAAPAAGAAPAAGAPAAKKEEAKPKEEEKKEESDEDMGFGLFD

SEQ ID NO: 199481 - protein, 622 aa, Oryza sativa
  Clone ID: PAT_MRT4530_95041C.1.pep
MASGAEVRVVAAIRVPLLRRSPPHLEQIPLSLFDVWFLPQPPIQRLFLYDDDGGGGGADDYFPSLVESLRSSLADAVAVFFPLAGKLTYVPSTGDVVVDCSPSAVGDGVAFLEAESDGDARALSAAKRHDVPAFLRLVPSLEAPELPAPVLAVQVTRFVGGGDRGGVAVGVAVHHAVADGLSFWRFMDVWSAAARGRPSPPAPVFDRSAIVHPMAADVARRILRKVTPELPLVISIFVSPHRELVEANVATPRHDHAPSAVADGVAFLEVEVDGGTPARTPTERLDVPAFLRLVPSLEVPELPAPVLAVQATRFVGGGGGGGVAVGVAVHHAVADGQSFWRFMDAWSAAARGRPSPPAPAFDRSAIVHPMAADMARRILRKKAPELPLIPTANLLRRTWERHVVTTLELDSHRIGHIKNRIAELDEATTASPGTERRPRRLPSTFVAVAALVWSSVVRARASRQPDDGARAHLVFPADCRRRLDPPVDAAYFGNCVRCCVAGAAAGDLADAHRGVLHAREAIREAIDGFLEHPMVEAFDAWIDAVAALVRQPGFVAVTASPRFQVYEVDLGWGAPSRVEFASESLPNGMVAMTAGRKEASVQVMATLRPEHMEAFRSQLLYW

SEQ ID NO: 199482 - protein, 344 aa, Oryza sativa
  Clone ID: PAT_MRT4530_95042C.1.pep
MGSPVSAVVANLYMESFEEEALDTCPLSCIPRVWKRYVDDTFIIVPISETDKLLKHMNSLEPTIQFTSEIECEGKIAFLDTLVHRHDNHRLSTSVYRKPTHTDQLRGLVKCLFDRASRIVTSPQQPCKERTRVRSALSLNGYPRRFIHNTKNRSSEPRDQKVYKTFTVLPYIDGVSQQLKRRLESHGIRTVFRSDTTLRQQLTCPKDPIPPHRRDGIVYNIPCMACDRSYIGEAARPIKERITEHKRDVRLRRTDNSAVAEHAWDNQHQPDWDGVQCLSQERHWYTRRVKEAINIRLNPNNFNRDNGIDIPEFWMRTIRRHDTRRPASQHWSIPFSRRSDPAAR

SEQ ID NO: 199483 - protein, 182 aa, Oryza sativa
  Clone ID: PAT_MRT4530_95043C.1.pep
RGVTNHQTWMKAPKDIETAITGKGGAWVYSPTAPTNPAVGLIWVDSSKTPNQPKRWVGGETEWVALTPEEVKDFPWGEDGSSLADWVAQAEQKISSDSIINTVLGSEDFTGIFDKKANTEDLNTLASYDDLDAMQAEYERLLKEGIAGIDFSPYVTNTELEQLKDSFTFSVQQAGGVNMLKK

SEQ ID NO: 199484 - protein, 92 aa, Oryza sativa
  Clone ID: PAT_MRT4530_95044C.1.pep
IHQVVCARFVVENESVTISKEPSFRAATKRRRRSACRWSELHHVYQPEQWSREQGPATLNLGEPHCSSPVGPMRISTRLGSVYSKLDLLVCV

SEQ ID NO: 199485 - protein, 368 aa, Oryza sativa
  Clone ID: PAT_MRT4530_95045C.1.pep
MALSDRSRESLLPSFLYTSSAARSFATGATRFPSPVSPASPAPGAVGGGAPISIQAPREKIEMYSPAFYAACTAGGIASCGLTHMAVTPLDLVKCNMQIDPAKYKSITSGFGVLLKEQGPRGFFRGWVPTLLGYSAQGACKFGFYEFFKKYYSDIAGPEYAQKYKTLIYLAGSASAEVIADVALCPFEAVKVRVQTQPGFARGLSDGLPKFVRSEGALGLYKGIVPLWGRQIPYTMMKFASFETIVEMIYKHAVPVPKSECSKSFQLGISFAGGYIAGVFCAIVSHPADNLVSFLNNAKGATVGDAVKKLGLWGLFTRGLPLRIVMIGTLTGAQWGIYDAFKVMVGLPTTGGVTPAPGAAEKALQASA

SEQ ID NO: 199486 - protein, 33 aa, Oryza sativa
  Clone ID: PAT_MRT4530_95046C.1.pep
MDHEMRFEMETDSLAGSQIQIVQPLILQTIADY

SEQ ID NO: 199487 - protein, 48 aa, Oryza sativa
  Clone ID: PAT_MRT4530_95047C.1.pep
IYPDPVRVVLFCYPVEDLIANPESKEWLFISTELCGGSHIKNTMRAEA

SEQ ID NO: 199488 - protein, 974 aa, Oryza sativa
  unsure (1)..(974): unsure at all Xaa locations
  Clone ID: PAT_MRT4530_95048C.1.pep
MELLSGAALAWQQYRALLRKNATLTWRHRRSASLQLLSSLVFIFLIFCIDRAIRSRFSYTTAYRNVPDPAALVAPPIPPCEDKYFVREPCYDFLWSGGGGAGSARVAGIVEAIRRNNPGRXVGPLRCLVGPQWAVETLLGTSLIRMRSQQQDECQRKKNILRVDXLDLSSCKLSLGXCNYRYVCTRTVYFFCFVVKEVLDDRYNKITSSLWCLTNSLTITQKTTILLPXAGPTFFLAIAMFGFVFQISALVTEKELKLRQAMSIMGLYESAYWLSWLTWEAFVTLLSALLTVLFGMMFQFDFFLHNNFGILFLLFFLFQLNMLSFAFMISTFVTKAASATTVGFAIFIIGFLTQLVTTFGFPYSTSYQKYYRTIWSLFPPDVFAQALNILGKATATPEDKGISWNQRGQCQSFETDCVITIDDIYKWLISTFFLWFVLAIYFDNIIPNVNGVRKSVFYFLMPSYWTGKGGGKLQEGGLFSFFGSNRPADDASPTDEDVIAEENLVKQQAANNEVDPGVAVQICGLRKTYPGSFSMGCCRCRTTKPFHSVKGLWVNLEKDQLFCLLGPNGAAMIYGHSVRSTAGMSNIRRMIGVCPQFDILWDALTAKEHMELFASIKGLPPSTIKSVAEQSLIQVKLSQAANVRAGSYSGGMKRRLSVAIALIGDPKLVFLDEPTTGMDPITRRHVWDIIEEAKKGRAIVLTTHSMEEADILSDRIAIMAKGKLRCIGTSIRLKSKFGTGYIANVNFSGNGHTQSPNINGNTEVPVNPNIESVKWFFKERLDVDPKEESRTFLTFVIPHEKEPLLTANIFSIKQRFFGELQDREREFGISDIQLGLTTLEEVFLNIAKQAELESSTAEGTLVTLNLSSGSSIQKTLNISLISLPFSMAMQIPKGARFVGIPGTESEDHPRGVMVEVYWDQDDNGSLCISGHSDEIPVPANVQLGRPPSLSRRASVGRGNPVGYIIDPNEVTAAR

SEQ ID NO: 199489 - protein, 145 aa, Oryza sativa
  Clone ID: PAT_MRT4530_95049C.1.pep
FRKKKKKKKPKKKKKKKKKKKKKKKKKKKKKKKKKKKKKKKKKGGRFKEPNFTTPCLQIIIFFLGAPIFFFLAGFLKSRDGKNLGVPQFIPLLENPLFPGWGITKKPPPNGLSKNWPTLIGKWNPPCRGALSAGGGGVPPRGPVP

SEQ ID NO: 199490 - protein, 66 aa, Oryza sativa
  Clone ID: PAT_MRT4530_9504C.1.pep
FKPPPPPSPLVQQSSSDQTPSAVGNHHVEEEEQLAAPAIPALADLFSFDIKDYLDDETEEDTTANL

SEQ ID NO: 199491 - protein, 537 aa, Oryza sativa
  Clone ID: PAT_MRT4530_95050C.1.pep
MPWDESRNTDSCAPQRQSAARPPSNAVHSWPNMRRLSLGCREDSNPSDQAVSAAILPRCRTRSSGSQQPDNSSNLDEILAGEETDEEMFFRGPTRMPPRPTRDEDKPVLTPKGDRQWQANDFGGNIRVPTGILTVIIKHFFPGIVNFKGRDEPAWSWKHYRIAPDDPESAILNRLPSRLHRVEEDFWLYFRWAERTEQDARKVVRNCIKHLFSDLIYETRILAVLNYQRKILKVEPWWFLKAKNAWRELIRLKWCNPEWQASSHAHRIRREKMTWPSHRQGSANLSRFQKNLKKKKRVVSQMEAYTEGRGEYGEDGRFRCNTHATGKLEAYNEAYVQLHGAGSDWRNSPIDPMAVHMAGGGKKHGRFMIGDGHIDSSAIFGDSSLNDPRPRRRLRTNPDNTNQIEDLERQLQEEREAREREREEREREKERERQEWEQEKERECEERAREKEQDRKERELERKERELEKIAFEQKSSFFEVALRAIQLKLNIDLPSASGPPPLPVMLTNPALSVSSALNGNPFCADHGGAAIVSGAI

SEQ ID NO: 199492 - protein, 737 aa, Oryza sativa
  Clone ID: PAT_MRT4530_95051C.1.pep
MGNIGGSGVSLNRRLGRRGGVEDASGFKQPTDPHMRDLYRTFRCFCTRKDIQCKDVLLDDHDVAKSITEFCAVAAIEKLVVGATARGGFRFKADIPTTISKGAPDFCTVYVINKGKVSSVRNSTRQAPRVSPLRSQIQNMAAAAAKPEPATAMAPTPQKWSSSSRGHDHLETPKVDSYIRSPFARGPMGGATRKSYADLSHLSMPDSADISFVSSGRRSVEHNPVPARLSAASAESYDHSFETSRTPWGGDSFGGNDHTSFSQSSTSSFCSIGMDDVETEMKRLRLELKQTMDMYSTACKEALNAKQKAMELQRWKAEEEQRTHDARLTEESAMALIEREKAKAKAAMDAAEASQRIAELEVQKRITAEKKLLKEAEDRKNRGGGGGGMSHEIRYRRYSIEEIEHATDRFNDARKIGEGGYGPVYKGHLDHTAVAIKVLRPDAAQGRSQFQQEVEVLSCIRHPNMVLLLGACPEYGCLVYEYMANGSLDDCLFRRGGGGGGGGGPVIPWQHRFRIAAEIATGLLFLHQTKPEPLVHRDLKPGNILLDRNYVSKISDVGLARLVPPNVADNVTQYRMTSTAGTFCYIDPEYQQTGMLGVKSDVYSLGVMLLQIITAKPPMGLTHHVGRAMERGALADMLDPAVPDWPVEEAQCLAEMALRCCELRRKDRPDLGSAVLPELNRLRALGEDNMQFCGAIRGGVGGGLYSSSLLSTPSRSQAAVTGLTFLPPLNSFNSEEF

SEQ ID NO: 199493 - protein, 427 aa, Oryza sativa
  unsure (1)..(427): unsure at all Xaa locations
  Clone ID: PAT_MRT4530_95052C.1.pep
RRQRRYWKVGKTMTRKDRGSSSSSPTATTPPSSTMPXTSTAPSTPSASATPTTQGPCTASPTPRPAPTASSTTATTGSPTPSSPASATSPPSSPSTRRSARWTSSLETSAPTTASPSANASAPSSSSPTATTAPSSARPSTPGTPSTPSASAARTTRGPCTTSPTTPPACTASSTTSTTGSPTRSRRASAASPPSSPSTRRSTSPAAPTPGRRSWPSRGAGTTGPTSTRTGGPGSSTPARSAPATSRTSSCTSTSTGRPTAAASPSCSPRTARTWTRRGGRRRPCTWTSGWPWCRGATRSPTCPATSRRSWSASTRSRWSPSCSTGSRTRGAPPPPWSSVRGGAASRPPRTRVPPARRASPSSRGRSRRWRPAWSGAPGCPPCSPGSIATSFSCTPPPPPPRRRGFPRRHRRRPTWWRTLSQPARGT

SEQ ID NO: 199494 - protein, 621 aa, Oryza sativa
  Clone ID: PAT_MRT4530_95053C.1.pep
MGRGRGKQRKEAEAAREEEERRCLLEASPLRKEAVEAMRLDREGRHDEAIARADELAAKHPESAVVLHLAAGLHQNASTRSARDGSDGQASVMHLVYARDLYAQAKRLAPNCVQIATGFAMAKVASAKDYEPDREIMRALAISSPTDPAENNVAFDLDRTLSTTMDRLAKAREAALFHSHHIMSHMSAKIIPAVVVDMLDISKREGAATAKKQAKKALVERFGYSARAHLTHAKISLDFARGLDPNIDKKPFLNSILDALNNLVEEFSNSLEIAMFRAKLWFVMGKYCSVEVECDRAIRMEEPTDPREEDVPPGSIPGEKPEDRKSYIRTELKRLLQKLVLVCRDYWCSLASEKQDSFRLVGLKYLHLHFVTFYQDDHEAAKTISDALNFVKKNKSWRFWICPYCVGKKIPDIDSLLQHMRSKHPEGGFWTNLRQVFDPESISDTYQGDHFSDNATICQDSEENYVLHFKRMDDIFKYLFLRAADNIEEKPFSQIREEKCRNGVFILEKIKLKLNNVPTDISSSEFNEACAEIRDLWRYFLEISLMDYRVAISPLAMCFISDQLLTCMTEDKEAASNSIDVAAINAVFPFVDVCPDIDAIFPNVDDAPDGNDADTSTSETL

SEQ ID NO: 199495 - protein, 116 aa, Oryza sativa
  Clone ID: PAT_MRT4530_95054C.1.pep
MTDAMRPGVVRHQTPSPSAVRRQSRRRAPPTPPFATTWTSAANQPPAGSRPCAERHQRRPPCAECRSQLNAPNAERRPQRRVPRHDPNAKRHHTAAAPADTVQDGGDEQSWICAKL

SEQ ID NO: 199496 - protein, 69 aa, Oryza sativa
  Clone ID: PAT_MRT4530_95055C.1.pep
MEEVVDIDEHDEEAIVYRTGDGVRSRLRRKVREVRFDAVDLATKDYDPRRRPLPSGDDRGDTPGVRGND

SEQ ID NO: 199497 - protein, 85 aa, Oryza sativa
  Clone ID: PAT_MRT4530_95056C.1.pep
QPKNKTKQKVQDFCRLLPKDDYSFSWRPTTCTARSMIESILCSWGTGIQPNPQHIFFFFLLFSSSSLMHTLHSTGTSTSSQKKRP

SEQ ID NO: 199498 - protein, 61 aa, Oryza sativa
  Clone ID: PAT_MRT4530_95057C.1.pep
GDDGEDHISNLPDDQLRLVLRWLDTRTAVATGALLFSSPLPLGASWRPGQGDDGRPSTVAA

SEQ ID NO: 199499 - protein, 50 aa, Oryza sativa
  unsure (1)..(50): unsure at all Xaa locations
  Clone ID: PAT_MRT4530_95058C.1.pep
FFFFFFFFFFFFFFFFFFFLLPCXLLYYXDWKRHXQXFFPWXIKKSVRXN

SEQ ID NO: 199500 - protein, 169 aa, Oryza sativa
  Clone ID: PAT_MRT4530_95059C.1.pep
MAAEAKAPSLAEEYSLPPQEAPVEKAVEDKPQEAESISVTNDETPQADETATAVEVNPETSEVQEVADKSEVEDTNPAAEETNETAEEEAEEKPEIKIETAPADFRFPTTNQTRHCFTRYVEYHRCVAAKGEDAPECDKFAKYYRSLCPGEWVERWNEQRENGTFPGPL

SEQ ID NO: 199501 - protein, 402 aa, Oryza sativa
  Clone ID: PAT_MRT4530_9505C.1.pep
MATKRSVGTLGEADLRGKKVFVRADLNVPLDDAQKITDDTRIRASVPTVKFLLEKGAKVILASHLGRPKGVTPKYSLKPLVPRLSELLGVDVVMANDCIGEEVEKLAAALPEGGVLLLENVRFYKEEEKNDPEFAKKLAAVADLYVNDAFGTAHRAHASTEGVTKFLKPAVAGFLMQKELDYLVGAVANPKKPFAAIVGGSKVSTKIGVIESLLAKVDVLILGGGMIFTFYKAQGYAVGKSLVEEDKLELATSLIEKAKAKGVSLLLPTDVVVADKFAADAESKTVAASAIPDGWMGLDVGPDAIKTSSEALDTCNTIIWNGPMGVFEFEKFAAGTDAIAKKLADLTTTKGATTIIGGGDSVAAVEKAGLADKMSHISTGGGASLELLEGKTLPGVLALDEA

SEQ ID NO: 199502 - protein, 82 aa, Oryza sativa
  unsure (1)..(82): unsure at all Xaa locations
  Clone ID: PAT_MRT4530_95060C.1.pep
NAPSAQPTAPLPAPASAAPPSAPGTRWHGDTSGYFRAFGAQHPAGSQVQYQQAESAQPQFVPXYNQFEPMPQQPQGTPQQQP

SEQ ID NO: 199503 - protein, 54 aa, Oryza sativa
  Clone ID: PAT_MRT4530_95061C.1.pep
ISQCYGFTLQPIRNLSTPNALHPPLGDGSMTQDGADAHGDDLEGARARRRRRRT

SEQ ID NO: 199504 - protein, 141 aa, Oryza sativa
  unsure (1)..(141): unsure at all Xaa locations
  Clone ID: PAT_MRT4530_95062C.1.pep
MEKQRAGESGKKMRKKEEIESTADDPKTGEEEMRQGHGSGEAATLDGRSGEAFIRDGDEMEAWSRGGGGVDRRRQKRRRSAAFIYEVRVRGSGSRWASSGRAYRYXAWAVLARSCRAGPACCCGSPGMARLSGQAGMGTNT

SEQ ID NO: 199505 - protein, 76 aa, Oryza sativa
  Clone ID: PAT_MRT4530_95063C.1.pep
GGVTFPIQVDVMFERATHSGFFVSTPYVEKSVGSKAIKFRKAKVFPGSTLLNCGPSKFFRSPYMKNNRLPLGRTLQ

SEQ ID NO: 199506 - protein, 329 aa, Oryza sativa
  unsure (1)..(329): unsure at all Xaa locations
  Clone ID: PAT_MRT4530_95064C.1.pep
MMVEVLEEEAVVYTPTPPGSEDASESRGPRHRRRNSPTPPRRDPSRREDPTQSGGSALSPPPGGGRPRRVRARRRLTYGDGGSPRGALQAAGALLGHPPVNSEPETPVQRWLDDVANLVTTAQRELAAGSRPVVTGTSRTPITLSSSARKRACRSATASRRSTAPTSSEASGSRRRHDGLYGEQDARINIERRRDERRAARMGEGASSSGVLRSSSRGGPPPTLTPRGTSCRAFVASLRNVWWPPKFRPNLTEKYDGSINPSEFLQIYTTIIVAVGGDDRVMANYFPMALKGXRGWLMTXPPDSINSWVVPRMVIRRAATTSLHPLMRE

SEQ ID NO: 199507 - protein, 89 aa, Oryza sativa
  Clone ID: PAT_MRT4530_95065C.1.pep
IVGFPLPRELGVDPSKNGVVLKSYPDTSRFGVCHGGSSGDYGPPPPFKWGTFPPRFLPSSSAWRLGWNQAFFNRLFGGHYAFEEEEEEP

SEQ ID NO: 199508 - protein, 297 aa, Oryza sativa
  unsure (1)..(297): unsure at all Xaa locations
  Clone ID: PAT_MRT4530_95066C.1.pep
MVEVLEEEEVVFTPTPSGSEDASESCGPRHRRRNSPTPPRREPSRREDPTRSGGLALSPPPGEGRPRRIGARRRLXYGDGGSPRGALXAAGALLRHPPVNSEPETPVQRWLDDVANLVTTAQRQLAAGGRPAVTGTLHTPITLSSSARRRACWSAMVSRRSTAPTSSGASGSRRHHDGLYREQDARIHIERRRDERXAARMGEGASSSGVPRSSSRGGPPPTLTPGGTGCRAFVASLRNVRWPPKFRPNLTEKYDGSINPSEFLQIYTTIIVAARGDDRVMANYFPMALKGVPSSNS

SEQ ID NO: 199509 - protein, 405 aa, Oryza sativa
  unsure (1)..(405): unsure at all Xaa locations
  Clone ID: PAT_MRT4530_95067C.1.pep
CEKAQITTYFGPREASSLTLDESQISDIPQVSQLENKALVQVFSEEEIXDAIFQMEHNKAXGPDGFSAEFYQIFXNVLKPDLVDLFDDFHSGNLPLYSLKFGTIILLPKCNEALKIQQYMSICLLNISFKIFTKVATNRISGVAQKVISPTQTTFIPERNIMEGVVILHEMIHELHXIKKSGVLFKIDFDKVYDKVKWSFVQQTLRMKGLSQKXCDWIASFXQGGHVGIKVNDQVGSNFQTYKGLRQGDPLSPILFYIVVDMLAILIKRAKDDGQISRVVQHLIDDGLSMLQYADDTIIFLEHDLXKAKNMKLILTAFEKLSGLKINFHKKSFVIKIGXQLSKELRKNLVVRRVLSRATQWLREWAQLQRHDDHIKLIKDVCRKLESTIMLLFANFGWRFTNRIQ

SEQ ID NO: 199510 - protein, 79 aa, Oryza sativa
  Clone ID: PAT_MRT4530_95068C.1.pep
AFRVDPASGASQLQKEKFFLSFFGQVESWMGTRMTAPFHCIIQTETLQSCMDSACTGPAGHHSSASCIPNSSLIFRVHH

SEQ ID NO: 199511 - protein, 89 aa, Oryza sativa
  unsure (1)..(89): unsure at all Xaa locations
  Clone ID: PAT_MRT4530_9506C.1.pep
VKHHNSYCPWVNGTVPAACCSNTESSSSSSPLSGWQLTVDALDTFQSLGQAXNHAMRSDSAASLYMDDHVTPNHKLAGRASVSRSHGKC

SEQ ID NO: 199512 - protein, 252 aa, Oryza sativa
  Clone ID: PAT_MRT4530_95070C.1.pep
MATVAVPRVKLGSQGMEVSAQGLGCMGMCPAFEPPKPEADMVALIRHAIAAGVTFFDTSDLYGPHTNEVLLGKALQGGGVRDRVELATKFGKFFAGGKPGIRGDPAELGIGIVAYSPLGKGFFSSGAKLVDSLPDHDFRKLIPRFQPGNIEKNAEIFERVNEMAARKGCTPSQLALAWIHHQGRDVCPIPGTTKIENFNQNVAALSVKLTPAEMAELESYASNVHGDRYPLMMANTTWQDSETPPLSSWKSE

SEQ ID NO: 199513 - protein, 126 aa, Oryza sativa
  Clone ID: PAT_MRT4530_95071C.1.pep
GRVGSTPVYRSTGRGPWSSVTPATAAASPRAPSRSRGSDLATTANCLLLPSTRRRRGCSGRPSCPRRRAAARRRPPRARRTSWPSLAPSTGWTPHSSDPLLCFFLLIFFPLSSLQRVCTCTVKNPK

SEQ ID NO: 199514 - protein, 790 aa, Oryza sativa
  Clone ID: PAT_MRT4530_95072C.1.pep
MATTSPCAAPSPSLRCPLALSHPFASPPPPPALRLAGPKLLPGRLAVSPPPGIPAVASALESLILDLDDDEEDEDEETEFGLFQGEAWAAADEREAVRSPELVVPELEELPEQWRRSRIAWLCKELPAYKHSTFTRILNAQRKWITQDDATYVAVHCLRIRNNDAAFRVYSWMVRQHWFRFNFALATRVADCLGRDGKVEKCREVFEAMVKQGRVPAESTFHILIVAYLSVPKGRCLEEACTIYNQMIQMGGYKPRLSLHNSLFRALVSKTGGTAKYNLKQAEFVYHNVVTTNLDVHKDVYAGLIWLHSYQDVIDRERIIALRKEMKQAGFDEGIDVLVSVMRAFSKEGNVAETEATWHNILQSGSDLPVQAYVCRMEAYARTGEPMKSLDMFKEMKDKNIPPNVASYHKIIEIMTKALEVDIVEQLMNEFIESDMKHLMPAFLDLMYMYMDLDMHEKLELTFLKCIARCRPNRILYTIYLESLVKVGNIEKAEEVFGEMHNNGMIGTNTKSCNIMLRGYLSAEDYQKAEKVYDMMSKKKYDVQADSLEKLQSGLLLNKKVIKPKTVSMKLDQEQREILIGLLLGGTRMESYAQRGVHIVHFQFQEDSNAHSVLRVHIHERFFEWLSSASRSFDDGSKIPYQFSTIPHQHFSFFVDQFFLKGQPVLPKLIHRWLTPRVLAYWFMFGGSKLPSGDIVLKLSGGNSEGVERIVNSLHTQSLTSKVKRKGRFFWIGFQGSNAESFWRIIEPHVLNNFASLVTQEGSSIGSDGTQDTDTDSDDDMQMSDTERDE

SEQ ID NO: 199515 - protein, 628 aa, Oryza sativa
  Clone ID: PAT_MRT4530_95073C.1.pep
MRSTAAAADVIDLSSDDDDEVPVPSTSAAAAAAARRVAPSTSPRDVTPYALVDVKPALLYPLQPPGVVVGGSGALVPVKEELPVLTPVPLLAAGYSPSTPSTKVALPAPRLCRQFWKSGDYVVAQRNPDADAPGGRNRLRINPRFLHSNATSHKWAFGAIAELLDNAIDEVNTGATFVRVNEFTNPRDGSSSLLIQDGEGLKNSTIRLGANVIVFTQNQNNWVPTRSIGLLSYTFLMETGCDDVLVPTVDYQYDISTASYTQMLRHDQKLFSSNLAILLKWSPFASEAELLKQFDDIGEHGTKIIVFNLWFNDDGDMELDFNSDKKDILITGAHRKAYTSVLYLHIPDNFRIVLRGHDVESHNVINDLMYPECVLYKPQIAGLAELSAITTIGFVKGAPEIDVQGFNVYHKNRLIAPFWKVANNSYGKGRGVVGILEANFIKPTHDKQDFEKSVLYQRLESRLKEMTYEYWDLHCHRIGYDNKKLPKSSRALNRANQMNAGSSPPIVPRQLLAADIPTSSCAVPTFMAPALRQKQMGLKRNIDALGSKTDSADQDGSHLDVSQRRRFNEYRTLTLENDKLRGECLQYEESAKQLALKEQKLRSQIALERKKYEELLQELRSLDVKTEK

SEQ ID NO: 199516 - protein, 70 aa, Oryza sativa
  unsure (1)..(70): unsure at all Xaa locations
  Clone ID: PAT_MRT4530_95074C.1.pep
KEGKRKRRKRKREKRGKXKKGGERKSDDREEKEEVWEEKVRKKRGKKEXKRKKREKREKVKEKKNEKKVF

SEQ ID NO: 199517 - protein, 214 aa, Oryza sativa
  unsure (1)..(214): unsure at all Xaa locations
  Clone ID: PAT_MRT4530_95075C.1.pep
REQEHKEKTKKKSREKKVKIKKMRKRKRARTTREKNNNKRKRQREXKKKKDKKIKDDRINREQRKKKKKRKRNKGKQGVKKKQKKDERKRRTQRDKNRKXKKRELRRKPDKQGQERKRKKKRTKEEEEKIKXKKEQRKKRSKEKKEKKKRKKNEKRKKRKKKKEKEKKKRKKEKRKKKKKERREKKEKREKKEKKKKKKKGVGVRVHARGTRDR

SEQ ID NO: 199518 - protein, 177 aa, Oryza sativa
  Clone ID: PAT_MRT4530_95076C.1.pep
MVQGNPCPASHYRGGLDVFRKIVAADGLYRGFGMSILTYAPSNVVCSSTLSPDVGGCARSTLRASPTLSFSTQRQEVGSAVVVAKKAALLAVCSHLPARAGLEDDGGLAEVVVLKLPIHVSSSSIVAVCGVRRAGSRVRRDGAKPDAVVGTTGMAGAEEELCSPAETKEELRAGGCG

SEQ ID NO: 199519 - protein, 109 aa, Oryza sativa
  Clone ID: PAT_MRT4530_95077C.1.pep
RGCTSSTKAQLDGQGIRHSHCQAWLWQAPGVVIRTVPGVPVMDTCAAHSRSGQVGLEPAAVAVDSLWATLRPLALSVPRSFSPEAASSSVRRYGLRGGCRSSRRAGWST

SEQ ID NO: 199520 - protein, 66 aa, Oryza sativa
  Clone ID: PAT_MRT4530_95079C.1.pep
YLSSAVAPSLFFPISPNSLVLPIAPAPCNHPPPPLPLLRQPLAAARLAAAPRRRHRRGRSAGLEPS

SEQ ID NO: 199521 - protein, 1336 aa, Oryza sativa
  Clone ID: PAT_MRT4530_9507C.1.pep
MREEVRSSSGAAAEPPPTPVARYDRGGALIFGGRFAGVAVGVVGESGSRCLDRLCRGWVLEVFVGFVTGAAIARRDFGLVYGERSEAVSVDVWLNPRAGASYWPASITVLLSGEIYIPLGGNRAIFGPSSPAMQANVASIDWSGSRQASRVDSSSHVAPHAHQPSHSFDATGTALDSAPSCRPWERGDLLRRLATYKPTTWASRPKAASSLACARRGWVNVDMDKIECESCGAHLIFSTLTSWSPAEVSNAGEAFAEQLDASHHNSCPWRGNSCADSLVQLHLTQSALIGGFKDRCDGLLQFTSLPVIASSAIEHMRLTRSSQIDRLLSQSITFLSGELSYKAESTTGIDIQQDSSCSYSKARKLISLCGWEPRWLPNVQDCEENSTHSAKNADSVEPFFPRFAEHQKNSFSGSAKKDKGKGKRPLKDSGCSMRSPLLDCSFCGSTVKIWDFRSVSRPCRFSPNNIDAPETGKKLALTRGISAASGINEWVTDGMERDPAEGRDEEATNEGKSLSNAGVDLNLTMAGGLPSIQSSIPIASERFNGGLGRDLMIGQPTGSEVGDHATSYESRGPSSRKRNHEEGGSTVDKPQDRLQHADSIEGSVIDRDGEEVDDAAQDSDIPNKRSRGFDLFGSYLPSSSGAGPSRNFCFDPDADAGKFSHARAAGLAAVDRDSMRESSVAAMDTVHSADEDSMESVEYYPGDGNDIDMPSSSAHRNIEMDDVLGLNYSNQAQQSACVQPASGSDGREIGGSSTNEGEEVLDAVTAPAFARDQLSVGISGGSVGMGASHEAEIHGIDVSLQRAESVVGDAEPNTELTETMGHTGESVPGPGLMDEFVPDEVDRQEPHGDSQDMVSQSVGQADSGSKIYGSTKADSVESGEKIGGHAVGHASRMHPSLSCNAGMQTGLDVSKEEVTQAGKLLIAGDVPMGLDYDPQNGLGSILLNLVICFSGATNGENDFESGLPEFDPVKHHNSYCPWVNGTVAAACCSNTESSSSSSPLSGWQLTVDALDTFQSLGQAQNHAMRSDSAASLYMDDHVTPNHKLARRASDYYCKQARFLACGPEGLCFHALCDLFLLPESDHPMSAAQTSGEDDDEVARAAMPLCSFYASTSLPVAKPHSLPSSSSSKPYTATPAPAPTAASASASAAALSLHLPELPSRVKDKILSLELMGVDYGRALALNPALRDAAPESIHAVVTFLQSRGLHFKDLGRVFGMCPSLLTASVRADLRPVFAFLTDDLGIPDTAYRRVVVKCPRVLACSVRDQLRPALLYLRRLGFRDARALAFQDPILLVSSVERTMIPKLGFPEALGMQSDAAVSLELHCPALSTLSIESNS

SEQ ID NO: 199522 - protein, 181 aa, Oryza sativa
  unsure (1)..(181): unsure at all Xaa locations
  Clone ID: PAT_MRT4530_95080C.1.pep
GRPSPPPPPRTPHPLPPPPPHCSRWHSPCHHSLPHQPPPAPPISPSSPASPASPPWHSPPSPPSPASRCRFPWTSPSPPYPSSGPSPXQRPHPQKLSPPPPPTTSWSPSPHQRAPISCPSQPWSGSCRPPRRPSSXSSPPQPRHPSPSSPAAAPPPPPPPPHHHQPAAPSAPRHPSPWASP

SEQ ID NO: 199523 - protein, 302 aa, Oryza sativa
  Clone ID: PAT_MRT4530_95081C.1.pep
MASDGDTVAKLAQLSGANLVCHLQTTNRMADYKVAAHVLGERERRAAETEACLQAKIDVLQMKCDLLAKEGAYSEGGKKTNIDSNKNEQPPSMGLISTGGSPIAPALVATSCASVPDMSPHLVEESNKGNIEMQNQLSHLHLNNLMNQLSFDAWMEESGGPFMSEQVPFSLVLPSSSKSASLLSKIETSLWESEENMVIRFMENVELCMGAICALYRQKKLMVESTCEERTKFTSLNESQAYRATQLAEFLLDGDINGPMKKNKEDLVNHDATGPKFIQEYAIQCSKQLFDIYRNKEDLYFC

SEQ ID NO: 199524 - protein, 482 aa, Oryza sativa
  Clone ID: PAT_MRT4530_95082C.1.pep
MARWPRPALLLLLVAVLLLSHIALCSSAAASGKPKGKGVGGRKALLADDGGEEEEVVVVPPPVKKAKGAAAAVGKIKKKVVGVDGKNQTKVVKGKKSEPAGAVKATKKLSAAAAAKASADAAVVKAKVPKTDKAATAKSKGTDTAKPAKVAKAGSAKAVKPVKPVKTAKSESVVAAKAKKASNSTVDGGAKQAKSSKKAAQAVVDGEASGGKVNATASNEAAEVEEDVVFAEAAEGTDDLISEFKGLPARLQETLMPDLARLSHSSKLYLSAANAGIADGVRPILGGRWAAAAASAASIALLLLPLFMLTALVRRMAPYLPLLHRALLLAQAYLAIYFATLALAAAATGLEPLRFFHAASPAAYAWTQAAQSLGFMGYLMLQMVDLVAVFSGAASPEEDGNGDATKALGLAQMVVGLAVGLHYYAAVFHRAAAGEAPRANWRVYAVYAACFVVVCACARAERRKKAYLAGGTDGGAEEWKKS

SEQ ID NO: 199525 - protein, 112 aa, Oryza sativa
  Clone ID: PAT_MRT4530_95083C.1.pep
LLPPKTEQLERESLCLSAAQVLAAGRKDDDRRHRRLSRGCLDLLFVPLSPLSAGSIPLKFSRFHAVDVRERGPRHRCSGASPERRRGSRRRSRQIRWISGRGVAPRELPRCQ

SEQ ID NO: 199526 - protein, 104 aa, Oryza sativa
  Clone ID: PAT_MRT4530_95084C.1.pep
VDLISSESSKLKPAAMDLMEKSRRANFLFDDNDDGDEDQNEQTNGEANREVMRTPVNRAGEKNNNENFTTRGLPNVTSKDRSSGLLASLLCCCGPRRVCLGRRS

SEQ ID NO: 199527 - protein, 208 aa, Oryza sativa
  Clone ID: PAT_MRT4530_95085C.1.pep
MGVHTKSMSWYMGTPASPSPGSAGEAQHALSSGGGGGSDASFDTNMVIILAALLFALLFALGLNSLARLIIRWARRAATGEGAGGGVEGAGAGGGLKKRALRSIPIEVYGGGGGGSPAAAAEVCAICLGEFADGEKVRVLPRCGHGFHVRCVDTWLVSHDSCPTCRGSVLHGATTKHKPTAAAAAAGSRRPGSEVDAPAAAAVTVVIA

SEQ ID NO: 199528 - protein, 86 aa, Oryza sativa
  Clone ID: PAT_MRT4530_95086C.1.pep
RQGNREVPQRFTTPFLPLWSQVTEVPNPSPPTPLIFPAAHASRPRPTLAQPPPAAPSPNRLTGVARRATPGAHARTRGSTGNPDGT

SEQ ID NO: 199529 - protein, 525 aa, Oryza sativa
  Clone ID: PAT_MRT4530_95087C.1.pep
MASSASAAALLPLPSPSCSSSEDSDDGKHLPSPPAPEANTPPTQQQKRRRLERDYNVAMKALALAGDLDEVVAVFAELKRTAADGGDGGAPPNVLCYNTLVNALAEAGREGEALKAFDEMLASGVAPNASSQNILIKMHARRSEFDLAWELIHKSGVEPDVGKIVEAWGVLDWMLEKNCRPMVQTYTPIVQAYCRDGRIVEAKLLMAEMERLGCLPNVVTYNVLIRALCDDDKFDEVEQVLMESSTKDWKPSTVTYNIYMNGLCKKGKAKEALELLDVMLGEGLEPTAYTWSILLNCLCHSSRLLDAIYLLERSTELKWYAGVVAYNTVMSSLCEMGKWRGIMKLLTDMIKKGIEPNTRTFNILIRSLCVGGKSSLAKSLIHSLGFAANVVTYNILLHWFYYHGKLTEANRLISVMEEKNIAPDEVTYTIIIDGLCRERKFDAATACFLKSLTSGLSMDVLTVLLNRLVYADKIWEINRIFDGKDFVPDHHVFDLTIRTFCRVGYCHYRTFYKLNLILDAMLKRK

SEQ ID NO: 199530 - protein, 830 aa, Oryza sativa
  Clone ID: PAT_MRT4530_95088C.1.pep
LEVVRGILSESFDDQSRLGALVYSAIYLKWIYTGQISCFEDGGHHRPNKHAEISRQIFRELEMMYYGKTTSAKQEIKHTIQNKLHRNAGPEDLIATEVMLARITKTPGEYSETFVEQFTIFYSELKDFFNAGSLFEQLESIKESLNESGLEVLSSFVETKRSLDQVDHAEDLDKNDTIQILMTTLQSLSSLRSVLMKGLESGLRNDAPDNAIAMRQKWRLCEISLEDYSFVLLSRFINTLEALGGSASLAKDVARNTTLWDTTLDALVIGINQVSFSGWKTDECIAIGNEILSWKQKGLSESEGCEDGKYIWSLRLKATLDRARRLTEEYSEALLSIFPEKVMVIGKALGIPDNSVSKLCTVLQKAIREVLGSTGWDVLVPGVAHGTLMRVERILPGSLPSSVKEPVVLIVDKADGDEEVKAAGDNIVGVILLQELPHLSHLGVRARQENVVFVTCEYDDTVTDVYLLEGKYISCSYLFFIPWALPQQKSKSGVNGSFAALELSEASVESAGAKAAACRTLSVLASLSNKVYSDQGVPAAFRVPSGAVIPFGSMEDALKKSGSLESFTSLLEKIETAKVENGEVDSLALELQAIISHLSPPEETIIFLKRIFPQDVRLIVRSSANVEDLAGMSAAGLYDSIPNVSLMDPCAFGAAVGKVWASLYTRRAILSRRAAGVYQRDATMAVLVQEILQPDLSFVLHTVCPADHDPKVVQAEVAPGLGETLASGTRGTPWRLSCNKFDGKVATLAFSNFSEEMVVHNSGPANGEVIRLTVDYSKKPLSVDTTFRKQFGQRLAAIGQYLEQKFGSAQDVEGCLVGKDIFIVQSRPQP

SEQ ID NO: 199531 - protein, 296 aa, Oryza sativa
  unsure (1)..(296): unsure at all Xaa locations
  Clone ID: PAT_MRT4530_95089C.1.pep
VSLSTRPGKYIWSLRLKATLDRARRLTEEYSEALLSIFPEKVMVIGKALGIPDNSVRTYTEAEIRAGIVFQVSKLCTVLQKAIREVLGSTGWDVLVPGVAHGTLMRVERILPGSLPSSVKEPVVLIVDKADGDEEVKAAGDNIVGVILLQELPHLSHLGVRARQENVVFVTCEYDDTVTDVYLLEGKYIRLEASSINVNLSIVSEKNDNAVSTEPNSTGNPFQQKLQNEFSLPSDIEMPLQMSKQKSKSGVNGSCAALEXSEASVESAGAKAAACRTLSVLASLXNKVYSDQRVPA

SEQ ID NO: 199532 - protein, 53 aa, Oryza sativa
  unsure (1)..(53): unsure at all Xaa locations
  Clone ID: PAT_MRT4530_9508C.1.pep
GGGPAAGRPCGRAVSGGEVEKGRXGVVRRRRVSRLPCRPCPGSDAGAPKQKKF

SEQ ID NO: 199533 - protein, 46 aa, Oryza sativa
  Clone ID: PAT_MRT4530_95090C.1.pep
PLSGFIRHVHFCLISIIYSQLIRITMCPSHLNFNQSSFVGKSHSII

SEQ ID NO: 199534 - protein, 264 aa, Oryza sativa
  unsure (1)..(264): unsure at all Xaa locations
  Clone ID: PAT_MRT4530_95091C.1.pep
FTSLLEKIETAKVENGEVDSLALELQAIISHLSPPEETIIFLKRIFPQDVRLIVRSSANVEDLAGMSAAGLYDSIPNVSLMDPCAFGAAVGKVWASLYTRRAILSRRAVGVYQRDATMAVLVQEILQPDLSFVLYTVCPADHDXRFVQAEVAPGLGETLALGTRGTPWRLSCNKFDGKVATLAFSNFSEEMVVHNSGPANGEVIRLTVDYSKKPLSVDTTFRKQFGQRLAAIGQYLEQKFGSAQDVEGCLVGKDIFIVQSRPQP

SEQ ID NO: 199535 - protein, 99 aa, Oryza sativa
  Clone ID: PAT_MRT4530_95092C.1.pep
MAELHYEGVVPRNPVKNSNYLLRSTSAGSANDIGFVIPYCFCGCSATAAAAAALQAAMEAPHKRARKPIPQQNQPHWRNPNQRAQIGDSATEPISLEEP

SEQ ID NO: 199536 - protein, 73 aa, Oryza sativa
  Clone ID: PAT_MRT4530_95093C.1.pep
TRPDPIGEGLAMEAMVEAAGGECIVPGQQAPLRLLGLKVRTDLSIAVYFCNPPGSRMSAREPLVKLNVIRGYL

SEQ ID NO: 199537 - protein, 469 aa, Oryza sativa
  Clone ID: PAT_MRT4530_95094C.1.pep
MSPTPRPHFLVLTFPLQGHIAPALRLARRLLAAAPDALVTFSTAAAAHRRMFAEGEGGDGDGRLELLPFSDGTENGFVKRGDAAELGAYMASFHASGRRSVGEMVDALAARGRPVSSVVYTLLLPWAADVARDRGVPSALYWIQPVAVLAIYCHYFHGLGGVVDEHRRDHSFVLEFPGLPPMAAGDLPSFLTEATDPSDYFHSIFTTFRDLFDALDRETPKATVLVNVFQELEADTLAAVGAYDVLPIGPVLPSGDDAALFKQNDAKYMEWLDTKPAGSVVYVAFGSLTVMAKGQVDELLHGLEESGRPYLCVVRKDNKAAVAETGDATAAAAARRNGVVVEWCDQVRVLSHAAVGCFVTHCGWNSVLESIASGVPMVGVPRMSDQQMNARLVERDWRVGVRAEVDGGDGVLRAAELRRRVEEVMGDGEAAEVRRSAAAWKRAVAEALGKGGSSDRNLTAFVEGARSVI

SEQ ID NO: 199538 - protein, 358 aa, Oryza sativa
  unsure (1)..(358): unsure at all Xaa locations
  Clone ID: PAT_MRT4530_95095C.1.pep
YIASTWIWGYHHYTAKGCVGWEPKTWAQXGRGPGADRPTEEGNXEREAAKLGKRERGKEREGGGERGKKNRGQGADGGEPEERHGARERQGGEERTPRREPAAGRGGTNQRKRRGTAAEPEPTGEARARAEKTGGRDRSASDAGRTKKAAGRHEGGGGDAGRGQTAERGSEDRERTPRQQAEAREDPGADGARTTRRPAATAGXRPSRERAHRGGDESGXSRGQEPAAEEQGEAQHSRKDRESGXARHAHRATRGQSTNAGRHGHGTHRNEERGEEGDKPTRGKKTRARQGDGREARDAERRGDARASHQHTTREPTHPHAKDRRTPQPQTATEPTDQRAGGREREASRERRGQRRAE

SEQ ID NO: 199539 - protein, 111 aa, Oryza sativa
  Clone ID: PAT_MRT4530_95096C.1.pep
MEAMDKLVQLAESMCQAASLLLGDNDPSDESSPRRPSTFLNAVALGNVWWSRPPSASPHAPTALDAIDEAVGKLKSVLDNGEGDLDEAALRAEELMAPLESHCGGWWRRLQ

SEQ ID NO: 199540 - protein, 42 aa, Oryza sativa
  Clone ID: PAT_MRT4530_95097C.1.pep
FCICCDICETWFHVKCVRISPARMERIKHFKCPGCSNKSTRE

SEQ ID NO: 199541 - protein, 116 aa, Oryza sativa
  Clone ID: PAT_MRT4530_95098C.1.pep
MERGCNGNGGVKVTFIETQFVTSDAAGFKSLVQRLTGNDAAVATAPSLESPRPCRRGVDGWRGAEATVGVGLPAAPAPWMDEIEMMMLYETCDLADMLCVDVAAGGGGCHGGGGRR

SEQ ID NO: 199542 - protein, 854 aa, Oryza sativa
  Clone ID: PAT_MRT4530_95099C.1.pep
MESSPPPPPQMRVRVMETVHLRPPPADDAASFALSGLDTDRNVLDVTFRTLRFFPPPSLELDPLAVLPRAFAAALGMFVPLAGRIGDGGRVVWSAADAVPLVLAAADDVSVADVDTDSPGSDLLERLVPGDGDGDGVAGSPALALQVTRFACGGVALGMRVAHALCDGAGATKFLSAAARFARGAQEPAAVAPVWEREDRLGPRRPPRVVKPFERVLSLDDAAAAVHGPYGAAGDAQGQIARECFHVSDARVEELRAQLAGEAGIKLTTFEFLAAFIWRARTKARRTSPDEVVKMVYSMNISKLLTPPLPDGYWGNVCVPVYVALTAGELVAQPLADTAAMVKKSKQEVDDEYVRSYIDFHELHRGGGVTAGRGVSAFTDWRRLGHSEVDFGWGSPAAVLPLSWRLLGSTEPCFFVPYGAADERRRRGFKVFVAVPAMATHCFREEMQELSLQRHCLRSKEKLGEDDNEVDSWVKKESEWEEAGDGEEDDYSDETEYDDDDDESSDEDNDYFSMENRDVRFASEEKWESQIMEQMKFSVSTADPFDIRTIWKGSLHVDGPCQSLDPNLLSMNNFMPQLPLRMKKKNNEEPCRRAIQVFGLTVSSPDNVVQEIYGMFAFRDIRNSQERNFIFEYPRDRPFTLKPGSDKVQPLIQPPRGIYAIGPVVMEYHLMIKGQEEQEDRVLVDGYSIYCPSFYKERSRFHWHIDTGHCGAIDLKMAAVPNAVLATVEIEVIRLGGTHYDSLAIVVALSIIKGMYLVFDGKVSVGKLLPFTVCINREMHLKLFVYGYSSSQIGHGDCSPDGVVSDYDNDGFFSASEDVYYDVLNFIPQFGTYKKMSHNLEDMDVSVTVFGVDQ

SEQ ID NO: 199543 - protein, 542 aa, Oryza sativa
  Clone ID: PAT_MRT4530_9509C.1.pep
MAALVQVVAVALALWCCGAAVVASAAASSPPLVSPKAKPGVRPKLPPKTKLTTITFSPHHKRDYQVTCTNTGRRPCVVSCPSNCPNKCLVACAYCLTFCMCDLFPGTSCGDPRFTGADGNTFYFHGKKEQDFCIVSDADLHINAHFIGNHNPAMKRDFTWIQSLGISFGDHRLYIGARRAAEWDDDEDHVQITFDGEPVNVDAAKGAHWVSAALPSLSVSRTDTVNAVAVELDGVFAITANAVPITDDDSRIHHYGKTAKDTLVHLDLGYKFHALSGDVDGVLGQTYRPTYANRLNITAKMPIMGGADKYRSSGLFSPDCAVSRFHRRRTAGDHVALGFASRGEARRRYSGCSGEARRLRGLRWRPTSERASKTRRRRGEAGELHRVEREESGWPRSSARSSQVGGPEEAVARRLPPSPISSPRRKTPQFRSAGRCALACRPAPPLCSALHHALANRRALARRLRPPPHTRPPPLCSAGRRALARRLRRPPLSPTCRRQSISSVHGVLVAQRAVGLVRQRSRRAWTARPRRPTRRPRRAGTT

SEQ ID NO: 199544 - protein, 87 aa, Oryza sativa
  Clone ID: PAT_MRT4530_950C.1.pep
MVHWEVGAHGSPLFLSPSYSNRRQRMARAKSATLPPSLTSYIFVSDLSTIGYASISNGCTSHGHVEGKGRDGWWRSGGGGGWPWWPG

SEQ ID NO: 199545 - protein, 75 aa, Oryza sativa
  Clone ID: PAT_MRT4530_95100C.1.pep
MMVVVHDRLVSILLEVWQTEYVFFINLANGNGMSESLFEMMNAFHDICRKDIKFKTSHYYLNFLSSSYQVYIAVA

SEQ ID NO: 199546 - protein, 136 aa, Oryza sativa
  unsure (1)..(136): unsure at all Xaa locations
  Clone ID: PAT_MRT4530_95101C.1.pep
KSFFPSLPKKKDLVPPVFSVGPFFFFFWKRVKLRPXKTIFFFFKNTFPPPAVFLSPIFGGNKGWGGFLSLAPSGGNPFGVLLGGQQYRFPLLLINPSHQGFFFFFPRGQFFNFYCGNAQILSVVFNIYTLLFYTPQ

SEQ ID NO: 199547 - protein, 537 aa, Oryza sativa
  unsure (1)..(537): unsure at all Xaa locations
  Clone ID: PAT_MRT4530_95102C.1.pep
MAVSLLAAALSSAGAMGNLVVYLVKEYHVPSVDAAQISTIVSGCISVAPVAGAIVADAFFGCFPVVAVAMVFSVLALVVFTLTASVRGLRPAACVPGATACEAATAGQMAVLYAGVFLLCVSSGGXRFNQATMGADQFDAAADRDVFFNXYFIFFYGSAVLGSTVLVYVQDAVSWELGFGLAATIAAAGLAALLLGARYYRRPAARGSPFTGIARVVVAAARKRKIDVAAAAAASGDLKFYYGPRSGDGDDDGGKPSDDNXFRFLNRAAVITDGDVDAADAAAPLRPWRVCTVRQVEDLKAVLRILPLWSSSIFLSISIGVQLNFTVLQALAMDRAIGRFHVPAASMVVSSFVAVVVSLGLIDRALLPLWRALTGGRRAPTPLQRIGVGHVLTVLSMAASAAVERRRLATVRAHGEAARDDPAWVSPLPAAWLVLPFALSGAGEAFHFPAQVTLYYQEFPPSLKNTASGMVAMIVALGFYLSTALVDAVRRATAWLPDNMNASRLENLYWLLAVLVAINFGYYLACAKLYKYQNFGK

SEQ ID NO: 199548 - protein, 630 aa, Oryza sativa
  Clone ID: PAT_MRT4530_95104C.1.pep
MEALRAWRASSNLLGFAASRAAKAAPAARPLRPHVRCCSPAAASTTKPPPPPPQDRRRRSASSSSSSTSDRESIRAIRLKKVEELRGKGYEPYAYKWDRTHTTKELQDGYTHLENGEVCADVAVSIAGRIVARRAFGKLVFMTVRDDSGTIQLYCEKDSLTEEQFEQLKTIIDIGDIIGANGSIKKTEKGELSVYVKNFEILTKSLLPLPDKYHGLTDVDKRYRQRYVDMIANPEVADVFRTRAKAVSEIRKTMESFGFIEVETPVLQVVGGLEKVYEIGRIFRNEGISTRHNPEFTTIEMYEAYSDYESMMNLAEEIVTRCAMATHGKLRVDYQEYTVRSTQCEASRPGVEMESATAKAIGRKKGVKTPPVPWLVLTDAISYGHCQCQWLAMGTEISLERPWRRETMHSLVKEATGIDFNSFGEDLESAKNAARGIKTESNENISLQACSSVGHVLNEVFETVVESSLVQPTFVLDYPVEISPLAKPHRRYAGLTERFELFICGREIGNAFSELTDPIDQLVFGGFDKLEMQRPDLVNMQKRGRFENQIKQHNAKRAAMTKEVKSTEGKHEEDDFSYEVTLDEDFLTSLEYGMPPASGMGLGIDRLVMLLTNSASIRDVIAFPVLKIQQ

SEQ ID NO: 199549 - protein, 401 aa, Oryza sativa
  Clone ID: PAT_MRT4530_95105C.1.pep
MLSDQELARYVESFVRQAAAVPGAVAAAGGISAESVARQLGPQLGLDLTPKAPLIRDILLALFSPPPQGAPFTSSAPSPSASASASASAAAAGHFFSQQQQQQQLQTFLTASQQYQHRGGAGAAAAPPSAYGVAAAAAGYRYGQPFPQDEGAHLQRLVQMHHHQQQQQQQQQQQMAAAAAGVAAAPPTAVESPRPAAASKKESASTGVKRRGGPGGLNKVCGVSPELQAIVGEPTMARTEIVKQLWAYIRRNNLQDPNNKRKIICNDELRLVFETDSTDMFKMNKLLAKHIRPLEAKMLKILAEDSNRDSKKLKPVDSEPISPAETDVNQLPIILSDALASFFGTGEKEMPSSEAVKRVWDHIKSNNLEDPANPTMILCDSKLKQLFGCESLTAMNRLTGL

SEQ ID NO: 199550 - protein, 139 aa, Oryza sativa
  Clone ID: PAT_MRT4530_95106C.1.pep
LATEATRRWWRPPEAGRCLAEVAAAAPSPPPDPAEGEAAVSSGRPVVAAGSRGRRLPRPPLRQIRWKGRRRSPAAARRWRRARKAGDCLANAVATRWRLPGGGGGYRALPSTTSGGRGSGGLPTKAAAAAVAALLHHRH

SEQ ID NO: 199551 - protein, 122 aa, Oryza sativa
  Clone ID: PAT_MRT4530_95107C.1.pep
PLPLGPPQCFPPALAVGAWAGCGPYLVHSLGKGSPPATFMCAAYGARAPAMFQAAAGRYASAPLWLFLPDCAGHPSSYLGWTRPSSFDWGGPASPFLSLLGSCPPPVLFLWLIMIVLWFLVL

SEQ ID NO: 199552 - protein, 511 aa, Oryza sativa
  unsure (1)..(511): unsure at all Xaa locations
  Clone ID: PAT_MRT4530_95108C.1.pep
MICIFIQDEPRDMEEMVNTIRVMLRTMGDGEISASAYDTAWVALVKNHNGSDSPQFPSTIDWISHNQLPDGSWGDDLCFLVHDRLLNTLACVIALMEWKVHGDKREKGLSFIRENIWRLAQEEEAWMPVGFEITFPSLLEIAKDLALDIPYDDPALHKIYAQRELKLKKIPREILHSLPTSLLLSIEGLRGLDWKRLLKLQLSDGSFLSSPAATAYVLMQTGDKKCLEFLDGIVSKFHGGVPFLYPIEIFERVWAVDRLERLGISYYFKTEIDEYCLEYTFRHWTKEGVTYNWHSSVKDIDTGSMAFRLLRLHGYSVSPSKQQATXCFCYFSTDAVGGCYNKNKFASFFYQPPSANSQTYEIYXAEYLNQKKIVEFSKDRLIVLINVDTXIGYALDFPWKASLPRVETRMYLEQYGAGRDVWIGKSLYRLPLVNNDLYHNMAKADFKCFQRRCQLEWHGINKWYAENDLEVYGVTHKSALTAFFLAAANIFEPNRADERLQWRIQDLIFSA

SEQ ID NO: 199553 - protein, 547 aa, Oryza sativa
  Clone ID: PAT_MRT4530_95109C.1.pep
MESSAAENWWVLPLTFLPPISGQNESAATLSAMATSFVYLAIFACLAWAGTALLYWAHPGGPAWGKYRRARGQSPRCSIPGPKGLPVVGSLGLMSGLAHCSLAAEAARRPGAKRLMALSLGPVRAVVTSHPDVAKEILDNPAFADRPLNHAAYGLMFHRSIGFAEHGPYWRALRRVAAGHLFGPRQVDAFAPYRARVAGGVVAALRGAGGEAAVQVRGVLRRASLYYIMRFVFGKEYDVSRGAPESGEEVEELLEMVHEGYDLLGKENWCDYFPGLAAVDPQGVGARCAELMPRVNRFVRGIIQEHRGKAIAGGEARDFVDILLSLQESEGLADADIAAVLWEMIFRGTDAMAVLMEWTLARVVLHPDVQANVHRELDAVVGRSNTVAESAVPSLPYLQALLKEALRMHPPGPLLSWRHRAISDTYVDGHLVPAGTTAMVNQWAMSRDADVWDAPLEFQPERFLPGGKAHGVSVLGADGRLVPFGSGRRSCPGKSLAMTTVTAWMATLLHEFEWTPASGAVDLSEVLRLSCEMAVPLEVRVSARRNV

SEQ ID NO: 199554 - protein, 40 aa, Oryza sativa
  Clone ID: PAT_MRT4530_9510C.1.pep
MKLTRLFPKFESLRDILSVEELTKSRVRSDLHKLLPANHK

SEQ ID NO: 199555 - protein, 733 aa, Oryza sativa
  Clone ID: PAT_MRT4530_95110C.1.pep
MPPPPPRRALLAPLLRLRAFSSSSSSLAHHPPLPPPPRRHQFVAADAITGQGGGGNPLDPAQLLRDDPVAITASLWVSSFRPQPTAAAPPPPSLSPFLSRLELWVLAYQKAYADETGSYLPRSSIPASTLSSLLALRNAVLDARFRFGNRLTPFLRSPRAAAAAQDPATLSKRKLRALLTTPGPAPFQDRVVQELLLLLLEPVYEARFSPKSFAFRPGRSPHAAIRTIRRSFAPYLWYIKGDLSPLLHSPDPALVVGALIRDVRDKKVVDLVRSALLTPPVTARPGDEDAAKKKKKRKYQKKKVLPEGEPKPDPYWLQTFFGFAPEEALTQPDWGHCGVLSPLLANVCLDELDKWMEEKIKELYRPSKSDVVGGEDGVEQGNTSWPEFVPTSGPDKTRKVDYIRFGGHFLIGVRGPRADAAVLRKQLVEFCDQRFRIKLDNESLPIEHITKGIMFLDHVLCRRVVYPTLRYTATGGKIISEKGVGTLLSVTASLKQCIKQFRKLEFLKGDREPDPQPCFRMFHATQAHTNAQMNKLLLTMAEWYRYADNRKKVVNFCSYIIRGSLAKLYAAKYKLRSRAKVYKIASRNLSRPLKDKKGQSPEYHNLLRMGLVDSIDGLQYTRMSMVPDPDYTPLPSGWRPDHEKILLEYIKLTDQQTLDEQRSCIREEGLITPQDYISMLVWSYKKNAVLLPSFKENDHKGSTEDLGSDTDELGDEEIGNLDHVDSPKVAEMP

SEQ ID NO: 199556 - protein, 120 aa, Oryza sativa
  unsure (1)..(120): unsure at all Xaa locations
  Clone ID: PAT_MRT4530_95111C.1.pep
MGKEKTHINIVVIGHVDSGKSTTTGHLIYKLGGIDKRVIERFEKEAAEMNKRSFXSAWVLDKLXAXRXRGXTXXXALWXFXTPLFXCXVXXAPGXRXFXLILVSGPSLAGCAVLVLGVPA

SEQ ID NO: 199557 - protein, 55 aa, Oryza sativa
  Clone ID: PAT_MRT4530_95112C.1.pep
NSIVGLVQVEIVMGLEEEFHISVEESSAQSIATVEDAAALIDKLVEQKSAEAKSS

SEQ ID NO: 199558 - protein, 581 aa, Oryza sativa
  Clone ID: PAT_MRT4530_95113C.1.pep
KRKKKKSEVVPEVQPAMDAMEYAECEATVKSYPPFIEAMKRRGVDDMELVMVDAWCAGYYSDADAPSRRLGKPLIFCRTDSDSPMENGYARPVEGIHVIVDMQNNVVIEFEDRKLVPLPPPDHLRNYTPGETRGGVDRSDLKPLIINQPEGPSFRINGYFVEWQKWNFRIGFTPKEGLVIYSVAYVDGSRGRRPIAHRLSFVEMVVPYGDPNEPHYRKNAFDAGEDGLGKNAHSLKRGCDCLGFIKYFDAHFTNFTGGVETIENCVCLHEEDHGILWKHQDWRTGLAEVRRSRRLTVSFICTVANYEYGFYWHFYQDGKIEAEVKLTGILSLGALMPGESRKYGTTIAPGLYAPVHQHFFVARMDMAVDCKPNEAHNQVVEVNVKVENAGTHNVHNNAFYAEEKLLKSELQAMRDCDPSSARHWIVRNTRAVNRTGQPTGYRLVPGSNCLPLALPEAKFLRRAGFLKHNLWVTQYKSDEVFPGGEFPNQNPRIHEGLATWVKKDRPLEETDIVLWYVFGLTHIPRLEDWPVMPVERIGFMLMPHGFFNCSPAVDVPPGSSDADIKEAESPKAIQNGLISKL

SEQ ID NO: 199559 - protein, 436 aa, Oryza sativa
  unsure (1)..(436): unsure at all Xaa locations
  Clone ID: PAT_MRT4530_95114C.1.pep
MTAEMEAIEYNKTWSLADLPPGRHAIGLKWVLKEKRDKQRPVSKHKVHLVVKGYTQRQGIDYDELFALVARLDSVRMLIALAVHEGWEIHXMDVKSAFLNGDLXGRDVLLPSLGFKRSSSEHVVYVRRNSNAQLVVGVYVDDLVITGSNCDDIRLFKKKMAAAFKTSDLGLLHYYLGIEVKQSTSGISLSQGVDAAKIPEKSGMEGCNPCQVPMEARLKLSKFSSEPSVDATIYRSIGESLRYLVNTRPDLAFAVGYVSRFLEDPREDHLAVVKHILRYVAGSKNWGVWFSRKVEKEAHLRXKSTTGVIFLLGSSPITWQSMKQKVRAQSSXAALWLARFLVEVQGSALRTPMLRVDNRSSISLTKNPLLHGQSKHIQVKNHLVWEAAENGLINVEFIKSEEQLGDILTKPLGKTKFHELCSKIGLINISSEHNKA

SEQ ID NO: 199560 - protein, 38 aa, Oryza sativa
  Clone ID: PAT_MRT4530_95115C.1.pep
SAIFPRIHVKDPYQRLGISREASEEEIRAARNFPCFPY

SEQ ID NO: 199561 - protein, 129 aa, Oryza sativa
  Clone ID: PAT_MRT4530_95116C.1.pep
MVDEACASASSSVAGLGEVDLDLGNDDRRCDNDDFCDLGFHQDVAGKEWISYADRHPPMKSFPRSPGGGAFNPIACSEQQPSRGKGRRGGVGDRGMQGREAGGLTTKGKAATVGAREASHCRGARKPGH

SEQ ID NO: 199562 - protein, 128 aa, Oryza sativa
  unsure (1)..(128): unsure at all Xaa locations
  Clone ID: PAT_MRT4530_95117C.1.pep
MIAPLTLPSTEGSSLEDTPYKGVRLTAEQRKEKISRYIKKRNERNFSKKIKYACRKTLADSRPRXPGRFAKNDELCEATRSSSQDFDQYEHVVGMKGEDMLDSSNILAHLSGMNPYGYKYNSTVESWI

SEQ ID NO: 199563 - protein, 131 aa, Oryza sativa
  unsure (1)..(131): unsure at all Xaa locations
  Clone ID: PAT_MRT4530_95118C.1.pep
SPRTSVQAGCIVDPIILSASRGVSSSTILEPYIPCLGPNPPIPLIVQVFITVVRNQIGSPGKKEXRCSPSAVCPGCFLRCVVPSVAWAVPRRQXKACGGEXRLMCFLAPXKAPPFMTRSQNXQAHFLSLLF

SEQ ID NO: 199564 - protein, 477 aa, Oryza sativa
  Clone ID: PAT_MRT4530_95119C.1.pep
MKKKSAPTPLPPETANTSPAPIGATAGIRVENCYVFKSRLQEYAQKAGLQTPEYHTSKEGPSHEPVFKSTVVINNTSYGSLPGFSNRKAAEQSAAEVALMEIGKSIPANANIPAVQETGLCKNLLQEYAQKMNYAIPSYICTKSASGLAPFICTVEIWWEYKYIGAAARTKKDAEIKAARTALLAIQGQSEGSANGATKYIVVPGKRVGKEVEKRPIETPKPLKVKKGGFKKKWNKRKFMKKDGQAVDVEKDEARVAGDAHDSDVLMQPTVITQEASCGTLFLQPCEEAKRVEAEPPRDIEMVQPDKENQHCDAALVQPDDEARVEQEPSRDISVVPPNEEAISGKQEPSIDAAILQPKEEASSVKQEPFIDTAMLQACKEAGSVELGPARDTVISQLNEQDRAVKQEPAGDTAVPQPDVHARVVKEESPRTEPNGEATNMKETPKNSAVCNSPETKDFGDITAMGSDPPATNMSEE

SEQ ID NO: 199565 - protein, 207 aa, Oryza sativa
  Clone ID: PAT_MRT4530_9511C.1.pep
MEPSERNCWFPELVLLKLLLPWAPRIRWPAGQPHGHTAGVVTSSRSAHLSWRTFVSEPARVVTPERLFAKWTRKSSPGPPVGGVRASHALRRGIGSSEFGVDNPAPRIGCSSQLLDLNDDIDCDGLRVVAAVGASVSQICGIFFFAKILVSTCQQKLKMPDCEKQLYIDIDDKVDILKKKHPRYNMIISTPYEHSVYSKIITLRDIY

SEQ ID NO: 199566 - protein, 491 aa, Oryza sativa
  Clone ID: PAT_MRT4530_95120C.1.pep
MAGWISSKLKAAETLLHQASPPPPIDQQAAESLGKSPSASDLTALHASSSSSAADALLDAPTRRQPPVAPPPSLGLRLAARRPNLPPPPAPAPASPAPRRSASATAVLAAQDRAAGAAVGGVAEAKVGGDREEDKGGGSESGSGSDEDDSDGSGSDDSEDSEEERRREEERRRRRAERLAAMAARAIAEREEAVAKLEGEKASLEKLLAEREKEQAQEASELQNSMIETMEAVEMEKQRHHSTRMEALARLAKLEVTNAELAKSLAREQWNLDLQVDQVAQLREEVDMKTLTQDKYKRKIAKMQKTSPLLVNEIESLRRFKLEEEMIDAEYALTCDRIVNLKDKDLSFFVLLVIIVLCLSMARKIKENIELTKRRMVHPTEVEIELKKRLDQLTDRLIQKQMQVESLSSEKAALLLRIEAVSRSLDNNGSSSLAYSSSSSKIDIEAGTWQESHPPRLRDRIRNGTAATGDRQSDSCDSMLLRWPYLRVPES

SEQ ID NO: 199567 - protein, 101 aa, Oryza sativa
  Clone ID: PAT_MRT4530_95121C.1.pep
SPVKLSTNVLGTSQPFLWCSCRSCSIFGDFWSGIQTQVTELGQHFLNQGLAAVLGGLGSLGSRGIGDIFSSLSSSIATAVAGAQVLLLVLSVVFNSRITNP

SEQ ID NO: 199568 - protein, 85 aa, Oryza sativa
  Clone ID: PAT_MRT4530_95122C.1.pep
AAAPLLSAPPPPPPPPPPPVPATSSPPPPPPPSASAAPSPSAAEPGAVHLGMPEPPPVCDDGECEMVPVELRTPDALLHLTRTPP

SEQ ID NO: 199569 - protein, 49 aa, Oryza sativa
  Clone ID: PAT_MRT4530_95123C.1.pep
PNFGGPGEPFAGGLAPEVVGARIIFGGLKWGCYPKGGSPHFGGLKKRAP

SEQ ID NO: 199570 - protein, 595 aa, Oryza sativa
  unsure (1)..(595): unsure at all Xaa locations
  Clone ID: PAT_MRT4530_95124C.1.pep
EIERYLLHAQSRSPLALPNYSSVRLPYGDPSITAAKFYTSSPTAATSLDEDYFSSLATKYPWFLSMKDKHQTSTGSADIHKTRNLYVTGHLDGTIRFWDASCPLLLQNLMIKQQNEENSPSGTPITSLQFDMSSSILICGDRSGTVRIITFRKDSSDNIFSFLHAKQGESYNVRCIKLKGAVTSISLISNSKRVAVGTEKGIVSVVSIEDASILYQKQLECRVSGGIASLQFEMYSHNGYDKDLLLARGEDSTIYILEEETGKLLNTNPVQTNKPSRALLMQTLELSPDDPSVSDTHDTVSKESLLLLCTENAIRLFSLSHAIQGTKNIINKKKPNGSCCFASLIHSVSSETGLLLVFSNGKIEIRSLPDLSILKEASLRGFSYTRNLNSSSSIACSSDGEIILVNGEETFFFSTLCQNDIYRHVDSINTIYRKDNSPRGRIFLCSXSPPKKKKKGIFGMIMKDTKASKGHQGDANGDEQFTATTSEELSSIFSCANFAPVSEKRNSSIKDDENIELDIDDINIDDNPQKQKGPHFPGLSKQKISKGFQSLREKLKPRTEEKVNSGNRKPEDDTSVSQVDQIKMKYGYATNDDPT

SEQ ID NO: 199571 - protein, 215 aa, Oryza sativa
  Clone ID: PAT_MRT4530_95125C.1.pep
MTKVHPNVAVVAPAVVEEEKGEAVSLTVWRRSLLFNGKGFTVFDGKGNLVFRVESYAGGSPREVVLMDADGRALLTIRRKKLSFADEWLIYDGDAASPAAPGPKRFTARRHVSLRPTKSLAHLSPARASSSAAAGGGSATAPSGACRYDVEGSYAARCLDVFASASAGEQRRRVAAVCSKEAAVGPDVFRLVVEPGFEPALAMAVVILLDQMHAS

SEQ ID NO: 199572 - protein, 51 aa, Oryza sativa
  Clone ID: PAT_MRT4530_95126C.1.pep
GRLCLVDFNFLTSMFLVRICFFFFFSFSSLSMACSICFARSRGFVRTGVVS

SEQ ID NO: 199573 - protein, 97 aa, Oryza sativa
  Clone ID: PAT_MRT4530_95127C.1.pep
MEMKESRVASFVDRLRHRHCAPSPVARCASRSCHHPSKRSCASVPAPARSRHQPTAPIPLSPLATTKNNNKSISECVSTASVWITAHIAALLCSGDS

SEQ ID NO: 199574 - protein, 291 aa, Oryza sativa [sequence omitted]

SEQ ID NO: 199575 - protein, 43 aa, Oryza sativa
  Clone ID: PAT_MRT4530_95129C.1.pep
MGREKMLKTRKRKDLRRKAFKRQIGTVQVRGLYILQIGQDDCS

SEQ ID NO: 199576 - protein, 106 aa, Oryza sativa
  Clone ID: PAT_MRT4530_9512C.1.pep
SGIRMLYQNPGSCRGQGPETFPLRPFHKGFPPSVFAVVHGVILPLSSGPGPSRPARPCLRSRCFCFCIWSGRSIYVPAVTFPYSGWHIFPLPLEMKSKLVYFLLGG

SEQ ID NO: 199577 - protein, 114 aa, Oryza sativa
  Clone ID: PAT_MRT4530_95130C.1.pep
MEKMPWPATGPSRRWSGPRSDCQFATNSNSIWHVGPTTPVETQAHKSGSNFDPPTAAAAAISARRSGPTRQRDVLIAAVPVYGGGRERGRDWVEANQESSWRCDVWMNWIGSVF

SEQ ID NO: 199578 - protein, 61 aa, Oryza sativa
  Clone ID: PAT_MRT4530_95131C.1.pep
MAANWSAYYSYDLILAKLSAETMWITQDVSVYMYLTRTVGQGNLQQAPLALTKMIDHHVTV

SEQ ID NO: 199579 - protein, 179 aa, Oryza sativa
  unsure (1)..(179): unsure at all Xaa locations
  Clone ID: PAT_MRT4530_95132C.1.pep
ERVESAVTDLKKEFGEQHVWGIVCDVREGKDVKALVDFARDKMKYIDIWINNAGSNAYSYKPLVETSDEALMEVITTNTLGLMICCREAINMMRNQPRGGHIFNIDGAGSDGRPTPRFAAYGATKRSVVHLTKSLQAELQMNEVNNVMVHNLPPGMDTTDLFMPGATTKQAKFXINILA

SEQ ID NO: 199580 - protein, 36 aa, Oryza sativa
  Clone ID: PAT_MRT4530_95133C.1.pep
PRQPLAPCIVSLFARCSELSGSRAAVCDAWATRIRT

SEQ ID NO: 199581 - protein, 108 aa, Oryza sativa
  Clone ID: PAT_MRT4530_95134C.1.pep
MTWRSCDYCGEAAAALHCKADTARLCVACDRHVHGANALSRRHVRAPFCARCEARPAAARVAAVAGAGGCGGGGEARLLCAGCADDDSADAARVPAVGFSRCPRARRA

SEQ ID NO: 199582 - protein, 556 aa, Oryza sativa
  Clone ID: PAT_MRT4530_95135C.1.pep
MAATAAYLPLRAQAQVGLAPLRPSGSAAAGARLPGRTARRRLAARGGPEAAGIRAEAVPGGGGVARRAAMVPPYNVLITGSTKGIGYALAKEFLKAGDNVVICSRSAERVESAVTDLKKEFGEQHVWGIVCDVREGKDVKALVDFARDKMKYIDIWNHKKAGFSPYLCVPLAQINNAGSNAYSYKPLVETSDEALMEVITTNTLGLMICCREAINMMRNQPRGGHIFNIDGAGSDGRPTPRFAAYGATKRSVVHLTKSLQAELQMNEVNNVMVHNLSPGMVTTDLLMSGATTKQAKFFINILAEPANVVADYLVPNIRAIPTNQSMKPTYIRFLTGLKAYSRIFSRIAFGARRNKIMSNSQPAQEDDCMSSILVSRLIRAMQPTRSYLRWSDDLHKMFVEAVAYHGGPYEAKPTAVKETMQAMGVTSLTTHNIKSHLQKYRESFSSGVGSLHDHDLLRTTSPSKEALDLASEMVRDNDAAMAEIEMLNDLLLDHDIEMVETSFSVDDLQMMERELMSEIKLIEHNFEISESALDEYMDDLANYAFDLTGPANSSSP

SEQ ID NO: 199583 - protein, 34 aa, Oryza sativa
  Clone ID: PAT_MRT4530_95136C.1.pep
TGKKQGECGRIVVRRNHRDEPILRGRLTARSRMW

SEQ ID NO: 199584 - protein, 453 aa, Oryza sativa
  unsure (1)..(453): unsure at all Xaa locations
  Clone ID: PAT_MRT4530_95137C.1.pep
MRSHEMNNSSSRYASEEERGSNSFLIESEEEEEDEEAHPHSSILLKDADSDSDSDDSSCATPRPSSYATHQWPQSYRQSIDIYSSVQSPNLSFLGTPTLSRLSNSFLTNSFRGKTPEILSNLVKPLLRPSSSSDDQQQQQQHDDDTRKSSQYLLPSRKPSLQQIPEDQKPLVPAHEVPAYQQCSYTQAVMNGINVLCGVGILSTPYAIKQGGWLGLVILCLFAVLAWYTGVLLRRCLDSKEGLETYPDIGHAAFGTTGRYAKMTALVLTLFPCMWLHYLQIILYIELYACCIEYLILESDNLSKLFPNAHLTIGSMTLNSHVFFAILTTLIVMPTTWLRDLSCLSYLSAGGVIASILVVVCLCWVGVVDHVGFENKGTALNLPGIPIAIGLYGYCYSGHGVFPNIYSSLKNRNQFPSILFTWXGLSSIGLAGAGVMGYKMLGESTESQFTLNL

SEQ ID NO: 199585 - protein, 170 aa, Oryza sativa
  Clone ID: PAT_MRT4530_95138C.1.pep
MGRVERMPNEDLSAMGRGLHFSISTLLLLEDRLSLHSAVMVARTQVHRGRGEQEPCALSASEAGQHRVRSTEEASVGNPEGAFMKVLQARKNYTSTELIVEPEEPSDSSGINLSGFGSEQLDTNDESDFISTLSYILPYFSAVNLDVKSLLLPLIKLPTSCRIPAARGIH

SEQ ID NO: 199586 - protein, 74 aa, Oryza sativa
  Clone ID: PAT_MRT4530_95139C.1.pep
FFFFVSYPLCHVVTWSKSFPELGKTKKKTPLINGGALFLNPWKGGGPKPFGAPWFGASRMRLGPLFKKGPAWRT

SEQ ID NO: 199587 - protein, 59 aa, Oryza sativa
  unsure (1)..(59): unsure at all Xaa locations
  Clone ID: PAT_MRT4530_9513C.1.pep
VGVVRLPCVACPSSXPCSSCPSSSFLPRSPWPRALGSCPSFGGSAARGVCSVPFPSLAG

SEQ ID NO: 199588 - protein, 56 aa, Oryza sativa
  Clone ID: PAT_MRT4530_95140C.1.pep
ATFEVAVSALLKRSTMFQNSLSKSYLSELLLGLLGPYWTVRCFGLIATSFSGSFHP

SEQ ID NO: 199589 - protein, 78 aa, Oryza sativa
  Clone ID: PAT_MRT4530_95141C.1.pep
GYVPRVIISGGLCNFDRKMWFFVKFTLIRVDFRTPCKFIYGIVNHKLCCLIQYTSRKNIYLPSNEKLEAKMLSFASLM

SEQ ID NO: 199590 - protein, 451 aa, Oryza sativa
  unsure (1)..(451): unsure at all Xaa locations
  Clone ID: PAT_MRT4530_95142C.1.pep
MASIRKVGGIGIEEETSKNIMGMESDDEFNEFVMNELIDPSSSALQLALRFGAALMIIEESVNNPGRIGSVQGHEVVHRDRLLWHNLLYKDYFSDNPTFGPNIFRRRFRMRLHVFLRIMKAVEEHDDYFKQKRNAAGVLGLSCLQKVVAAFRMLAYGVPADALDEYIRIGESTALEALRKFVAAVVEVFGPEYMRKPNEQDAARLLTIGASRGFPGMLGSIDCMHWSWKNCPTAWHGMYRGYKKEPTIILEAVASKVLWIWHAFFGMPGSHNDINVLQRSDIFARLAEGEGPQVNFDINGHEYSMGYYLADGIYPSWATFVKTIPEPQGNKKKYFAKAREACRKDVERAFGVLQSCFAIVRGAARMWDEDTLHDIMMACIIMHNMIVEDERDDYEYNFNNKGQYVCNSGRDTPELXAFIQNYKKKMKNKETHTQLQVDLIEHLWQNHGDLY

SEQ ID NO: 199591 - protein, 59 aa, Oryza sativa
  Clone ID: PAT_MRT4530_95143C.1.pep
SPGVLLEHNPCNNTYWPMVFSHTLYSCVLIYKDKTNWLNTHRLSPWCEFTNQLKHLYYL

SEQ ID NO: 199592 - protein, 87 aa, Oryza sativa
  Clone ID: PAT_MRT4530_95144C.1.pep
MASRLAQLRSKAAQASELVSKHGCAYYKEVMEKNKQHVVQPPTVEKCQELSKQLFYTRLASLPGRYEAFWKEFDGVKQARLLAEDSP

SEQ ID NO: 199593 - protein, 457 aa, Oryza sativa
  unsure (1)..(457): unsure at all Xaa locations
  Clone ID: PAT_MRT4530_95145C.1.pep
KTSLPINSSSQTHQSPTSNPLIQHEEERVATLLGIAEECDTEEELRLLLRGNPHPVCYDSFLPCDRMTIAQVSVLACLIACSISRVILLLSPIHLFTWQGVLKAIHVRKMVEAGCRVKIWIDDWSAFLNNKLGGDMEKIQTVGRYMIEVWKSIGMNHDGVEFLCSSAEINSRADEYWPRVMGISTHRKIGVVRHMFQIMGQRELRECKKPTAQFFNPCMQCAGIFFLEADICQMGMDQHEVNKLATTYSDNRQEKKPIILSHYLLPGLKGQNKMSASDPASAIFMDDEKAEIDLKIKQAFCPPKIVKGNPCIEYIKYIIFPWFGKFEVVRKAKNGGNKTFMSVEELVMDYESGSLHPADVKPALKEAINQILKPVREHFENNKEAKFLRDTVKVISCPLYLTLNQNHTFLFVIFDHSSYSKNFXLLFVLFVICFIIKSILSTTYSFLYLHGNAYAQV

SEQ ID NO: 199594 - protein, 366 aa, Oryza sativa
  unsure (1)..(366): unsure at all Xaa locations
  Clone ID: PAT_MRT4530_95146C.1.pep
MMLSFTSARLLPRCRRLYSACGAGAAACGVVGERVTVLTIDGGGIRGVIPGTVLAFLEGELQRLDGPGARLADYFDAGSXTGGLITAMLAAPGEGADRDGRRRRRPMFAAADITPFYLEHGPRIFPQRWSTLAAKIAAARGPKYDGRYLRGVVRRXLGETTVGDTLTNGGGPTCDGRRRQPGSGATDEGPGHPAGQGENRDARGRARTTGRPRDPPRAGPSCPGTRDGPPDDTRGGTHTGTTHEHGTRDGTPTDPGPGPDATTHTHGNRDNNRGDTPPATGRTRGTETDTDTRTDGDNGGGTGGQRGETTEKPRGTQGKNQTNGKPAGRGGGGGDRAPTTGGQRRHPDGGGAGTTRAGAGPGGPGA

SEQ ID NO: 199595 - protein, 405 aa, Oryza sativa
  Clone ID: PAT_MRT4530_95147C.1.pep
MAALASKLAQMQAKACDAARFAAKHGCAYHRALMEKNQKYVADPPTIERCQELSKQLFYTRLASLPGRYEAFWKEADQVKNLWRNRKDLNVEHAGVAALFGIELYAWFCVGEIVGRGFTFTGYHSSSPRRFPTPKEIRRGLDEFVVGQDKAKKVLCVAVHNHYKRIYSESSNCSMKSSACGDVSMSGDDDIELEKSNILLIGPTGSGKTLLAKTLARFADVPFVIADATAITQAGYSGEDVESIICNLLAAARRPPPPHLTSPRIPHPPRDLSSPLPGASPTAMASRLAQLRSKAAQASELVSKHGCAYYKEVMEKNKQHVVQPPTVEKCQELSKQLFYTRLASLPGRYEAFWKEFDGVKQVWKNRKELKVEDLGIVTLFGVELYAWFCVGEIVGRGFTITGYKV

SEQ ID NO: 199596 - protein, 129 aa, Oryza sativa
  Clone ID: PAT_MRT4530_95148C.1.pep
MAAVTFNGIGSRASAGGMADLARHGPSRTVGSGSGMARHEQTWRRRRQRLQDGGEVLLPLVELAAGVAPDAATARFAGRAHRCHRTGRVVVVERDGEKEERMKEEDEYDMWVPRADEEENKKQTAVARF

SEQ ID NO: 199597 - protein, 43 aa, Oryza sativa
  Clone ID: PAT_MRT4530_95149C.1.pep
LAHMLIVMQIRESIRRLVRAVLVVAHAQCVIGVIHGACQFPGC

SEQ ID NO: 199598 - protein, 108 aa, Oryza sativa
  Clone ID: PAT_MRT4530_9514C.1.pep
MGESKWGGMGRDEPLSGDLISELRLSSSLPSRDLFGPDRCHLFTAGLLSRLVLPSLLHTRQMGGKRGGRMARSTSSRRGTGTQGAQADGATDEVEVGREEVAGEVPGL

SEQ ID NO: 199599 - protein, 359 aa, Oryza sativa
  unsure (1)..(359): unsure at all Xaa locations
  Clone ID: PAT_MRT4530_95150C.1.pep
MAERANLVFQNKEIDGXTAMKRLISRLIEHFGMGYTSHILDQIKTLGFHQATTTSISLGIEDLLTIPSKGWLVQDAEQQSFLLEKHYYYGAVHAVEKLRQSVEIWYATSEYLKHEMNSNFRITDPSNPVYLMSFSGARGNASQVHQLVGMRGLMADPQGQMIDLPIQSNLREGLSLTEYIISCYGARKGVVDTAVRTADAGYLTRRLVEVVQHIIVRRRDCGTIQAISVSPQNGMTEKLFVQTLIGRVLANDIYIGSRCIATRNQDIGIGLVNRFITTFRAQPFRAQPIYIRTPFTCRSTSWIXQLCYGRSSTHGDLVELREAVRVIAGQSIWEPGTQLTLXRTFHTGGRIHRGVPADL

SEQ ID NO: 199600 - protein, 111 aa, Oryza sativa
  Clone ID: PAT_MRT4530_95151C.1.pep
IPAANAVFLKILRNCKKAIPSRDAGGKVIIMDIVVGVGPSDQKHRDVQILFDALIMFVNGVERDEQEWKKLFVEAGFSSYKIMPVMGFRSIIESHGKDDRLARINLLYKEE

SEQ ID NO: 199601 - protein, 580 aa, Oryza sativa
  Clone ID: PAT_MRT4530_95152C.1.pep
MRWTAFMWEGASRAFNHRPTFTNLVLVLGAASSGGLVAYADSNSDDVVGKPQGPPKKKIVVLGTGWGGTTFLRNLDSRLYDVQVISPRNYFAFTPLLPSVTCGTVEPRSVVEPIRRILEKKGGDIKFWEAECFKIDSSNKKIHCRSNIGTNLDGNGEFLVDYDYLVIAVGARSNTFNTPGVEENCFFLKEVEDAQKIRRNVMDCFERASLPYLDEEERKKNLHFVVVGGGPTGVEFAAELHDFVTEDLSKLYPSIQHLVKISLIEAADHILTMFDKRITEFAEDKFGRDGIDVKTGYKVVKVAKDAITMQNPATGDIAVPYGMAVWSTGIGTRPFISEFMKQIGQGKRRVLATDEWLRVRECDGVYAVGDCATINQRRVMDDISEIFRVADKDNSGTLTVKEIQDVLDDIYVRYPQVELYLKSRQMNGIADLVRTAKGDAEKESVELNIEEFKKALSLVDSQVKNLPATAQVASQQGQYLARCFNKMKDAEENPEGPIRIRGEGRHRFRPFRYRHLGQFAPLGGEQTAAQLPGDWISIGHSTQWLWYSVYATKQISWRTRALVISDWSRRFIFGRDSSCI

SEQ ID NO: 199602 - protein, 461 aa, Oryza sativa
  unsure (1)..(461): unsure at all Xaa locations
  Clone ID: PAT_MRT4530_95153C.1.pep
MAPIQSNGQHATSSLDALSELYGNTFSVIKSMALKAALDLGIADAIHHHGGAATMAQIATRVTLHPSKIPCLRRLMRVLTLSGIFAVQKPAPGDAAAEADEAPMYTLTPVSRLLIGAGNQRHMMSMLLHPCFIAPFFRISDWLQLELPEPCMFKHTHGQSFWEMTNEDAAFNTVVNDGMASDSAFMMDILVREHGEVFQGISSLVDVAGGNGAAARAIAKAFPEVKCSVMDLAHVVADAPRGTGVEFIAGDMFDSIPAANAVFLKWIMHDWSDNDCVKILRNCKHPALYXKAIPSRDAGGKVIIMDIVVGVGPSDQKHRDVQILFDALIMFVNGVERDEQEWKKLFVEAGFSSYKIMPVMGFRSIIEKIQSAINVSRLNFAKQSHGKDDRLARINLLYKEEPFLGEGVNGILDWGSSAVRGRRAVNAGMRRRADLPMDSSLAANSGLRRQKLEAADRVEAG

SEQ ID NO: 199603 - protein, 88 aa, Oryza sativa
  Clone ID: PAT_MRT4530_95154C.1.pep
MDSITRNQSQRNLRRKNGYDGGELGFPEIARLRLRPPPARGPPLQLLPAPTADWRRLRRRPLAGVSADAAGFPAGPRAVALGGAKVTA

SEQ ID NO: 199604 - protein, 39 aa, Oryza sativa
  Clone ID: PAT_MRT4530_95155C.1.pep
TTTPPEWDDASVDYGLNDDGGGGHCSRRETASLEDQGYG

SEQ ID NO: 199605 - protein, 99 aa, Oryza sativa
  Clone ID: PAT_MRT4530_95156C.1.pep
SQTKIGALHAATWAASGRPAGGERQRRLGPRGHRRRAVATRNAAEGDGKGEGSSPRGWDGEAKTGRWPATRIGGGASRVRVKDGAPATRDHGGGAAEGR

SEQ ID NO: 199606 - protein, 32 aa, Oryza sativa
  Clone ID: PAT_MRT4530_95157C.1.pep
WSLLVVEIVELLLLVCSWLVRNLSELLASDYL

SEQ ID NO: 199607 - protein, 629 aa, Oryza sativa
  Clone ID: PAT_MRT4530_95158C.1.pep
MHTKLLLLPILASLQLLPGAANGATVDPSCPPATCGNLTITYPFWLGSQNQSSCGPPSFQLTCNDRASGPFLRNSYIKVLGFDYGRRSLVAVHALLAADAACTVMFNVSSAFAITDRFSISQSNRELYVLSRCRERLPPPDAVPVTNCRANSSGMYAYLGGSYGTGQTPVNNGGCELSVFLVLGSSNAADMTAANYRQLIAGGFLLEWEPVGDCNACTASGGRCRYDASTSAFACLCSDGGMRPSICDGKNRGKLALIVSLSAAAGLVFAFLAWLMYRQRQKFRSAICGVYSGNTKNEEEMLKKCESLALKRYKYSELKKITKSFEDNLGEGGYGVVFKGRLQNGRMVAVKILTVSKGNGEDFLNEVMSISRTSHVNIVTLLGFCLEGPKRALVYEYMPNGSLKNYIHSESSNLATGWEMLLKIVIGIARGLEYLHQGCNTRIIHFDIKPRNILLDHEFCPKIADFGLAKLCHLNESILSMAEARGTIGFIAPEVFSRGFGVVSTKSDVYSYGMLLLEIVKVRKNIKGIADNFSETFFPHWVYDSLVSEMQCCETAYGTEEIARKMTIVGLWCIQMTPETRPSMSRVIEMLERSISELEMPPKPFLCSPIHSTNVSSYKSVNFTMSASS

SEQ ID NO: 199608 - protein, 28 aa, Oryza sativa
  Clone ID: PAT_MRT4530_95159C.1.pep
YQPCSGHSDQRRYNAPTASQRRYNAPTA

SEQ ID NO: 199609 - protein, 291 aa, Oryza sativa
  Clone ID: PAT_MRT4530_9515C.1.pep
MARHVPLTADSSLPRNLRACHLRRLLQQLETILRAPVRHTRRGRGRRAGNAGRGPPSPPPGFAGRGGRRRGNGAAAQRNAGAGSTDSNTIATRRGSPATPGMCTTLDRILVEAPHHCASHGWTARVRPQLDMPDVRRLGTAPLPEVNANEKKNVPSGNTQTGSSFGKGKRNRAKKQRGNSKKRKGNSKPNNDSGSKTACYRYGCYNHIAKKCRTPKHLVDLYMKSMGHTQTNQKHEAHFASQVLETGAMDPIPDEEGPSKTKTPTNEEEDSLDIDDMLVEYASNDIYGDLN

SEQ ID NO: 199610 - protein, 136 aa, Oryza sativa
  Clone ID: PAT_MRT4530_95160C.1.pep
MGKLVAAIGKLLCCVQVDQSTVGIKERFGKYEEVLDPGCHCVPWIIGSRVAGELTLRLRQLDVRCETKTKDNVFVTVVASIQYRAMEDKASDAYYKLSNPKSQIQSYVFDVIRASIPKLELDDAFLQKNEIARAVE

SEQ ID NO: 199611 - protein, 184 aa, Oryza sativa
  Clone ID: PAT_MRT4530_95161C.1.pep
MLRRRGFCCCSGAPTAAAAALLLLAVAAAAPRAAGFHLGGDESVLVRGMLAAIRREQAEAEDAARFAVAEYNKNQGAELEFARIVKAKRQVVTGTLHDLMLEVVDSGKKSLYSAKVWVKPWLDFKAVVEFRHVGDSQSQSATDADGNAGQDTADPTVASRNDLHNTENNKVSVVLSTFSQTYSV

SEQ ID NO: 199612 - protein, 516 aa, Oryza sativa
  Clone ID: PAT_MRT4530_95162C.1.pep
MAMAPRCTLSVLLPVALLLCAAIASPDFPLGKNFTVPLYYQQPADLAVTTTTVLNASHGAPLRPGVAAAISVVAGTGGLEGLSMCSLVVLLGNVTVWASDHDGGRFLVRGFCRLELTVDGDLRLTDAAGTVGWSSATAGRRAKVLRLTRSGNLRLLDAKNQYVWQSFDKPADKLLRGQRIGVPSYLTAPVTMIGSAFFSLELKERSITANFNVGIKRYTYWELTPRHNRSVAFAEMDVLGLRLLDRQRRPVAQISPAIEAQVSFLALGEDGNLGMYFYDSHDMKFGPSYEALGFCELPLACGLRGVCSAAGECDDFSTYGVHPAPAAHRHSACNATTVADRHYMAVMEGVTTAIRPASPPTANVTMRQCADSCLRDCSCAAALYVLAAVADHGGACSRYEMTAGAREVIGGGHRHNYLYLVKAPRTRDSEHEHGDDDGAVSRVLTRILIGFGTLDVIGLCALTWLCAYYCIYLRDIPVLDDKDDEEADDEGGEAARRGDAVSQSPPTNSEPVIELN

SEQ ID NO: 199613 - protein, 428 aa, Oryza sativa
  unsure (1)..(428): unsure at all Xaa locations
  Clone ID: PAT_MRT4530_95163C.1.pep
MAAALCSASPAISAAAAAALGAAARRLRVRVRAASRPYCAAPAPPRAAAAVGAQSWRARRRFAASAASTTTEEEEEGAGAEVMIPPDNRIPATIITGFLGSGKTTLLNHILTAHHGKRIAVIENEYGEVDIDGSLVAAQTAGAEDIMMLNNGCLCCTVRGDLVRMIGELVDKKKGKFDHIIIETTGLANPAPIIQTFYAEDTVFTETXYEHHHHDHHHHDHEHKHDHHAHDHTHDPGVSSVSIVCEGEMDLEKADMWLGNLLLERSDDIYRMKXATKRAEYGKVDLDYVLGIGGFDLERIESAXHEHKHDHEHHHHDHHHHDHEHKHDXSQNRLISLEGFQTLSTILNMLGVHDHHAHDHSQDPGSLXSEVRLDELTCIICGMHDIFQGSPERMWEPNEPRINKIVFIGKNLNGEELEKGFKDCLLKK

SEQ ID NO: 199614 - protein, 372 aa, Oryza sativa
  unsure (1)..(372): unsure at all Xaa locations
  Clone ID: PAT_MRT4530_95164C.1.pep
HEGLADPGRDIVVNAVLCIRKPDEPIDLFMVEIMHMRHKFDVDTRLVEGLVLDHGSRHPDMKRRAENCYILTCNVSLEYEKSEINAGFFYSNAEQREKMVAAERRQVDERVKRIIELKNKVCAGNDKNFVVINQKGIDPPSLDLLARAGIIGLRRAKRRNMERLVLACGGEAVDSVDDLTEDCLGWAGLVYEHTLGEEKYTFIENVKNPRSCTILIKGPNDHTIAQIKDAVRDGLRSVKNTVEDEAVVLGAGAFEVAAKKHLIDNVKKTVKGRAQLGVEAFADALLVIPKTLAENSGLDTQDVIVSLQNEHDRGLVVGLNXHSGEPIDPQMEGIFDNYSVKRQIINSGPIIASQLLLVDEVIRAGRNMRKPT

SEQ ID NO: 199615 - protein, 75 aa, Oryza sativa
  unsure (1)..(75): unsure at all Xaa locations
  Clone ID: PAT_MRT4530_95165C.1.pep
RNIIIGGNMLRMRVGPLIVTPQSGYSSARVYSPKLFXEDGXSSVFSPGCMVMIGCRKELDSQGWLLDVPAGHRIE

SEQ ID NO: 199616 - protein, 43 aa, Oryza sativa
  Clone ID: PAT_MRT4530_95166C.1.pep
MLKPRVQPSPPKARQGLYLASGRIQGPAYPSEWTAPLRHLKEG

SEQ ID NO: 199617 - protein, 52 aa, Oryza sativa
  Clone ID: PAT_MRT4530_95167C.1.pep
IWVAGVDLFFYLPSVSVSRQVYSDKKCGHQAQVLASCECIVLPSDYPKPPER

SEQ ID NO: 199618 - protein, 476 aa, Oryza sativa
  Clone ID: PAT_MRT4530_95168C.1.pep
MEMVECSLPAARAPRPLPRRLPPLPGGRPALGAAGRSGSRLRVRSERTRRRDSPTMPTAASERDGGGPCRAGQGGSGARRGGRGVADRARRGAPLAAAAGAGRVAHRRVPCLKGPKGEPGAEDAGGGVGADTVRPSWIPPSITKQTMVEMFPLKSEDAAYGKISGMLSTLGDPFTKIISPKEYQSFRIGSDGSVQGVGVFINKEPSSGRLLVMDCIEGGPADRAGLHGGDELVEIDGKSVSGLDGEAAAQRLRGRVGTTVKVKVLDGTENERNGRIRQKEVQLSREVINLSPLSTAIISHRSDDGRECKTGYVRLAAFSQGGLVKAGLDVAQMWLDGNETLVNTVDREGNVLPINMARGHSLTHDPLVVLVNEGSASASEILAGALHDNGRAILSVTELDDGSALFITVAKYLSPALHEIDQVGIQPDIQCTPEMLSLPRAPSLKEDDKATNLEMDSCIMVAEQALEIEKSKGSAS

SEQ ID NO: 199619 - protein, 31 aa, Oryza sativa
  Clone ID: PAT_MRT4530_95169C.1.pep
FRFREGLILTSFKHVSELPTPNLIHCVFTIS

SEQ ID NO: 199620 - protein, 61 aa, Oryza sativa
  Clone ID: PAT_MRT4530_9516C.1.pep
SIQEGESMPVCFNLKTIHTDHAKKARNNEHRHQQSFLIWSTISFELFKCLQASRILGITPR

SEQ ID NO: 199621 - protein, 43 aa, Oryza sativa
  Clone ID: PAT_MRT4530_95170C.1.pep
LVRKEQGNLIFSRIHLHLSFNRAHRTYALCKVHHLSTRGGIEQ

SEQ ID NO: 199622 - protein, 94 aa, Oryza sativa
  Clone ID: PAT_MRT4530_95171C.1.pep
DSRTQNSLAGRRGGWLDLVANKYRLTRSTSSAEELLQHREAPSAARHTWPYLKLGACILQSVTSKNEQANSSILHAAFFRSFPVPGTDRNPRFV

SEQ ID NO: 199623 - protein, 70 aa, Oryza sativa
  Clone ID: PAT_MRT4530_95172C.1.pep
MAAVGGLRVGRRVCGSSWVDPLSPFPLFAPPCHFFLSAVSSFGFSWCDCRVFGAPRPADFCRRVSLHFVR

SEQ ID NO: 199624 - protein, 73 aa, Oryza sativa
  unsure (1)..(73): unsure at all Xaa locations
  Clone ID: PAT_MRT4530_95173C.1.pep
PRRGRVGXRPAKKKXHTVGGALTFDDQCXILEKEAENQSLENLMTHPIAKAGTAHGSPNPFLIHCKFNHSKCT

SEQ ID NO: 199625 - protein, 414 aa, Oryza sativa
  Clone ID: PAT_MRT4530_95174C.1.pep
MRSLSVSFQGESFFYQTSRAPRAASPSSPGGRRGPTPERRKSVSSVPEAENTRPQHRWPAAKPKASDPLARSLDCSLDRKDSILAAVHLLRRSMAFDSTTSLSPSDPAAAAAAAHDLSASSDTDSVSSGSNSGAGDPPRRGISVPARFWQETNSRLRRLPEPGLPLPSSSGRRSFSDSQMSPRLPGRSPSPSRGSRGMASPARGRSGEASPNGHTMQAPANAPSIISFAAEVRRAKKGENRIEEAHRLRLLDNRHLQWRCINARTDAALLVQSFNAEKTLHSAWKEISKLRDNVSSKRSKLQLLKQKLKLFAILRRQIYYLDEWSHIEKHHSSALSAAIEALKASTLRLPVVGGAKVEGTSSVVSELAKLATQEQMLLDQSRDLLSMVAAIHVKQCSLQAHMLQRKQKQSQTRV

SEQ ID NO: 199626 - protein, 66 aa, Oryza sativa
  Clone ID: PAT_MRT4530_95175C.1.pep
ARERRLPANHAASGGIRRRGTSGRGRARPCGAEGGGGAGGRRPRRRQTAAGATAGDGERRRAWGGG

SEQ ID NO: 199627 - protein, 239 aa, Oryza sativa
  unsure (1)..(239): unsure at all Xaa locations
  Clone ID: PAT_MRT4530_95176C.1.pep
GEASPNGGTVQAPANAPSIISFAAEVRRAXKGENRIEEAHRLRLLDNRHLQWRCINARTDAALLVQSFNAEKTLHSAWXKEISKLRDNVSSKRSKLQLLKQKLKLFAILRRQIYYLDEWSHIEKHHSSALSAAIEALKASTLRLPVVGGAKADAQGVKEAVNSAVDVMHTMASSMCTLLSKVEGTSSVVSELAKLATQEQMLLDQSRDLLSMVAAIHVKQCSLQAHMLQRKQKQSQTRV

SEQ ID NO: 199628 - protein, 173 aa, Oryza sativa
  Clone ID: PAT_MRT4530_95177C.1.pep
MEMVGRYTCRLAVGGEARRIYNGHSPSDNDQQVDAGIWGGSRSNGRRHHGPLLGSKDTTTGNAPWSCRSTLPQAPSVAPPSTCLEDPPKRSQRRVDQVESTLLRRVVVQVEEARWRLPTNGTDVGRGGAWGGCVWTGLLAVVAALTGGSQETMLWKVNSRASRRSKMSSVDGR

SEQ ID NO: 199629 - protein, 258 aa, Oryza sativa
  Clone ID: PAT_MRT4530_95178C.1.pep
MRKKLGTRFPAARIKKIMQADEDVGKIALAVPVLVSRALELFLQDLIDRTYEITLQSGAKTLNSFHLKQCVRRYSSFDFLTEVVNKVPDLGGADSCGDDRALPRRRKALPNGSDPENEESRSSKMAVRSANISPRGRGRGRGRGRGRPPTKRKEVGYVQFEDESSMFADQGEALPGEETVPETIHGTESVPPSTHPPAEAPSAAEIPAPNPKVEEAKNDDHQPDWPMPDAIGNIGVGPSGFGHLTVQVDEDEDYDNED

SEQ ID NO: 199630 - protein, 69 aa, Oryza sativa
  Clone ID: PAT_MRT4530_95179C.1.pep
MAVIAVVATVPGGGVGGAGCSSDDRPSSTGTVVGGGDEGNGGSGGLLSLVDFRKKQLRACLEEGGEATL

SEQ ID NO: 199631 - protein, 783 aa, Oryza sativa
  Clone ID: PAT_MRT4530_9517C.1.pep
MGIQGLLPQLKSIMAPIGVEALKGQTVAVDTYSWLHKGALSCGDRLCKGLPTTRFGSGDLPPFLGTQGFLIHFADWHIEYCMHRVNMLRHHGVKPILVFDGGHLPMKGDQETKRERSRKENLERAKEHESAGNSRAAFECYQKAVDITPRIAFELIQVLKQEKVDYIVAPYEADAQMTFLSVNKLVDAVITEDSDLIPFGCSRIIFKMDKFGQGVEFHITRLQRCRELDLNGFTMQMLLEMCILSGCDYLPSLPGMGVKRAHALIQKLKGHEKVIKHLRYSAVSVPPQYEENFRKAIWAFQFQRVYDPVTEDIVHLSGIPHGKGLASLEAKRKFRAPKVTPKQQVLNGSLPSPRIEDSGTPDLIEDTSLPSNNIQVYQCSSEHFSSGTPLDDSINTASQCSSERVRCDIPRDDSASVSPQCSHDIGSDPAEDPDIEGNKVKVNFCNRSTIPTGSFLEGTLPGISDPFLDSHNTEPSRAAPRYAEKSNVVSANRNITVRSSYFKTVNKRVCTNQGEDECHDEDNCETGNYTLPGDQQRSSGGILKRRKFSDPQNFEDGMFQPTSPHESPPVADKGCDSDSHDGINTNSEGKFGCNVAHVNKYSGIAEKSMDKFAALISSFRYAGSRASGLRAPLKDVKNTLPVRSVLRPPEQRFGCTAKKTTRVPLQSRFSSDATNSTDVPDLSTFAYRPTTASAHSDQGKITSKATDAAAGPPDLRTFAYAPTRSTTSRFDQSENTRKAMCTADSPPDISTFEYKPMKSAVRRSDGSKFSGAALKAARRTSRS

SEQ ID NO: 199632 - protein, 125 aa, Oryza sativa
  Clone ID: PAT_MRT4530_95180C.1.pep
MEPCLWWARAVLGWAAHLTYYSRYPSSNAGATMVLPLSVVTAATPDADTARRTRRPAPTPPPARQRFHRSLPPQNGAVIALPLSVTTAASRDADTTCNTLCPLPPHAIASAAPFLCTPVLSQPFL

SEQ ID NO: 199633 - protein, 54 aa, Oryza sativa
  Clone ID: PAT_MRT4530_95181C.1.pep
PPSGKGPKKNQFWAKNPPIKTIKTHPSSFCLLYGKKNPLLNPKVLPFFSAQKTN

SEQ ID NO: 199634 - protein, 533 aa, Oryza sativa
  Clone ID: PAT_MRT4530_95182C.1.pep
MAPPSHCHTINGGAPRNGAIPEVETTTSTPAASDTALLLDADEFRRLGHQVVDFIADYYAGLGDYPVHPSVTPGFLRRQLPADAPSRPEPEAFAAALRDVRDLILPGVTHWQSPRHFAHFPASSSTVGALGEALAAGINVVPFTWAASPAATELEMVVVDWLGRALHLPESLLFAGGGGGTILGTSCEAVLCALVAARDRKLAEIGARRIGDLVVYCSDQTHFAFRKAARIAGIPREHCREIPTCRDDVFALSPTALHAAMQADVDAGLVPLFLCATVGTTQTTAVDPVRELCAVAARHGGVWVHVDAAYAGSALVCPEFRDVIAGAEAVDSLSMNAHKWLLANNDCCAVWVAAPSALVAALGTEQEYILRDAAAEGHDVVDYKDWGTTLTRRFRALKVWLVLRCYGVEGLRSHVRSHVAMAAAFEAMVRGDARFEVVAPRRFALVCFRLRSPPERLGVGVGVGGEKAANELNRRLLEEVNAASSGPYMSSAMVGGVYMLRCAIGSTLTEERHVREAWKVVQERATSILRKRG

SEQ ID NO: 199635 - protein, 137 aa, Oryza sativa
  Clone ID: PAT_MRT4530_95183C.1.pep
MALARGGRGGDKAICSVHLGLLLLLVILALQCGVEPAAARREWPVGDGAGWSPGVVGWPNYKPFKAGDVLVFSYDASAHNVVVVGDVDYALCRAPANATAYGSGDDRVALPPGVTFFVSGFPGDCDKGMMKIAVTAR

SEQ ID NO: 199636 - protein, 120 aa, Oryza sativa
  Clone ID: PAT_MRT4530_95184C.1.pep
MTIAAGLEKGDGSRRRGGMEGPTVGAPRGGWTGWCGGLRAKRRAGCGRGRCCGAGGGDGDIGWHSNGAAGAAGVGADETEGEAARATVFRRNSGDAAAWPGKRMVLLCWERQRRRQPTDR

SEQ ID NO: 199637 - protein, 156 aa, Oryza sativa
  Clone ID: PAT_MRT4530_95185C.1.pep
MEEVPQFVKRKRHGRKSDLFTGDRIKNVHLRPLISGPLLCKAVEASDVFTNRLRGVEETRRLRSFVLSKVVQFASNEVHPLVKVEEGIAAEAKLWELHSTCFGEYWQRCNLLEDELLVQDHRESCNLGGLIERAGSPWNELYRKPNEDAPSNSESD

SEQ ID NO: 199638 - protein, 34 aa, Oryza sativa
  Clone ID: PAT_MRT4530_95186C.1.pep
ALCTIWHKPKQVVLYRAAYVILVEAKQKRSVYDI

SEQ ID NO: 199639 - protein, 86 aa, Oryza sativa
  Clone ID: PAT_MRT4530_95187C.1.pep
FFLLYKKERINLAAEAIAARGGLFYSGLGQAYRTRCTCAIECDHWRIMRLGGALLRFPRPQIAPRIHSPNSSLCSVAVLEIIGGIW

SEQ ID NO: 199640 - protein, 424 aa, Oryza sativa
  Clone ID: PAT_MRT4530_95188C.1.pep
MEMCSREEIMDLCRQAIHQNMCYVVPRVLPQQLCLPPPSPKDELHSTLTKTSTRKFSDLPHDILMDIIAMLEIPDALRAASVCSSLAEKRTYKLTLPEPPISRRYLLGSSDGWLVTADERSEMHILNPITGEQIALPSVITINQVTPIFNHKGVLCKYRYSRHTAEGVTDSPMTLPLDKLRYFFHCKAFVFYDKSVKSYIVVLIHNPCEQLSFARLGYDKWTWLPPHLRFQDCTYKDGLLYAVTSLGEIFAFDLNTTVITAKIIMDRTKEYSRERIYIVQAPWGDLLQVWRPPQGDGRGYDEITGRSALVSNTGRTKLYRVDTLAKELVEISDLGDHVLFMGNNQTYCLCAKEYPLLKANHIYFTDDSECLALRTLWGFRLDIGLLNLRDKSVEEIVSPRLWLKCRAPVLLVPNPRKMNSTCHN

SEQ ID NO: 199641 - protein, 131 aa, Oryza sativa
  unsure (1)..(131): unsure at all Xaa locations
  Clone ID: PAT_MRT4530_95189C.1.pep
CGSIDLNSVQSKYIDHDISKEEIFSSLDPLVQLVVEVGREATAASPPQFVVHKVEIVTGKREASPPEKKECDYRNEGLGTARSGGTGTLIGSRQVEPRGKSMGTAIDSEPTVIDLFNELHCSXTKGFSEPV

SEQ ID NO: 199642 - protein, 633 aa, Oryza sativa
  Clone ID: PAT_MRT4530_9518C.1.pep
MAAAPASSASAAGNREAFRVAVTNTLERRLFYVPSFKIYGGVAGLYDYGPPGCAVKANVLAFWRQMCRSTRYLHFVLEEGMLEVDCPCVTPEVVLKASGHVDKFTDLMVKDEKTGTCYRADHLLKDFCKDKLEKDNTLSPEKTAEFNHVLAVLDDLSAKQLGAKIKEYGIVAPDTKNPLSDPYPFNLMFQTSIGPSGLSPGYMRPETAQGIFVNFKDLYYYNGNKLPFAAAQIGLLRVREFTLAEIEHFVDPEDKSHPKFRDVSDLEFFMFPREQQLTGKSAMKLNIGQAVSEGTVNNETLGYFIGRVYLFLTQLGIDKDRLRFRQHLPNEMAHYAADCWDAEIECSFGWIECVGIADRSAYDLRAHSDKSGVALEAHEKFAEPREVEKLVITPSKKELGLAFKGNQRMVLEALEAMSETEALNMKSALESKGEVEFKVCTLGKDVTIKKSMVSINMEKKKEHQRKFTPSVIEPSFGIGRIIYCLFEHCFYQRPGKAEDEQLNVFGFPPLVAPIKCTVFPLVKIEKFEVVAKKISKALTAAGISHIIDMTGNTIGKRYARTDEIGVPLAITVDNTTSVTVRDRDSKDQIRVEVDEVASVVKEVTDGQSTWADIMWRYPAHTASAAEEEEASET

SEQ ID NO: 199643 - protein, 46 aa, Oryza sativa
  Clone ID: PAT_MRT4530_95190C.1.pep
MAVAPPQTSYHHCLTGPPRHLRWGVIGPEARKREPPRPVHGGHGMG

SEQ ID NO: 199644 - protein, 309 aa, Oryza sativa
  Clone ID: PAT_MRT4530_95191C.1.pep
MQQTSGAGRTGLTTPVRPANRPEPAPIPASTPAPAPVRADESIGKAGRMLYSHEEDIRLASAWLKCSTDPIGVNRKGETYWVHVAETYNETTLDGRKRDPTCLKGHWHKITPKVTLFNGCCVQLRNTPISGRNDEKLMDDALALYIKRSKKHKPFLYQSRSYDLGYYLADGIYLEWATLMKSIRHPQLPKDKLFAQRQESARKDVECAFGILKACFRVVETPTHLWLIADISDIMTACVIMRNMIVEDEGHVWDTEDLEFEGDYEIEPPEHTFGTPQHIARLLERDSQVQSRTMHNRLKNDLVEHIWAR

SEQ ID NO: 199645 - protein, 136 aa, Oryza sativa
  Clone ID: PAT_MRT4530_95192C.1.pep
MSHSEEEEEEEERVEGDGGGVHDSKNSCTAKSTNTRFRTKCSKNARAHTCAIYAVICKGAHTKLDPEAYCFILYYLLWLGAVLGVRDGKADEVQQKGNGDGFECHGTHVGDLTAGADVDVSEVNKPALQIHKWIGP

SEQ ID NO: 199646 - protein, 88 aa, Oryza sativa
  Clone ID: PAT_MRT4530_95193C.1.pep
LGNITHDLSSELVLLTVETRVRLFRGILFRNSCNSCIQTLSAPQKCDGDKVVLSAIGSPHLASWLLRMIPPRITAGDLSKTITIASAT

SEQ ID NO: 199647 - protein, 218 aa, Oryza sativa
  Clone ID: PAT_MRT4530_95194C.1.pep
MNHREQRQTNAIALEGKDWYEPNSNRGDDYTLTREDGGRLRGEGAPSSAGSNQKGCSMYEEDNIQGELLLVQAELDDIQGQISALIDRQEELYERESQLKAMLEVSKASNNTINNTPSVGPKDWSGSFLWDSRADDVRFNVFGISSYRQNQREVSFFILHPFKHIATFQIINAIMSGRDVLVIMAAGGGKSLCYQLPAVLHDGITLVVSPLLSLIQDQ

SEQ ID NO: 199648 - protein, 226 aa, Oryza sativa
  Clone ID: PAT_MRT4530_95195C.1.pep
LERPRASHSLNLVAGWLVLFGGGCEGGRHLDDTWVAYVGNGAGNRSSAVFSWQQLDSGTPSGRFGHSCSIVGDALVLFGGINDQGQRLNDTWIGQIICEESRRMKISWRLLEVGPHAPYPRGAHAACCVDDKFIVIHGGIGQSGSRLGDTWLLDLSNGLRSGIWHQIEDTEPLPLSRSGHTLTWIGGSRMVLFGGRGSEIDVLNDVWLLDINERVPKWKELKYDLV

SEQ ID NO: 199649 - protein, 495 aa, Oryza sativa
  Clone ID: PAT_MRT4530_95196C.1.pep
MEEEAAVARLGCDQVLSILHLLPAESVLSFAAACRAFHAWASSDALWEALCRRDWGARATAALAERRRRGGGGVPWRRIYAEVALLGALSARRVPVKGASPRPRASHSLNLVAGWLVLFGGGCEGGKDAKSTYLLTLSSRAYSGLWHEFHMLGRHLDDTWVAYVGNGAGNRSSAVFSWQQLDSGTPSGRFGHSCSIVGDALVLFGGINDQGQRLNDTWIGQIICEESRRMKISWRLLEVGPHAPYPRGAHAACCVDDKFIVIHGGIGQSGSRLGDTWLLDLSNGLRSGIWHQIEDTEPLPLSRSGHTLTWIGGSRMVLFGGRGSEFDVLNDVWLLDINERYPKWKELKYDLSSVLGEMPFPRVGHSATLVLGGKILVYGGEDSQRRRKDDFWTLDLPALLQFESGSKKMTKRMWKKLRIDGQCPNYRSFHGACVDTSGCHVYIFGGMVDGLVHPAEASGLSFHIKLLDNRSEDLPENISTNLYHVDIPPRRYWPL

SEQ ID NO: 199650 - protein, 196 aa, Oryza sativa
  Clone ID: PAT_MRT4530_95197C.1.pep
MSSGGGAAAAVDPEAATELVRKGATLLLLDVPQRTLLGVDTQVFSVGPKFKGIKMVPPGPHFLYYCSPNRHANEFAPTVGFFLTTHPSEVIVRKWHAQEERLIKLPEEEEIRYSEAVRHFEFDSQLGPYNLDSFGDWKQLSSYLSQSVIERLEPIGGEITIAWESSWMDKAPQTDMERRLMDQLKDGKFAKECSCA

SEQ ID NO: 199651 - protein, 413 aa, Oryza sativa
  Clone ID: PAT_MRT4530_95198C.1.pep
MSSGGGAAAAVDPEAATELVRKGATLLLLDVPQRTLLGVDTQVFSVGPKFKGIKMVPPGPHFLYYCSPNSYGQNNLHEKPHIDYSSTICDPFRHANEFAPTVGFFLTTHPSEVIVRKWHAQEERLIKLPEEEEIRYSEAVRHFEFDSQLGPYNLDSFGDWKQLSSYLPQSVIERLEPIGGEITIAWESSWMDKAPQTDMERRLMDQLKDGKFAKNAPVQSERRGCYYTTIPASIKHSNISGDELTALNLDKTCLLESVLAKNYQGQEDLLLGELQFAFIAFMMGQSLEAFMQWKALVSLLLSCSEAFIRAIYYQLKHGFQHTQDNRSGEEMGNSLFLDEAWFSRDIFLYRLSKTDFFAVILEATVVDGDLLSWTRKLKSLLETTFGWDLDNNTVNLIDEDDEFAPVVVEMDGS

SEQ ID NO: 199652 - protein, 85 aa, Oryza sativa
  Clone ID: PAT_MRT4530_95199C.1.pep
MVSYGCNYRDTQGNIAMGRQVGFHPLHRREHTGPRPTKNKHGDDATTHGRRQPREEEETAGRLVTLALMVASSSASSSFSAAAAA

SEQ ID NO: 199653 - protein, 850 aa, Oryza sativa
  Clone ID: PAT_MRT4530_9519C.1.pep
MAGGFAVEAKVAGGGERREFKGKITWYVWLCGIIAATSGLMFGYDVGISGGVTAMDGFLIKFFPSVYARKHRARENNYCKFDDQRLQLFTSSLYLAALAASFAASRLCTRLGRRRTMQLASVFFLGGTALCAGAANLAMLIVGRICLGVGVGFGNQAAPLFLSEIAPAHIRGALNILFQLDVTIGILIANVVNYFTSSAHPSTGWRYSLGGAGVPAAVLFLGSLVITETPTSLVERGRRDAGRATLERIRGTRDVGDELDEIARACEAAAALSAEESAYRRLRRRESRPPLVIAVAMQVFQQFTGINAIMFYAPVLFQTMGFKSNGSLLSAVVTGGVNVVSTLVSIVAVDKIGRRRLLLQACGQMLIAQTAVGAIMWEHVKANGNPGEKWAVAIVVLICVYVSSFAWSWGPLGWLIPSETFPLATRTTGFSFAVSSNMLFTFLIAQAFLSMMCSMKAFIFFFFAIWIVIMAAFVFWLLPETKGVPIDEMVDTVWRRHWFWKRFFTDAGDGRIVDAVFPAEASPTWKGIEHGLQLLKTGLIWRIGDGTKVRIWRDKWIPRASSLMLMGRSGRCRLRWVSQLLKQGEKSWDVDLIKHVCHPLDVEEILKINLSPYQDEDFLAWHYEKSGIFSVRSAYRLAWLNKFHPDGEGSSRETDGDRSIWRRIWSTPVPPKVRIFAWRLARNYLATQKNRCKRKLQAVATCTICGQGEEDEFHAVISCTRPRALRETLRASWRLPDKRSLSKLGPGWLLGGLDKLSENERAQFLLVLWRAWYLRNDCVFGSGQATVKGSASFLLNLWNSLCPSGSATLENEKGKIVSEGRQSDVNGCGERTQVAGVWQAPAMGWVKINW

SEQ ID NO: 199654 - protein, 634 aa, Oryza sativa
  Clone ID: PAT_MRT4530_951C.1.pep
MERDAAEVEVRRRLRDVGARLSSLPDDGELLRLLQEAAKLLYRVNQCEVDRIHSALIPVMRALIKKELLDHTDPGVKLAVASCLTTLIKIRAPDPPYDDDVMKDVLKLVVGVFCELDDVDCPSYGTRVSMLGTFARIRGCALLLDLDCNDLIRDMFHHFFRTVSNTHQEHVISYMETIMKFVIEDITDMEQDLIKDLASCLLQNVKKEEKETPPASFVLAERVIGLCHEKLKPVFIKLLQGAPITEYSNLVTSFLQDAIVAGDNNVGAFMHDMKEVVSPKSSTMMGKTIGQPADSGDELKPEIVQGTKEAPNSNKKALDGSIVGSRIKVRWPADEMFYNGLVKSFDASSETHEIVYDHGDVVRQSLKDEKWEFIAEEQDYNPDASPDMLEDRSDEGSLGQPFQDVHKAASSHSFVIQEKYNTVLNEIGCISTETTGSLLVRIQPRIVEALQLNQKRPAMKIQPRIARELQLSLNKHARKVQPGVARESQVNQNMHVTKGVQKHMARYNNNKPTEIEGANVGTTKHAKVKRAALACENVVGRDVFLKRIVRPYNRVARATIQSQDPLEMVGGTMLGRECYKVVIDSLICGDAELFRPHRNLNYIRDAIGHCIAWPSQLVEEVSPQCNGEVTKTGL

SEQ ID NO: 199655 - protein, 104 aa, Oryza sativa
  Clone ID: PAT_MRT4530_95200C.1.pep
FFFFFFYYSLFSYYFSLPPGDFFIFCGLWHCAHIQGALPRCTHTQQHGTFQHSPNFSTSSVNLISSLSDISTGITSSHQHTALLTQLVGQAQQHLIIGQVFSFT

SEQ ID NO: 199656 - protein, 464 aa, Oryza sativa
  Clone ID: PAT_MRT4530_95201C.1.pep
MAAKGNPADAVAIVAVPFPAQGHLNQLLHLSLQLASSSHGLTVHYAAPAPQLRQARARVHGWDDKALLSVQFHDLGVSTYVSPPPDPTADAPFPSHLMPLWEAYTADARAPLSALLGELSASYRRVVVICDIMNSFAVKEAARLPNGEAFVCNCVAVSSATGSIDPGHRLLRENGLRFIPMDTYLTKEFMDYEQQRARAAQSISSCAGILANACRALEGEFIDVFAERLDASSKKLFAIGPLNPLLDTGALKQGRRRHECLDWLDRQPPESVLYVSFGTTSSLRVEQVAELAAALRGSKQRFIWVLRDADRGNIFAGSGESESRYAKLLSEFCKETEGTGLVITGWAPQLEILAHGATAAFMSHCGWNSTMESLSHGKPILAWPMHSDQPWDAELVCNYLKAGFLVRPWEKHGEVVPATTIQAVIEKMMASEEGLAVRQRAKALGHAVRSSRNDLEDFVDHITR

SEQ ID NO: 199657 - protein, 140 aa, Oryza sativa
  Clone ID: PAT_MRT4530_95202C.1.pep
MGSGSKKKSGGGDDQRPLLWRLPEVTSTELGKIGPAFGLGVGCGVGAGVGFFGGAGLGYGFPGLTLGFGVGAGCGVGFGFGYGLGKGIAYDQNKRYSNVGTMFQEAPSLPMDTVAGLVDELVVNTKKLVRATSKEIEKWR

SEQ ID NO: 199658 - protein, 92 aa, Oryza sativa
  Clone ID: PAT_MRT4530_95203C.1.pep
YIFIDRRTCHQPTFCHEIEIVYSKKKILPSFVGSAVTCQSSSSSNKYIDQRSALPSSVCVSTVHNLKSRNMCEKKKALAACAIAKKKWKKKI

SEQ ID NO: 199659 - protein, 74 aa, Oryza sativa
  Clone ID: PAT_MRT4530_95204C.1.pep
RPYLFACKCTNTHATQLTDPQSMPLLQLLDSATTPSRYPHITSYMQALTCRSWIFLIKLTHARTNHNSHNKQQD

SEQ ID NO: 199660 - protein, 1020 aa, Oryza sativa
  Clone ID: PAT_MRT4530_95205C.1.pep
MDTGATDHITGKLEKLTTHEKYNGKEQIHTASGAGMDIKHVGHSIIHTPVRNIHLKNILHVRKVKKNLISAHRLAVDNNAFVEVHSRFFAIKDQAKGHQLPYPKSSSVSSHPLELVFSDVWGPAPVSVESRKYYVSFIDDFSKFTWIYLLKNKSEVFSKFHEFQQRVERLFNRKIISMQTDWGGEYEKLHSFFTKIGISHHVSCPYAHQQNGSAERKHRHIVEVGLALLAHASVPLKFWDEAFLAATYLINRLPSKVIQYSAPLERLLDQKPNYSALRTFGCACWPNLRPYNKRKLEFRSKQCVFLGYSNIHKGFKCLDVSTGRVYISRDVVFDENVFPFSKLHSNAGARLRSEILLLPSSLIPNGVGYSNDHMLNTPERSNGVSEHVTDQHEHLNDNSGNMENIASGNTEVFEENAEDPDGTEDPDHASVIQPNDMRTVLLHMMVLALQLRHREQEGPPTATSSAQHSAQQHSQAQHSVQQHGNDGNDGAEQQQQMVQRPMTRLQRGTRKEKVYTDGTVRYSFLAMTGEPNNLAEALADNNWKHAMDAEFTALLDNKTWHLVPPSSDKNIIDCKWVYKIKRKSDGSLDRYKARLVAKGFKQRYGIDYEDMFSPVVKAATIRTILSIVVSRGWCLRQLDVQNAFLHGYLEEEVYMRQPSGYEDKSKPSYVCKLDKAIYGLKQAPRAWYSSKGDVTVFVLIYVDDIIIASSTEGAVTALLTDLRQEFALKDLGNLHYFLGIEVSTVDDGILLKQEKYATDLLKKAGSVDDRRSTGGVFLGSNLVSWSARKQATVSRSSTEAEYKAVANATAEVMWIQTLLKEIGINAPMTACLWCDNLGATYLSVNHVFHARTKHIEVDYHFVRERVARKQLCKSATNIGQPSPCDLVSSHKRHDSRGGPVIGYRFTVNPRRQIQHHYGKICATIVTVDMPRKRMAEAICMLHELKLLSVSGTGWILLVKDRKGSFPPQKLAIEISSVAYLQQIWWFEVVGKIDFSFPVGTYSLYFRIHLGKFYKRFGRRV

SEQ ID NO: 199661 - protein, 1032 aa, Oryza sativa
  Clone ID: PAT_MRT4530_95206C.1.pep
MDTGATDHITGKLEKLTTHEKYNGKEQIHTASGAGMDIKHVGHSIIHTPVRNIHLKNILHVRKVKKNLISAHRLAVDNNAFVEVHSRFFAIKDQAKGHQLPYPKSSSVSSHPLELVFSDVWGPAPVSVESRKYYVSFIDDFSKFTWIYLLKNKSEVFSKFHEFQQRVERLFNRKIISMQTDWGGEYEKLHSFFTKIGISHHVSCPYAHQQNGSAERKHRHIVEVGLALLAHASVPLKFWDEAFLAATYLINRLPSKVIQYSAPLERLLDQKPNYSALRTFGCACWPNLRPYNKRKLEFRSKQCVFLGYSNIHKGFKCLDVSTGRVYISRDVVFDENVFPFSKLHSNAGARLRSEILLLPSSLIPNGVGYSNDHMLNTPERSNGVSEHVTDQHEHLNDNSGNMENIASGNTEVFEENAEDPDGTEDPDHASVIQPNDMRTVLLHMMVLALQLRHREQEGPPTATSSAQHSAQQHSQAQHSVQQHGNDGNDGAEQQQQMVQRPMTRLQRGTRKEKVYTDGTVRYSFLAMTGEPNNLAEALADNNWKHAMDAEFTALLDNKTWHLVPPSSDKNIIDCKWVYKIKRKSDGSLDRYKARLVAKGFKQRYGIDYEDMFSPVVKAATIRTILSIVVSRGWCLRQLDVQNAFLHGYLEEEVYMRQPSGYEDKSKPSYVCKLDKAIYGLKQAPRAWYSSKGDVTVFVLIYVDDIIIASSTEGAVTALLTDLRQEFALKDLGNLHYFLGIEVSTVDDGILLKQEKYATDLLKKAGSVDDRRSTGGVFLGSNLVSWSARKQATVSRSSTEAEYKAVANATAEVMWIQTLLKEIGINAPMTACLWCDNLGATYLSVNHVFHARTKHIEVDYHFVRERVARKQLISKVLQLRSSRKVQECHNIGQPSPCDLVSSHKRHDSRGGPVIGYRFTVNPRRQIQHHYGKICATIVTVDMPRKRMAEAICMLHELKLLSVSGTGWILLVKDRKGSFPPQKLAIEISSVAYLQQIWWFEVVGKIDFSFPVGTYSLYFRIHLGKFYKRFGRRV

SEQ ID NO: 199662 - protein, 110 aa, Oryza sativa
  Clone ID: PAT_MRT4530_95207C.1.pep
MAAASAAPFQVSISTSRSTTAADVPTRRSAASPSRGFVTTVPAPVTSGYSFLSQSHNATLSFLYTKRPLLSSHWRDKIPTVSLSLLWPQTEDFPSLKPAAVAVGTENGVP

SEQ ID NO: 199663 - protein, 320 aa, Oryza sativa
  Clone ID: PAT_MRT4530_95208C.1.pep
MSNYMTYLLFVNPEMLMPGTRRNLFTDAYNELKGVVKEKNPPLDERELAERIIAEVQQQLEEITGEDKSPSSKRGLIEDAWSIAEELLKLEDDEKMWRVIEGVWVEMLCFSAARCRGYLHAKGLGTGVEFLSYVWLLLHYMGMETLAEKLARGDLQNRGHSGNLRTFHVRESSGEEQVAGPSTSYANGDNGDQHVVAPFSEDGFTLAGDENGLLVIWTGQTGQVLPVNPELCERSDWLAHVGPDRRPSRHHLCRPRCRPLPLWLRRHQCIYTIDEEGARKDKAMSGLCAHDELDGSPIEFGLARHLRLIFKIDWVQCLYG

SEQ ID NO: 199664 - protein, 410 aa, Oryza sativa
  unsure (1)..(410): unsure at all Xaa locations
  Clone ID: PAT_MRT4530_95209C.1.pep
RPPPVRRRSAPLLEGRRGATPAQTLGNIVVSIVGTGVLGLPYAFRTSGWLAGALGVAGAGAATFYCMLLLLDCRDKLREQEEVDHDGNYTYGDLGEKCFGAIGRYFTEVTIILSQTGGSVAYLVFIGQNICSVFPTTAAGGEEPPRRVSPAAVVLAVLLPAEAALSFIRSLSSLAPFSILADACTVLAVATVVREDVQLLAGRGGSPFQGRSALAGLWGVPFACGVAVFCFEGFCLTLALEASMSDRRRFRPVLLHAIAGVTAVYVCFGVCGYLAYGDVTRDIVTLNLPNNWSTAAVKIVLCVALALTFPVMMHPIHEIVEARLRRXQASRVAVVGAVTAVACFVPAFGEFAAFVGSTVCALLSFVLPALFHLRLVGAAASAWRRAVDGGFLLLGLAFAAHGLYTVVSGL

SEQ ID NO: 199665 - protein, 234 aa, Oryza sativa
  unsure (1)..(234): unsure at all Xaa locations
  Clone ID: PAT_MRT4530_9520C.1.pep
FFQVIKHLRYSAVSVPPQYEENFRKAIWAFQFQRVYDPVTEDIVHLSGIPHGSSEDLDFLGPWLPQTVAKGIAQGNIDPITKEPFEGKTESSALAFDKVHLNRESSAPSNGKKKLDLPVQRNVLTNYFCLASLEAKRKFRAPKVTPKQQVLNGSLPSPRIEDSGTPDLIEDTSLPSNNIQVYQCSSEHFSSXTPLDDSINTASQCSSERVRCDIPXDDSASVFTQXSHDIGSDP

SEQ ID NO: 199666 - protein, 229 aa, Oryza sativa
  unsure (1)..(229): unsure at all Xaa locations
  Clone ID: PAT_MRT4530_95210C.1.pep
EIVPLNAGNVLVIEDNEPAARWLVLINQALNRPAETNANVFQNEPSPSVDSSVSRASSSLDTSFSDLAKTSSSSTIFQKSNLKSIRKSFMPVHRKRLKACNCPVEMAKSSYRDACFGCPKAYAYEIDSSEEDEREEKKGQSRDSNGSVRSEVISPPTARDELKYNLIAXGCISVSMTLHQTSFCFICSHLASXKVIWFGDLNYRIALSYADTKNFLMENNWDVLFERDQ

SEQ ID NO: 199667 - protein, 288 aa, Oryza sativa
  Clone ID: PAT_MRT4530_95211C.1.pep
MAKTMEQRRRGTENRADLTKPKASWANDSLTRVGSDHNPILVELENQITPSGPKSFKFEKGWIQQEGFKAWIIDIWPERRKKHILDHWKCQRYILRRKMRGWAMNKKKEINKEKEELISQIQKIDEEVEKKELTCEEWGHRYELEGALNQIFISEEIYWQGRSGEKWMLEGDANAAFFHGVANGRKRKTTIRSLEGEEGPIENADELKEHIYGFYKKLFGMELPPKFCLSHNMWEGRGRLSSEDNIELTKPFSMEEIEGALREMKTNTAPGPDGFSVSFYKEFWPQVM

SEQ ID NO: 199668 - protein, 322 aa, Oryza sativa
  Clone ID: PAT_MRT4530_95212C.1.pep
RYFTEVTIILSQTGGSVAYLVFIGQNICSVFPTTAAGGEEPPRRVSPAAVVLAVLLPAEAALSFIRSLSSLAPFSILADACTVLAVATVVREDVQLLAGRGGSPFQGRSALAGLWGVPFACGVAVFCFEGFCLTLALEASMSDRRRFRPVLLHAIAGVTAVYVCFGVCGYLAYGDVTRDIVTLNLPNNWSTAAVKIVLCVALALTFPVMMHPIHEIVEARLFPSAGGWARKRAAVQASRVAVVGAVTAVACFVPAFGEFAAFVGSTVCALLSFLLPALFHLRLVRAAASAWRRSVDGSFLLLGLGFAVHGLYTVVSGPLNMG

SEQ ID NO: 199669 - protein, 65 aa, Oryza sativa
  Clone ID: PAT_MRT4530_95213C.1.pep
PLAASGCYRLTMACQARSINMRIVQGRLSSSRRARLLVVAPPPSPLQRTRSRKEESTKSTESQVA

SEQ ID NO: 199670 - protein, 138 aa, Oryza sativa
  Clone ID: PAT_MRT4530_95214C.1.pep
QRGVWGESGGGAILKAAQGALAACGGEGGWRGGSVVRGDGPLEGPVPVRLRVRRGGLWGQWVPTGTFRAFHYRRERDGGRGVHVLKSNLWETITNPSPSLTFVGATISPVLLSLTLHTTPYVPSLIVLSFQTINDLTT

SEQ ID NO: 199671 - protein, 341 aa, Oryza sativa
  Clone ID: PAT_MRT4530_95215C.1.pep
MGLGRSPSTASLCEKPLKWLLDRNNESFSTSPYLHLKTVVGLGEEFASCAPRDNVVPRMLWYKVKSRDEERRRKEGIDRCRKMPGCTLAQRYGMCVGSLYVPMPGFRYSSRQAAARRRCQRLGVAKSSGGHSSHSSPVYPFPFLSSIPCRHPGSPSWPSVEEHALTGAPSVLCEWPMLVCLFARCLSGCAQSRIENEEAVAKCKERRQWMKSVVQARNAFAAVHSAYAMSLRDTGAALFEFAHGEGVLPPPPPPPTTTGPRGRRRAPNGGDLIRGSRSLSVSEGSSDGCLLHGDVPQQALVLLAAARPQRVSIPASSLLSRLYYNNGGQSKWILSWSAVAG

SEQ ID NO: 199672 - protein, 90 aa, Oryza sativa
  Clone ID: PAT_MRT4530_95216C.1.pep
PVRDKASWVKMNGPKVNPPINEKKVGRPRRCRRKQPHELEGGTKISKHGVQMHCSYCQGVNHNKKGCKKRKNYSTKKWKVQILIRREPTT

SEQ ID NO: 199673 - protein, 44 aa, Oryza sativa
  Clone ID: PAT_MRT4530_95217C.1.pep
MAATLGRDKGTWIDALGQRFPPATPLAASLPTVTSLLVADEFPS

SEQ ID NO: 199674 - protein, 257 aa, Oryza sativa
  Clone ID: PAT_MRT4530_95218C.1.pep
MEHEFDDYFKDASLMEQRPIDNSSITCETISVTPMPKTGMASNPLPISPIDFDNKKVLIRPSQAESTKGKNVIIRDPRPKTIRINNAKAEDYKVTKDESSSSNKTKKPKLTVEMLMAKYKKGLADRFDNRPSDSKRPRSSPRKRFGQTAKKSEPSTIPTPYKPPVVTPWYPYPMSLYGYPFMYYMPWMPQSPMSFHQEWKESPRTVPSHSFNSRQDRFSHKNRSGGSKVKKVKKVWVRKEAKALEVVTTKEESQDVQ

SEQ ID NO: 199675 - protein, 95 aa, Oryza sativa
  unsure (1)..(95): unsure at all Xaa locations
  Clone ID: PAT_MRT4530_95219C.1.pep
FPSVGLGTWQSDPGVVGNAVYVAFSPGYRHIDSGSAYTXXKQMSLHSXLASEEGVVKREDLFITSKLWCDHHAPVHVPEALAATLNDLQLEYLDL

SEQ ID NO: 199676 - protein, 425 aa, Oryza sativa
  Clone ID: PAT_MRT4530_9521C.1.pep
MGKPTLPPVVVVVVLLLLVVVLPATTCGADAGGGGEAEEFQIPRDGRVLELDDGNFDAAVRAAGLLFVDFYAPWCGHCKRLAPQLDEAAPVLAGLSTPIVVAKVNADKYKKLGSKYGVDGFPTLMLFDHGTPTEYTGSRKADLLVENLKKLVAPDVSVLESDSAIKSFVEDAGMGFPLFLGFGVDESLIVEYGAKYKNRAWFSVAKDFSEDMMVFYDFDKVPALVSVNPKYREQSIFYGPFDDGAFLEDFIRNSLLPLVVPMNRETVKMLNDDGRKVVLMILQDDESDENSPRLIKVLRSAASANRDLVFGYVGVNQWEEFTETFDVKSSELPTMIVWDKKEEYEIVEGSERLEEGDYGSQISRFLEGYRAGRTIKKKVGDRSPTLLGVNAVYILVFLVAVLVLLMYFSGQGEEDQRPRQRAHED

SEQ ID NO: 199677 - protein, 113 aa, Oryza sativa
  Clone ID: PAT_MRT4530_95220C.1.pep
MEAKLIALDTVTVEAECLHELLMDLPVVEKPVPAILMNCDNQTVIIKVNSLKGNMKSSRHVKRNLKSIREQKNSGVIALDYVQIAKILADQFTKGLSRNVIDSASREMGLRPT

SEQ ID NO: 199678 - protein, 448 aa, Oryza sativa
  Clone ID: PAT_MRT4530_95221C.1.pep
MSFRSIVRDVRDGFGSLSRRSFEVTLASLYGLTGHHKGKTQSSLDELDDSPAIIPESRWASLPPELLREVIRRLEADESTWPSRRNVVCFAAVCRTWREMCKETVLSPEFCGKLTFPVSIKQPGPRDGMIQCYIKRNRSKSTYHLYLCLSNVVTAEGGKFVLAAKRHRKTTCTEYTISMVSGNISRSSRTNIGKLRSNFLGTKFIIYDTQPPYNGAVVPHVGRTSKRFNSTKVSPKVPSVTYNIAQVSYELNVLGTRGPRRMRCMMHSIPASSVEPGGIVPGQPEQIVPRALEDSFRSTTSFSQSFRSTTSFSKSIMDPSMDFSSARFSDISGSIMGGDDNGEIKERPLVLRNKPPRWHEQLQCWCLNFRGRVTIASVKNFQLVAAPSPPPAGAPTPSQPGPADPEKVILQFGKVARDMFTMDYRYPLSAFQAFAICLSSFDTKLACE

SEQ ID NO: 199679 - protein, 1287 aa, Oryza sativa
  Clone ID: PAT_MRT4530_95222C.1.pep
MPLSRHEVGNEYSLGGRELYRRANQHDPEAVLDGVAMAGLVGVLRRLGVLPAFAAQVFHGLYDEVMTASARGHGLMLRVQQLEAELPLVEKDSCHTDYLYVASNRGIEWHSNPRLESGVVTKGDTPRFIMDSIKKCHGPPKLFMLDKYDIGGEGACLKRYTDPSFFKTDSACSSMLEQGIQRERRPLRAMEIRPTLQNSEIFRPPNAANNDSKLETDLSGEALDEVPTRRRQLKYRQLNGSVFRSFRPQMQNLYGETSPDEKPCSMNHSEVQISFTDSPDTNTEERDIMVDTFSSMDKGKENNYVMAGKNRLLSEEALSRSSDARSAGSSKGYNSEVDIYVDALTTMDSEVETDTEHRDHGHRALVPVESSKPCSDVHGAAVSGSISFRNNGSMVPNSSDVVPAEEENNDHHQGYVCVPSPQAKPVAGEHERSSSLEELFAQEKPVSCEHERTSSLEELLLGDVHPSGHNMRSSATESNTNGVVSTVESNGTVGTTKKEKDNPIIAGISFKKTASKKSKYVGSMELIVSKVGILPRKLSKKHDPFSDSLRNMAKQLLELKIDGTKDTELYEFEANGEGCDMKCLEMSHPPIEIMGSATQSVPPDSPQDNVDSRACRPEEVNQEYDHDVPPSDSPQDSVDGNVFRDIALLRSQEEQQCAGPVTVDNLLDHAPENTQDQIGEHFYREVTEDIHTEVVPENGPDIGEELEEGSITEEKVNEEDVEESNESDAYTLDENTEYIEEQVVSDDLISSPISSKQSDDPCQMAPLTLTDADDALAGTITESNVSTVVVESATTNDVAVQYNEQCCLHPETSFAQDLTHVSSCEVEGQNEPLPLCSSSMVGTTPDLSVDTEEIHENPILCIDSSSDLFRDALAPDSRDVPLPNISSFDWMLNGAMQKSLNVLPAKPPNGILQENNSSKDTEDAPPPLPPLPPMQWRTTKLQPGPAVLSAKFGRPPRPKPPVKYQENESYSSQDERNREPEILQEASLQNGSTSVTPEKEMVVAKVSNEIQTNIMFGRDSQESHLKGLNEYDVQASDSFSTSEFKSVGGVASVEGDNLETSQLSELIVIPEEAWSELVDIKSISGQEKGGKRQLSTGVFNCNGMHTTGLSAEKRDDYKIYDQNEKNLLAGKGNAIADSEEKEPNGVTCQDDTKNSDLLVQQEDGQHDSSAGTARESSSSFEEEVAKFSPPRVPTPPKYPLFQVTAHDRSMLKRAPTLVQPSIKLSDENNTILEQIKNKSFNLKPVLAKRPNMMGAPRTNLQVVAILERANAIRQAVADDDDEDSWSD

SEQ ID NO: 199680 - protein, 181 aa, Oryza sativa
  Clone ID: PAT_MRT4530_95223C.1.pep
RQHVRQRTGQPVAHLDMSGAELKRNLQDLRIQGTEKRVETYKNISKVYGASLTKVTTLNPFINDIFEKLVQSNKKPVKKQEEISLETWETQCARHGNKPHGVEAPSMRNTNGLGALGRGPSTPHCPGLTMGREPFGEQLIHPHLRDMTPHVASREPMSAEGIGGVDMPLPYHSSIFNLATL

SEQ ID NO: 199681 - protein, 98 aa, Oryza sativa
  Clone ID: PAT_MRT4530_95224C.1.pep
FWKGARPPPPPWLEVWRLDLPPVWIQWAPLPPQDGVLQGHPPPGLRPWGVISRPGPIVLDPMRLPPVAPTPKNSVKSCVVSLKKKRKLNPKKFPPRFF

SEQ ID NO: 199682 - protein, 100 aa, Oryza sativa
  Clone ID: PAT_MRT4530_95225C.1.pep
PYIPTHASYIGQLSMHVSRTFSPPSTTVRVQHADYAQLEQDTHFATPNGQLGANRVAAPEIKPSRLNSTDKSRSPERSARVGWWLATQTSPLTKKAGNIQ

SEQ ID NO: 199683 - protein, 77 aa, Oryza sativa
  unsure (1)..(77): unsure at all Xaa locations
  Clone ID: PAT_MRT4530_95226C.1.pep
VVFPPFQRFFKKGFVLKTKSGKSLAQVVGHPNLTKSGVYXNWKKKWGFFKNQLFQKANPPKKAKKFWALNKKLVGLV

SEQ ID NO: 199684 - protein, 52 aa, Oryza sativa
  Clone ID: PAT_MRT4530_95227C.1.pep
MSGGVQEQFEIKFRLPDGTDIGPKRYPAASTVATLKESIAAQWPKGFLSSTR

SEQ ID NO: 199685 - protein, 59 aa, Oryza sativa
  Clone ID: PAT_MRT4530_95228C.1.pep
VLVTQYFYPNHNIGAPSRSSPVFIPHGPSAVRNMAAQVRDGLLQATATAGGGAAPPKAL

SEQ ID NO: 199686 - protein, 131 aa, Oryza sativa
  unsure (1)..(131): unsure at all Xaa locations
  Clone ID: PAT_MRT4530_95229C.1.pep
FFFFFFXXXXFFVDPKSLXILKXTXXXXXXXXXQXHXNXTXSXEKXXXHPXEHXXXKXLXXXGXXDXXXKAXXPPXXXXRXXAXXXXAPXXXXXXQXXXXXXXXXAXXXXXXXRXXRPXXXPCPXSXAXXR

SEQ ID NO: 199687 - protein, 250 aa, Oryza sativa
  unsure (1)..(250): unsure at all Xaa locations
  Clone ID: PAT_MRT4530_9522C.1.pep
HAGPLGAWAGNVGRGGRRAQAPLASLASDLEAFSRNPAHGSFAPLAFXPSAMTNCVNQRLRGGXVELLSRHGHQLGKTNLSHDGLNPAHVPYWWVNTPSLGEFCFTMXGRADIEGSXXPVALNAWLSHASYPCVCFSDTSSFQLRRSKGSXASLSRFVFVLRVXSXRAFSLLFLTKFLFSLSSSYXHLAYFLQMVPPQPNSPPDNVFRPGRPEGLGPLIPKEGARPPVSDYGFRKITLKVIGFFNLGPEG

SEQ ID NO: 199688 - protein, 74 aa, Oryza sativa
  Clone ID: PAT_MRT4530_95230C.1.pep
MGNRAQRSAAFAGFRRGARVRGARARVRVRVRERESVPASPARRAATQRAATGIVGVAGGGRSSGEQQIPYCAR

SEQ ID NO: 199689 - protein, 513 aa, Oryza sativa
  Clone ID: PAT_MRT4530_95231C.1.pep
MAFSRATAAAVVALVVLLPHLVAAVVLDVGGGVAARPCHSASVDGDAGCLSWRVMVEANNARGWRTVPAACVAYVRGYMTRGQYGRDLSSVMDQVAAYVDTVEADGDGLDAWILDIDDTCLSNLLYYEAKQFGYGEEAYDPSAFKTWASKGACPGIPAVLELFATLQAKGFKVFLLSGRDEETLATCTSENLESEGFLGYERLIMSIRVKCWLVTAKSPEYRGQSSSVFKSAMRKRLVEEEGYRIRGNVGDQWSDLQGDYVGDRVFKIPNPMSAHPPAAEASAYVESKRKLRPVRCYRQIKNKPYPKSRYCRGVPDPKIRIFDVGQKKRSADDFPLCVHLVSWEKENVSSEALEAARIACNKYMAKHAGKDAFHLRVCAHPYHVLRINKMLSCAGADRLQTGMRGAFGKPTGTCARVRIGQVLLSVRCRDANAAHAQEALRRAKFKFPGRQRVIFSAKWGFTRFKRDEYLKLKSEGRIVPDGVNAKLLTRHGSVADRQPGRGVFPPSVAGSDA

SEQ ID NO: 199690 - protein, 205 aa, Oryza sativa
  unsure (1)..(205): unsure at all Xaa locations
  Clone ID: PAT_MRT4530_95232C.1.pep
LRSTTLLKRGNNSKAEYNHRTQQATPMMQTCKGIQGWVSPPSXSGQRAVPSRAXGESGSDRGRRRAHPAPSRPPLPXMHQLEESYTTSSAVAHASLWXVRGILPGFPANREKALLTSSKGKGAPTDGPHTSAGXGRAHGGHGPPRPGQHRGPRPRVVHGRPQGRAPRARARLRVSGTAPDGGEIAAVLPGARTTATVQRRPTGDE

SEQ ID NO: 199691 - protein, 267 aa, Oryza sativa
  Clone ID: PAT_MRT4530_95233C.1.pep
KHIEKMDEAKPEAMAYLRKNHVRLWTRSQFSGQCKVDYVTNNLAECFNSWIRPHKGLHLVDFMDKIRHKLMVKWNRRRSISKKLEGNILPHIMNELNEKSRGLNHEVTRSDDALAEVECKGGSGHREGDPADYQAMLAERGPPKKRQKSSNAHAETSIVHVPSASSAQNAILSATMTYPPSKSCQTGKKGQDLSNTSSGEFSLGYIGGRTLASDGWPRARWASSSCLSQCPPLALANLGSWALFIARLPYQVGINLYANLERPVDHG

SEQ ID NO: 199692 - protein, 139 aa, Oryza sativa
  Clone ID: PAT_MRT4530_95234C.1.pep
EPVTEPAAEPAVAPVAETDALPPAVDNSCGQAVDNIDDPMLQPEPEPQPEPEPQPEPEPQPEPEPEPEPQPLAPPFSQVVLEAQGPVRRLAWTPGRDCPAELLALAAQLDQPTAAAPLVNDLALLEMVRIARERNTCAA

SEQ ID NO: 199693 - protein, 284 aa, Oryza sativa
  Clone ID: PAT_MRT4530_95235C.1.pep
MGWEAAAEAEGSCCAGACARCIFAAGERSFRTPLADSLRTCDDRGLKRRRLTDADALRAAVADVLPRFLGSYTDDILAEYIVILVCNGKHQYQARDDLEAFLGDDSAKFVSWLWGYLSKKALTLADNSSIQHGLTNEIRNRSTKKNLQVANALSEDTFICPSRFPGPDRLLPVTRIYRKSFQIQIMVTGWSIQISHHLKSIILFRSMTQLKDKMWPDATLARRLLLLLKSWLTINVIGRANIRRAERSEIIKWQKFLHTEVWCSCKDSTSIATSKDTGFFQARY

SEQ ID NO: 199694 - protein, 68 aa, Oryza sativa
  Clone ID: PAT_MRT4530_95236C.1.pep
SQVLPALTVSRPCSCYQICSPDVLKLHRCLIRSLSDIIRTGIQQTDKTSAYYTAEGANKVIISVVCCE

SEQ ID NO: 199695 - protein, 502 aa, Oryza sativa
  Clone ID: PAT_MRT4530_95237C.1.pep
IFFAISFPSPLPKPSPRLRRSADARASPSPPPPRRKKDSLFRRVAAAADPRLPLSPVLEQWCLAEERPIAKPEIQSIIKYLCRRRRFSQALQLSMWMTERRHLHLSPGDVAYRLELISKVHGLDKAVEYFDAVPNQLRELQCYGSLLRCYAEAERVEKAEELFENMRGMGMANSYAYNAMMNLYSQIGQVERVDSMYKAMEEGGIVPDIFTIDNLVSAYADVEDVEAIEKVLEKASCNNLMSWHSFAIVGKVFMKAGMQERALQAFQESEKRITARKDGRVAYGFLLTMYADLQMDSEVDRIWDVYRSKVPASACNTMYMCRISVLLKMNDIVGAEKAYEEWESKHVYHDSRLINILLTAYCKEGLMEKAEALVDQFIKKGRTLFSNTWYKLAGGYFKVGQVSKAADLTKKALASASNEWKPDLANVLMSINYFAEQKNVEAAEEMASLLQRLVPPTRDIYHGLLKTYVNAGKPVSDLLDRMKKDGMEADEETEKILAGEVH

SEQ ID NO: 199696 - protein, 1135 aa, Oryza sativa
  Clone ID: PAT_MRT4530_95238C.1.pep
MATAPLAFHLPFPFPSASRPPPRLLPPSRRPPAARLAATRRFRPPTADDEPPEAAEDSSHGLNRYDQLTRHVERARRRQQAEQPEITPDHPLFSSPPSSGEAGSYDPDDEFFDEIDRAIAEKREEFTRRGLIKPSAPAPSQPEEEDGLADELSPEEVIDLDEIRRLQGLSVVSLADEEDEEANGGGGGVDYGDDGVPLDDDGEVFDVADEVGLEGARVRYPAFRMTLAELLDESKLVPVAVTGDQDVALAGVQRDASLVAAGDLYVCVGEEGLAGLTEADKRGAVAVVADQTVDIEGTLACRALVIVDDITAALRMLPACLYRRPSKDMAVIGVAGTDGVTTTAHLVRAMYEAMGVRTGMVGVLGAYAFGNNKLDAQPDASGDPIAVQRLMATMLYNGAEAALLEATTDGMPSSGVDSEIDYDIAVLTNVRHAGDEAGMTYEEYMNSMASLFSRMVDPERHRKVVNIDDPSAPFFAAQGGQDVPVVTYSFENKKADVHTLKYQLSLFETEVLVQTPHGILEISSGLLGRDNIYNILASVAVGVAVGAPLEDIVKGIEEVDAIPGRCELIDEEQAFGVIVDHARTPESLSRLLDGVKELGPRRIVTVIGCCGERERGKRPVMTKVAAEKSDVVMLTSDNPANEDPLDILDDMLAGVGWTMEEYLKHGTNDYYPPLPNGHRIFLHDIRRVAVRAAVAMGEQGDVVVITGKGNDTYQIEVDKKEFFDDREECREALQYVDQLHRAGIDTSEFPWRIATSSEFRRKVASFVSHFVHLSSMDPATRAAAAAVEKVFVALPAEKGKTTLSWALGHFRGSGAKLVVTHVHVPPQTIPVKCEKLVIEKEDVVAGLLELIASHGITKLVIAAAADKHYSRKMDKPKSKIATEIMQRADASCQIWDKKVETTQSVTPLSQLFKIDTPPSPDIGQTILQPSAEQEQVKQFEELYLEEVKRRKELEGALVKANLELTRLKQEMDIPRNHQSTILGDRQEVITDKFILRQQTVDMKSDFGATGQLIKPQQEYLQLHPDHDNGVRQPETLLHRRSLTAFSPASTVPSQFDKDSIPSHFICPISQEIMREPCIAADGFTYEAEAIINWFDEGHEVSPMTKQPLVHRDLIPNFALRSVIQDYTRRKQYSFS

SEQ ID NO: 199697 - protein, 418 aa, Oryza sativa
  Clone ID: PAT_MRT4530_95239C.1.pep
GPAPPAFPRPGAVVPRRGTPYREARDPVHHQVSLPPPPLLSGAPGAGRTTNLRIPLFTTSVAASFDFVLFSFLLQLSMWMTERLHLHLSPGDVAYRLELITKVYGLDRAVEYFDSMPDQLKQQQCYGSLLKCYAEANCVEKAEELFEKMRGMGMASSYAYNVMMRLYLQNGQVERVHSMHQAMEESGIVPDVSTTHTLVAVLRKKKTLVAAYVVAEDIKAIENVLEKANSCNSMYMCRIGVLLKMNDMVGAEKAYEEWESKHVYHDSRLINLLVDAYCKEGLMDKAEALVDQFIKKGRMPFANTCYKLAGGYFKVGQVSKAADLTKKALASASNEWIPDLTNVLMSLNYFAEQKNVEAAEEMMSLLQRLVTPTRDIYHGLLKTYVNAGKPVSDLLHRMKKDGMEADEETEKILAGEVH

SEQ ID NO: 199698 - protein, 168 aa, Oryza sativa
  Clone ID: PAT_MRT4530_9523C.1.pep
MAVIAAAGGEGDAGVIAHVVVDVDESCAAAADDDDRSRRPSTGCRICHLGGGGDGEMAAESGSGRLVRLGCGCRGELAAAHRRCAEAWFSVRGNRRCEICGETAENITGWGGGGKEFMKRWHATAGVDVEGSSKACSGFCKSHSLCNLLIACLIIVIVLPWLLHNHVL

SEQ ID NO: 199699 - protein, 60 aa, Oryza sativa
  unsure (1)..(60): unsure at all Xaa locations
  Clone ID: PAT_MRT4530_95240C.1.pep
MADSGVRRPAAELGRRQRERGRKTAGAMASSAAESSGARRGGXGERSGRRGGAGASTRET

SEQ ID NO: 199700 - protein, 107 aa, Oryza sativa
  Clone ID: PAT_MRT4530_95241C.1.pep
VLTIIPRSFMHFLPEATLICEFFCCARMKCNDHLRGTTNCTTLTLLMFRRALFLERKELCHSLRNQSNIGRSSPCSKLGKPEAVLGYPAHQFDLTWTHQLDLLLHVR

SEQ ID NO: 199701 - protein, 122 aa, Oryza sativa
  unsure (1)..(122): unsure at all Xaa locations
  Clone ID: PAT_MRT4530_95242C.1.pep
IRNQXSVCRGRSXRGSXCXHXXXPXSXFLAYXNNKXVVSLEXFAXRPSXVVDXGVPTXXMSDNEIQXNGGGHGXXSXXPXXGAXRSXXRRGXPXXDXXFXIVXVGXRXCXAGQSKXCKGXCX

SEQ ID NO: 199702 - protein, 1002 aa, Oryza sativa
  unsure (1)..(1002): unsure at all Xaa locations
  Clone ID: PAT_MRT4530_95243C.1.pep
RRGGGASVSVRQTXKDFPFGSAIASTILGEXAYQKWFGDRFNAAVFEEELKWYSTEPMSGQLRFDVPDQMLAFVRSHRVMVRGHNIFWENQDATPSWVKGLSPDDLRAAVNGRIQNLMTRYRGEFAHWDVNNEMLHYNFYELLLTAAASLLVAFLLARLLASAATASDPRRRAPDHAAVIAEEEAVVVEEERIIEVDEVEVKSARARECVVSEGWVEVGRASSAEGKLECLPEEEEAPAKAARELVLDAVLEEREEEGQVGEERCDLAAAVAEVVGVKPHELGVEAAPGEVSDVTLEEGKVQDVGVEQHDLVAEAAPREALDTGLEKQGVPIIEAVEIKRQDDLGAEVAPSDVPEVEFEQQGVRIIEAIDVNQHHRVALAAPAEVVDAGLEERVQAIEAGSSGLTSETVPEEVLDELSEKQEEQVIEEKEHQLAAATAPVAIPGVALAETEELKEEQSSEKAVNVHEEVQSKDEAKCKLHLVDQQEGSASKVELVGRNTDNVEISHGSSSGDKMIAELTEEELTLQGVPADETQTDMEFGEWEGIERTEIEKRFGVAAAFASSDAGMAALSKLDSDVQLQLQGLLKVAIDGPCYDSTQPLTLRPSSRAKWAAWQKLGNMYPETAMERYMNLLSEAIPGWMGDNISGTKEHEAGDDAVGSVLTMTSNTINQHDSQGNEDNTGMYEGHLTSSPNPEKGAGAREPTERRTARLTKAGARRDERRTSAPRLGNRQLLWQGGNRIGLGRILYSRRLAPRQAMMRFFACGGAQRPSLPAALHLLLPSVGPVFEHHKGTAPNRFLEEAASAEDQLAIAKPESFLRSALGSWKMRRFSLHAVRYLVLWMLLRCGRELVAAVPPDGWYDYTAYTDPEPALYNGGILRFGNSDDPTGYRTTETGVFSPAFVVYNLNKTTMYTFSSWVKLEGASSALITARLALDNAGARCIGTVLARNDCWAFLKGGFVLDWPTQTSVIFFQNADKTPMKITVENVHPSVQLAIAKPEQLPS

SEQ ID NO: 199703 - protein, 50 aa, Oryza sativa
  Clone ID: PAT_MRT4530_95244C.1.pep
GRVGGRVGFSTLYAPLIPDGRVEKFYWASTPDHRVGVCKGIFRTDNLPDE

SEQ ID NO: 199704 - protein, 224 aa, Oryza sativa
  Clone ID: PAT_MRT4530_95245C.1.pep
WPIPTAAAASPPVIQIKPTPPRPGESPPSMASPAARAGPPTPTSPPARTSRRTWPTASATRPTTSGRGRGLGLAMTRVAGLMTTTTTGPGKTSAARLTSTTSPARRARSPTSVHLTNRGRKPPTPTWLHWRRWQRDPTTSTSRRCTSTAPPPSPPRHPHSHPHRRAPWDPLPHRCRVTGLLTITTTTHVTYPGKTRAAELTPTTSTARRPSVQAPISSTTPREE

SEQ ID NO: 199705 - protein, 98 aa, Oryza sativa
  Clone ID: PAT_MRT4530_95246C.1.pep
MNSNISMAISFSLSLSSPPSLSSFSVPFSFSITPCPTSKTSCSSISSPSSSIPSSSNSSSSSSSSSSSSSPIATSSSSPGSPSSCVSGVDVDVEGTTL

SEQ ID NO: 199706 - protein, 48 aa, Oryza sativa
  Clone ID: PAT_MRT4530_95247C.1.pep
MRRNCIERAKHKRECGELNAPLPLCDPGGDACIAWCINEGYANGNICP

SEQ ID NO: 199707 - protein, 118 aa, Oryza sativa
  unsure (1)..(118): unsure at all Xaa locations
  Clone ID: PAT_MRT4530_95248C.1.pep
SSPSFPSHDPALPSVFAPHPGTPPAPDARQPRRRRPCRRGSSSTHPRSWTAASSWRTPSAPRPAGHRRXTGRRPAPLHGPEPLGGXTRSSSPASPPRRPRLPIWSRPPRRRWPPEATR

SEQ ID NO: 199708 - protein, 54 aa, Oryza sativa
  Clone ID: PAT_MRT4530_95249C.1.pep
FFFFFFFCFVDADIHLHNHQSLEHKISTMLLLSRYRIRCLRGRFLNRCSFMFID

SEQ ID NO: 199709 - protein, 137 aa, Oryza sativa
  Clone ID: PAT_MRT4530_9524C.1.pep
GAKVRFTSLHNSTVSDAVRLSTDVQIDFVDIIWLCNRPSTWYISNFQLKLLPMPPSSSTSKLQYVVANTNIEPNYPSSAKVFRIERYSDDDNMTYKLLTCITHGKPCKYLGFQVFGDNKFLVATDEPLAVQIVKEYT

SEQ ID NO: 199710 - protein, 58 aa, Oryza sativa
  Clone ID: PAT_MRT4530_95250C.1.pep
MASHGIVRDALVGAGSNPMEKPIGNGMAVTPSGKTKLRDIAKNTNASSDYKRSKQPVY

SEQ ID NO: 199711 - protein, 237 aa, Oryza sativa
  unsure (1)..(237): unsure at all Xaa locations
  Clone ID: PAT_MRT4530_95251C.1.pep
LAPSIYDAVPARFRNHRTVAEALLNKRWIQDITGALGMQAILEYLSXLASDEVYTALGPGGFAALESSPIXKSLASPKYRYFIWLVALTRYXTADRLRKRGLPHPAKCVLCDQCEESIDHLLIVCPESCQLWWMALNAIGHAGCLPLSDSSFHLWLCDSTMKQCKEHRRGFDTIVALVAWTIWKERNNRVFNQQQRSYXVASAMAAEAELXRLARLAVPELLRHEERRCRSIRSDKR

SEQ ID NO: 199712 - protein, 59 aa, Oryza sativa
  unsure (1)..(59): unsure at all Xaa locations
  Clone ID: PAT_MRT4530_95252C.1.pep
PSFFPLFGTCQKKHPFRAFLVGLKKKIFSPQNGRPPPPPYGIXVQKVDPKGPSLRGVLM

SEQ ID NO: 199713 - protein, 472 aa, Oryza sativa
  Clone ID: PAT_MRT4530_95253C.1.pep
MAGPGSSRSRPDASSVGVGVGAKLAVESVAYVATACLYFCSFSSWKEKTVSGTFLAVVTVVVVSVEATTGNDHGVAILIGTIVALVVYCIWKPYQALLSCIERRLRRKAAAAATAAEPLPPEKKEDAGRPLVQAERLRAAFRIDGLLREYSHGEIQAMTDNFGCVVGRGGSATVFRGVLDDGTAVAVKRIVCDESVGEADFLSEITIVASVHHYALVGLLGYCLQPGGGRYLLYPFYENRSLDYWLFSGEERRRHVAVDVAKGLAYLHHECKNQILHLDIKPANILLDGDFRAHVSDFGISMSIGRDLTSVDTRWRGTLGYMAPEMLVNALSAKSDVYSYGMMLFELVGGRRNFELAGSGGASQARAPPDFTKEFLPCVMRDRMEEGRLMEVVDATMARGDGGGAAGVDEEEVEVVVKVALWCTQHSRDMRPGMTDVVDMLEGRAPIPPPPVRPEFLGDTFLVSCARTAMSR

SEQ ID NO: 199714 - protein, 330 aa, Oryza sativa
  Clone ID: PAT_MRT4530_95254C.1.pep
MATARRLLPVTLLLISLSRALCTTFTLTNSCAYTVWPGLLSSAGSPPLATTGFALAPGESLAVDAPAAWSGRVWGRTLCGADPGGSGRFACATGDCGSGALECGGGGAAPPATLAEFTLDGAGGNDFYDVSLVDGSNLPMVVVPQGGGAACGATGCLVDLNGPCPAALKVAGADGAGIACRSACEAFGTPEYCCNGAFGTPATCRPSAYSQFFKNACPRAYSYAYDDATSTFTCASGTASYLVVFCPIISSLKSSVGGGATNPSASGTGLPLINDTVSFLNRGGGGNGGYYDASSSASLTAPSPLPVAGQAAAAVLAWLCTARGRHWLPW

SEQ ID NO: 199715 - protein, 46 aa, Oryza sativa
  Clone ID: PAT_MRT4530_95255C.1.pep
TITQHSFAQHDAHSCHKPGHILTDSGSEARCLSPVREDRRPSPRHL

SEQ ID NO: 199716 - protein, 252 aa, Oryza sativa
  Clone ID: PAT_MRT4530_95256C.1.pep
METAASLAAIFAGGRKWRWNSRGSGRHWYRRTVRAETVSLQPDLDAHHQWASGAKHDDDDDVKSTRFGCSSSSSSIGTTRSSSSSAIWTDANIGFQSGRSWRPPCKESCNVHADPQDNGTAQFFSPSNWTDRAVFVIETCCENQGQQNGVQSSPFGLSTGVSYHMIVRRISTNFNKISARFTVSDFNSQKPFEVSLEIYFSSTTKLQNVTVFVKSMNPDAGTVGSIKYQQHMYPGIPDSRARSTVKSNINKC

SEQ ID NO: 199717 - protein, 269 aa, Oryza sativa
  Clone ID: PAT_MRT4530_95257C.1.pep
MPPPSPHPPHRNGNHVPAPSGESFAKFFECWISEQSRDLAALRSAASAATNPAAPPDDAELHRLVNRVLGHYEHYYRTKSAAASTDVLRMFSPSWTSTTENLYLWCGGWRPTAALHLLYSKSGAQLETQLPVFLAGGGLGAGDLGDLSAEQLQAADQLQRITVSKEREIENAAASAQESLATVKMVELAGGGGMDAEGMEMEMRSKADGMRRVLEMADGLRLETMREVVALLRPSQAVHFLIAAAELHLAVHEFGRRKDGDGAASPPPA

SEQ ID NO: 199718 - protein, 83 aa, Oryza sativa
  Clone ID: PAT_MRT4530_95258C.1.pep
CVFFTEQNALVPARPPARVSSCSDARVYSACTWVCRNGVVYDAAPTASCVLFNERALVSCVFRLGMSDSASHEVCDHVSVSLL

SEQ ID NO: 199719 - protein, 53 aa, Oryza sativa
  Clone ID: PAT_MRT4530_95259C.1.pep
MMAFFFFFTCSVRNQVAKAPDGNGGVYAALKSRRLLEDMSSRGVKYVDCYGVD

SEQ ID NO: 199720 - protein, 72 aa, Oryza sativa
  Clone ID: PAT_MRT4530_9525C.1.pep
MAIYAMRGVVGVTNQALGAMISVRFSGKMWSAAEQLDAAAFRAPLPSSPGIVSGGALINDVLTDDVLHWLRV

SEQ ID NO: 199721 - protein, 326 aa, Oryza sativa
  Clone ID: PAT_MRT4530_95260C.1.pep
MVTGVEQMVCVTGAGGFIGSWLVKELLHRGYAVRAAVRDPEGRKNAHLHALERAKRRLSLHRADVLDCNSLRAAFNLCDGVFHVASPVSDDPELLPTAIEGTKNVINAAADMGIKRVVFTSSYGAAHMNPNRRSDQTLDETCWSDLEFCKQTQNWYCYAKTVAEKTATEEASKRGVQLLVVVPAVTVGEMLQPTLNASVYRVATYMRGTKSAYPNAVAAYVDVRDVARAHALVYEHPDARGRYLCIGSVLHRSEFVRLLRELFPQYPITTRCEDNSKPMVKPYQFSVQRLEALGMQFTPLKESLYKTVISLQDKGHLPAISPRSAL

SEQ ID NO: 199722 - protein, 447 aa, Oryza sativa
  unsure (1)..(447): unsure at all Xaa locations
  Clone ID: PAT_MRT4530_95261C.1.pep
MGRKESSTTTTTTAAAAAAATRSMRLPPQHQALEVKIPSFFRCPISLDVMRSPVSLCTGVTYDRASIQRWLDSGNTTCPATMLPLPSTDLVPNLTLRSLISHWSSSSPATSGDASVTSSPAGLVRQVASPDADPSAALRQLAAYLSDDDVDEFEKNALVGAGGAAEAVASVLRRKGEREVGVEGCEAAVRVLAAVVAMDGVEDANKRRVAAGLAADAAASAASLARVMRGASGLEARVDAARLVEFLLANAADEAREAVAESAELVAELVRLVGPADEKGSLDARAVGAGLSCLAXLKTEQXNNKEAVQAKYRHEQIKYHGGGXAASARALRVLESAVGCAEGRAALCEDAEQAVPAVVGRMMKSGRDGAEAAVAVLWAVCHKYRDRRAADAAAASEGGLTRLLLLLQSGCSPAARQMALELLKIYKVNAKSCLAGYDSKTTHIMPF

SEQ ID NO: 199723 - protein, 141 aa, Oryza sativa
  Clone ID: PAT_MRT4530_95262C.1.pep
MENLALLWGIIGPGVAGAVFGAGWWFWVDAVVCSSVQVSFLHYLPGIFASLAALMFNAVNKDEIGYDYYSPYGDDSEWRVKLWLFVAYVVSFVCLAGSVGMLVQDALTDKGPSVWTGVAGVLQCVLVLISGLIYWTCHSED

SEQ ID NO: 199724 - protein, 194 aa, Oryza sativa
  unsure (1)..(194): unsure at all Xaa locations
  Clone ID: PAT_MRT4530_95263C.1.pep
LSRRAKLAAVIALRGDGPSHGGAWPKMAASGSASGERRGLGRRHERGRREXERGRGGSGEQFIGGGGXADVAGKAFDFTGDVGWRERESGVGFEIESRPLERARGAGATGRGRRRGEDAGMARRGRGRSGGGGAAAAVAGMGARLEVGDDPTGGAHLSAPGREREGGSTLGRGREERAAKEGAPSVGREMGRQP

SEQ ID NO: 199725 - protein, 216 aa, Oryza sativa
  Clone ID: PAT_MRT4530_95264C.1.pep
MAKVAENCGQLSSMAFRQEQLWFNANERIPWHEKLDGEEAGRKRVHELVSLGNLETAVSLLLSTPPEGSNFYPNALRAVVLSSAVSRSLHELAVKVVAANMVRTDKSLSGTHLLCAVGRYQEACSQLQDAGCWVDAATLAASHLHGSDYARVLQRWGDYILRSEHNMWRALILYVAAGALPEALETLRKNQRPDIAALFLLACHEIYSQITTESES

SEQ ID NO: 199726 - protein, 567 aa, Oryza sativa
  Clone ID: PAT_MRT4530_95265C.1.pep
PSASTKPSTAPPPAVDDAAARSSSSSSPASAAAARKVRKVVKKVIVKKVVPKGTFAARKAAAAAVAAAAAVSGAAASSEAGGEAPTDEPASDQDGGVGNEQKLDESKPATDCNAVAVVEESVCKEEEEVALVVGKGVEEEEAGMSERRKRMTMEVFVGGLHRDAKEDDVRAVFAKAGEITEVRMIMNPLAGKNKGYCFVRYRHAAQAKKAIAEFGNVKICGKLCRAAVPVGNDRIFLGNINKKWKKEDVIKQLKKIGIENIDSVTLKSDSNNPVCNRGFAFLELETSRDARMAYKKLSQKNAFGKGLNIRVAWAEPLNDPDEKDMQVKSIFVDGIPTSWDHAQLKEIFKKHGKIESVVLSRDMPSAKRRDFAFINYITREAAISCLESFDKEEFSKNGSKVNIKVSLAKPAQQSKQTKEDHKSSITGEGKMKTSKIRYPVQDYTHIYSGEKRPFSTLNRVADSFSLNHFASSYVSYGALPPATAESSLPHYHDSNRYPPHLGEAIKFSPTSAVLSKQAWQKMKLESASENYPRISACCDVFLVFLNCEELLNDPSSTFKGTRTSLLT

SEQ ID NO: 199727 - protein, 111 aa, Oryza sativa
  unsure (1)..(111): unsure at all Xaa locations
  Clone ID: PAT_MRT4530_95266C.1.pep
SCDFYHVSRDTREVSCDTCQVSDDFYHVSRDTREVSCQVSDDFCYVSRDTXEISDDTYQAGAAAMAGDGRGGKGRRRRRWRXGAGAAVAAVGDGDGGGGGRALLVDPQLSS

SEQ ID NO: 199728 - protein, 164 aa, Oryza sativa
  Clone ID: PAT_MRT4530_95267C.1.pep
MARGRIRGMVAGRGGGLAGCGRRWRCRPDLGGPQWQGSAIAREDAVTPQGSTPGRGGDFATGRGRYMLLLVQTMLGEWLRIKWSASGRPAGLRGAILPREITEEPGKASEVAQGIPRVIKEAGASEAPGATEGISSSGAWRAFGARSRGSGGGQGLRSFGGFQS

SEQ ID NO: 199729 - protein, 52 aa, Oryza sativa
  Clone ID: PAT_MRT4530_95269C.1.pep
MWLIPTGWVIRLTGSARPGWPLGKLIGPVAEDDEADPADEEFFQEQAGYDEF

SEQ ID NO: 199730 - protein, 50 aa, Oryza sativa
  Clone ID: PAT_MRT4530_9526C.1.pep
PEYRARPTRPPTRPDHSTIVYHHRMYLELWYQLYPILAIRLPLPSFMQER

SEQ ID NO: 199731 - protein, 169 aa, Oryza sativa
  unsure (1)..(169): unsure at all Xaa locations
  Clone ID: PAT_MRT4530_95270C.1.pep
FAAAAAAAAAKLASMGVFAVTKVSEGPVRPSAATPSETLPLAWVDRYPTHRGLVESVHVYLRRDDAAVEAVAPVADDGGVVVEGKKKEKKPAAAVVRGALADALVHYYPFAGRIVEDERSXGRPAVLCSGEGVYFVEAVAXCTLADVNHLERPLLLSKEDLVPCPTPEQ

SEQ ID NO: 199732 - protein, 150 aa, Oryza sativa
  Clone ID: PAT_MRT4530_95271C.1.pep
MAVDPLRRVIAPRFWAGVISMPILAVIFTAIGIWGGSLVGVDWKGVDSGSFWSVMQHSVNGQDLINGFIKSIIFAIAVVWIALFNGYDSTATSEGLLGEQYIVLNVGFMLEGETEYMIEGNSFADTNSAIVLEDLIGQFLYGDKKSATTE

SEQ ID NO: 199733 - protein, 142 aa, Oryza sativa
  unsure (1)..(142): unsure at all Xaa locations
  Clone ID: PAT_MRT4530_95272C.1.pep
GRWLSPPWNPPRALQPPPPPPDPLPPPNAPAPAPQPPWPCPPAQPKPPPWPPRPLEPPRPPTPPPPPPPPPPKPNPNAVPPGLCAELWPXAPAASGPRGPPPPVPPXPSGPEPCPDPASPXPSGRRRPPAPPPRLVTPLSVH

SEQ ID NO: 199734 - protein, 167 aa, Oryza sativa
  Clone ID: PAT_MRT4530_95273C.1.pep
MWWEWEEDGEEAARPGEEVPVDFDFISLLCKPKDYYKILEVGYDASEEAIRSSYIRLALKWHPDKKQGEENATSRFQEINEAYQVLSNPAKRREYDKKGILYVQDHNVVDYLNHGHADLPLLGGNDDAEFILCFDKWKVVGRELGKISADLLVTLLLPLNFQCVKTQ

SEQ ID NO: 199735 - protein, 93 aa, Oryza sativa
  Clone ID: PAT_MRT4530_95274C.1.pep
TPPGPPPPAPLPYPPPPAKGPPPPATGGAHCGGKKGGGGGGESASESDDGSSSSRTDMADAAGARSPKRSRRAAPMAADGARSTTLDQSLSEI

SEQ ID NO: 199736 - protein, 77 aa, Oryza sativa
  Clone ID: PAT_MRT4530_95275C.1.pep
MRGFGDGSAVERFGPRPGERRGEERADGSGSGSSCSASAACFGWSGHQKGEVPVKAKRYGAQLSWGMVERATAELQE

SEQ ID NO: 199737 - protein, 309 aa, Oryza sativa
  unsure (1)..(309): unsure at all Xaa locations
  Clone ID: PAT_MRT4530_95276C.1.pep
TLRSRSFMFTFSLRSRFIHLRSFVHVRPCXCTLSKVRSRMFVRLCTFKYNVKFMFVHVHVRXTFVHVPILVHVCFVRSRSFXSFTFSFTFVRSFTFTFXVHIRSFTWRQLAERRCGGRGAAAGRRAARVASAWRAARWRXARGTAAAWRRGATAALRGGGVAARRCRGGVVASRRVVPPRRRGAAESCSAATTSASASATRQPAATERERSRSERXELEREAAAALTPXMRCRRSRRRRRRRRARDDDEIRRRRRRGDALGSGGEGEAERDRSGQKLLSVGGEDEGAHRENIYTPRSLVPVDENKNNWE

SEQ ID NO: 199738 - protein, 63 aa, Oryza sativa
  Clone ID: PAT_MRT4530_95277C.1.pep
MGARASAFLRLEINRQPQRLKRAQPQRDAGQLMMILQARHQLAVRPDEKFCPNVSAADDAYYD

SEQ ID NO: 199739 - protein, 136 aa, Oryza sativa
  unsure (1)..(136): unsure at all Xaa locations
  Clone ID: PAT_MRT4530_95278C.1.pep
HLSLPSLWPAAPRRRASAVMQXTRRRWGKRHTGSPAGRRPRVAPPPAARAFRSGCKARRRAVARSLPVELKQEADPEKNVARRPVTRTAAARRRRTAWSAEPVARGQEETEEAEGRRRKATPVPPLPARGDPLEST

SEQ ID NO: 199740 - protein, 497 aa, Oryza sativa
  Clone ID: PAT_MRT4530_95279C.1.pep
MAGNMKLMLHTSGIFLDEEDGRSTKLFHSRCKVQSASCAFTIDDLSAVNLVSIELMEKLNLFTCSHPDPYLLEWTSCNLSITRRVKVPFLLGEFSDNVECDVVPVPMSSCHILLGWQWMKSHQLESDFSTNSYSLLHKGRHMILRPMPSTMFLLDREKRKQRTLEYVLSKKKEYIVKHGTFPSANVTCSDVAAVHAAQQIIVDGKCAIVGPWSLHDEMRENPCDKESHIAKLSESAEKSKLCDSTKCEVEYIQNISVDEKENKLDVTQPAPFQEQVPPTTRTSSIENFNDKYEHIDMLLQQNMSGATFLQGRGNDMSRHERFGPLAGINNMWVQSEVTVVAAYMRKINCYSVHEVHGEFCIDEKAFNMNGLYTRKGYQVHFPSDQTACHSELSTNGNLKLKTSCAGRTGNAQVTTMVMNVGFERHVWMELYYPMAHLGLGRSPSIISPWIEAFQSKEFLDKEEKIQFGLGLGQPGYTRTKTPVSVSSGVRFGRVSTC

SEQ ID NO: 199741 - protein, 77 aa, Oryza sativa
  Clone ID: PAT_MRT4530_9527C.1.pep
NTGSQKACIAKTKNYNDKKKKHVKVDIKGKKIGTQMVFFLLTKKPRKTRKYQKIHPKKNRMPRWKKKRKRGEENKEK

SEQ ID NO: 199742 - protein, 91 aa, Oryza sativa
  Clone ID: PAT_MRT4530_95280C.1.pep
MLHHTPRLQASTTSTTSWFMSSRVSKSAGGHSRSGHGAAVASEVALWGFKGARLPRPVAAPLHRPVAPYRFSTCRCYSMRATLAPEMSSPP

SEQ ID NO: 199743 - protein, 190 aa, Oryza sativa
  unsure (1)..(190): unsure at all Xaa locations
  Clone ID: PAT_MRT4530_95281C.1.pep
RRPLRTIRGRHRGLQRHPLIHPTVRGTDGGTRADSCRDAVAVVAQVLPQDKPEEITELADALSVAELMKALKDLGNKMGLDKGLGERTAASPPANLLSNSLMNTIITALDKPDVFLQAGAQATVETAIVHATVRTTDTAAHAIGAYIEPTSDYDYDHDHPDTVPQTVDEIADGLXTLCSTLNSANNAVVI

SEQ ID NO: 199744 - protein, 70 aa, Oryza sativa
  Clone ID: PAT_MRT4530_95282C.1.pep
KKRLINLIVAGLFTASMLPYAFFLLFPFFILLPNIYLTGRLFKPLFSKITGLTQLNPFASYCIFDSSRTN

SEQ ID NO: 199745 - protein, 166 aa, Oryza sativa
  Clone ID: PAT_MRT4530_95283C.1.pep
WIPGLQATLVAVLPMQEQLNMFAEYKEKLGGIAGEAAAARIVSESLFLVCAGSDDIANNYYLAPVRPLQFDISSYVDFLGNLASDFIKQLHRQGARRIAVLGMPPIGCVPSQRRSVAVDAAGGGRECEAAQNRAARLFNSKLEQEIGCLRETLQLQSIGYVDIYGV

SEQ ID NO: 199746 - protein, 126 aa, Oryza sativa
  Clone ID: PAT_MRT4530_95284C.1.pep
MRTPTRRGLSHRCPSSPELTLGDDVDSNHSRGDHGVAGGSGVGGDDSSAGRKRWRGLASSTDGEDDGRNPPSLSPTKPDPPFFHHRHLSRSGHYDVGSEIGGKKVKNVRYWSLGVIRTIAIVWGLF

SEQ ID NO: 199747 - protein, 560 aa, Oryza sativa
  Clone ID: PAT_MRT4530_95285C.1.pep
GGGGGGGGNTRELDQTPTWAVASVCGVIVLISILLEKGLHKIGEFFSHRKKKAMVEALEKVKTELMVLGFISLLLVFGQNYIIKICITEKAADTMLPCRLKASTIHAETGKGGEHGATPAGGEQGATPAGGEHEATPAEHFSLVGVGPPFTAAFSRPHHRLLAEAKMATKCPDGKVSLISINALHQLHIFIFFLAVFHVTYSAITMALGRAKIRGWKEWEKEAAGQDFEFANDPTKFRFTHETSFVRQHMNVLNKTPASFYISNFFRQFFRSARRADYCALRHSFVNVHLAPGSKFDFQKYIKRSLEDDFKVIVGISPPLWASALIFLLLNVSGLHTMLWISIMPVVTILSVGTKLQGIICRMAIDITERHAVIQGIPLVQVSDSYFWFSRPTFVLFLIHFTLFQNGFQIIYFLWILYEYGMDSCFNDSKEFVFARLCLGVVVQFLCSYVTLPLYALVSQMGSTMKQSIFDDQTSKALKNWRAGVKKKPAAASSSKHGDAGGDHAAASPHSGSPKGEAGGVALTQRKAGGGEAGGEQQAGGGSGSKKGEEGDYEFVKLEP

SEQ ID NO: 199748 - protein, 157 aa, Oryza sativa
  unsure (1)..(157): unsure at all Xaa locations
  Clone ID: PAT_MRT4530_95286C.1.pep
MASASGSSSSARGRAAAPRRRAALSPSPPYVAVAAGVGMGRHTELRDARTVEHHFAAGGEHVPSLPPPRPAPPRDGVHRPPPAPCAALRCRPPRLARHLQPPPRPPPASAAAHRPPPASPPCPPAXPRRPPPASPPLPLPPAGSAPAAPSRLPPPAA

SEQ ID NO: 199749 - protein, 48 aa, Oryza sativa
  Clone ID: PAT_MRT4530_95287C.1.pep
VQSMDMKYACFLSYSFNLSLCTLMVLRKMTYFLMQIGMFSDLFPFIRK

SEQ ID NO: 199750 - protein, 116 aa, Oryza sativa
  unsure (1)..(116): unsure at all Xaa locations
  Clone ID: PAT_MRT4530_95288C.1.pep
XNHTPTPVRTLFFAQFWDSQPGRFNESTQRPSPALFKLAHVLVVAPFVMKQAKFYIHHVYLEVILMMVMMPSFMTTMLLMPFLCMVLFNPFVSMILFHPKLAKTRASFGLKCLLRG

SEQ ID NO: 199751 - protein, 78 aa, Oryza sativa
  unsure (1)..(78): unsure at all Xaa locations
  Clone ID: PAT_MRT4530_95289C.1.pep
KXXGLKXGTHXLGXLMXNNEXLFQDPYWASHWGXLKGRGLPDAWVLRLRFQLCNTRNDLTYMILEKFVVSKSCVLDIV

SEQ ID NO: 199752 - protein, 89 aa, Oryza sativa
  Clone ID: PAT_MRT4530_9528C.1.pep
MLPRLPLHHRHDEDPLPSPVPPHSSTTSILVGPSISSTPTPSPSPPLLPPMPTPPPPHPRGHPPPRHLQRRLARLPLHVPPPLRCHPPP

SEQ ID NO: 199753 - protein, 91 aa, Oryza sativa
  Clone ID: PAT_MRT4530_95290C.1.pep
MGMKKRWKAIRWITPTIRMGCHGAIAAATTTTTIQPTMMAYRNGSFSDVPAYRNSGFGAVPASSTAMAELQEAWASEAKELNCMRCLTGGL

SEQ ID NO: 199754 - protein, 165 aa, Oryza sativa
  Clone ID: PAT_MRT4530_95291C.1.pep
MGMRWGKGGEGLPPWRRRRPHFPIALTSPLLVAVAAPGHLAVGIPIPRHGSSGGGGDEVGEGRRGPPPIATGNMMTMTDEVGEGRTGPPFAMAFTAQPFAALASTTHARPAIPRRCPSSPLHLERRRATHLRQCCTASRTRPPTPPGLPDEPGAVATTRLMEKAS

SEQ ID NO: 199755 - protein, 83 aa, Oryza sativa
  unsure (1)..(83): unsure at all Xaa locations
  Clone ID: PAT_MRT4530_95292C.1.pep
KSTLYLGTFISWLYFFFFSYIFPFFIXFNLLLFYLFSFFLIFISRSYISFIYYHSYIFTLYIFSISFSSFFIILFFTFYYFFF

SEQ ID NO: 199756 - protein, 130 aa, Oryza sativa
  Clone ID: PAT_MRT4530_95293C.1.pep
MCSSQPRNNMIRLAVGHAGTTRLATSFLGYYPAHRANTTSACSEPARHRPGIAHALARAARWRPTIGEQPPVKQLPSEQKPGGKENERIEEARDQGRGSDAWGEKSRKQRATTVLDEEEEECAIGQHDMT

SEQ ID NO: 199757 - protein, 1091 aa, Oryza sativa
  Clone ID: PAT_MRT4530_95294C.1.pep
MAYREEIIPVAVGLQRKMSREQDNNWPANSGESDGGNVSPSDNPDNMEDVNPSATTHSGDTATSSIRRGRGPTKMPIGLYTITALDADGNPTAPESALTPYSNAIGVIVKDDIPIKYRHWKTRDPDELEWMVPDRDKELAWERLKRTFQFPEGSEELAKHKALQRMSLSFKKFKMDLTKKFVKKGLTPNFEDPNYRRTSDEAKEISERNQANAAKNLYPHRLGPSGYAKNVGKWQEREDELLQKGIEIETKDWSQRGKNYQYARGATLSDTGELVHKGPRSQEVSQRLHDAHQKSLEGSFVPNREKDELTLALQNSEHPGRTRGVGLVPWREGFPEDKRRYRSRSNTNSGDQSEEIRQLKERMDLIMARLERQDVGDVGRVISPGGRKSNSASIEVTQELGMARYPVDDIHVRTACRLHLPLQNITVEVAHGMAHPVMEGERIHGNPIPCGYSRVEVEYVSSRYRAIQLDFAPDEGVNTLGKAIHNIILWRKRFIVFPSGDSDDEPSDGGSSSEGLVVSPRRMPTPLLPRKSPSPPPAHCKSPSPPSSKHQSLASSIPLKKRGRLCKTSQMSEPPSLKKPKKVPLPNMLVPSLKEKKEMSGSITLLLKHKGDKIKEATNVKVPVAVHDHFNRMARPLAPKPPISDFRRTTRKKRLKEFSKKEFEKDEANKNVQEFLEGAGLQSLSDVDNIAKSPLAAQFKLGYSLTTDEYRKVIGNCTQMRRVEEWYLQMAKEGKVMFPVFYRDEDFHHCDGIVWVPFKELFQLYNLKEVDLSLIQLWVLMGALECRTTHNKLGFLDPQIVNSTKIEGGEKSEKEVLDYLYTSFVKLQDMNTILLPYHFKPHWILLAIHLNDSKIVVMDGMRTPQAKFQSLVDTLDKALVKYKKRIQHAPCSNTFRVWCHPYCSRQDPGTSTCGFYVMKFMRVFMEDGNWNITDSEDVNVEDVCDFCELFMTGAEQAGFQYSCAERVVLLCCAVGRFAVVYKVLKRFLRYRVIALACRSEFSLLYKALVYIFASVFYSPLQIYTFQLFSVGNVKYMRVGRQPDSNVFSFIADTMGLLLKHLTADMGLRQLPDGRAPPWRLYQSSPGIDEVT

SEQ ID NO: 199758 - protein, 72 aa, Oryza sativa
  Clone ID: PAT_MRT4530_95295C.1.pep
MRRRWGRSCGRGAAPSEAAAVDEEFLAVAVERRRRAASWVGVGLATDQCCLLPLQPQAGTHQCCLPAGRRAR

SEQ ID NO: 199759 - protein, 227 aa, Oryza sativa
  Clone ID: PAT_MRT4530_95296C.1.pep
MAPPRAQRTMLVVAGDAPPTAGGGARFAAPPPERDHTQDLPDEILSLVFAWVTPTDRNACSLTCARWKEVDASTRHRPSLDARAALGYAAQGIFARFTAVSKLALRCARGSGTDSLSDDGARQVAAALPSARLARLKLRGLRQLSDDGLASLAGATPVIRKLSVASAGATTAITEEILFPPASSLRSVCLKDLYSALCFVPLVASSPNLRSLKILRCSGSWALPLEV

SEQ ID NO: 199760 - protein, 191 aa, Oryza sativa
  Clone ID: PAT_MRT4530_95297C.1.pep
MHGEGTFELKPYLHMWQILEEFCFEQKVEIKVPMVDEKKKSKVMQIISKQCGILSITADMEKGKVTVVGNDRMDVTDLTTVLRKKMPHTYIIIDTVTQVDEKKEKEEKDRKKMEEECKNLWPNIIYPPYQYPPYMVESSGAAHISTRIQKCLPRFFTESLIVITKEIAKLNDTDKTVVEFVRLDHPATWLL

SEQ ID NO: 199761 - protein, 73 aa, Oryza sativa
  Clone ID: PAT_MRT4530_95298C.1.pep
MGRQRRPGRLIRRLTRRAADGSGASSPASGRGRGGRRVPGVPRHASSHAPVSRCSAADGDGESRGRATMARWS

SEQ ID NO: 199762 - protein, 491 aa, Oryza sativa
  unsure (1)..(491): unsure at all Xaa locations
  Clone ID: PAT_MRT4530_95299C.1.pep
MASPSPPIAAPGIEFTAPPPGRDHTQDCSLTYAQWKEVDASTRHRLSLDARAALXTPLRGNLRAVHRQVTKLALRCARGSGTDSLSDDGARQVAAALPSARLARLKLRGLRQLSDDGLASLAGATPVIRKLSVASCSFGPKAFVAVLRSCPLLEDLSVKRLRGLPDTAGATTAITEEILFPPASSLRSVCLKDLYSALCFVPLVASSPNLRSLKILRCSGSWDLPLEVIAARVPGLVELHLEKLQVGDRGLSAVSACANLEVLFLVKTPECTDAGIISVAEKCHKLRKLHIDGWRTNRIGDHGLMAVARGCPDLQELVLIGVNPTVQSLRMLGEHCRSLERLALCGCETVGDPEIICLAERCAALKKLCIKGCPVSDRGMWALNGGCPSLVKVKLKRCRGVSYECIENLKVVRGGSFSISLDIVLERDAGGAIENGGQEAGQVQITELTDQMAAMDLPTNASNAQSSAQASSRMRSVMSALRRRFGNPPAL

SEQ ID NO: 199763 - protein, 178 aa, Oryza sativa
  Clone ID: PAT_MRT4530_9529C.1.pep
ANFATGHFDFVVCHGTSPELTCCFDVTCSFVVRDSAGANIAHHVARRYALASTTFANLRLAGLIAIQPFFSGEERTPAELRLVGALIISVPRTDWLWYAFLPPGAAPCRIATALPSSAAPAVSAAAAAPTVLVVLHCGSGRNWRRQRDSPPRRPPRESRGGCSRRPRHLLCRDELEPW

SEQ ID NO: 199764 - protein, 396 aa, Oryza sativa
  Clone ID: PAT_MRT4530_952C.1.pep
MASLRPDLGGEAGEPPPPHRERAAAGGEPPMLPPPPPSSPGPPSGRIWEGRLGNHVAAAGPHKVTCENKCSQAPLRWSAVFRCGELCNGSRKSTAGAATAGSARLGSFMGSSLEPGIKLQRLYAHEETAKAMQSHKQSTCAEAIWNTCFDIPDKTKDNVKARQDLVDIYNRPSLHLDLKGNGKWHKPRAAFCIDKNDKTIILKWFQDLKFPDGRITTYGCYDVNGYRFRSEKYESAKSGLSTVNTGVCVSCVDDDNNVIDYFGVIEDIIKITWEGSTNLELVLFDCRWFDPTNSGVRRTENLGLVEVNHTSRLSNFEPFVLASQVTQVYYLPYPWDDIEIATTYISDEITNEKDLDYLAKCNSPTQGDEELDDEEDDEEDEEEAEPEAIIYDPEDF

SEQ ID NO: 199765 - protein, 518 aa, Oryza sativa
  Clone ID: PAT_MRT4530_95300C.1.pep
MAPPRAQRTMLVVAGDAPPTAGGGTKFPAPPPERDHTQDLPDEILSLVFASLTPTDRNACSLTCARWKEVDASTRHRPLGSTASPSPLRVHQRKGILRRRFNGRVAQPAACQFQQQASAKAPKASTRRLATLKLQSLRQLSDDGLASPAGSTPGNPKPPRPSCSFGPKAFVAVLRSCPLLEDLSVKRLRGLPDTAGATTAITEEILFPPASSLRSVCLKDLYSALCFVPLVASSPNLRSLKILRCSGSWDLPLEVIAARVPGLVELHLEKLQVGDRGLSAVSACANLEVLFLVKTPECTDAGIISVAEKCHKLRKLHIDGWRTNRIGDHGLMAVARGCPDLQELVLIGVNPTVQSLRMLGEHCRSLERLALCGCETVGDPEIICLAERCAALKKLCIKGCPVSDRGMWALNGGCPSLVKVKLKRCRGVSYECIENLKVVRGGSFSISLDIVLERDAGGAIENGGQEAGQVQITELTDQMAAMDLPTNASNAQSSAQASSRMRSVMSALRRRFGHPPAL

SEQ ID NO: 199766 - protein, 236 aa, Oryza sativa
  Clone ID: PAT_MRT4530_95301C.1.pep
SFGSTLPVRHPYFVFHNTVCHLIQTLPISRLTPIPSSQFLAVGRNASPSLEKLHAAWNRSATHGQCPRWLGIVRSWPGIVAATASHQPSTSNLTHGPYQSVTHPPRVSSFVRPMRLLRGAPVPQHRALSGGDNQKGLNAKKNDATRSFPSLSPSSSFVSCLREGMASKLKTRKKLLPQQPQVASLQVEAVAASETLTPQPSHQRIVSQVDVYHRLMAAAAAAAVAALLGERRGQED

SEQ ID NO: 199767 - protein, 119 aa, Oryza sativa
  unsure (1)..(119): unsure at all Xaa locations
  Clone ID: PAT_MRT4530_95302C.1.pep
FLLTRCRRRPPPLPRPSPXPPPSPSPPRPSPTAAVAVPRRHRARPPPPPRPXPPPPPXCPPPPPRPXPPSTPLPPPCPSPTATVAVPRRRRRARSPLPPPSPRPSPAAAVAVLVYKGRL

SEQ ID NO: 199768 - protein, 141 aa, Oryza sativa
  Clone ID: PAT_MRT4530_95303C.1.pep
MKCSAIFMLFLALGSLAIVVHGGRTHAVVVVEPAKKSAAGGGVVQPEMDPITICSPSNFCIPEAWSSCYRCIVKPDDNSPFRTIDECNSNCPEHMYPHLVPVGRGGMFLLHHVPSGATTVRKQRQGSVFLVPENELLVKEK

SEQ ID NO: 199769 - protein, 34 aa, Oryza sativa
  Clone ID: PAT_MRT4530_95304C.1.pep
KKLTLHFIHHYHKHNIHLTTLTMHPSFTNTSYII

SEQ ID NO: 199770 - protein, 61 aa, Oryza sativa
  Clone ID: PAT_MRT4530_95305C.1.pep
SFSTHLWNHKLRVKMMYKNLGTISFSRCISKIHITKLHSLLLISIWVKHSSPSQFPLSNQQ

SEQ ID NO: 199771 - protein, 64 aa, Oryza sativa
  Clone ID: PAT_MRT4530_95306C.1.pep
MAASAAATGRSLRPLSPPSRIGSDGGSGNPWRVAAASLPGVLAAAAPLPSCPSPPRHGANGGSL

SEQ ID NO: 199772 - protein, 598 aa, Oryza sativa
  Clone ID: PAT_MRT4530_95307C.1.pep
MSTSANPSAAPLSEYAEKTAPEKSWTTWYKRVSTSKAVHWDEIGISQALALTIANSAKDEPLMSAATYFWSNTINAFLFNQGPMTPTLIDITMITGLDVTSSANPMSLNTKNQFDFKTKSIDGWSGYVAAYMGKGSVTHKEHVAFLLMWLEKFLFCGSSCGPTTNWQFVAEALESKKQFPLGKILLGYLYQMLNNASAKIAVSSVVGAGGPWWLLQTWLNLVVMKVVNWPSVTEAEFPRLEPIVEDDGEERNHRRCISYGEYASTPTDAGAKLSAELLKDWFCSFYEGFQKDARVWFPYEDSADLELPSDFRFEDINHEKYQKSREVLAAAINPCILPVGIHQGRNIQTTESSPPRQSNNGKDIEYAPGLIREPADAGKKRKTRSSAVDTSAPAPKKKIKSKKTKPTDDLPVLDPSIEQALDEEAIEDDIDQAAAEVSNTERTPSASPKQTPPTSSAPAHFSRLQKKKTAVKKKSVVPTLKPAPPPPLPPSPAVQLESGNRTPSAADSHNVEEEEQPAAPTIPDYLDETEEDTTSKAIAPLSDDVKKTLEDISHRLEASLDNLVTNCGSIRARFTDIQALLPDELADALTPAVSRPEI

SEQ ID NO: 199773 - protein, 796 aa, Oryza sativa
  Clone ID: PAT_MRT4530_95308C.1.pep
MSTSADPSTAPSAEYVEHMSNLVAIPSLSHENHYFLGPIGNLDPTDFITGETNRIPFRLANLNLGHWKNTFKSWPSLEKTTPEKSWTTWYKRVSASKAVHWDEIGINQSLSLTIANSAKDESLMAAATYFWWNTINAFLFNQGPMTPTLIDITMITGLDVTSSANPMSLNTKNQFDFRTKSIGVMKVVNQPSVTEAEFPRLEPIVEDDGEERTHRRCMSYGEYAYTPTDAGAKLSAELLKDWFCSFYEGFQKDARGRNIQVSYEFYHPMSSARQLGLGQLPIGLFFADKIQCRGEISSTLMMDRLLNIPGPPLGSIENIELARLRSWNFDRWWGEWKQHIFHQPASMNIIDLFPDVIPQVNLYFINLARTTESSPPHQINSSKDIEYAPGLIPNGGGPSPPVIGYHAPITSTLLQGLIREPADAGKERKNRSSAVDTSAPAPKMKTTSKKTKPADDLPALDPPIEQALDEEDIEDDIDQAATEVSDTERTPLASPKQTPPTPSAPTHFSRLQKKKTAMKKKSVAPTLKPAPPPPRPPSPPVQLESGNRTPSAADSHNVEEEEQPAAPAIPVLADLFSFDIKNYLDETEEDTTSKAIAPLSDDVKRTLEDISHRLEASLDNLVTNCGSIRARFTDIQALLPDELADALTLAIYLEQHQFKLEKARQRLADRRECKDIEATIQHNRQLVHVEKSKLDQLSKGPIKSNIDWLEARKIDLMAQLQECNAELDMEHKKLADLPKSIEDQKARLKSAIKNVADLTKSLKVISGTDAQDAQAIEEVEQIRQRAISAIQRYLSQ

SEQ ID NO: 199774 - protein, 51 aa, Oryza sativa
  unsure (1)..(51): unsure at all Xaa locations
  Clone ID: PAT_MRT4530_95309C.1.pep
FPXXXXLXKKNCXGXXWXLXXCADNYILPCAYVMLHNNXXXIXXLXXNLXS

SEQ ID NO: 199775 - protein, 250 aa, Oryza sativa
  Clone ID: PAT_MRT4530_9530C.1.pep
MGPTVTRGPPSSVVEEVRTAGAAARALCGGTGRRTARRAASSRQLRPLPRRRMARTAGTARRGGSNGGWRGRGETGTGAGTIRAASPQGGGRPCCFDVTCSFVVRDSAGANIAHHVARRYALASTTFANLRLAGLIAIQPFFSGEERTPAELRLVGALIISVPRTDWLWYAFLPPGAAPCRIATALPSSAAPAVSAAAAAPTVLVVLHCGSGRNWRRQRDSPPRRPPRESRGGCSRRPRHLLCRDELEPW

SEQ ID NO: 199776 - protein, 550 aa, Oryza sativa
  Clone ID: PAT_MRT4530_95310C.1.pep
MDFNLRDLFPNPENLDCLVDQFYTQEKDNLIKDFYSRFSLCFRNVLRLRFHFDLIFFSDADITKSAIPSVHQRFQGDSVPVHWDEIGINQSLSLTIANSAKDESLMAAATYFWWNTINAFLFNQGPMTPTLIDITMITGLDVTSSANPMSLNTKNQFDFRTKSIGGLIPNGGGPSPPVIGYHAPITSTLLQGLIREPADAGKERKNRSSAVDTSAPAPKMKTTSKKTKPADDLPALDPPIEQALDEEDIEDDIDQAATEVSDTERTPLASPKQTPPTPSAPTHFSRPPRPPSPPVQLESGNRTPSAADSHNVEEEEQPAAPAIPVLADLFSFDIKNYLDETEEDTTSKAIAPLSDDVKRTLEDISHRLEASLDNLVTNCGSIRARFTDIQALLPDELADALTLAIYLEQHQFKLEKARQRLADRRECKDIEATIQHNRQLVHVEKSKLDQLSKGPIKSNIDWLEARKIDLMAQLQECNAELDMEHKKLADLPKSIEDQKARLKSAIKNVADLTKSLKVISGTDAQDAQAIEEVEQIRQRAISAIQRYLSQ

SEQ ID NO: 199777 - protein, 90 aa, Oryza sativa
  Clone ID: PAT_MRT4530_95311C.1.pep
MKIFQGSILSGALTDLQERGVALTGGPNIKSHIIIRGAKIYSPTGAQKAYPNNIKCLSYHLLGDTDFLKTLCEKLIELYVDPCILRHPNE

SEQ ID NO: 199778 - protein, 60 aa, Oryza sativa
  Clone ID: PAT_MRT4530_95312C.1.pep
LTVLFGFEKSASASKHGFKLIIIKGGLLLFLRRLTREKMIYIYGEIADMYYYCHHHLMGL

SEQ ID NO: 199779 - protein, 52 aa, Oryza sativa
  Clone ID: PAT_MRT4530_95313C.1.pep
RKSRVDPASATYFNLAPGQTCGSYSAICTATQKLETNCQNYKTLCMARILVA

SEQ ID NO: 199780 - protein, 67 aa, Oryza sativa
  unsure (1)..(67): unsure at all Xaa locations
  Clone ID: PAT_MRT4530_95314C.1.pep
MFWSGLIGRSKYPNCGTVKDNVLFASYSNVAKLXSHXXPKKKKKKKKKKKKKKKKKKKKKKKKQKKK

SEQ ID NO: 199781 - protein, 502 aa, Oryza sativa
  Clone ID: PAT_MRT4530_95315C.1.pep
MDDIMRAIFACIPGMRSPASPGGCLSAAFGGGDDDGEEGEGEGEDRISRLPDAVLSSIVSRLPVKDGARTAVLSPRWRRVWASTPLVLDDADLLPDDDGPQIFWRDVADAVSRVLAAHPGPFRCVRLTNACSYAGSRGAAALSRWLGVLAAKGVQELVLVFLHAWPVRVEPPADVLRVSSLRRLYLGLWRSFPDTEHLRPGADVFPNLVELGICRTDIKAKDLDRLLQCSPALETLAFVVSYNTQPNVRVRSRSLRCVLFWMSIAEELAVVVAPRLERLILWNGCPCTRRVRRDFRTRVKIGYTPELKVLGYLEPRIHVLEIANTVIEAGTKPSPGTMVPTVKVLAMKVRFGVRQEAKMLLSFLRCFPNVETLHIMSAEADEPTGKLNFKLKFWQDVAPVECLKAHIKKVVFKNFRGERSELAFLRFVLERAQILQTLVVVLTDGDGDHASQEELGNRLKPLIYSTHRASKCAEFFIFVRCGGTSWSFRTASDLSRSDPFDC

SEQ ID NO: 199782 - protein, 173 aa, Oryza sativa
  Clone ID: PAT_MRT4530_95316C.1.pep
MAAQPSKENTLNYNRGLAPELKGTKDSPRIGRAHHVAQLPPEQGRSNGCQTEAARGLVDRGCQSGWGDTCHHGEDSSIMPFSTGRLGNYLSLWTTAEESDWTSQRQSALTGGGGVGVAISTRVEDGKFGPMGGLGQGPEVIWGGDGDMIWNHTMHLCWPDSPIRGVHIHLEKL

SEQ ID NO: 199783 - protein, 75 aa, Oryza sativa
  Clone ID: PAT_MRT4530_95317C.1.pep
STRVLPELSSRRHCMCTKKKMKDGVYKKKKKKKKQKKKKKKKKKKKLHIKRSILSAPRMEGQKVCFGALKGNPLA

SEQ ID NO: 199784 - protein, 58 aa, Oryza sativa
  Clone ID: PAT_MRT4530_95318C.1.pep
HALRTSGILIQLLQRHGGKPMQASKQPFLPYETRVLTDTTAHWLKLGNKFQAKWEIPT

SEQ ID NO: 199785 - protein, 97 aa, Oryza sativa
  Clone ID: PAT_MRT4530_95319C.1.pep
GKPWYQHNPQAKKEKKRGLSPRFFNNPTLACLLLQCLQMQHRWIYFSSNSGLLVGSCPWAPALSGSNDNNNKNLLPRVFNNPIQLECSVLTLLLPMT

SEQ ID NO: 199786 - protein, 105 aa, Oryza sativa
  unsure (1)..(105): unsure at all Xaa locations
  Clone ID: PAT_MRT4530_9531C.1.pep
LDIIGFDVFYPTALLPPSTEPPNLPPPPPGAXPLPHCARDFSPPHQPPRTPGAGPPPVALPTRPRTVPPQSGAPSAGPPPAALASPRIPAPLSSTPLSLGASPPP

SEQ ID NO: 199787 - protein, 525 aa, Oryza sativa
  Clone ID: PAT_MRT4530_95320C.1.pep
MESGYSDVDDDYFGDSDEDYGDDGDYMDDDGDDYGGQVVEETEAPAMEKTYVVLTEDDVRARQEEDIAKVCEVLSLSPGAAAVLLRLYRWRAVLLQEEWFLDERRIRDAAGLLPADGGGGEVPARVNRRRLTCAICFDVFDTGGMRSAGCSHFYCVSCWRGYVRAAVGDGARCLSLRCPDPSCPAAVVRELVDAVADGEDRERFGWFALRSYVEESAGMRWCPGPGCSRAVEFVGGGDGEESSEVFCSCGHGLCWRCGEEAHRPVSCKTVAKWVEKNSSESETATWLLAHTKHCPKCRLPIEKNLGCMHMTCRPPCLHEFCWICLKPWHGHAACSRYQPNGTVVALAGANADDERRRQAKASLDRYLYHYERWDANLKSLRVALRDMESLERSELEAMASAAGVPATEMGFVTEAYEQVGEGRRVLGWAHAYGYYLDPDRDFTKRQLFEYLQEDANASLERLHGCAERERRELFAAGADDKAAVDFDKYRAYREKLAGLTRVTRQYFGNLVKAFETDLAEVSSSS

SEQ ID NO: 199788 - protein, 237 aa, Oryza sativa
  unsure (1)..(237): unsure at all Xaa locations
  Clone ID: PAT_MRT4530_95321C.1.pep
MVVALGPGRFYGSSLPRPRFFSGGDRVEPPVAVTDPLMAWAHEAHWSMGGLSSKRLRLQGRIEGSIDKLRRRARRXTPGRRPRPAPPASSPARSPPSAPTTTTPPPTRKRRSRPRSSRSSTSRRSRRRSRRRRTRKRKRRKPSPPSPPRPRGSGRGSSATSSTASRPCRRGRPRSRSPQQPLHRRGLHRGGRPPRWLSPRRRRGRHRGGRLLPRGLLLHRRGRRRGGRPRQGGHRRG

SEQ ID NO: 199789 - protein, 111 aa, Oryza sativa
  Clone ID: PAT_MRT4530_95322C.1.pep
MGGDVEEAGGCSNFRMRPPELNCLRVLEPPLPVDPSPASLATALEPPLTPDPPPARLGHRSYRCPAAGRGDLELVVDLVGDNLGGGGRQTKKDWIIAVHSLASPEIGSGRE

SEQ ID NO: 199790 - protein, 131 aa, Oryza sativa
  Clone ID: PAT_MRT4530_95323C.1.pep
MGSPEIYDGWPPRRVPSPSQPPRCLPRQRYMVIEAKHHVYEAIAERQRQPLDPPRLHCCLSLGGPPTRFGGCRRRYSPSTGFGTPTRRAKPFEDRRGRYEPAASSYALGIVPAIAWASVPVRGHRLGERAS

SEQ ID NO: 199791 - protein, 64 aa, Oryza sativa
  Clone ID: PAT_MRT4530_95324C.1.pep
LEFKLELASGGVDEEESAAASYHPDRHWRRQPKESCPLPHPHNYRHHRCSRRDKCSPLHTKKSK

SEQ ID NO: 199792 - protein, 64 aa, Oryza sativa
  Clone ID: PAT_MRT4530_95325C.1.pep
AVLSFFHFSEPPDILESSPVSSTTYACTCLFSGCCVSACSNTVSFYTQPPSIKTPQKKGRPLAI

SEQ ID NO: 199793 - protein, 457 aa, Oryza sativa
  Clone ID: PAT_MRT4530_95326C.1.pep
MADAKGDEVLAEGQMPLGRWPILSYGVGHMLNDITSACWFTYLLLFLQEIGLAPRDAAIVMLSGQVADGLMTILAGEMIDRFGHFKLWHIGGSILVGISFSSVFGGCLLCTVLGTDSYLVRTIGYSFFAAVFNIGWAATQVSHMSMVNCMTLNSTSRVALASCRNAFTMVANLGLYAIALVVFALVSAKACSDIVLQYRWIAYVSIFVGCCFLVVFYAGTKEPTLQSGSDCKKSARISWGYWFKKALYYQVALLYMLARLITNVSQSLIAFYVTRDLKMNEYSKAIIPAIIFCCSFLVSVVLQEIKWNSRRLKSLLTIGAILWVIAGAAVFVLPSQMHNLMYPLAMVIGAANALVMVTTIGLESALVGDDLNGCAFVYGSLSFLDKMSCGIALFVLESYEDSISCGETRGLYTVSRFGTGLIPSCFAVFALLVTSTLKLQDTNPRAAAAALEAPLLV

SEQ ID NO: 199794 - protein, 93 aa, Oryza sativa
  Clone ID: PAT_MRT4530_95327C.1.pep
MATPRCGRLDHAPRLVARGALHSARHRAPSTALLPPSPVPASLPKLPLSKEYNAKLRGKEAIRQNTTAIGGKGSMFIKPGRNKPSKAAPAQDA

SEQ ID NO: 199795 - protein, 90 aa, Oryza sativa
  Clone ID: PAT_MRT4530_95328C.1.pep
WTLQRTDHLEDPCLLKHQSSSSSGNQSHRIRQRGPSHQSSHLFPLALNPFVSPSVGSTSHRGRSARRMGTGGRNCARAGGGRRVKISHRG

SEQ ID NO: 199796 - protein, 66 aa, Oryza sativa
  unsure (1)..(66): unsure at all Xaa locations
  Clone ID: PAT_MRT4530_95329C.1.pep
VCVGQPVYVVGQGGRPKPIFGFRXFSTPVFLPPGERAELAIEKFFPLPPVFGGFVFLRNTPGFLED

SEQ ID NO: 199797 - protein, 296 aa, Oryza sativa
  unsure (1)..(296): unsure at all Xaa locations
  Clone ID: PAT_MRT4530_9532C.1.pep
MYMGNNNNGCRPQVGQGWNQPLPYYQGGNNNVIQKIHINVPLLDAMQVPTYARYLKDILNNKRSLPTTEVVTLTEQCSNVILHKLPEKKKDPGCPTITCLIGAQQFDQALCDLGASVSVMPKDVFNKLNFTDFFISVDFVVLDMDTGKETPLILGRPFLSTAGANIDXFPGEGNNNAQEPLLEDAGKTKYTGQETRAVGSEEAAFRTEAKEGVXSSSSHHDESSTRSSVDVSMEDAKIPGRLLNDTDLDLVSDRERQAYNMLSDREYAHTREYSLELLKKTGLYDIIDDVITGERL

SEQ ID NO: 199798 - protein, 107 aa, Oryza sativa
  Clone ID: PAT_MRT4530_95330C.1.pep
MGRPDKEGERAREEGRLGRRPNIITPYMEPGASNATPSTRESVEPTIITNFGIKQTKLPRAGTVTKPSMVIVPYSPRAVDLATKGARSMLGARGDTMTSMARTLTTG

SEQ ID NO: 199799 - protein, 79 aa, Oryza sativa
  Clone ID: PAT_MRT4530_95331C.1.pep
MSHSHNQVLYFQAQRKVRFQDNQANIMKEVPIGTNEKLVHDQRMKDDKNKDVDSVASDFIKLKHRAWALQKSASMYQPS

SEQ ID NO: 199800 - protein, 286 aa, Oryza sativa
  Clone ID: PAT_MRT4530_95332C.1.pep
MAASVTCKLHPGHSLKRHHYGGEEGHACVCALCERIIAGSGYRCGECGGFDAHEACLSLPMRVAFVGHPAHELTLSLLTASRWCDACRVASHAGRCVYRCVACDFDVHARCTSLLDGEQQHGRKRGVARRVGMAALRMGLFGLRVADAVTGGFGSPPRPATPSGNVACGGEFYHLDDRGNRRCRPPPVSIRSDLGGEPHRVPPPPRAMVIPAPRRSRPPPASLRPDLGGEPRRVPLPPSPRPPPARSGREGGAGGRRGRHVAREPPLPPAGGRRLFGSEGHVRLQK

SEQ ID NO: 199801 - protein, 308 aa, Oryza sativa
  Clone ID: PAT_MRT4530_95333C.1.pep
MASAASAPAFERLAGIRALAESGRFKAWFLDQFGVLHDGKKPYPGAVLALEKLAEKGAKMVIISNSSRRSSVTMEKLESLGFDPSCFLRAITSGELTHQYLQKRDDPWFAALGRKCVHLTWGNRGAISLEGLGLQVVSNVEEAEFILAHGTEALGLPSGDPLPKSLEELEQVLMLCLEKRLPMVVANPDYVTVEARDLRVMPGTLAAKYESLGGEVKWMGKPDKVIYTSAMSLAGVNPHECITVGDSLHHDIKGANASRVASAFITGGIHATELGLNEIGEIAGEDAIDSLCRKHGSYPTYVLPSFTW

SEQ ID NO: 199802 - protein, 145 aa, Oryza sativa
  Clone ID: PAT_MRT4530_95334C.1.pep
TTNTEKQTVLGSRSLSRHTQTKQQTQAKRTQKRCLPVVQYDDNSASFSVPVPCGSVGTVSRSSWDDPASANMSPRASGFTNRTEPLSSANMMEPPDCLTMLTHADLALSVIELIPDTISHTRIVLSTDADTSERASSTMTAVISF

SEQ ID NO: 199803 - protein, 44 aa, Oryza sativa
  Clone ID: PAT_MRT4530_95335C.1.pep
MDARTSAVTSERCWDLAGGENGTGATAGKAIMLKNPPPGKLKVF

SEQ ID NO: 199804 - protein, 820 aa, Oryza sativa
  Clone ID: PAT_MRT4530_95336C.1.pep
MVGGGGYRQKLIQVWNDWQVSVLVLLSLTLQLLFLSTAGARRRAQPSWGKKTYFWALYIGSRFITTYSLGILSRASTGDANADIQAFWASLLLFHLGGPDDFTALSLEDNKLWDRRCLELFIQEIGNELVSTTLYVFSRYVLDPGFRRFIVPFALIFSAGVVKYVEQVVALHHATMEALIKSVLGKPDAGPDYADTINRLDGIMRSGALPSLDIKNERVDRPNSDPEANVQVKDYSEDEQVAIKTIRSAHSLFSRFSVLFADGIFSFEDRQESQAMFLRKDARWAFKIVEIELGFAYDRLYTKASVSRGARLAVRVCSLSLTLAAGLWAALAILRASQYRQRHRCVTYALLAGAALNDAAILAAHAFSVWSLVHGDWLSWCSVMLVKRRRWSASMAQSNLVTFCLRKLPSNNDSDPAPLSSSFLLRRLLLGGGRGGGVQQQDASPAPALSTTLASMDEFQKLFERRSLLDQVRSGSFWSKYKHTKYVPVSEKLKDFIYAQLEEKVRRLSEYDKRMERERERERKRVRAPSPSPSPSPSPSPSPSASATTPTQTGTSTTTTTSSMYSILTDCRGDQVMKKERISNLSWSLEKKEFDESLLIWHIATDLRFREEAQAAGAAASAASAATVDQRETRKHMEIARELSNYLYYIMVVVHPLMLSSSTTMAIKRCRDTCAEARRLFLKDHVMAAAGKGKGDRRRAVGEDNAHRVLLDVDTPLHAAVVKGDKCKSVLWDGCFLARELRQSMADPGRRWRVVCEVWVEMLGYAAVHCGGYQHAERLKDGGELITFVCLLMTHLGMGKHYRTEVGDAYAHLSPYSAAA

SEQ ID NO: 199805 - protein, 174 aa, Oryza sativa
  Clone ID: PAT_MRT4530_95337C.1.pep
RFYAFEKAHRLDPTSSGRGVRQFKTALLQRLERENEPTLRGRARKSDAREIQAFYQHYYKKYIQALQNVSDQVDRAQLTKAYQTANVLFEVLKAVTQQHSVEVDHEILEAADKVKEKTKIYLPFNILPLDPDSGNQAVMKFPELDDNALNEVMKKLFKNYKKWCKYLDRKSSLW

SEQ ID NO: 199806 - protein, 361 aa, Oryza sativa
  Clone ID: PAT_MRT4530_95338C.1.pep
MEFWAHKPNEIPENGPNHYATGPRTHLPGPRRKPRARQGRPTPRPDPSGLQFSHAVLEIGVEVVTALEITVVLPMQMNLKKTKYTCSLWKFNTFEYYKVKYYIGISVRLRILSVNPKLLETWEVGFGRAVEQSSGLPLAKPPPLDLLLLRSEPRLVGSLAAVIVCVAHPNLAAGPKLGIGLGGSKQLRPWIGRARSVVPKAVLVQGGPAPVQLWVMPRLESKLPPRGASLSGDPLRRLPPDRLQPPCQAGSVDLHRMPPTTSIFEKSQFCITNIDQKLKALRHATCLNRPFWKNSAAKAKAEMKNWLRAHRKKIKVLILFLQVINVLYISSSLTAERETKGLAGHQEGAGHGTYGMKRALP

SEQ ID NO: 199807 - protein, 107 aa, Oryza sativa
  unsure (1)..(107): unsure at all Xaa locations
  Clone ID: PAT_MRT4530_95339C.1.pep
KKGFIASAEGEGRADRVHGSGAHEAASRSTVDRVHPGSHRPAXPWAPRVSRTRGHGQLTAGPNAAATRRARRRPXTAQLAGGGACAPMVAGDPLESTAGSKRGTHPD

SEQ ID NO: 199808 - protein, 114 aa, Oryza sativa
  unsure (1)..(114): unsure at all Xaa locations
  Clone ID: PAT_MRT4530_9533C.1.pep
GGPPLSFFVGPVPVAKGVPEFPKKRVSPLRFPEPVRARIFNSGGGGLPFGQLFFRGPLGGTPVLFGGPKNARGAVRPFGRAPGGPPPPPKPFVGSKGRKFXKARGGGTPRGFKV

SEQ ID NO: 199809 - protein, 88 aa, Oryza sativa
  Clone ID: PAT_MRT4530_95340C.1.pep
IVEIGVLSHSPPIHLLVLRFRILLTSEPGPSGAHRRRGCGRKQQVAGARSGPRDGDRRWSAPAGIELARRDGGVPPEGKERGREKESA

SEQ ID NO: 199810 - protein, 106 aa, Oryza sativa
  Clone ID: PAT_MRT4530_95341C.1.pep
MAGHKVVFCTCILIFIVVVISGQAEARRLAAVANGNEDAVAVEGDGSFRAVQETASSASTDHAAAGRGGGGAATAVQGSMPMTTTDSRPTAPGNSPGIGNKGKINN

SEQ ID NO: 199811 - protein, 88 aa, Oryza sativa
  unsure (1)..(88): unsure at all Xaa locations
  Clone ID: PAT_MRT4530_95342C.1.pep
WXKXXWSELERRLPPSLSMLSSVVAITTSGFTHREHIEDIQAFFSSKSTKGFDMALSQSIDAISAKAAWLERDAEDVKTWLQEHKYLQ

SEQ ID NO: 199812 - protein, 86 aa, Oryza sativa
  unsure (1)..(86): unsure at all Xaa locations
  Clone ID: PAT_MRT4530_95343C.1.pep
HITTSPKHRELLAHTDSQPNKSNLSMNSITNPSLISKAITHSTKRHTRTSKPTPASGGRRRRRIPFXPYRKAAAAAPGWSSXFCSL

SEQ ID NO: 199813 - protein, 180 aa, Oryza sativa
  Clone ID: PAT_MRT4530_95344C.1.pep
MVGESKLDERVERKEAARPGESSESSPLLPQSSEPLPPKYNEPNLPCCCDDHLWPDDDPRALPGFPDACSPRSMSEGDGRGVVRSPRLPPSMPHSLASFLFRPLASLPASSLPTPLDGEKGWPLPPATFFPLHVQRRRAIEFSVGSGNDSRTKAVVGHGARKLSGREEQHAVRRWERGEE

SEQ ID NO: 199814 - protein, 65 aa, Oryza sativa
  Clone ID: PAT_MRT4530_95345C.1.pep
VGSFSRSFTSIRIFLAATGPIIRRGALTRLGDSGCVAGRPLSLSLRVNRRVEEGSGQVNQQDGET

SEQ ID NO: 199815 - protein, 73 aa, Oryza sativa
  unsure (1)..(73): unsure at all Xaa locations
  Clone ID: PAT_MRT4530_95346C.1.pep
QERKARXRXMVEIPAIDLRLAGGGGGAEETARLRXACXGWXASGFRGTACAGAXGRNEGRGARALXPPXRRQA

SEQ ID NO: 199816 - protein, 49 aa, Oryza sativa
  Clone ID: PAT_MRT4530_95347C.1.pep
VSKKGQVWLVTLLNKSTSYHPRKLIVYDSCFFTIHGCIFCPPKQSICHI

SEQ ID NO: 199817 - protein, 96 aa, Oryza sativa
  Clone ID: PAT_MRT4530_95348C.1.pep
LPSLLLAVEVLRNMGPGNYNPPASAGQFFLSFKNLSRSPNNGERRVSKMHFFFSLFFSLSFFPFVYMLVASNCNSTLPSTKYATLTTEFISPDKGK

SEQ ID NO: 199818 - protein, 201 aa, Oryza sativa
  unsure (1)..(201): unsure at all Xaa locations
  Clone ID: PAT_MRT4530_95349C.1.pep
KYLGIPIHYRKLRNVDWKGVEDRFERKLSTWKGKXMSYDQYPTLYNVPRKKQSTVAEVMSTTLLNISFRRAIVGQKLIEWNDLILRLANITLSNEKDCFVWSLHKNGQFSVKSMYAAIMNCNVRIKKRILWDLKIPLKIKVFMWFLHKKVIFMSSYWLHFWSTMLPQEEQDTIRNGATLLESVAKGLLFYYGWRSSIRIGS

SEQ ID NO: 199819 - protein, 92 aa, Oryza sativa
  Clone ID: PAT_MRT4530_9534C.1.pep
NHILIFQPRGRSERRSGGRRRQRNGGAQEVAAEGWGTKLKNTEERRLNYQRKRETMPRPRGPGQDTADGLARLQLGREAATAPDSGQANPLA

SEQ ID NO: 199820 - protein, 73 aa, Oryza sativa
  Clone ID: PAT_MRT4530_95350C.1.pep
MEVGMVVVVAAKVLVSLWCVGACCLTAYLYRVVWVAPRRVLAEFRRQGIGGPRPFFPYGNLADMREAVAAARH

SEQ ID NO: 199821 - protein, 360 aa, Oryza sativa
  unsure (1)..(360): unsure at all Xaa locations
  Clone ID: PAT_MRT4530_95351C.1.pep
MSPIFFNIVVDMLAVLIERAKGDGQIRGVIPYLVDDGLSILQYADDTVIFLDHDLEQAKNMKAILCVFEQLSGLKINFHKNILVFLFIIRNSGMLIGKELKIDLRGNSAHGKAKTCHMLFNGEGLWQDFLRNKYLKGKPLSGMSSKIGISQFWAGLMKVKDQFLRFGSFRCGNGTNIRFWEDTWLGSRAFKDQYPTLYNVARKKQSTVQRRAIVGQKLIEWNDLILMLANITLSNEKDCFVWSLHKNGQFSIKSMYAAIMNCNVRIKKRILWDLKIPLKIKVFMWFLHKKVILTKDNLAKRKWXGDKHCSFCYAQETIQHLFFECHEEQDTMRNGATLLESVAKDLLFHYGWRSSIRIAS

SEQ ID NO: 199822 - protein, 490 aa, Oryza sativa
  Clone ID: PAT_MRT4530_95352C.1.pep
METGTKRYQIYNRKNDTSWYLLKKGKIALYEKVLVKYFFSSTTNNLTAEKKFHHFCFQSPKDTCRSLQLLRLPPPRRLRGYDLVTSAKKFVKEAQLRLRAIVGQKLIKWNDLILRLANITLSNEKNCFVWSLHKNGQFSVKSMYAAIMNYNIWIKKRILWDLKIPLKIKVFYVVSSKESYLHVFLLAPLLVYDATTGGAGYYAQWCYTLGIGSQGLIFYETNDYSLSPKIEFRTVIYARWVRLAVIGSEDGEIPVLGNGLDSLRWGEPVKLRCSLKMQQNRAAKLRICADGGANRIFDEMFQMTNDPDYESTRKRYIPEIIEGDMDSIRPEVKQFYSSQGSKISDKSHNQETTDLHKCISRIHRCTPDHEKTNLCVLVTGALGGRFDHEAANINILYLFSDMRIVLLSDDCLIRLLPKTHKHEIYIESSVEGPHCGLFPVGAPSGSTTTTGLKWNLSTFLSQVAYSCSFHVKLYASVLSNRRILKILKHI

SEQ ID NO: 199823 - protein, 39 aa, Oryza sativa
  Clone ID: PAT_MRT4530_95353C.1.pep
STVIFMLLCHAFTTNGIIYSLKRNRTETVPIRTVRGRIR

SEQ ID NO: 199824 - protein, 117 aa, Oryza sativa
  unsure (1)..(117): unsure at all Xaa locations
  Clone ID: PAT_MRT4530_95354C.1.pep
LGSHISVKSMYAAIMNCNVXNKKRILGDLNIPLKIKVFTWFLHKKVILTKDNLAKRXLAGIQHCSFYYAQETIQHLFFXCHEEQDTMHNDATLLESVAKDLLFHYGWRTIIKEELGI

SEQ ID NO: 199825 - protein, 257 aa, Oryza sativa
  unsure (1)..(257): unsure at all Xaa locations
  Clone ID: PAT_MRT4530_95355C.1.pep
MSTTPLNISFIRAIVGQKLIEWNDVILRLANITLSNEKDCFVWSLHKNGQFSVKSIYAAIMNCNVRXKKRILWDLKIPLKIKVIFMSSYWLHFWSTMLPQEEQDTMRNSATLLKLVAKGLLFHYGWRSSIRIASXNILCDLTLVNNKGELGICPITLFLILIYFYLTFLLLSQTPQPPCLLKLSSSPPPPPPSSSPAPPPRPAAASSRTARRTTSSPAAAPPRAPPRTLVGGWRGGRRGEAGEEGVGGRRRVTRWQH

SEQ ID NO: 199826 - protein, 64 aa, Oryza sativa
  Clone ID: PAT_MRT4530_95356C.1.pep
ICGFFYYATHTVALRPTLGVTTTTLVATNHTPRRGTVVKPCDLTTTPRLLCDWHTTYGLWTLPY

SEQ ID NO: 199827 - protein, 486 aa, Oryza sativa
  unsure (1)..(486): unsure at all Xaa locations
  Clone ID: PAT_MRT4530_95357C.1.pep
MKANLCVLEQLSGLKINFHKSKISCFGKTKEVEDEYRQLFGCNSGSFPFRYLGIPIHYRKLRNVDWKGVEDRFERKLSTWKGKNLSYGGRLALLNSVLSSLPLFMLSFFEIPRGVLQRLDYFRSRFFSNDDRKRKYRLTKWENICRPKDQGGLGVHNLDIKNSCLLSKWLFQLFNGEGLWQDLLRNKYLKGKPLSGMSSKIGISQFWAGLMKVKDQFLRFGSFRCGNGTNIRFWEDMWLGSRAFKDQYPTLYNVARKKQSTVAEVMSTTPLNISFRRAIVGQKLIEWNDLILRLANITLSNEKDCFVWSLHKNGQFSVKSMYAAIMNCNVRIKKRILWDLKIPLKIKVFMWFLHKKVILTKDNLAKRKWGGXRGDKHCSFCYAQETIQHLFFECHEEQDTMRNGATLLESVAKGLLFHYGWRSSIRXLAKDVPNMIDYLMIGTGDDMFSAQPYQKSRCACFLQLIIIIYSFICPGLPTYLLTFFIL

SEQ ID NO: 199828 - protein, 99 aa, Oryza sativa
  Clone ID: PAT_MRT4530_95358C.1.pep
MTCALASDSNGNVHSGQLAPQQVVDTGGKEEEDAGDSGGREGLREADHGTPRRVPVEERAKVLNPLQRDDTLSVLAKAKDSSTIALQGLLPGTFVPASS

SEQ ID NO: 199829 - protein, 87 aa, Oryza sativa
  Clone ID: PAT_MRT4530_95359C.1.pep
MAGRPHRQQRREARVDDDNGGLSRPVRVRPTWTEENDGCCGEGLEWLLEVLVGVGDDIAGGNIGLAHDGAPVWWTCELVEVVWAKEI

SEQ ID NO: 199830 - protein, 77 aa, Oryza sativa
  unsure (1)..(77): unsure at all Xaa locations
  Clone ID: PAT_MRT4530_9535C.1.pep
FXFFYSXTAITLWYEYNKYVSYEPHGYTQGKELDVQFHLKXGKKERNGHIKRIKXXEGGSSLMXTYHMAXPVKLSLN

SEQ ID NO: 199831 - protein, 219 aa, Oryza sativa
  Clone ID: PAT_MRT4530_95360C.1.pep
MGRLAIAGLMGRKGFLGPRGGELVKAKSSSFGRQSSPCTLRLRRLWPGATLRLAPLSLHSLRHGFRQVWSQGLMPSANTDQQVLHMHLPLHDLNPFMSTNGCSDSVPMVGGGAGSGGEAGDGGQELEAAAAMVAVVPANSGEGNGPGKHQGRKGSAVVAATRPGAVGSGGAPYGWRRPNRGRRREAAPRERGARRHRVGVRQLERGLHRAGFAWLGLAE

SEQ ID NO: 199832 - protein, 196 aa, Oryza sativa
  Clone ID: PAT_MRT4530_95361C.1.pep
MGSLETRYRPAGAPSDDTTKRRTPKSRIYKDVENFGVLVLEKNSGCKFKTLRYLLLAITSATFLTLLTPTFYEHQLQSSRYVDVGWIWDKPSYDPRYVSSVDVQWEDVYKALENLNVGSQKLKVGLLNFNSTEYGSWAQLLPGSAVSIVRLEHAKDSISWDTLYPEWIDEEEETDIPACPSLPDPNVRKGSHFDVI

SEQ ID NO: 199833 - protein, 44 aa, Oryza sativa
  unsure (1)..(44): unsure at all Xaa locations
  Clone ID: PAT_MRT4530_95362C.1.pep
LSLNXMVTVYIKSCRCXDRISRXIMSTSLGDRCELLSFQLSRLX

SEQ ID NO: 199834 - protein, 157 aa, Oryza sativa
  unsure (1)..(157): unsure at all Xaa locations
  Clone ID: PAT_MRT4530_95363C.1.pep
VVRASETSKDTGRLRRQGGEARRGLIVTWCPQLEVLAHXAVGCFVTHCGWNSTTEGLSAGVPMVAVPQWSDQTMNAKYIEDVWRVGVRVRPDGEGVVRKEELERCVREVMEGERSKEFMENANGWKEKARNAMCEGGSSDKNIVEFIAKIGVDRKFK

SEQ ID NO: 199835 - protein, 1275 aa, Oryza sativa
  Clone ID: PAT_MRT4530_95364C.1.pep
MAYGLDHSEWLEVKYINNHALFVGYLSMAVKGVGFLVGLWTTVVLLGGFVSMLEKKDFWSLTIITLVQTAGVFDVLLNEKLRHAVNSVDGFLVTMDMVFRCEDEEFDSGIQLWRSRAGRLVTFIQAVVFAIILCPLAVLYLSGLVISTSLSLWRLIQHDYGDGDGSANLTPALNVLYSLALFQGVLFFYQWVSYFAGKRLIEKVASKYWQNSKEAGGAGARAGAWRKLVKVYMKKTKIRCEKDPSFLEEWNLVTFAVELMKPESKSSDYVSGAMILDTILGQKDLTAQHALIRKLVGSASSRKVMKKLLRSLRSASQYNRNIRVHAARIVSRLAGEISLASFPEALSCISSLLDTTTTEQQEQQQQDGDSAPSAHYRDLMVLGRVILQKLAAADEHNLFLIGKKQSTISKAMLPVRKDLLHIHNNGHVDAWKDIVTESLQLMSQLVSAPGKTGDDLRSHILTIHKDDIRVNNIIICKQCQSNKKLHMQAINIFTQQQHPMEALSTTSSNIDTTYSETNIRLLVDIFLTNKDASTRKMAVGILAILLSDQNKSNANANATIIFKASDTVVRDLKTVLLDDEETEYRICAAEILEHLHRTKEASYLKKLMEAMQNVLPKILNEIFISLSPPKQGEKQAEKAEKGTDGTKTDPDIEEGAGAVASKDNVDVNDQKEDIGKKKKDRTRKLHAALLSLSVAIFEKRIRDGKDLDTLAGEIARGDSASSFVGKLRTMVDQNSEQTVNCLRILKIATRMIISLLKLEGCYPKQELENLMMDRSSWMYEIRRTQPIFIKEASKFIDQAKEHALRENMTKIFCPCRHCKNQKLLVDPGEILGHIMEYGFTANYKRICYAMSQPFHSEFFHGGSAAAGSVAGERVTVLTIDGGGIRGIIPGKVLEFLETELQRLDGPDARLADYFDYIAGTSTGGLITAMLATPKEDGDGPRRPMFAAGEICPFYQEHGPRIFPQRWGKLASTVAAVWGPKYDGRYLRDMVREVLGETTVDGTLTNVVIPTFDVRLLQPVIFSTYDAKNSTLKNARLSDVCIGTSAAPTYLPAHYFQTHDDASGETREYNLIDGGVAANNPTMVAMTMITEEMIAEEKAPLLLTKPPEKECGRFLVLSIGTGLTSDEGLYTAEKCSRWGALGWLRHRGMAPIIDIFMAGSSDMVDIHVGVNFQLFHSEGNYLRIQEDQDDSLRSTAAALDEATPENMRKLVGVGERMLGQQVTRVNVETGRYEKVPDEGSNADALVRMARTLSEEKTARLQRRMDEVTAAASATGF

SEQ ID NO: 199836 - protein, 282 aa, Oryza sativa
  unsure (1)..(282): unsure at all Xaa locations
  Clone ID: PAT_MRT4530_95365C.1.pep
NNQPTAQPIAPNVPSAQPTAPVSAPAPAGPSSAPGQPVQQQPIQQTPPRQQVAQPIQQQGFLNASAGFRTPDNQPRQHAANQVVPEHLVHNVQPDQSVIPQVIPEHLEPWADMIADVMREQFGIKPKDTGNLYRHRYPEWFERVPLPNPFKGMIAPIREKFSSQDFDSLSHLAQKETYIYGSDDDDDDSEVAAAKWVRSKKVIPCQWVKSSEKKRVFRQQIQAAIEEGXIKFDDSNKPMKVDXNPFRVNIVHTAGRTADEGKARGFQMNSPMIINKYQRKYD

SEQ ID NO: 199837 - protein, 318 aa, Oryza sativa
  Clone ID: PAT_MRT4530_95366C.1.pep
METRQGTIVQRYKMKLDADVAATSSSKDGEVQQVSDGTAQSGDKSAADGSGDKGDGSQGVQGEDLSPDGNLAQLQFNNFQDRIDYTVRHALINQSGVLVNTLSNIVKSMVDGSIAEYQATGPVYLPGVQQQSIQQTPPRQQVAQPIQQQGLLNASVGFRTPDNQPRQHIANQVVPEHLVHNVQPDRSVIPQVIPKHLVHNIQPNFQNYQGGNLNYQYQPPSPQVQYQQGGSAQPRFAPQYNQFEPVPQQVQGVPQQRPWANMIADVMREQFGLKPKDARNLYRHPNPEWFERVPLPNRFKVPDFTKFSGQDSVSTYEH

SEQ ID NO: 199838 - protein, 124 aa, Oryza sativa
  Clone ID: PAT_MRT4530_95367C.1.pep
FNSNHASPLTGLENATSSLSLSPHDHARAGAGHFRRRRLPSSAAAPAPRRPSTAAPPAPTRAAAGPPTARFVFFSMEGGGFDFFSEDPNPSVWPSVIGPQPSVTSRQISPPASASAAAHAVAVA

SEQ ID NO: 199839 - protein, 629 aa, Oryza sativa
  Clone ID: PAT_MRT4530_95368C.1.pep
MQRFSHCFHFKWSSYDYFLVLNQRCSVSPKWSSYDYCLVLDQRRDESAISDLAGHGFKEKGYPVLDYESDHQTAMSTIASDGRCCGEEAARGRGEEEEYDVTSAAAAGPCDAYLVFRSSLPLYASAVSISNLLNVTATTGGEVVREGDGGAPELEKERAASSVSISRSVPHKGEVNRARCMPQRRYMVATKTCVDEVHVYHLGDDGEKCGADVVLRGHEAEGYGLAPAQSTAPFQVSIFTSRSTTAADVPTRRSAASPSRGGEARGRPEEKCDDSGGEMSSVAVSKRGRPRRAWKEIRAGVAAVPLPLSTPSRSALSCHRRRRPPDPRCRAAVVESSSSTPSKSVPSLRIQAVASASSTAVAPDPRRRLGILDCRRSGSTPPRRSPRHPAAPVFIVESGTPREDDVRCLEGLKTSLGDPDGRLASWTFSNTSAGAICELSGVSCWNPDESRIIALSLSGFGLTGAIPSELQFCSAITTLDLSSNRLGGQIPPALCDWLPFVVNLDLSGNQLSGPIPAELANCKFINSLKLSANSLSGKIPASLVLLGHLKSLDLSNNNLDGDIPPKLAASFSADAFADNPDLVEPHSGFNLGVLFGRPEAAAAIAFVFGFVGTLFFGPSIIRRVAGRSC

SEQ ID NO: 199840 - protein, 760 aa, Oryza sativa
  unsure (1)..(760): unsure at all Xaa locations
  Clone ID: PAT_MRT4530_95369C.1.pep
LQDQINWHAHTPKGKFWTCNGVKQISQASCFXTSTRFWHARWDRLEVRTAIAFXLMVEKPPATPSSAGKEGPPKSRIPKLGVSEVHESNIVLITIDKLTPEQKKDLEVMMQQTQNQFLNSFMETRGGTIVQRYKMKLAVDDTGTSFSKDGEVQQVSDGTSQSGDKGAADGLGDKGDASQGVQGEDLSPDGNTAQLQFNKFQDLIDFAVQHALINQSRVLVNTLSNMVKSMVDGTIAEYQAIGPVYLSGGVFPNYRPLITNNQQTAQSIAPNAPLVQPTAPVSAPAPAAPSSAPGQLINPRLLVREQPQHSGQNVNQLTQEQVAAMFLPTHPIQQTPPRQQVAQPIQQQGLLNASAGFRTPDNHSXAACCKSSCPRAFGSXCATRSIEVMREQFGLKPKDTGNLYRHPYPEWFERVPLPNRFKVPDFSKFSEQDSVSTYEHISXFLAQCGEASAVDALRVRLFPLSLSGSAFTWFSSLPYGXINSWAELEKQFHSYFYSGVHEMKLSDLTAIRQRHDEPVQDYIQRFREMRNKCYSLSLTDAHLADLAFQGMIAPIREKFSSQDFDSLSHLAXKVTLHEQRFAEARKNFKKVNHVCLYIYGSDHDDDDDDSEVAAAEWVRSKKVIPCQWVKSSGKEERYDFDITKADKIFGLLLREKQIQLPAGHTIPSDEELGKRRYCKWHNSGSHSTNYCKVFRQQIQAAIEGGKIKFDDSKKPMKVDGNPFPDNMVHTAGRIADGGKTQGFLVNSAKIITKYQRKYDK

SEQ ID NO: 199841 - protein, 91 aa, Oryza sativa
  Clone ID: PAT_MRT4530_9536C.1.pep
IMSTSSIIISRGKHSSSIVLFNQLDIGLEYLKAMSLLHFNFLCMFAPLHPLFVAHLHGHLLYSLLVSLLRALEPLIVAHFHGLLANELKKL

SEQ ID NO: 199842 - protein, 95 aa, Oryza sativa
  Clone ID: PAT_MRT4530_95370C.1.pep
LLNRHRFRDSILERDRASSKDRHRGDRGSSRDRDRDYDRRRSHDRYHDRESRSDKDRESGRSHSYDSRGYRRSRSPRDRSRDYDRYGRDDRRHRR

SEQ ID NO: 199843 - protein, 110 aa, Oryza sativa
  Clone ID: PAT_MRT4530_95371C.1.pep
GLGDLLNSSAGPKLAFGCVSMPVDLILQSTRDKDKETAVKSINDSRSARTPSTRGNHHEARQPNPTTYAVSYCWIRLNRLTLSDSNSADPSRCRFGLQPILLCSPSDSIL

SEQ ID NO: 199844 - protein, 161 aa, Oryza sativa
  Clone ID: PAT_MRT4530_95372C.1.pep
MLALRKTLLHGRLPAAPPAAAAAAIASRIPALLRRLSSSPGDGQGGDEWGSSWSTGITKEHFDGSDAAVGRPVTSPSKPVSPELAAVRAMDEEDEIFRAMERDNREAKAYVDSWGDRMRETCELLKQVREPGSRGSYLKDSEKQEMYRLHKEDPETYTVER

SEQ ID NO: 199845 - protein, 388 aa, Oryza sativa
  Clone ID: PAT_MRT4530_95373C.1.pep
MLPFFDSPSPMDIPLYQQLQLTPPSPKPDHHHHHHSTFFYYHHHPPSSPSFPSFPSPAAATIASPSPAMHPFMDLELEPHGQQLAAAEEDGAGGQGVDAGVPFGVDGAAAAAAARKDRHSKISTAGGMRDRRMRLSLDVARKFFALQDMLGFDKASKTVQWLLNMSKAAIREIMSDDASSVCEEDGSSSLSVDGKQQQHSNPADRGGGAGDHKGAAHGHSDGKKPAKPRRAAANPKPPRRLANAHPVPDKESRAKARERARERTKEKNRMRWVTLASAISVEAATAAAAAGEDKSPTSPSNNLNHSSSTNLVSTELEDGSSSTRHNGVGVSGGRMQEISAASEASDVIMAFANGGAYGDSGSYYLQQQHQQDQWELGGVVYANSRHYC

SEQ ID NO: 199846 - protein, 692 aa, Oryza sativa
  Clone ID: PAT_MRT4530_95374C.1.pep
MDRIPPQKSSSFSPATFREERLGRNLSLGAIKISEHAPAVRVKEEAEEGRGGVDNAGAGEGEGAAGEEAAPPEEAAEPDLAMLSAEVDAFLAGREGDAPTSISEVTLDKFASAVEQEMAQSEGDDDKWAVGENGEAAPLLAAIRRISALAAALTAVPEGSKFTIGVHRVTGVLHRAMAFVEDEFHTMLEDPRVAKAAQNGDTRSATGKSMRRGPSFNHAGGDPASDGGGGGGGGGDTPPPFPPETVDRLRAMADAMIAVGYMTECTQVFLVARRNALDASLQNLGYEKASIDDVVRMAWESLESDVATWIKAFHHTINVGLSAEHDLCARVFAGCDAAVGRAIFVDLARCAMLQMLNFTEAVAMTKRAAEKLFKVLDMYEAVRDAAPVIDAFIAACSTTDAAADEPDTTTDALTDIKTELASVRSRLGESAAAIFCDLESSIRADAGKQPVPGGAVHPLTRYLMNYLKYACEYKNTLEQVFHEHHRTDIDADDEGSDPFAAQLMEVMELLHDNLEAKSRLYKDPALCSIFLMNNGRYMLQKIRGSPEINAVVGEAWSRKRSTDLRQYHKNYQRETWSRVLTLLRDDGVITVKGSVQKPVLKERFKQFNAAMDEIQRTQGAWVVSDEQLQSELRVSIAAVVVPAYRSFLGRFSQSFSAGRQAEKYIKLSAEDLEAIIDELFDGNAVSMPRRRN

SEQ ID NO: 199847 - protein, 989 aa, Oryza sativa
  Clone ID: PAT_MRT4530_95375C.1.pep
MDRWVTEPLGDSWLLATWRATWYITHYREKRMLVEMEELLCFFTVEHHYHSFAYNRKVIHNTHSVGMKPIAIGQSFVLLLVFSTVSVVICSDGNETDRLSLLQFKQAISLDPQHALLSWNDSTHFCSWEGVSCSLRYPRRVTSLDLSNRGLVGLISPSLGNLTSLEHLFLNTNQLSGQIPPSLGHLHHLRSLYLANNTLQGNIPSFANCSALKILHLSRNQIVGRIPKNVHLPPSISQLIVNDNNLTGTIPTSLGDVATLNILIVSYNYIEGSIPDEIGKMPVLTNLYVGGNNLSGRFPLALTNISSLVELGLGFNYFHGGLPPNLGTSLPRLQVLEIASNLFEGHLPYSISNATSLYTIDFSSNYFSGVVPSSIGMLKELSLLNLEWNQFESFNNKDLEFLHSLSNCTDLQVLALYDNKLKGQIPYSLGNLSIQLQYLFLGSNQLSGGFPSGIRNLPNLISLGLNENHFTGIVPEWVGTLANLEGIYLDNNKFTGFLPSSISNISNLEDLRLSTNLFGGKIPAGLGKLQVLHLMELSDNNLLGSIPESIFSIPTLTRCMLSFNKLDGALPTEIGNAKQLGSLHLSANKLTGHIPSTLSNCDSLEELHLDQNFLNGSIPTSLGNMQSLTAVNLSYNDLSGSIPDSLGRLQSLEQLDLSFNNLVGEVPGIGVFKNATAIRLNRNHGLCNGALELDLPRCATISSSVIAVKVFNLDIRGTQRSFISECNALRNLRHRNIVRIITACSTVDSKGNDFKALIYEFMPRGDLYQVLYSTCADENSSTSHFGLAQRVSIVMDIANALEYLHNHNKGIIVHCDLKPSNILLDDNMTAHVRDFGLSRFEIYSMTSSFGCSTSSVAISGTIGYVAPECAESGQVSTATDVYSFGVVLLEIFIRRRPTDDMFNDGLSIAKFAELNLPDRVLQIVDPQLQQDLETCQETPMAIKKKLTDCLLSVLSIGLSCTKSSPSERNSMKEVAIELHRIWDAYLREN

SEQ ID NO: 199848 - protein, 316 aa, Oryza sativa
  Clone ID: PAT_MRT4530_95376C.1.pep
MDPVTASIHGHHLPPPFNTRDFHHHLQQQQHQLHLKTEDDQGGGTPGVFGSRGTKRDHDDDENSGNGHGSGGDGGDLALVPPSGGGPDGAGSESATRRPRGRPAGSKNKPKPPIIITRDSANTLRTHVMEVAGGCDISESITTFARRRQRGVCVLSGAGTVTNVTLRQPASQGAVVALHGRFEILSLSGSFLPPPAPPEATGLTVYLAGGQGQVVGGSVVGALTAAGPVVIMAASFANAVYERLPLEDDELLAAQGQADSAGLLAAGQQAAQLAGGAVDPSLFQGLPPNLLGNVQLPPEAAYGWNPGAGGGRPAPF

SEQ ID NO: 199849 - protein, 96 aa, Oryza sativa
  Clone ID: PAT_MRT4530_95377C.1.pep
KTFSSLSFLSQILHPSICEVVHTPPVNTSKELKILLYMLAMGHETINALHTPSLSTKLIVVGAPFPVVRRTKNSASNDSVSIASSKTTLEGLTCNL

SEQ ID NO: 199850 - protein, 79 aa, Oryza sativa
  unsure (1)..(79): unsure at all Xaa locations
  Clone ID: PAT_MRT4530_95378C.1.pep
VIPLDXTFALIVYFFLCVTVLHATIPRAARAHSSIYNGLNVYRTCHSNVQYRVKANYVISRYICIKEPREVKVEKKKKK

SEQ ID NO: 199851 - protein, 38 aa, Oryza sativa
  Clone ID: PAT_MRT4530_95379C.1.pep
MNLFPRTIGTIHGPETTASHRTSPTISSSTSRTRSPPS

SEQ ID NO: 199852 - protein, 167 aa, Oryza sativa
  unsure (1)..(167): unsure at all Xaa locations
  Clone ID: PAT_MRT4530_9537C.1.pep
AXXGADSPSXRVTVVCGCRGWFXKGXVLKAIKWVTQVFPSHDVVKRRPVMIRVPGGVGGGRPNGERESGXXXXXXXXXXHGHSLFCPLFRSVNCRAICINEISGSPVGSWGFLSDLRYRNGPLFLGRRGFISTPGYNWGGGRPPVGDNPLKHRCLFGNCWGTGKPIF

SEQ ID NO: 199853 - protein, 98 aa, Oryza sativa
  Clone ID: PAT_MRT4530_95380C.1.pep
MGGCEVIPSVVLFDYCLVVIYLQPDTRSFPTLCEIISSVKSDAAACGHGAIHRRFGHDAGTIHRRFGHDARRGGYRQSGDDGVVVHRPIVLLIVGTNP

SEQ ID NO: 199854 - protein, 79 aa, Oryza sativa
  Clone ID: PAT_MRT4530_95381C.1.pep
AIPSCSALDQAYRITGTSGFECIPLVALGHLLPRVFCMLSTHDCLPGVSFAAASTMFFTLLPDQMRCNGSFLAPIQKKT

SEQ ID NO: 199855 - protein, 111 aa, Oryza sativa
  Clone ID: PAT_MRT4530_95382C.1.pep
ENPKEFRPDRFLQNKSGVDSTVSGKVDFRFLPLGVGPRNCPGIIQGPAPPWPFRLSREAWCTSYRDRFPPRAWRSCTCSEKGGQFMPPHLQALRCCLPPPLCLNSSYPFSL

SEQ ID NO: 199856 - protein, 91 aa, Oryza sativa
  Clone ID: PAT_MRT4530_95383C.1.pep
TMDRGKLSLDMGGRLAVAAVTLPAPSWQIFDLFLPGGPSHRSYCGGAGKWVLMNHKEYVEKKSLYAMKAVCDIRGKTINTSLYDVDEAQVT

SEQ ID NO: 199857 - protein, 58 aa, Oryza sativa
  Clone ID: PAT_MRT4530_95384C.1.pep
TTPFAGVYYPIWHRSPCVIATYLCASDGRFFKPHIPNCVVIHQLADAKPCAGLRRIPD

SEQ ID NO: 199858 - protein, 53 aa, Oryza sativa
  Clone ID: PAT_MRT4530_95385C.1.pep
FRIVVSPRMFQLGSHTSDAVTYIFRASVVATIRVTSSNTRIPRERVGSATRGA

SEQ ID NO: 199859 - protein, 688 aa, Oryza sativa
  Clone ID: PAT_MRT4530_95386C.1.pep
MRERGEMREAKAPLIAEAAEHISHSHGSGSSGTGSHTSGGGGGWRGSRQYQRRSDALAYGNRYQKAAALVDLAEDGVGIPEDVLNDTRFERAMRFYFVYLRLDWLWSLNLFALILLNFLEKPLWCRGYSQHACDQRDLYFLGQLPYLSKTESLIYEGLTLVILVMDIFYPLSYEGLNLFWKNTINKLKVLLLFILACDILVFAFSPQPFRVAPYIRVAFLIMNIRCINCSFCDRELRMCAVTLVGMVGTYLNVLALSLLFLLFASWLAYVTFEDTPQGKTVFSSYGTTLYQMFILFTTSNNPDVWVPAYKSSRWSSLFFIVYVLLGVYFLTNLILAVIYDSFKEQLAKQVSQADCTRKSILEKAFGIIDATGQGYLNKEQCLSLLDELNKYRSLPKTSREDFELIFAELDQSGDFKVTSEEFATLCNTIAIKFQKEPPPSYLEKYPSFYHSALCEWLKSFVRSPLFEYIVIFVLLMNLVAVIIETTLDIENSSSQKVWQEVEFVFGWIYVIEMALKIFSLGFGAYWMEGQNKFDFVLTWTIFIGETLTFAFPSKLSFLFNGECYLLFNFNDYPSGMVTLFNLLVMGNWQAWMESYRQLTGSYWSLIYFVSFYLISVLLLLNLIVAFVLEAFFAEMELEKDGEADIQDPTLEGRNRRRSVRVRTKGTMVDILLHHMLSNELDGSQNRDQ

SEQ ID NO: 199860 - protein, 59 aa, Oryza sativa
  Clone ID: PAT_MRT4530_95387C.1.pep
NYTSTTQRMIFNPYKLLNQFQPFLYIPTTTYISSSNNKLITLIKTPIQKFIPQLNKSYF

SEQ ID NO: 199861 - protein, 277 aa, Oryza sativa
  unsure (1)..(277): unsure at all Xaa locations
  Clone ID: PAT_MRT4530_95388C.1.pep
FANQNGGVEQVCKIPAKPKEAAPXLEAVXGLTPAGGTGSSGGVGVKKELPSRSSNSGEEXEGRLKGRKRTEVGAGRVXIGLEGGESGRRGRKPAREXRPPSMAPARFXGGKSARLNXKREKEKWGERERGSRGLISPTLLHVGTAGCGRFGGGDGAXARAGRRERREEGDDGWAPPIMSMWLVLAGGXVWVVXYLGFHXFKPIARITHSPRANCAACCGGXGNSEAPTAVRIEAXGARSSTSTLGLVLPGFTTNGSTSGIVNRXVPMEGVKFQSAAF

SEQ ID NO: 199862 - protein, 904 aa, Oryza sativa
  Clone ID: PAT_MRT4530_95389C.1.pep
MRKFLLSPAATRPIGWLIQPMSSRLCVKNLPKGADEGRLREVFSRKGEVTDAKVIRTKDGKSRQFAFVGFRTNEEAEEALKYFNNTYIDTCKITCEVARKIGDPEAPRPWSRHSLKKPEYNSKDKTKTGDVSAPLKSSKGQKVSDDVGGSKGSAASDPKFQEFLEVMQPRSKAKMWANDTMGTLDASAKDSMVVSEKPEKPQKNVPVSENDSSSGDSSDEEMANDQSESDDSSSEEASEELKIESKQGKDMTDMDFFKSKIKKNWSDSESDSEDSGDQSDHSTDDEDSSDESHDADEKDEIAHQKDSLNLKKNVDKEMTLEGSTVQEAGNSDNKEVENLDSQLKEDDNQEKEDEEAALITDEKKLALETGRLFFCNLPYATTEGDLVELCSQYGDVDQARIVVDKTTKLSTGRGYVLFSLPDSAVRALELDNSSFQGRLLRVKAAKPLNNKKIESSYEEKKMSLKQQKLDQRKASEISGDTRAWNSFYMRQDTVAENIARKNGISKSELLDREADDLAVRIALGETHVIAETKKYLSRSGVNVAALEELASKRNEKFKRSNHVILVKNLPYSSCEEDLATMFRKHGSLDKIILPPTRVFALVVFVEATEARHAFKKLLYTRYKDTPLYLEWAPENILSPTSAPVEDDEKDVVGDRIVTKAIVEQTVEGVSAEEIDPDRVESRSVFVKNLNFKTSDESLKQHFSTKLKSGSLKSATVKKHIKNGKNVSMGFGFVEFDSVETATSVCKDLQGTVLDGHALILQLCHGRKDGQTKKNEKDKSSTKLLVRNVAFEATEKDLRQLFSPFGQIKSLRLPMKFGSHRGFAFVEFVTKQEAQNALQALASTHLYGRHLVIERAKEGETLEELRARTAAQFVDEQSGFQRLSKKRKQTSLVDEGSVKFSRIVE

SEQ ID NO: 199863 - protein, 69 aa, Oryza sativa
  unsure (1)..(69): unsure at all Xaa locations
  Clone ID: PAT_MRT4530_9538C.1.pep
MKLSTKRPPYNRTSQCMRMXKSSWSGYCQCEVIEKLCRDVSHVLRQGSCVGQSRSVGKVYIHCSVSKPN

SEQ ID NO: 199864 - protein, 202 aa, Oryza sativa
  Clone ID: PAT_MRT4530_95390C.1.pep
MGAYAALTPVVSKIFCSSSQAVLMVRRRPPTVNGGGFVVTDRDQRVVFSVDGCGIIGASGQLIVRDGDGTAILFIHKKGGVVQVLSINNWWKGYLMDYGEPSKLVFSFQDPKPVLCMNGDVRVAVEPKGRKRHWDYEVIGSFSQRACTVRSRAGHVVAQIGVKGMLAGKDFYHVVVQPGYDQAFVVGVIAILDNIHGESTRC

SEQ ID NO: 199865 - protein, 123 aa, Oryza sativa
  Clone ID: PAT_MRT4530_95391C.1.pep
YLDVDLLHFACVQRFFIDMVAENIARKNGISKSELLDREADDLAVRIALGETHVIAETKKYLSRSGVNVAALEELASKRNEKFKRSNHVILVKNLPYSSCEEDLATMFRKHGSLDKIILPPTR

SEQ ID NO: 199866 - protein, 112 aa, Oryza sativa
  Clone ID: PAT_MRT4530_95392C.1.pep
VEGWLYRTLCPVRFEPLCAFFLSILIPSDICKAQMISYCLLAEKYVVLRYLKHLCFSRNVAASTAAENIAILDGTGLKANTPGTLRDEDQFLTIWLGAGFFDLFVFNYIFSD

SEQ ID NO: 199867 - protein, 492 aa, Oryza sativa
  Clone ID: PAT_MRT4530_95393C.1.pep
MDAGSKSSSSGPLHLVIFPWLAFGHLLPYLELAERVASRGHRVSFVSTPRNIARLPPVRPAAAARVDLVALPLPRVDGLPDGAECTNDVPSGKFDLLWKAFDALAAPFAEFLGAACRDAGDGERRPDWIIADTFHHWAPLVALQHKVPCAMLLPSASMMVGWAIRSSEPAGASMFEVLGAVEERRMDMPCYEWEQKAALFVADGASGMSIMKRCSLAMERCTVAAMRSCPEWEPEAFQQVAAGLKKKNKPLIPLGLVPPSPDGGRRRAGSMSTDNSTMQWLDAQPAKSVVYVALGSEVPLRLEQVHELALGLELAGTRFLWALRKHAGVDAADDVLPPGYRERTNGHGHVAMGWVPQIAILAHAAVGAFLTHCGRNSLVEGLMFGNPLIMLPIFTDQGPNARLMEGNKVGLQVRRDDTDGSFDRHGVAAAVRAVMVEEETRRVFVANALRMQKIVTDKELHERYIDDFIQQLVSHVADSSCNIATPVPSSSS

SEQ ID NO: 199868 - protein, 109 aa, Oryza sativa
  Clone ID: PAT_MRT4530_95394C.1.pep
MGGKRAAIDDGRRRTKAGAAGLDGRWVVGSGGPVQGLADYSTFSTVPPPSAASTSLCSYSCSTGPRTEQHRLTTTPSNSLVTIVFTELLIALKRYIAPPRQDVPQCSNA

SEQ ID NO: 199869 - protein, 128 aa, Oryza sativa
  Clone ID: PAT_MRT4530_95395C.1.pep
PFIPGRVKVLGHPLLSRFFFRFNFFQFGLCFFKPLFHKGGFLPSWTPPFIKLVYSKNILFQCHLWLIEFFFWPPPPFFFFEVPPGPQVNFQDVRFFHPLILMVPNFDFCAPPILVFPPQKIESPLVNP

SEQ ID NO: 199870 - protein, 109 aa, Oryza sativa
  unsure (1)..(109): unsure at all Xaa locations
  Clone ID: PAT_MRT4530_95396C.1.pep
PQLRHRGARFGHPLVMLPLFLDQFTNASYLEGARGVGVQVXRDGEHGSAFDRDGVAAAVRXVVDEESKKALAANAGKMGEVVADTECHERCIDAFIQQLRSYTTTRTGY

SEQ ID NO: 199871 - protein, 40 aa, Oryza sativa
  Clone ID: PAT_MRT4530_95397C.1.pep
NTSIKNPYCIKRTRAYHTIKRMLLHDNLKFHDARFDPYEH

SEQ ID NO: 199872 - protein, 361 aa, Oryza sativa
  Clone ID: PAT_MRT4530_95398C.1.pep
MMTRSMMKFFSPSSSAIYTTLSSRLARINATRHTPPPPPKSSRAARSLTSFLLIRATMSSSSSSSDAVAAAAAATFEKPRTVVKKLLAESQPEGDGATVRRSIGRYELRNLDPFLMLDEFSVSKPAGFPDHPHRGFETVTYMLEGAFTHQDFAGHKGTIGTGDVQWMTAGRGIVHSEMPAADGVQKGLQLWINLSSKDKMIEPRYQELMSKDISCAEKDGVEVKIIAGEAFGVRSPVYTRTPTMYMDFTMQPGSQLHQPIPEAWNAFVYIIDGEGVFGREKASPATAHHCLVLGPGDGLSVWNKSGEPLRFALVGGQPLNEPVVQHGPFVMNTRAEIQQAMEDYYYGRNGFEKARHWSSTA

SEQ ID NO: 199873 - protein, 321 aa, Oryza sativa
  Clone ID: PAT_MRT4530_95399C.1.pep
MSSSSSSSDAVAAAAAATFEKPRTVVKKLLAESQPEGDGATVRRSIGRYELRNLDPFLMLDEFSVSKPAGFPDHPHRGFETVTYMLEVRMTKLLVVPFHLFFMPGAFTHQDFAGHKGTIGTGDVQWMTAGRGIVHSEMPAADGVQKGLQLWINLSSKDKMIEPRYQELMSKDISCAEKDGVEVKIIAGEAFGVRSPVYTRTPTMYMDFTMQPGSQLHQPIPEAWNAFVYIIDGEGVFGREKASPATAHHCLVLGPGDGLSVWNKSGEPLRFALVGGQPLNEPVVQHGPFVMNTRAEIQQAMEDYYYGRNGFEKARHWSSTA

SEQ ID NO: 199874 - protein, 101 aa, Oryza sativa
  unsure (1)..(101): unsure at all Xaa locations
  Clone ID: PAT_MRT4530_9539C.1.pep
MKLSMKRPXYNHTSRMDLSFSGAPELLSLLETXTPRVHEDXSSWSGYYQCEVIEKLCRDVSHVLRQGSCVGXSRSVGKVYIHCSVSKPKKDCKMIFHSKIN

SEQ ID NO: 199875 - protein, 113 aa, Oryza sativa
  Clone ID: PAT_MRT4530_953C.1.pep
DLKGNGKWHKPRAAFCIDKNDKTIILKWFQDLKFPDGYIGRLRKKVRNKARVEGSIVEAYLVEENTNFLSLYFSHNYPGRCFNRRTCRDLTVEEYKAAFLYILTNISEMDTLF

SEQ ID NO: 199876 - protein, 88 aa, Oryza sativa
  Clone ID: PAT_MRT4530_95400C.1.pep
MAAATEEPREEDGEHGPEYHPPPRHVPRRDDPACRRLRRSHGKQWRRSARCSWTSTASVGVSISSQDMACRTCVYGPLTHSDADSEIE

SEQ ID NO: 199877 - protein, 36 aa, Oryza sativa
  Clone ID: PAT_MRT4530_95401C.1.pep
CKRQIEMCKYLKLNIDFVVLTECITSRDWLNEERKA

SEQ ID NO: 199878 - protein, 76 aa, Oryza sativa
  unsure (1)..(76): unsure at all Xaa locations
  Clone ID: PAT_MRT4530_95402C.1.pep
LHRYTNLYWPDHHWERERYGDNXEKRRPADNSSHSDGEWNIDNPNTLEDCPVILHVQAEVYAHYRIFLRTLKPAHH

SEQ ID NO: 199879 - protein, 106 aa, Oryza sativa
  Clone ID: PAT_MRT4530_95403C.1.pep
GETPDGAESPTISTPPHASHRRRRKNRRRRAPGARDRRARRSDGDAETKAASSPRGARAGTTPSPPAQPWRTSDDDEAAPPTSPIEPQEILWKWQPSCRIPAATGI

SEQ ID NO: 199880 - protein, 583 aa, Oryza sativa
  Clone ID: PAT_MRT4530_95404C.1.pep
MALRGFLSDPSELRELLFASAVAVRGAIAHAYLVFDQIPRPDRFMYNTLIRGAAHTAAPRDAVSLYTRMLRRGGGGGVRPDKLTFPFVLRACTAMGAGDTGVQVHAHVVKAGCESDAFVKNALIGMHASCGNLGIAAALFDGRAREDAVAWSAMITGCARRGDIGAARDLFDECPVKDLVSWNVMITAYAKRGDMALARELFDQVPERDVVSWNVMISGYVRCGSHLHALELFEQMQRMGEKPDIVTMLSLLSACADSGDLDVGQRLHSSLSDMFSRNGFPVVLGNALIDMYAKCGSMKSAHEVFWSMRDKDVSTWNSIVGGLALHGHVLESIDMFEKMLKGKVRPDEITFVAVLIACSHGGMVDKGREFFNLMQHKYRVEPNIKHYGCMVDMLGRAGLLKEAFEFIDTMKCEPNSVIWRTLLSACRVHGEIELAKHANRQLLKARNDESGDYVLLSNIYASVGEWFGSEKMRKLMDDSGVNKEADSERLHHRLLFGFLVKQINISPSCISYIKEYNPKKSKSIKGYALRDKYHDLNDTSTQQATSSAKNISNVNLGRLMGNQSLVSVGKKKYAVEGWQWLLL

SEQ ID NO: 199881 - protein, 409 aa, Oryza sativa
  unsure (1)..(409): unsure at all Xaa locations
  Clone ID: PAT_MRT4530_95405C.1.pep
MLSFITFWRAIGWDKFXCVDEPGSWLRTVQFLCAMLEVGDGVTFRLFRKEYHLFWKDLSLHLGFDKTCKINFRNAFPDFNKRMFWQSISGLSSYRKPRTNDIHNPTLRLLHKLLGFTSFLRADIQXRELVLLYAMVRKKINVSPIQPMIKQWLENVKLSGPVECISLVTRLAXRVGTMLNMQVSSILVTGSYVDEAYLVQGHALKHGXMILFPGYTNEIPLPNPEFHLYNCRELTISLQAELPRDVPRRITRRMGRKAPQEASSSSPPVQMYGDSWDPTAHALGWTQFRQHDGGGSSWQSASDSRWHEPXELHWGYSRSFSSSGLPPSSWMHCSVSSRRDLGELIRGTDTLELQARNMQHTLEDDVVQSWEWQQSVGAQLANFNTMMQQXQADWQAFHRYQGFDPRHEP

SEQ ID NO: 199882 - protein, 99 aa, Oryza sativa
  Clone ID: PAT_MRT4530_95406C.1.pep
MEAGGRSSGRRAWQWSTGGEVVGERGSDVLRRESTAVERWCYADKLTMEEGVLHGSPLCPYRCHPTPPVACFVPLTCSGRCHSACLPRAWPIRPALPCS

SEQ ID NO: 199883 - protein, 63 aa, Oryza sativa
  Clone ID: PAT_MRT4530_95407C.1.pep
MARAQTGFFATPMAYAHIQVAAPAPAPAAPWSPLVAQKSTGEVEHFKDLLRARIKELDEKGTS

SEQ ID NO: 199884 - protein, 115 aa, Oryza sativa
  unsure (1)..(115): unsure at all Xaa locations
  Clone ID: PAT_MRT4530_95408C.1.pep
MSCTAGGQMYNETLMEVEHTPPVHKRILDIMPGVSGGVARIMVGQPFDTIKTRLQVLGKGTIGAAGMPPEMVYTSGMDCVRKMFKAEGPFSLYKGTXVAPLLGNMVLLGXIHFPT

SEQ ID NO: 199885 - protein, 72 aa, Oryza sativa
  unsure (1)..(72): unsure at all Xaa locations
  Clone ID: PAT_MRT4530_95409C.1.pep
IVGQPPCLGNXSYVSIGINRRKSWPATSVXPTAQGWXSATNLTXXRPLXXAFRAYCCQQLQXCSRVGVCGDL

SEQ ID NO: 199886 - protein, 61 aa, Oryza sativa
  Clone ID: PAT_MRT4530_9540C.1.pep
LITTTPTTPARVLMAPLALWYLPYIHGTLNATKLELEPYSPQPEDHPTAPIVSAVLCPEQY

SEQ ID NO: 199887 - protein, 45 aa, Oryza sativa
  Clone ID: PAT_MRT4530_95410C.1.pep
ISIQGPSLMLICKITFMSYIKWHVSFVKKKKKKKKKKGGPRAEFL

SEQ ID NO: 199888 - protein, 49 aa, Oryza sativa
  unsure (1)..(49): unsure at all Xaa locations
  Clone ID: PAT_MRT4530_95411C.1.pep
INWPFFXNVLIGKTLALPNLIPLKKIPFSQIGKKKKRPEPIAFTNSCPT

SEQ ID NO: 199889 - protein, 108 aa, Oryza sativa
  Clone ID: PAT_MRT4530_95412C.1.pep
HGGKPDANPLKGFQVPTLKLIKDMYIGEGDSAPHSSHIFLIHPLLGVSCFQENVRLSDLTLACSIHWDAAKAERILALQGASNLELGPNYWEGTRAESTSRRKRVVSL

SEQ ID NO: 199890 - protein, 521 aa, Oryza sativa
  Clone ID: PAT_MRT4530_95413C.1.pep
MGRIKSSSGRCSTARLEAVAVLVVVFGVASSSLRGCIAQQSGGGLTRGSFPEGFVFGTASAAYQSDGAGKEDGRGQTIWDTFAHTFGKITDFSNADVAVDQYHRFEEDIQLMADMGMDAYRFSIAWSRIYPNGVGQVNQAGIDHYNKLIDALLAKGIQPYVTLYHWDLPQALEDKYKGWLDRQIVDDFAAYAETCFREFGDRVKHWITLNEPHTVAIQGYDAGLQAPGRCSVLLHLYCKAGNSGTEPYVVAHHFILAHAAAASIYRTKYKATQNGQLGIAFDVMWFEPMSNTTIDIEAAKRAQEFQLGWFADPFFFGDYPATMRARVGERLPRFTADEAAVVKGALDFVGINHYTTYYTRHNNTNIIGTLLNNTLADTGTVSLPFKNGKPIGDRANSIWLYIVPRGMRSLMNYVKERYNSPPVYITENGMDDSNNPFISIKDALKDSKRIKYHNDYLTNLAASIKEDGCDVRGYFAWSLLDNWEWAAGYSSRFGLYFVDYKDNLKRYPKNSVQWFKALLKT

SEQ ID NO: 199891 - protein, 55 aa, Oryza sativa
  unsure (1)..(55): unsure at all Xaa locations
  Clone ID: PAT_MRT4530_95414C.1.pep
NGRVGRPGNSGPVPAGVPAFPIVSRIXAWRNHGHSCFLCEIVIRSQFHTTYEPEA

SEQ ID NO: 199892 - protein, 582 aa, Oryza sativa
  Clone ID: PAT_MRT4530_95415C.1.pep
MASPGELVTPSPPDGWNFDFGKSFSAQVQNLFNSSVHFSKFFSKRPFFLVVDFIRFNFCLTEKSVAVALQSCLGGTPFGFHVSHLKNNSFCFQVCSKQVGFHILSFKNFISKDFHARFFLWRDGRPNWRWEFSQWQKEEADMWTLVSYGKNKSPILPSGNKHQCIGRSGSSALIAKNRSLSSDKLKPGSGKSSVFLRLSFPPSNVHDGILPTPGFHNASSSTTRDGILPTPVDRNTTCSSKLFHTKFFRRSCWAKRKNDKAHWRAKSRSDPSREIPAKGRELIIFGNNQSPSSSSPALSPYSPNFPSSPNPISPQVVSLIAWAESMANHTDEELRPDLFLPLRGLGYDPGIPPRFRTPAIIEQTIIEQQDDQLPFDGQIVPYGLPLPHLPLTKFPPLVCIAVAQGVFKPLLLATQPIIFRSVHSYPCWDLISIKWIIDIPKLPQLCPSPTCPSLAKKQKSIHPDGKRVAKVMFASSEITSDPEVRQGRARKHKIQTPVSTEGLRRSPRFTGLGEKLEIHTDTPKKKTKVKPMVTSFKPSKDDRVKHLPPAIPVAQLQKIGLEKCGLLLEEVADGKLLQNKDD

SEQ ID NO: 199893 - protein, 151 aa, Oryza sativa
  unsure (1)..(151): unsure at all Xaa locations
  Clone ID: PAT_MRT4530_95416C.1.pep
LAPSAANMPCANKPRQEEPGWKMAGKATAAKKAKAYKRFPAMAGDTGCGEGKNXGARRLMTKRDETYKIYIFEGVRDVHPVIAVPTGHVIMNSFIXNLEDKLADEAYRLTGCTENTTIPSXQMQTAEALRLPHELVLASDIEGTWGAATFT

SEQ ID NO: 199894 - protein, 154 aa, Oryza sativa
  Clone ID: PAT_MRT4530_95417C.1.pep
LPSQIRWRGWAAATARTEGIVGSCSGGGRWPRDDDDDYSRPHRFPSPPVSSQIWRRGGASAAARAEGSAVALSHVPQLYSPALPATMMMTTARRQRPYRAMTTTTTVGRVASSLLLPDMDRRGGRRRHSPRALAADGGGEPSRGGEGRRLFFFH

SEQ ID NO: 199895 - protein, 99 aa, Oryza sativa
  Clone ID: PAT_MRT4530_95418C.1.pep
NLRSKEIIKNDLGSDKAVADLINKTLAKGAVLKEDSSIIDVLTDVNAYYKKPLNKLRASFIHTYFSNPWVFFSLIGAVILLVATVMQTVYTIVPFYKNK

SEQ ID NO: 199896 - protein, 232 aa, Oryza sativa
  Clone ID: PAT_MRT4530_95419C.1.pep
MAEHRADLEAAAVRRHHASWTSHSPRQAYASPSPPAPHNSGNDILMLCLLWYILRYVLGFFQRYNLLPRDSFTFLVGCNLKTILQGGNYLVQGRKLHCKLSNQRGTDEMFVVIWTHSIVRDCCHIVFRENRISMPSDLKCTKLQISLGDFMVFEEVLGSTISTSVKVGTTQYQLPLARSSFRSVNLSHCDDGAKLPAAATSLAIRDGEPHRCRWEVAPLAIEGLARPSSPDE

SEQ ID NO: 199897 - protein, 50 aa, Oryza sativa
  Clone ID: PAT_MRT4530_9541C.1.pep
RDDLTEAARRSAATAAFPPPIRHRHLRLMPSSPGAAAPSPVGRGGGRRER

SEQ ID NO: 199898 - protein, 67 aa, Oryza sativa
  Clone ID: PAT_MRT4530_95420C.1.pep
SDVSCITNLTLHTENQIIWNRINFGAVPFWQTECRNIGGENLFPYLRSMVVQILDGMKLGVRKFRTR

SEQ ID NO: 199899 - protein, 177 aa, Oryza sativa
  Clone ID: PAT_MRT4530_95421C.1.pep
APLHVCGYQYPNANPSAKLRRSHRKNCGKAPAADEREEGEEVDADMERNAGEGLLPVRAGGGESEGNAGSPSLGSARGDADLVEVKEIAEHASPNVTGVQVITGYCSEAGVINCASHSDEISKEVGRPAEREDSLDEYQDASPFLHQPDSEVGAAVAHKSDFSIEEIKNLVFHQQQV

SEQ ID NO: 199900 - protein, 81 aa, Oryza sativa
  Clone ID: PAT_MRT4530_95422C.1.pep
MWLLGWDSGLTPLVASERPPLLPPRVADAADAAVRCSSSRRPSEIWKDTNDCVANGATPSLAAVIQTMANEGRWCLGAQSS

SEQ ID NO: 199901 - protein, 34 aa, Oryza sativa
  Clone ID: PAT_MRT4530_95423C.1.pep
RGRTRGSRIYYCQASISYITSVKSERTYTYACAV

SEQ ID NO: 199902 - protein, 966 aa, Oryza sativa
  Clone ID: PAT_MRT4530_95424C.1.pep
MEGEEGRKGKEALSGGHLCHVCGYQYPNANPSAKLRRSHRKNCGKAPAADEREEGEEVDADMERNAGEGLLPVRAGGGESEGNAGSPSLGSARGDADLVEVKEIAERLKKAKSMAAFCSSVPPLERDRKLTWHSEMVLFWGTGVKSFVSFHAFIGNTFNEHASPNVTGVQVITGYCSEAGVINCASHSDEISKEVGRPAEREDSLDEYQDASPFLHQPDSEVGAAVAHKSDFSIEEIKNLDSVSPAASVAANEISVEMDGVSKDQLSGQPNMTNLSGESIVGKEVEPTVMLESSDEFSVNVHSDNTYIVDSKPDKTSEFIGDVNGSTSFISDLTSQSTSPIMVESLMEDSMDALHIISEVSPSLEEKAGSANAESVTENSRIDFVQTEDQLKLTNAVNTLTDCSSQYKCVKDTLDAQLPVENPFLGNSVCSLDGHQSDHVVTNMDSMWGSDDEDICSEGIKAKGSELGFSCEENPQHVELVDKADENPSVEKPNGLSEEVVCSKEIGPEVPIIGQVSASQHVALLMDQVSTKNPFILDDTRSDDLFELPTENYHSEAQNVAESKLQVDFTPLPLDQLIIVDQTSIAEGQQFVISGDRVPAISSTCGNEPAVGTEDVSVSSTSDPAKNISLHDASVNNSRQEDGEPTSGINFVPSEVFLPAEFSTMPTSQDINALKNDGNEKTPLEDISTKDMTASLSEDNVEEKKETEGTSVKEMNSILKADNVEEEKLTDDTSAERNAMQHIDDAEKKQAADTVSRETSALQNIEERENVEGTGAKGVPAVGSLENADAENQTEDTSAKTECKSDNADNKKQSYDTSTEEMNAKNQAQDTSSKEMNTIQNTSNAEEKNQTEDPAVQEGNKQKEGISPTVAKQSSERVHVPLKVLLAEASVETKEKKTTAKERVLSFRRRVSKDDSSSAKSGSPKPGADDNKFWSSPARLPENNAEKKSKARKQPWMPFICCHSVH

SEQ ID NO: 199903 - protein, 91 aa, Oryza sativa
  Clone ID: PAT_MRT4530_95425C.1.pep
FWVGQALVVPRVFQRCVPAGVERVLGVLCCSSVALSSRWVSSCLRGAFFSVLVFLCCLQNSIPKVRMLGVGGVPPRYFYETPPFVLAVLWG

SEQ ID NO: 199904 - protein, 124 aa, Oryza sativa
  Clone ID: PAT_MRT4530_95426C.1.pep
YAGQYARASASSRLGGSVDRSVRSTGSAAAGAQDEGSTGSADQRQGRRARAARCRVSDRDAGESGVPTPAPRTLMCLGPSALTRFRLHGTDDAPHTHYARSAADGALRCETARDVPAGHLCCSI

SEQ ID NO: 199905 - protein, 94 aa, Oryza sativa
  Clone ID: PAT_MRT4530_95427C.1.pep
AHSYLQLELSKPKLFITLGGVLSRAFRKDCAMDLWRVHCLGWLLVLLLFSHGGGGAEQVATQAHHDASRRTLRAGGARHAGAGRDLAARHCPGG

SEQ ID NO: 199906 - protein, 132 aa, Oryza sativa
  Clone ID: PAT_MRT4530_95428C.1.pep
MAEGGGRGRTHRSARGCEFRRRIPTGKGRTPSRSNLEIAAAYGVNGPYHGASAWLPIWKVGVGPSKFSKSYLAIASPTVREFTPIPSKDPPNIDNQIALEIAVYPQFVGDDLPRLYIYSTVKCLSYFLRSTI

SEQ ID NO: 199907 - protein, 77 aa, Oryza sativa
  Clone ID: PAT_MRT4530_95429C.1.pep
VFSTYPPVSVSGTGTPLLKVVRAFPGSMAWVTYFSAVAPGMSLVEKQWLVHGAHTSALQRLVLGPRLEGGPGTQFAL

SEQ ID NO: 199908 - protein, 151 aa, Oryza sativa
  Clone ID: PAT_MRT4530_9542C.1.pep
SCLTFCSQKVDATGSFFLLVSISAQEAGAKDMSESPYSVYSYNDVPPSSLTHIIRLRSGNVLFNYKYYNNTMQKTEVTEDFSCPFCLVPCGSFKGLGCHLNASHDLFHYEFWISEECQAVNVSLKTDSWRTELLAEGVDPRHQTFSYRSRL

SEQ ID NO: 199909 - protein, 52 aa, Oryza sativa
  Clone ID: PAT_MRT4530_95430C.1.pep
TPRVQSLTIPVTRAVSGLVIVHHGNQVKPLPFSSGKSQKISLTRSVTIPPIW

SEQ ID NO: 199910 - protein, 78 aa, Oryza sativa
  unsure (1)..(78): unsure at all Xaa locations
  Clone ID: PAT_MRT4530_95431C.1.pep
LSYTCVXAGTAGLFFVPIYLLVDVKGYKSPXSPLEWMGKHALMIFVLVACNIVPVLVQGFYWKEPSNNLXLKLIGIGG

SEQ ID NO: 199911 - protein, 150 aa, Oryza sativa
  Clone ID: PAT_MRT4530_95432C.1.pep
MADWAMHHYLLLANQQRHRALADVAVLRRQLLLDSGRVFMLLGAVILMHLLATGRGASSGCIRGAEPCVALLLWLLGAALAMLSLVAGRFPVLAAAAATIAKELGDHLLGDHLLLRAFALELSTDCVYCILAFSLHVMLSKHHLFFSIVQ

SEQ ID NO: 199912 - protein, 334 aa, Oryza sativa
  Clone ID: PAT_MRT4530_95433C.1.pep
MASQGVASMFALALLLGAFASIPQKAEAIGVCYGMSANNLPPASSVVGMYRSNGITSMRLYAPDQAALQSVGGTGISVVVGAPNDVLSNLAASPAAAASWVRNNIQAYPSVSFRYVAVGNEVAGGATSSLVPAMENVRGALVSAGLGHIKVTTSVSQALLAVYSPPSAAEFTGESQAFMAPVLSFLARTGAPLLANIYPYFSYTYSQGSVDVSYALFTAAGTVVQDGAYGYQNLFDTTVDAFYAAMAKHGGSGVSLVVSETGWPSAGGMSASPANARIYNQNLINHVGRGTPRHPGAIETYVFSMFNENQKDAGVEQNWGLFYPNMQHVYPISF

SEQ ID NO: 199913 - protein, 134 aa, Oryza sativa
  Clone ID: PAT_MRT4530_95434C.1.pep
FFFFFFEKRKSPLVPNKTIPNQPSSGSASIPTFHLLFYGKKLDRGVFNTPIISGARYAQVKTSLTASRISKIGPTKSTLPTIPQQQIEVLLCTACVSDPGGIPGTLVPCRAYPRLYPISESSSRRLWAGKSVGP

SEQ ID NO: 199914 - protein, 67 aa, Oryza sativa
  Clone ID: PAT_MRT4530_95435C.1.pep
MPLMLLSSYGGGGGGSLSLSLSAAQQHHEADKVSFEVLDKNPALFLDDNVVDRGQVVLEGAWIRVGA

SEQ ID NO: 199915 - protein, 60 aa, Oryza sativa
  Clone ID: PAT_MRT4530_95436C.1.pep
SSLPKSHINVHFAQYSGLHAAVACLELSVQSITFRSLAILCMSCCMFQFDVSSMSGNGAT

SEQ ID NO: 199916 - protein, 101 aa, Oryza sativa
  Clone ID: PAT_MRT4530_95437C.1.pep
MWERATGEVGVAVGDGSKRPARPMAMVEADVAEGCRRGWCGLVAKRGTHNRGLRERPKRPRVSGEADAANGSGLAFGVDDGRYGSLWWLGAPVADADDGGG

SEQ ID NO: 199917 - protein, 67 aa, Oryza sativa
  Clone ID: PAT_MRT4530_95438C.1.pep
RNYQSYHQFQKLTKTSLVCKASVSKEKQKSHKFLNNNQPHVRNKQARRDIWLNQKRTWPEMGAKIKK

SEQ ID NO: 199918 - protein, 94 aa, Oryza sativa
  Clone ID: PAT_MRT4530_95439C.1.pep
NKGKHRAPEEHTSYSAHISNFCIPKHILLITTSMSFNEHDPFTHVDINFHCCHPTIQAAPRPLLPESTHARATKAKTKLLKSTHITQSISHREQ

SEQ ID NO: 199919 - protein, 99 aa, Oryza sativa
  Clone ID: PAT_MRT4530_9543C.1.pep
DDVWIGEMPLKTQFPYIYSICSDPNSIVKQMLIEGEWEINLRRTLGQNELVEWMELQERLAPIQLTTEKDSMVWKLTQSGQFTTKSPYREIVFGGVKDV

SEQ ID NO: 199920 - protein, 120 aa, Oryza sativa
  Clone ID: PAT_MRT4530_95440C.1.pep
SNNPKSCTNCSIAHMKHASFAITMSQHSTTVLSQRELRCVLPQWTPPSPSRRASSPRVSARVPALRSAPGSSDGGARAAPLKLDGIDTHCIQLHRRSLRPPTTFIFLSQHQSFEILPGAQ

SEQ ID NO: 199921 - protein, 355 aa, Oryza sativa
  Clone ID: PAT_MRT4530_95441C.1.pep
MELLTTAPMLNCAAKRAGGSALGPLADALGSWIARAVVPPPPPPRICGSPGGPPVAAPRVRLRDGRHLAYAESGVRKEDARYKVVFSHGFTGSRLDSVRPSPEVAEELGVYMVGFDRAGYGESDPNPNRSVKSAALDVEELADALGLGPKFYVIGISLGCHAVWGALKYIPERIAGAAMMAPVVNYWWPGFPTDLAAEVYNKQEVGDQWALRVSHHAPSILHWWMEQSWLPTSTVVAGTTPLPNKRDAEIRKNMKADGSFQKKMDLATQQGIHESYYRDMMVMFGKWEFDPMSLPKPPCPVHIWQGDEDGLVPVVLQRYLVSRLSWANYHELPGTGHFLSAVPGLGDTVLRTIFG

SEQ ID NO: 199922 - protein, 73 aa, Oryza sativa
  Clone ID: PAT_MRT4530_95442C.1.pep
LILYMCNIFKVHCTMGKVNQIGKKEEASKVASDWTLDGKHFRFLLGWFIVGQLLLITGYCLGGLVLFMWLAGY

SEQ ID NO: 199923 - protein, 925 aa, Oryza sativa
  Clone ID: PAT_MRT4530_95443C.1.pep
MASSSSAVVISNPLFGIQILEKFTKQNHSLWSAQILTTLRGAQLEGYITGTAEAPAAECEKEDGDKKVKTTISNPEYIKWFTQDQQVLGFLFSSLSREVLQQVAGAKTAAQAWSMINDMFTCKSKAGAINVLLALTTTQKGPISISEYIAKMRSLGDEMAGAGKPLDDEELIAYIINGLNSDFDATVEGLMATARIAPLSISHVYSQLLSYENRIRIRQAYLTTSANAANRGGRGGRGGNRGGRSSAPHGGRGGGRGNTGGANPGRGRGNDTRPVCQVCHKRGHVASDCWHRYDENYGPDEKLGGAATYAYGVDTNWYVDTRATDHITGQLDKLTTREKYKGTDLIHTVSGEGAKKYYVSFIDDYNKFVWIYFLKHKYEVFQKFHKFQKLFERQFDRKILAMQTDWGGEYVNNLHKGFKCLDVSSGRVYVSHDVTFDEQVFPFATLHPNAGARLRAEISLLPSNLMNNTLDQGGEEQYDQMFNIHVPNATDDACIAVESYDRNSAENCNGNERSGECGCYAQPGARSAGGFGGRIPLGRGLAAALSCASDAFADGRPVRSWHVACRQLSPLAQQHHHVPRAGRAAVPSTWIICANGGRTTGYSCFTSSGEPQTLDEALGDKHWKEAMDSEYHAVMKNKTWHLVPPKRGLNVIDCKWVYKIKRKADGSLDRYKARLVAKGFKQRYGIDYEDTFSPIVKAATIRTILSIAVSRGWTLRQLDVQNAFFHGILEEEFYMRQLPGYEQDDIIIASSSNSATDTLLKNLNQEFALKDLGELHYFLGIELSAHEGTPLGPVDSTRYRNLVGALQYLTLTRPDLSFSVNKVCQYLHAPTTEHWAVAKRILRYLKHTVKLGLKISKSNSLLVSAFSDADWAGCLDDRLSTGGFAVFIGPNLVSWSARKQATVSSSSTEAEYKALANATAKIMWI

SEQ ID NO: 199924 - protein, 175 aa, Oryza sativa
  Clone ID: PAT_MRT4530_95444C.1.pep
MEECGADESRARIRVRGGGVFWYSFAQWVAQAQKFPRRTMSALASREGDSTKACMWESKNRRARAWRGQECATLYNREETSWICFGNRKGYDGNEVRRNRGGIEMYPNQNQDLIAYLLANGVGVHNLLIMLWQICKARNDINFKNKKWEPQQVCTTIYVDALWKEGQELESSFTT

SEQ ID NO: 199925 - protein, 263 aa, Oryza sativa
  Clone ID: PAT_MRT4530_95445C.1.pep
MKKKTAASKYLCFASFTICIPSAKQPSGGDAKNRLSFSFPESINGGKDRRCQQHTEEEHKSESIIDPAASVVTRTDGKHCTIIVGTIFGRRSGHVTFCVQRDAAMPPPFLFELSVPMLSLAAEMGSGLLRIALECHHSSGKVVVGAADGDTINNAGTGGGGSRSVWKASCNGRDVGYAVRRRPTDQDCRVLESMRMTTTGVGVLPSTGFSEDGGGGDVLYMRATYERVVGSKDAVSYHLITPGTASGSPQQELSVFLLRTRGD

SEQ ID NO: 199926 - protein, 48 aa, Oryza sativa
  Clone ID: PAT_MRT4530_95446C.1.pep
GAIFWISFFPRVGVPVLSPSVSLVGCSKRPNLLMLSGCLLSWVWVQVN

SEQ ID NO: 199927 - protein, 244 aa, Oryza sativa
  unsure (1)..(244): unsure at all Xaa locations
  Clone ID: PAT_MRT4530_95447C.1.pep
MYFPPGLLALGNMSGHYYHHLTSFLLGAVLPTVLLFFLASDRVSERLPTISSLGNGALVIGGRATAREGGDLTGVDGSAPAPAEKEKFPGLAELLPEVAMEDKTVIITSVNDAWAAPGSLLDLFRDSFHNGDGIAHLLDHVLVVAVDAGGFRRCKAVHPHCYLLDVPGHGGLRRLLRXYRPDAGRVCTVHANCCVGLENKVLDLKNVLADWKNYTAGLTSPEKKGANKFRWTFPAKCKASLKRH

SEQ ID NO: 199928 - protein, 64 aa, Oryza sativa
  Clone ID: PAT_MRT4530_95448C.1.pep
SGEREIRDHITERIQYELKGTAALTDRGTSYYKVPKSDDGNWRFRRNVKRFPHLGHDTIDLEAL

SEQ ID NO: 199929 - protein, 148 aa, Oryza sativa
  unsure (1)..(148): unsure at all Xaa locations
  Clone ID: PAT_MRT4530_95449C.1.pep
MFFTGMKNFKKHQNMIFGHIGVCWXVRVEKSLRDSRGELLSINANIGLYXTRGCDVLHRNEKLQKPPKHEFWTYWSMVGESVSKNHSVTRATNFCQLMPTLAHVGAMFFXRNEKLQKAPKRDFWTYWSMLGQSVSKNHSVTRATNCQK

SEQ ID NO: 199930 - protein, 130 aa, Oryza sativa
  unsure (1)..(130): unsure at all Xaa locations
  Clone ID: PAT_MRT4530_9544C.1.pep
KEVEVGAGGERGRWAAARAEAEVEPFLVLQGLVFTHGYXNMYTRGYCKLSLXSIILLSAHRHPLSRGFYISTGRIWHLTRGCIGSVRSPAKGXVLRSTSPGESAGYVGVVQGCIASISXIALVWLIHLPT

SEQ ID NO: 199931 - protein, 119 aa, Oryza sativa
  Clone ID: PAT_MRT4530_95450C.1.pep
FFFFFFFFFFFFFFFFFFFFFLDTPKRGVKKFPHKFYYFMLQLYKKGGRDVKLASLNRDHHQALGAKGSPPPKKKKKPITVSPKIQGSPYKTPLFIKLTGPPPLGYFGFPFPRVSGANL

SEQ ID NO: 199932 - protein, 676 aa, Oryza sativa
  unsure (1)..(676): unsure at all Xaa locations
  Clone ID: PAT_MRT4530_95451C.1.pep
QQDTKQXQPESQEEEMNKVERKREEKEAETHRATPKTHANTPQKEKEKEHKEQRXEGEGGRDERHHENXQKRGTDNTTQRDHPRLKERRQRHRDQAEXEXTNNAXRRRSRRTRSHAXRESXRSXKRATKTRARQEQNRRHTLXAXEXHVEGQRHXRXAAREGMXQXEREERTRGEXAQRRXLERXXADDRATRHASRVEGRQKNERXRARXHTTRTXRAQPRHHRHQEERRDAASKRQTXEHSRLTRRDTGTXEELRDTAPRRADTEGKHDNREEAGQQHTAXARAYNATQRTEERRETDATTTXKTARTRARQRIEREREEKEQQQQQARXRQAQQEEANTRRRQQAREQHTHRKHTSTRPTETXEERTTSRXERDAHNRXKRTMTRSEATSNTARHGKARRRQQTYDEXAQRTARRRRTREPTTARQARAREXYAATQARAPPRXRRQTLERDGADAQRTAXAATTDRERVVXXAQMXRSAHATEREXEENRQEYIHSAPIDKKTERDEGXEREVRERGSAPRXEDSTYTTDRRRVEEIRSQTDSEKERERETRQXEQTEDEQHKQTERTARNGAQKHTRRKQRXQQRRSEDDRERTRRCIHEEREPDGAEXADRGKRRRREASRPDEERASGGRRRTRRRSERSEDTENEEAHSTAKGGLRAKQHRSTTSRRR

SEQ ID NO: 199933 - protein, 140 aa, Oryza sativa
  unsure (1)..(140): unsure at all Xaa locations
  Clone ID: PAT_MRT4530_95452C.1.pep
MFFTGMKNFKKHQKMIFGHIGVXIGCVRVEKSIRDSRGELLSINANIGTRGCDVFHRNEKLEKAPKRDFWTYWSMLGESVSKNNSVTRAANFCQLMPMLAHVGAMFFXRNEKVQKAPKQDFWTYWSILGECHTLRFFSQA

SEQ ID NO: 199934 - protein, 169 aa, Oryza sativa
  unsure (1)..(169): unsure at all Xaa locations
  Clone ID: PAT_MRT4530_95453C.1.pep
MFFTGMKNFKKHQNMIFGHIGVCWXFRVEKSLRDSRGELLSSNVNIGPCXTRGCDIFHRNKKLQKAPKHDFWTYWSMLGESVSENHSVTRAANFCQLMPILAYIGTCGCDVFHRKEKVQKASKHDFWTYWSVLCASVSKNHSVTRAASFFQLMPKLAYIGPRACSEYVP

SEQ ID NO: 199935 - protein, 80 aa, Oryza sativa
  unsure (1)..(80): unsure at all Xaa locations
  Clone ID: PAT_MRT4530_95454C.1.pep
MATINGDAELIVAEAKEEEEATHDGGSVHSYNGLVSTASLMLGISAARPADKRTVLLSGLAGLVTDAXAWPSASTSPSTC

SEQ ID NO: 199936 - protein, 163 aa, Oryza sativa
  unsure (1)..(163): unsure at all Xaa locations
  Clone ID: PAT_MRT4530_95455C.1.pep
MFFTGKKNFKKLQNMIFGHIGVCWXVRVEKSLRDSRGELLSINASIGIYXTRGCDVFHRNEELQKAPKHDFWTYWSMLGESVSKNHSVTRAANFCQLMPILAYIGTRGCDVLHRNEKLQKPPKHEFWTYWSMVGESVSKNHSVTRATNFCQLMPTLAYIDTRG

SEQ ID NO: 199937 - protein, 110 aa, Oryza sativa
  Clone ID: PAT_MRT4530_95456C.1.pep
MAIMPRSPVPAVAMNVTMRQVMWHRQHGPFGLAAGSGNAATSSVGEVVTAVWRDQISALTSLKIYTDMGGEATNWCPSTTFLIVAQHEGFVLAIIVSVEHDKRISLSLLL

SEQ ID NO: 199938 - protein, 266 aa, Oryza sativa
  unsure (1)..(266): unsure at all Xaa locations
  Clone ID: PAT_MRT4530_95457C.1.pep
SLLRRSARRPXTXXXPXXXPRGAPPTPRPXRPPPXPPXXPTPTPPXXXFXRXPPAPPPPPXPPPPXRPPPRPPSRPPPGRXPPRPFPGRAXRXXRAXGXWGPSLSVPRPFPPPAVAGVVKPPLPXSQPPRALLRSCQPSVVAPAAVPPPQPPLLPQQPLPPXSFAASDGPPHRWPDASPPPPLLPLPLRNCSRRRAVAPPAAPPPSSSWRRPRRKRKPPTTAAACTPSGCVPWCWVPATASSPPHRSCSASARRAPPTSAPSSCPG

SEQ ID NO: 199939 - protein, 501 aa, Oryza sativa
  Clone ID: PAT_MRT4530_95458C.1.pep
MEINSEATVTLVSVVTLPILLALLTRKSSSKKRRPPGPWNLPLVGGLLHLLRSQPQVALRDLAGKYGPVMFLRTGQVDTVVISSPAAAQEVLRDKDVTFASRPSLLVSEIFCYGNLDIGFAPYGAYWRMLRKLCTVELLSTKMVRQLAPIRDGETLALVRNIEAAAGGKKPFTLATLLISCTNTFTAKAAFGQACGGELQEQFLTALDEALKFSNGFCFGDLFPSLRFIDAMTGLRSRLERLRLQLDTVFDKIVAQCESNPGDSLVNVLLRIKDQGELDFPFSSTHVKAIILDMFTGGTETTSSTTEWLMSELMRNPEVMAKVQAEVRGVFDNKSPQDHEGLLENLSYMKLVIKETLRLNPVLPLLLPHLCRETCEIGGYEIVEGTRVLINSWAMARSPEYWDDAEKFIPERFEDGTADFKGSRFEYLPFGTGRRRCPGDIFAMATLELIVARLLYYFDWSLPDGMQPGDIDMELVVGATARRKNHLQLVASPYKPISMQS

SEQ ID NO: 199940 - protein, 90 aa, Oryza sativa
  Clone ID: PAT_MRT4530_95459C.1.pep
MTVDQSPGGLGGADQRGRWRVPLEQCWRPRFGEDDTAGVEAVAKLSLDGVESEKDGVGDELETRRMAPAMVLGGPPGRMASATALGGLTG

SEQ ID NO: 199941 - protein, 360 aa, Oryza sativa
  Clone ID: PAT_MRT4530_9545C.1.pep
MEIVTGAINTLLLKFAKLLVGEYKLQKGVKKEIESLQEEYVDVRELSYDIEDSIDTFMVSAGKDGHPVAKLFSFKGMIDRTNNLFKKVVAHHQIAREIKDIKKLLEDASKRRERYKIDDAVIARRSESIDPRLGAMYKKETELVGLDGPKNVLVKTLMEEDGKLRKHRDIISIVGFGGLGKTTIANALLHELRVKFDCHFFALVSNKSDIRNILKSILHQLDNKANIFEGLADFQLINKIREILQNKSWDVIKLALLDGDHGSKIITTTRKMAVAERVGGAVYELKPLSYDDSYKLLSKRVFDTEDRRRLVVRGRGEGYLRPELRMDEMWRSPSPSASFAGEGSRRPVPVERTESPPARS

SEQ ID NO: 199942 - protein, 145 aa, Oryza sativa
  unsure (1)..(145): unsure at all Xaa locations
  Clone ID: PAT_MRT4530_95460C.1.pep
PPYPQHPIDPLPFPPHPWRITLLCTALSPYLLPIPSTSFNHDSASLFVLCKPMVPDLHAAGWARRRTSALAXPVVGAELEDVHTEEDEVDEEEGSDCXELSDNPRVLLGNLPWRVDSTQSAGLXRQSGSGDMGEVTTLFASADYE

SEQ ID NO: 199943 - protein, 115 aa, Oryza sativa
  Clone ID: PAT_MRT4530_95461C.1.pep
VSQTVGARVTAPRRRLPRYLYYRIPTEGDLLSNGEDEHEVGLGGTAVIGRHAGGEPAIGRRIQPHARDDHLKLKAKKDKAEMINYDALPKLKAKKDKPYKGRSCANAGSEKCVQG

SEQ ID NO: 199944 - protein, 726 aa, Oryza sativa
  Clone ID: PAT_MRT4530_95462C.1.pep
MGDEWETWIAADMGQNKGALINDGEQRMSIPARELFAAIEADSGLLPVNSSNTNEKRKRRLQRLTGKQSEVLEGFFSICGHPDDGQKRHLSETTGLGLDQVKFWFQNKRTQVKTMCWKEENYKLSVENEILRDENRRVKIAHCTAVCLTCCNSSVQNQLAVEMERLMGQSEWLQQEIARSNGTPPAANLAFQLNSSADYVFSGQHDQQMIAELAKNAMHALIILAESHVALWFPVPGCSYEVLNKMAYDQAYPGDNSANAIGFKTEATRAVSMVMMDYKSVVDFLMDPYNYRTFFPEVISGAVTNRIYTWPTSDGYNGVIQLMTVEMMFPSPLVPARKCTFLRYCNVLNEGLVVVIDVSLDDGSIFSKCRKMPSGFLIQSIRPNSCKVTAIEHVLADDTGVHELYQPCMNGLVFGARRWVATMARQSARMRDVHHNKTAPQVSTKGRKNLMKLADDLLASFAGGIAATGGGTWTVVIGAGTEKDIRVAYRRTTEGSSSYNAILSVTASLRLPLPMRKTFDLLRNLTHRCKWDVLVHGSVVKEEVTIARGVGNDDTVTVLHCKRAGREDRGRTMILQNNGYDASGSFMVYSQIDSELMNTMVLSPSDLPPGRGGPSLYPTGFSLLPDVEAAQDSSGIALGEVGGTLMTMGFQIPVKLASGDRMYSRSAASAIRLMTDTIALVKKTLMNEHSGIYGGEKGGPCADKNQEHAKGIHRLRSPCISQNLLN

SEQ ID NO: 199945 - protein, 215 aa, Oryza sativa
  Clone ID: PAT_MRT4530_95463C.1.pep
MRPKEEQADLSGSRHRQPDHATLPVASAHTTRAHRALPVAPAMLEALLVNWFLPDTCLVRVATVGQPGAMRRITVHYVNLLPVAGAGEAHVDGAANYSGKASQHRKHQAEQSQQWRGEIDSDGGDGGAEGGVLEERGDAAADAVESTAVGRGGAGGVHVCLEEFSAGDAMAHLPYGRHFHWACALPGSRLAPHPAPAHSAAPSSTRRGRGSGRGR

SEQ ID NO: 199946 - protein, 709 aa, Oryza sativa
  Clone ID: PAT_MRT4530_95464C.1.pep
MEMNQQHNEGNESFVALMNGFAGDGTATLPNDGEQRMSIPARELFAAIEADSGLLPVNSSNTNEKRKRRLQRLTGKQSEVLEGFFSICGHPDDGQKRHLSETTGLGLDQVKFWFQNKRTQVKTMCWKEENYKLSVENEILRDENRRVKIAHCTAVCLTCCNSSVQNQLAVEMERLMGQSEWLQQEIARSNGTPPAANLAFQLNSSADYVFSGQHDQQMIAELAKNAMHALIILAESHVALWFPVPGCSYEVLNKMAYDQAYPGDNSANAIGFKTEATRAVSMVMMDYKSVVDFLMDPYNYRTFFPEVISGAVTNRIYTWPTSDGYNGVIQLMTVEMMFPSPLVPARKCTFLRYCNVLNEGLVVVIDVSLDDGSIFSKCRKMPSGFLIQSIRPNSCKVTAIEHVLADDTGVHELYQPRVNGLVFGARRWVATMARQSARMRDVHHNKTAPQVSTKGRKNLMKLADDLLASFAGGIAATGGGTWTVVIGAGTEKDIRVAYRRTTEGSSSYNAILSVTASLRLPLPMRKTFDLLRNLTHRCKWDVLVHGSVVKEEVTIARGVGNDDTVTVLHCKRAGREDRGRTMILQNNGYDASGSFMVYSQIDSELMNTMVLSPSDLPPGRGGPSLYPTGFSLLPDVEAAQDSSGIALGEVGGTLMTMGFQIPVKLASGDRMYSRSAASAIRLMTDTIALVKKTLMNEHSGIYGVSPFHP

SEQ ID NO: 199947 - protein, 81 aa, Oryza sativa
  Clone ID: PAT_MRT4530_95465C.1.pep
RSPCVVGSRRKLSPVSAAWWRTRSISRRPTNSGGRTMSSCRFPGRMTWRAGAIHNSDIDRKTHPSLARFPPPPSPLSLSNK

SEQ ID NO: 199948 - protein, 119 aa, Oryza sativa
  Clone ID: PAT_MRT4530_95466C.1.pep
NKKTILICTVGTNKKKRREDGFQQAYHQRLSGLKGAKTPSGTMKQQYKASYMDSRDIKPRTPMDLMGPHGWTKLIGPLPGGFSTEQGPSGLVDRMEPTSTGTGETPPISKMGRTKRQFL

SEQ ID NO: 199949 - protein, 39 aa, Oryza sativa
  Clone ID: PAT_MRT4530_95467C.1.pep
KKSQQHELLVATRDLFGYFHRKVIQKQTLEELIRSELDN

SEQ ID NO: 199950 - protein, 265 aa, Oryza sativa
  unsure (1)..(265): unsure at all Xaa locations
  Clone ID: PAT_MRT4530_95468C.1.pep
SRPPSPLPPAPVIAXRRPLLHRRSPPPRSQQRPDXPPPCPPPSSPADAAAAAVASRPPNPATPRPSSQPPXPSPASPXPSRPSPPDPAAXPGSRRPAPPPPVPAAVAPAPSSLSPXGRRPPPPAPDPHRGPPETSPPDPRRIWRPLPPPPAPPKLRRHPRQRPRPSTLPHRRLNSPRTPAGRRRSGRFLPPDAGRPPPALVRRDEAKPRRRCPCRCAALLAAGRAAEAEEEGGRAGDGGLGTSRAAREETTREEKVRYTPPQEVN

SEQ ID NO: 199951 - protein, 102 aa, Oryza sativa
  unsure (1)..(102): unsure at all Xaa locations
  Clone ID: PAT_MRT4530_95469C.1.pep
MIRKCLVLFLSFALLLSVFPMLXVDAANRPXAKLPGNSNPLXDHKLGADPYSLXVYDGRVYIYMSSDTYVYNKDGSIKENDFSALDRIQVISSTDMVNWTDH

SEQ ID NO: 199952 - protein, 147 aa, Oryza sativa
  Clone ID: PAT_MRT4530_9546C.1.pep
WEGRGKRIGGPRLTPGRRRRRERRPERRKAAAPLGSTSTAVFRRSATETERWTRSARMRRSRRRRRRGGKWSGATTAADRSSALLMTVVAAGNVLTALQPSLRMNPGRPRKTPGWMALMGVWLNQGLGQTSPSSAGGIFHCFSLSTC

SEQ ID NO: 199953 - protein, 171 aa, Oryza sativa
  unsure (1)..(171): unsure at all Xaa locations
  Clone ID: PAT_MRT4530_95470C.1.pep
KXDPISPXPGXXIKLGXXSXGXXXKDVPXXRXGTXXXXGXLEXRAXXEVESLKKYLRXMXXAIDRXSKRXALNHMXXSXXTLIRGEXXSDRQXKYPXSLXECXSHXXESXGNXSXQGGPPXXIXXXXXXLSPLNXXPXSXKRGXXLRSXTPPALXSRNXRRXRRXXXRVHR

SEQ ID NO: 199954 - protein, 51 aa, Oryza sativa
  Clone ID: PAT_MRT4530_95471C.1.pep
MAGGARWRRRPGSVEGGAGRWRRRSGRSAPGGRRRARWGSATWGPSQMTHR

SEQ ID NO: 199955 - protein, 104 aa, Oryza sativa
  Clone ID: PAT_MRT4530_95472C.1.pep
STTSRPRPTTRTGRNRSSGAPHGADEPLPPPPPPPPPTIVFSELDDADDPPPPPPPLLLLLGLLGGGCVDRSITPARRIGKPWRAPLLYTTTTTTITTGHGRWS

SEQ ID NO: 199956 - protein, 57 aa, Oryza sativa
  Clone ID: PAT_MRT4530_95473C.1.pep
MGVGMGTVLYPRRVSVFKWEYLDIVGMSMGQENPMGMHPLPSLVGDGEGATYGPLNE

SEQ ID NO: 199957 - protein, 156 aa, Oryza sativa
  unsure (1)..(156): unsure at all Xaa locations
  Clone ID: PAT_MRT4530_95474C.1.pep
NHKLQVAPCGCXDYPQLGEHLAKVGVDPAINKWDQPFVLGVVDPHDSLSHPAGVSDVQAESAARLDPDLFTNFMIPSWFGTEVQEPTKCCPFPLPEIYCASQSKKLAALEDIRRTIRELQIDDNRKKELTNALHAQFKDWLYASGNIRQLYCLQGD

SEQ ID NO: 199958 - protein, 45 aa, Oryza sativa
  Clone ID: PAT_MRT4530_95475C.1.pep
SFPVIMLCHFTLNVIGYSILSSYKFYIVFIHNLLSKSTTQHFKLS

SEQ ID NO: 199959 - protein, 71 aa, Oryza sativa
  Clone ID: PAT_MRT4530_95476C.1.pep
LYRLPRLSILQPCCGTLRFFDHGYTLSVSALINYYNQKHRFNQSLLVVFTVRHQLRRWYDRDLRQRVRLFW

SEQ ID NO: 199960 - protein, 618 aa, Oryza sativa
  Clone ID: PAT_MRT4530_95477C.1.pep
MADDPLDPPPEPQPQTLPAVAAASPSPSPPPLLLRPRREAFEHGLLPIPKLIFPEGTLAHTLAQVKDKLASAADGGGRVAAAALAEALQIPHEQAALALATLAAVLPADDPALDSGGGGRADLRDVLLFLYIQSYKRLVPRAHKDSPAVTDVWPSTSAFDGYLSALSPIQGQSQFPFPKPTDQAKDIKTPSVPFANMSRMLVRSNSRRFMPSQADEEIHQLSYLQKHMANILTLLADSVEGEGDDSLVLTMETFEHLGFLLKFSEGTPLSQAATFFANSDPDMPAAPVPAAQVHDWISQNISASLEFSTEKSISKEVSQQVTSDIDVTMADANASNARNSTPTGTNPAYYRNTTFVEGFSKTSVVKHASDVKGHSVKVLNCHESVIYILAPLKYATVYGCSDATVVLGAIGKVVKVEHCERVHIIAAAKWICIANCRECIFYLGVNHQPLIVGDNHKLQVAPFNTYYPQLGEHLAKVGVDPAINKWDQPFVLGVVDPHDSLSHPAGVSDVQAESAARLDPDLFTNFMIPSWFGTEVQEPTKCCPFPLPEIYCASQSKKIFLIQLCVYTIHIQLAALEDIRRTIRELQIDDNRKKELTNALHAQFKDWLYVPFAYDGFA

SEQ ID NO: 199961 - protein, 174 aa, Oryza sativa
  Clone ID: PAT_MRT4530_95478C.1.pep
METGSFIQVQAPELSELWLSFLIQNSLAVCGIHNPDKLGKDPEDWRTPFVKYLRDGWLSEDEAEAKHLQLRVAKYKLVSGQLYRIGVLQPMLRCISFAEGEEMVKEIHQGMCGAHQAARTVSSKIFCQGIYWPTVLKVCVEQIKKCEGCQWHGRSQTVPQCELQLIAPVWLFAR

SEQ ID NO: 199962 - protein, 371 aa, Oryza sativa
  Clone ID: PAT_MRT4530_95479C.1.pep
MSTTAKFLALAVFAAAAILSLDSRSDVRQLEIRDGDVELIPLLDGAAGPESIVFGDAGEGPYTSVSDGRVLKWLPPPERRWVEHSCSVPELLDSCRGSKDTKREQECGRPLGLKFNSKTGELYVADAYLGLRVVSPGENVSRPLVPKWTESPFSFSNGVEIDHETGVIYFTETSTRFQRREFLNIVITGDNTGRLLKYDPKENKVEVLVDGLCFPNGLAMSNDGSYLLLAETTTGKILRYWIKTPKASTIEEVVQLHGFPDNIKMSPRGGFWVGLHAKRGKIAEWSISYPWLRKVILKLPAQRIQRITSFLTGFGRQVIALRLSEDGKTIEAMSVHGDVRKLFKSISEVEEKDGNLWIGSVLSPFLGLYRI

SEQ ID NO: 199963 - protein, 71 aa, Oryza sativa
  Clone ID: PAT_MRT4530_9547C.1.pep
MRGICGFQRCDCTKRAGNVEINLSRQMRENDVHPYRLRRPAITKRFGRCAGDVSPARRRETAGEAMGLRFG

SEQ ID NO: 199964 - protein, 42 aa, Oryza sativa
  Clone ID: PAT_MRT4530_95480C.1.pep
TFSGSQNFLRMNFASQLNYEPIQKLFTKWILICVRPLLHNIL

SEQ ID NO: 199965 - protein, 605 aa, Oryza sativa
  unsure (1)..(605): unsure at all Xaa locations
  Clone ID: PAT_MRT4530_95481C.1.pep
MARAAAAFVFVSLTLLCNASSQGEGAAAAAACRAADLVVRQRATGRVVEGKPEYAVEVANRCRWVTLRLHPVGPPLLVPHHARQDTVVAGYDVPADARVLVHVRAIAPDPASWPDRTDAFLPERFLPGAGGCDGGVDVHGQHFELLPFGSGRRISPATNLAKKMVALGVASLLQGFAWRLPDRGREHGGAGQAVHTPEGAARHRRRAQAAATSLRRRRRMNVVIHIGSGLLVPMKASLVVLAAAVAAAAALLVSLDPRSDDVPVLEIRERDVELITVDAGGAVGPESVAFDGDGEGPYTGVSDGRVLKWLPLERRWVEHSSAVIEPQLCRGSKDTKREQECGRPLGLKFNSKTXELYVADAYLGLRVVSPGENVSRPLVPKRTGSPFSFSNGVEIDHETGVIYFTETSTRFQRREFLNIVITGDNTGRLLKYDPKENKVEVLVDGLRFPNGLAMSIDGSYLLLAETTTGKILRYWIKTPKASTIEEVAQLPGFPDNIKMSPRGGFWVGLHAKRGKIAEWSISYPWLRKLIFKLPAQRIQRITSFLTGFGRQVIALRLSEDGKTIEAMSVHGDVRKLFKSISEVEEKDGNLWIGSVLSPFLGLYRI

SEQ ID NO: 199966 - protein, 97 aa, Oryza sativa
  Clone ID: PAT_MRT4530_95482C.1.pep
GVPLPRGHHPQPCFHQGRQAGGHPVSLVNNNSGDLVPVDRSPAGPPNTFFRPRNVRPGIKKKVVPPKKKIGKSKVLKFWIMLRHVLLLIAELLIPCP

SEQ ID NO: 199967 - protein, 135 aa, Oryza sativa
  unsure (1)..(135): unsure at all Xaa locations
  Clone ID: PAT_MRT4530_95483C.1.pep
NSRSHVPDPVVAGFIKGAASSATGGYDPRLSGLYRNKAELVGIDEASDQLMNALALSLXGGGLGKTTLARTVCNRLKPQFDCTAFVSVSSAPDIKKVFKDMLLELDKSKNKDIHNLVRDEKQLIDELRDFIQNKR

SEQ ID NO: 199968 - protein, 437 aa, Oryza sativa
  Clone ID: PAT_MRT4530_95484C.1.pep
MATPSAARFSPSSNPARPPPPRLPLPRFLPPTPPQALLRARPLRTSAAVAAAAAVVEVGGVKIAREDVVKEEDPTNNVPDTIYSKIGLQLHRRDNHPLGILKNTIYDYFDKNFSGNFNKFDDLCPLVSIKQNFDDVLVPADHVSRSYNDTYYVDAQTVLRCHTSAHQAELLRDGHTHFLVTGDVYRRDSIDSTHYPCFHQVNVTPYHLKYFQRKMEGFRVFTPDEWSDSGMDGTARVGADLKKTLEGLAKHLFGAVEMRWVDTYFPFTNPSFELEIYFQDDWLEVLGCGVTEQEILKNNGRIDNVAWAFGLGLERLAMVLFDIPDIRLFWSNDKRFTSQFSEGKLGVKFKPFSKFPPCYKDMSFWINEEFTENNLCEVVRGIAGDLVEEVKLIDNFTNKKGMTSHCYRIAYRSMERSLTDEEINDMQVTFDDIYDFR

SEQ ID NO: 199969 - protein, 1013 aa, Oryza sativa
  Clone ID: PAT_MRT4530_95485C.1.pep
MVVRHVVKEVGSSANYPILTKTNYGDWALMMKVMLQARSLWEAVNTGDTDFQEDPMAMEAILRAVPPEMLSTLVVKPMAKDAWDAIKLMRVGVNRVTGRLRNAEQCKGYGGKGGQDAGKLYLTEEQWGTSKGETSQGGKGHWARECRLPKKQEAHQAKAESGDDDEEPTLLMARVCSVIEPERGGTPPPASPSSLHVEEAKVFAHLDDEKRCDYGLWYLDTGTTNHMTGSHAAFSELDMAVRSTVRFGDGSVVAIEGVGQLNEIRCHVEVHCGMMRIWDPHCKVLARIKRSANRLYKASVETETGRRLRVLQTDNGGEFTSVQFAEYCADRGMQRHFSAPHSPQQNRVVERRNQTMVATARALLKARGIPARFWGEAVTTPVYLHNRVTTKIVEGRTPDEAWHGHKPVVHFLRTFGCIVHVRDTHPNLKKLDDQGSKAYKVFDPVTGHVHASRDVVFNEAASWDWHSSEGSSATPAIEFTVEYLAEATQPGSQASGESPPHSEMVSPMPAGTLPVGMHDASRTPTFVSPPGGGSENIDNDHNDCPQRFRKLDEILGECDPPRPIMHKLVEGELHLQVLEEPVALKEAELEEPNGTWHLADLPPGHRAIGLKWVYKVKKDTQGAIAKYQARLVAKGYVQQANVDFEEVFTLVARLESIRLLVALSAEHGWVVHHMDVKSAFLNGELAEEVYVKQPPGFILASKEDKAPRTWNQKLDNNLKQHGFTHSESEHAVYVRRRGTSQLLVGAYVVDLIIAGGETREIEVFKEEMKQLFKMSDLGELTFYMGIEVHQSTAAITLHQGGYARRLLTKTRMDGCNAYTTPMETRLQLSRSSSASPEDTTEYRSIVGSLCYLVHMRPNIAFAVGYVSRFMETPTSEHMAAVKRILSYVASTLDFGCCYNRSVGPATLTGFSDSDMAGDVDTRKSTMGVLFFLGTNPSSSEAEYVAATKATCQGVRLSQLLGELSGFKPGAFKLKVDNKSAIALNILTKALGRVRFHELRTQIGVIEIKNQHKV

SEQ ID NO: 199970 - protein, 49 aa, Oryza sativa
  Clone ID: PAT_MRT4530_95486C.1.pep
TKTSLIAGLVPKLKRAGFTKKHLLLKLNITGPTRSCLRANNWWPSPPHY

SEQ ID NO: 199971 - protein, 52 aa, Oryza sativa
  Clone ID: PAT_MRT4530_95487C.1.pep
PTCQHIIASSVHHFTQPIPAHICAPLNTCIIFSPSSRPKLQGHHPLGPQCTP

SEQ ID NO: 199972 - protein, 338 aa, Oryza sativa
  Clone ID: PAT_MRT4530_95488C.1.pep
MDDSSFFMQWAMDTLHQLPSDSTAAAAYATDVAGDSGAFPSLQALRNASAAGGGGGFRDLTVQVDQVHRANSWSSSDSPGGGAATAAAGWSPHVTGGGGRGHRPMSWNFSAASAQPTTEDSGGGGGGGVVPAPLQAMETTATARAAVKKGGGGGSSSSAAAPGYVQDHIIAERRRREKINQRFIELSTVIPGLKKMDKATILGDAVKYVKELQEKVKTLEEEDGGGRPAAMVVRKSSCSGRQSAAGDGDGEGRVPEIEVRVWERSVLVRVQCGNSRGLLVRLLSEVEELRLGITHTSVMPFPASTVIITITAKASSLSNHPALLCLYICIKLPCVISS

SEQ ID NO: 199973 - protein, 163 aa, Oryza sativa
  Clone ID: PAT_MRT4530_95489C.1.pep
MPRERVTVDCGVVSVQAAHSKPLPSLSSPPASPSHLLLVGRRLRRIRLRLRLIAHFAPATERYHRPAGSLVATIELSAREYKKFASRPGLSEEGMRFLGWYLKIAAGGAAIGAAMELFMIHTGFYEKVTVLESEKRAWETSPEAQAMREALNPWRKHDDQEKR

SEQ ID NO: 199974 - protein, 55 aa, Oryza sativa
  Clone ID: PAT_MRT4530_9548C.1.pep
SGRPRVRKCLDMFAYFGRSLASCNKAKTNTLTCGLGGASWVICKNLLKPFLTQVF

SEQ ID NO: 199975 - protein, 128 aa, Oryza sativa
  unsure (1)..(128): unsure at all Xaa locations
  Clone ID: PAT_MRT4530_95490C.1.pep
MEHIVRALITLADRSAITISPGKTNRLVPIRVLLRMRASRHSSLAGASVLAPGDGTLVPVRYIPGFIPTIARKTLYEEGQTCSLLSXRVEDKNDWFVTDLTLVMSSVDNRVPTLNLLPAEWRSTRTQE

SEQ ID NO: 199976 - protein, 83 aa, Oryza sativa
  Clone ID: PAT_MRT4530_95491C.1.pep
MAGGGMFGGAGAFWATRALEVVKRNDSPGLLWKRIKLTTTRKNNAKKRLKRLWQNEAVIRACGEAESSSSSTSNTASASGKQE

SEQ ID NO: 199977 - protein, 575 aa, Oryza sativa
  Clone ID: PAT_MRT4530_95492C.1.pep
MHASLNMPNMPGSFSQRNAAMSGLPSSGVQQPGGSMPGRFASNNLPVGMSQIPHGHSGVGSRGLNVGGGPAFSSSLNIGGTIQGLSSNLGAGGSRNSVPGMSVSPSLGNLGPRITGSVGNIVGGSNIGRNISSGGLSVPSIASRMNLSGNVGSGGLNVQGSSRMMNGILQQGSPQMLNMMGSLYPTSGGSLSQNQIQGGNNSLGSMGMLHDASDGAPFDMSDFPQLTGRPSSAGGPQGQYGSLRKQGVGVNTIVQQNQEFSIQNEDFPALPGYKGNTTDYAMELHHKEQLHDNVPVMQAQQYPMSRSVGFNLGSNYPPNRQQHQQGANSVQNAGPPNIGLRPLNSPNQTSSLGSYEQLIQQYQQPQAQNPFRLQQVSSATQSYRDQSLKSIQGGQTPSDPYGLMGLLGVIRMNDVDLSSLALGIDLTTLGLNLNSPDNLYKTFGSPWSNEPAKGEPEFHTPACYSAEQPPPLQPIHFQKFQTPTLFYIFYSMPRDEAQLCAAIWYTRGWFYHKEVRVWLTRIPNVEPLVKTPHYERGSYGCFDPNNWETIRKDNFVLHYDQIEKKPAIPSSQNVR

SEQ ID NO: 199978 - protein, 122 aa, Oryza sativa
  Clone ID: PAT_MRT4530_95493C.1.pep
MGKLAGGGGVLGSGGGFPGAEVDGLCDVHLLLLTFSSYAYATVAMDAKLAALFPTNRPHHSGKRRRRQWKRDGSSLLGDKEGEGRKGAVERPSTMDHGRCNRRDDEVEADMWGRCHVCGHMD

SEQ ID NO: 199979 - protein, 135 aa, Oryza sativa
  Clone ID: PAT_MRT4530_95494C.1.pep
SPWMSYGLPTISFREIISEATLTRNSAAMAVTCEADVSGASCMRATEPQSQCWAVTSSSGSAGAAMPMIRIRVAPVDRWPFVGHCGKTLAGRRGRERLGGVFLERSVPVHCLPSFACQWGPQGPRDIGPTCQRQG

SEQ ID NO: 199980 - protein, 148 aa, Oryza sativa
  unsure (1)..(148): unsure at all Xaa locations
  Clone ID: PAT_MRT4530_95495C.1.pep
TIKLTYXCAQKRASRAPKKKETSIAPIVYKHRWQKETTGLMLGKTEPFQLTINVLVSIRALGAELPRAARGTTAVRRRTSPLLRVQTDNGRIVALLHAQLALHVALVRHVLGEVLRRHGTLAVRQRRQQHLLGDERDDLDLVLVVRDI

SEQ ID NO: 199981 - protein, 95 aa, Oryza sativa
  unsure (1)..(95): unsure at all Xaa locations
  Clone ID: PAT_MRT4530_95496C.1.pep
LTGTARSIDRSPCPPPPLALVSSSRCXCXXRCRSSCPPPXXAPPLPRRPSVQQQLSLRGGRRGEGXVPXPTTSTAASNVAXRYDFQEDTTGRRRA

SEQ ID NO: 199982 - protein, 110 aa, Oryza sativa
  Clone ID: PAT_MRT4530_95497C.1.pep
MRGRGDGAPLPVVMFLVVVLLLANEVVTLGYGCRALKQADCAMAATPKHGGTVLMRAAAPPGPGESRAAMYGRQTKECWPKFVKEHEKNRFCSIDQGCQPSDNCHCLEES

SEQ ID NO: 199983 - protein, 45 aa, Oryza sativa
  Clone ID: PAT_MRT4530_95498C.1.pep
VLPVAFPPSVVSGSDPPPYSSIGHKNKVMHHSVCQGATSGSFKSE

SEQ ID NO: 199984 - protein, 106 aa, Oryza sativa
  Clone ID: PAT_MRT4530_95499C.1.pep
MKFRKGTKVEVLHKGGAPLGSWRPAEIVSGNGHTYLVSYGSCPTQGSVAAERVPRKAMRPLRPPLDGIVCWVKGEIAEVFDSYTWKVAEVVRLLGFSYYLVRLLGS

SEQ ID NO: 199985 - protein, 568 aa, Oryza sativa
  Clone ID: PAT_MRT4530_9549C.1.pep
MIRRGILFSMGLVGFLFWRSTVSLTFGVAPGLAILALGVLSLKVWRSGKSSLPFILAQAAVAAAVAWKHFQAYTTPVAGSPAAAAEMIRLQTYAAFSLMATATAVYYAFSSREQFYPAMVYLSTSKICFVLLLNTGLVAMCVAWQLVKRLFLGTLREAEVERLNEQAWREVVEILFAVTIFRQDFSVSFLAMVAALLLVKALHWLAQKRVEYIETTPSVPMLSHARIVSFMLFLLVVDCLFLSNSAQVAHTQAGRRLLQSSFSFGDMLMEGQWEKKAVYTFYLELISDLVHLSLYMLFFIAIFLNYGVPLHLIRELYETFRNFRIRIADYVRYRKITSNMNERFPDATADELNASDATCIICREEMTTAKKLLCGHLFHVHCLRSWLERQHTCPTCRAPILPPDNGRTAARPHGVHPGVQPGNGTPGSERAAGENISRRQAKLEAAASAASLYGRSFAYPPANNLNRYSTPPQSTSNGPQSGEASTSNQSPKGHATADPSAPTFYARGAVSSVTTTRELESSLQKAYENAIKSQIERLMQAACKFLDMSVVNTSLTALKLHAWYEPLG

SEQ ID NO: 199986 - protein, 48 aa, Oryza sativa
  Clone ID: PAT_MRT4530_954C.1.pep
PWRRRSTTHHLCAPTRRTTSRSPEETYYRQGRYTWQTVTTNVAYLSWP

SEQ ID NO: 199987 - protein, 132 aa, Oryza sativa
  Clone ID: PAT_MRT4530_95500C.1.pep
THPASRDLISASRYCSNPLEHQSMDQQTRASIHGSTDKRRLRDAMQIKEKEDVMLLTLRLQRLPFFLFFMGCLVPMSEVKIELATCVDYLSTPCRSFETTKRSHFEFNQSKKRHAFAAMVVWWRRTRQEWPA

SEQ ID NO: 199988 - protein, 36 aa, Oryza sativa
  Clone ID: PAT_MRT4530_95501C.1.pep
RSRCRRHRCNPRTGASERRSSGTTANLHLSMRGAPA

SEQ ID NO: 199989 - protein, 257 aa, Oryza sativa
  Clone ID: PAT_MRT4530_95502C.1.pep
MAAGNFRVRYTQQFSDFNLNSLMTVELRMVLSITPCLYGSHTEIDQSRTTTTSTSEVTIGYMSSFKQKSGATVRVTDKEIHYGVHRWKDSYSDKIGDLRGGPKASNLTANRTTTSYEVGAFRSQVAGKRKGRYGVERIIGRSLGQRPQPGLVDLIHPPPPQWGLGPAGPACRSARVVDLCSPSCVPDPPRWSRQAVFCWHNVARTVRVECGAAAMFGPLRGAIITGMREREGMGCGHISAVWGLEGGGADLLLPWSR

SEQ ID NO: 199990 - protein, 356 aa, Oryza sativa
  Clone ID: PAT_MRT4530_95503C.1.pep
MARRRRGFPATLVTLLRLVGCLLLAFFLAAPPCAAAQQVKTSHAQFAFHLPLPDGVTGAESLAFDSSNHGPYTGVSDGRVLRWGGAAAGWTTFAHHENYRKIPMCTTPVAPAEETESMCGRPLGLAFHDRTGDLYIADAYKGLMRVGPRGGEAEVLAAGADGVPFNFVNGIDVDQATGDVYFTDSSTTYPRRFNSEIMMNADATARLLKYDAATKRVTVLRAGLPYANGVAVSRDGSHAVVAHTVPCQAFRYWIKGPNAGEYELLADLPGYPDNVRRDANGGYWVALNQEKARLDATAAAAVAPPAKHLVGVRLDGDGVEVEELTAAKGVTLSEVVERGGKLWLGSVELDFIGLMQ

SEQ ID NO: 199991 - protein, 57 aa, Oryza sativa
  Clone ID: PAT_MRT4530_95504C.1.pep
IGGGCRGGARRRGRGRRRRATTRRRPRRRSGSAPGRRRRRRRRRGTTRRRPRRRRRL

SEQ ID NO: 199992 - protein, 1540 aa, Oryza sativa
  Clone ID: PAT_MRT4530_95505C.1.pep
MTSMGAKVNESINDGRAPYVFKISGQVCHRMGSLLPLEGRRPEYAQLYIFDTEHEVSNRINVASSSRAPFHANQEIVANLIEMFNTNNPIVQLFRTARERLSIDTSDQIQIRLFGKRDAHGDIYSAPVASEVVGLIVGDIGSSDIGRDIIIQDRSSNLQQINENHCKFMSMQYPLLFPYGEDGYHEKLTYNTTARSQAIKRTKMTPLEYFAYRLHDRPRDFNTPLRKYGCLDLFVTFTSNPAWPEVREALARIPGQQPSDRADIVNRVFKMKLNILMDDIKKREFFGPINAEDDDLEEVIDDPNNSKSKLTAWLEANMENPSARQLTYIEFPEYWTWHNKEKYWDGHRGASRRIGRIAHVSPSQGEAYYLRMLLHIVRGPRSFAEIRTVSGVEYPTFRAACEALGLLGDDQEWSNAIKDAAQWALPFQLRQLFVTMLLFCEVTNPTRLFNEHMSCMSEDIAYRTTRNTFQASSSNNTFVTFSLLLELDKLLRDAGYSLSHFNLPMPDDIASVSAQNRLLLDELSYDVCNMGYTINEEVSCLNNSQKEVFNAIYKFVVNNEGKTFFVYGYGGTGKTFLWTTLLNSIRRQGKIALAVASSGIASLLLPGGRTPHSHFKIPLEILQNSMCSIKKNTNLAELIQKTSLIVWDESPVNHKYCFEALDRTLRDILSDTSPHSTHKQFGGITVVLGGDFRQTLPVIQNATKQNILKSCIVNSYLWNQCILLHLTENMRLNSACLSASEREDLKNFAEWLLRVGNGAEPYVDVPDQPKGMFIEIPQSLLLSPDCRNLDGLISFVYDSGCQTTDLRSYLCERAILAPTNDVVSEINNKMIAQLATTEMSYYSSNSIDDSCSNHTTLEALYPTEFLNTISINGLPEHVLHLKIGVPIILLRNLDASRGLCNGTRLIVTQLTNRVIEEEIITGKAKGTKAYIPRIITTSAQSKWPFKLRRRQFPIRLSYAMTINKSQGQTLSRVGLYLPSPVFSHGQLYVAFSRVTSPKGLKVLIENSPASYENCTQNVVYAEIYFDGKLSYSTQRCNYWPAKLQGKTEASSSSATQIHIDLDIPQVEQFRSSYKLGSPSLQQQLPKIVRLSPVQAAGKIYNLEEISAMPVSAFQGGVTYSAVAKVSSIMSSIKWYYIGCHRCDKGYKLPVTITDKSGSLDAVAFSFVAEDLVELDAAQASQNMKIDSVEHPVTLNKAIGKTRLFTIGMNTDSSSKFPISYVLKMSFSIDDTMPNPLLTSEKLSKNKDQLQFPPPMTYTSSPSTTIDNTGLSKDSTPPESSAAVNISTEKNISTSTKRSIDFSEDSTDKTKSLSLAIIFFFMAVSNNLIYLLSNVRRKSILWMKTTRHVKKYTSEKSGCVLHGLEGPYVNQNHLELSQIIAQDVRAPLSNLSAEEEAGSWPCCLDDRSMQTQAGGFIFMAWSVSRLDLFAAVLALEQAVAGAATGDCPTTCGDVAVPFPFGIGADCYHSAGFNLTCDWSNDPPRLLLGDAAAFQVLNVRRGWDSTRAGTAPPPWSTLTREAVRTPCSPPQLSQTCSSSLPD

SEQ ID NO: 199993 - protein, 713 aa, Oryza sativa
  Clone ID: PAT_MRT4530_95506C.1.pep
MAASGQVQCLLPLRVALSPPLPPWPPATMVMPPLLAAAAAMAASGQVRRLLSLRAALPSPWPLATMAPSSSRHRHHGCRCPGFQYAFVREKAAGDHLSLGYMQHGDNNNKKKKGDLSNNLDLSSSPLLMDSRGQAYYHRAAAAAAAVAAGDATDGEEPAAAELAPKAVRSKKKLAVEAQGGAAVRDDLTCPECGKVFMSDKAMYGHLRSHPLRKHKGAARLAAVAAAAADDASVAAGVKPRPWKVPRTKEEAELGDDRHPGRSPVTGKRGRPASSASSSGSAPAPAPPASSRLQLVITEEEEAAMTLLDIASGCSLDHQPTQPAHVADAALLAPASDQMPSVDVEQGVLAVAEHRTWEAEKPALVEHVFGIVKEHVAAVAADAEPQSPEAKTPVKLGPVTDQAVPVLGDKNDDGHADMPVSPGGGTTKKPLKRRLQDVETKHPTAPPPPPVKRIPSPASKRKYECSECHKTFSTHQALGGHVAAHKRQKKSCAEQQQEAVAAAAQVARHNFLAHQRPAGVVVAVDATVVAAAGGGIAIGPLGEEGLVGPPPPPPPPPPPPAPAPALAPAPQQHQCLRCPMVFPTGQALGGHMRKHFLEAKEQEQLLAIDIANANANANANAAPGPPPMMANAAPVPPPSMANGAGPVPPPIAVAPPPAPPIAGAAPPPPMANGAAAAAPPGGNPAPPAGPQPGVNMFDLNELPNEDAGENQQP

SEQ ID NO: 199994 - protein, 1496 aa, Oryza sativa
  Clone ID: PAT_MRT4530_95507C.1.pep
MSLCNILLSCSFFTRTYQYVFIVVSAFFCMFAMTSMGAKVNESINDGRAPYVFKISGQLFRTARERLSVDTSNQIQIRLFGKRDAHGDIYSAPVASEVVGLIVGDIGSTDIGRDIIIQDRSSNLQQINENHCKFMSMQYPLLFPYGEDGYHEKLTYNTTARSQAIKRTKMTPLEYFAYRLHDRPRDFNTPLRKYGCPDLFVTFTSNPAWPEVREALARIPGQKPSDRADIVNRVFKMKLNILIDDIKKREFFGPINAVIYTIEFQKRGLPHVHIIIWLAKKEPLDAKKVDSYILAQFPDPAVDKIGYDAVCNFMVHGPCGPHNPSSVCMSEGKCTKFYPKEFCEETTILENGFTQYARPNNGITFKRNEVEIDNRFVVPHNVDLVVKFQAHINVEKVNYDGMHKYLFKYVTKGFDCSRVGFHSNSSNSESSSETINEINNYLECRCVTPNDAAWRLQQFDIHHTDPSIERLPVHLPFKNNVVFTEDDDLEEVIDDPNNSKSKLTAWLEANMENPSARQLTYIEFPEYWTWHNKEKYWDGRRGASRRIGRIAHVTNPTRLFNEHMSCMSEDIAYRTTRNTSQASSSNNTFVTSSLLLELDKLLRDAGYSLSHFNLPMPDDIASVSAQNRLLLDELSYDVCNMGYTIDEEVSCLNNSQKEVFNAIYNSVVNNEGKTFFVYGYGGTGKTFLWTTLLNSIRRQGKIALAVASSGIASLLLPGGRTPHSRFKIPLEILQNSMCSIKKNTNLAELIQKTSLIIWDESPVNHKYCFEALDRTLRDILSDTSPHSTHKQFGGITVVLGGDFRQTLPVIQNATKQKILKSCIVNSYLWNQCILLHLTENMRLNSACLSASEREDLKNFAEWLLRVGNGAEPYVDVPDQPKGMFIEIPQSLLLSPDCRNLDGLISFVYDSGCQTTDLRSYLCERAILAPTNDVVSEINNKMIAQLATTEMSYYSSDSIDDSCSNHTTLEALYPTEFLNTISINGLLEHVLHLKIGVPIMLLRNLDASRGLCNGTRLIVTQLTNRVIEGEIITGKAKGTKAYIPRIITTSAQSKFISMASSATALKDVTIGQQNCKVFGRLIRLWDALNMRSKSADPLISIDGILLDEHGSMAQISVPKKLEKQFRPLLNEGSVYLITNTTAVDARRKTYIYQHQSYMIQFKHETKVNHLESRGSTIPKFSFSFCPFDQIPGKTITSKPLLGKTEASSSSATQIHIDLDIPQVEQFRSSYKLGSPSLQQQLPKIVRLSPVQAAGKIYNLEEISVMPVSAFQGGVTYSAIAKVSSILSSIKWYYIGCHRCDKGYKLPVTITDKSGSLDAVAFSFVAEDLVELDAAQASQNMKIDSVEHPVTLNKAIGKTRLFTIGMNTDSSSKFPISYVLKRSFSIDDTMPNPLLTSEKFIPIPIVYYHCSSSYGLSLRLLAQVNLCSPPSPSYKQITKSLFGRFSIFGISKLLRLLLKTDKYERLKRRLISSSILDELSAVGKSILSIIVISWPQLG

SEQ ID NO: 199995 - protein, 76 aa, Oryza sativa
  Clone ID: PAT_MRT4530_95508C.1.pep
MTGRGRRVVVGERRLSAGDQPSAKVFRRFVHDAIERPDEFILHPAAPLPPSVEIVRVMDVISNFVPHFLLKFAASE

SEQ ID NO: 199996 - protein, 163 aa, Oryza sativa
  unsure (1)..(163): unsure at all Xaa locations
  Clone ID: PAT_MRT4530_95509C.1.pep
VSLWNPLPVLTVVARVPHALPSPPLPHRLQSTTIVFPPPIRHHCRQPMPPPPPSPSPMGRGXRRPTANWGENSPVSLARGGSRQEAAHRARSSPAYRPQEEELNGKPRVGEELAGKLCAGENQPADNTRGEELVGCYCCCFHTATGASCCLDRCRRRNLLSRC

SEQ ID NO: 199997 - protein, 652 aa, Oryza sativa
  Clone ID: PAT_MRT4530_9550C.1.pep
MAEDGEEKLLATVQHIVKTLGRTDTMTEDILKVFSNYDGRLSLDKLYATRAAAAAAAVAAAGGAGAGEHSVPASPPMPPPPAVPPAVAAMPAVTSLERTVRTLDRQISQFVTMDRLIWADSADADAFLEAVDDLIGTVQELDAAGTNRGLLDRADELLSRCMARLEDEFRALIERPDDVAPPAPGGFASDESEEEDYDADDGYGDEPIPIAKPVSDFDVVIDALPPGSVSDVHQIARRMVDAGFGRECAEAYAAARRGFIDESVARLGIRARTIDEVHSLPWEELEFDIARWIPAFKMVFRILIPSERRLCDRVFDGLAPYGDLAFVAAVRTQVLQLISFGDAVSAASRAPERLFRVIDMYEAVRDLLPDLDPVFADPYSAALRAEVSAVCNTLGSSIKGIFMELENLIRRDPARVSVPGGGIHPITRYVMNYLRAACGSRQTLEEVMEGDLGAVGGAAIAVDPDRPTSSLAVHIAWIMDVLHKNLETKSKIYRDPPLASIFLMNNGKYIIHKVNDSELGVLLGDEWMKQMMSRVRRWSLEYQRGAWAKVMSVLQTGGPGIGSLPAKALLQKLRMFNGYLEEICAIQSEWVIADEQLREDVRAAITDSVKSAYMGLISRLKSSPEAAQDLFIKHSPEDVEARIQHLFEGVSK

SEQ ID NO: 199998 - protein, 70 aa, Oryza sativa
  Clone ID: PAT_MRT4530_95510C.1.pep
KKKKKKKKREFYNNSHHDFVRCNWAVLLVVLGFFGPLFRLSFYIAFNCLFMFYGVHLSSPWSWLTVSLVS

SEQ ID NO: 199999 - protein, 114 aa, Oryza sativa
  Clone ID: PAT_MRT4530_95511C.1.pep
MALQVEVEEGDGVARDDGAAKEQRTEPTTSTPREPGTAPPSAVRVVEREPPARTTASTTQQCGLTPRAPSPLTSLCGVGEDDLIKSVASAADADAATGGGRHLEDHRAHQAVLE

SEQ ID NO: 200000 - protein, 132 aa, Oryza sativa
  Clone ID: PAT_MRT4530_95512C.1.pep
GRRLAVATTTMSSPLPPPLLPSSPLPSSADPCAGGGGGSPILSAADPPSPRSPTMNPSVLRSPATDRPSLRLPATEPPVPQSLSTDPRTVVALVDGTGRIRVLSPPAPEAASAACQRDLRLCMPPEPACEAV

SEQ ID NO: 200001 - protein, 246 aa, Oryza sativa
  Clone ID: PAT_MRT4530_95513C.1.pep
MPEHSENAAANIVDSIVDAIADNLPKQKSVRFEDGSISDQAKRLFGGQKSVHHVLGGGKSADVLLWRNKKISSSVLAVATAVWVFFEWLDYHFLTIACFVLVLGMVVQFAWSTFAGMLNGSPSKVPRVELPDELFANIGSAIGTQVNKFLGTLQDVSCGRDLKNFLLVIAGFFAAAIIGSWCNLLTVIYIGFVCAHTLPVLYEKNQEKVDEFLYNTLGLLQNQYQKLDKGVLGKVPKGIIKLKKSD

SEQ ID NO: 200002 - protein, 952 aa, Oryza sativa
  Clone ID: PAT_MRT4530_95514C.1.pep
MTASQAGSGGMQRRRSLWQAAEAASGAGGDSTRIRPVPSTRATTVRGSVDSDCGTGGSVAGNRREGRSVAGDRRTDGFIVGDRGEGGSAADKIGEPPPPPAHGSADDGRGDDGSSGGGRGDDMVVVATVSSFYNANVAMSGLGDLRGRSSGLASLRPHGEPAAASARNGVYTTSLERTWRTIAYGDTGSLLSPCVFQRTLNVAAKQRRSPEKLRAVITGEIGIERLRGGCRDTGLPEVLKPARRHVVPANRRAAAGVRLDGFLEMLGYDKSLGFKAYWLLPGKTLEDGLRVIETQADFEVMAKVVNRANKFVIYFDQDDTIARVDWDDVVSPPICQLPKVMSPGNPSVAEKAKGKVFEVVGESDSDDSASDSDYVDSDYDLSDSDDDLYVDNIDVEVEDLTGKKKRNSKKARGSELKGKEIVVCTNSEGDDEDYDTDEGLEAADSDGDKSGVKFKFRSFSKEDVNNPVFKILTAVGIDPNDCVYPIPLAVVETESLSSWRWFLQTLKEDLGIDNTYPWTIMIDKQKGLIPAVQQIFLDSEHRFCVRHLYSNFQVHFKGENLKNQLWACARSSSVIEWVANMEEMATLNQDAHDWLKKMEPSTWVRAYFSDFPKCDILLNNSCEVFNKYILEARELPMLSMLEKIKQQLMTRHFNKQKEAAEQWKGPICPKIRKKVLKNTDLANTCYALPAGKGIFEVQDRNFKYIVDINAKHCDCRRWDLTGIPCSHAISSLRYQRINAESVLPVCYSVQAFSNAYEFNIWPCQDTAKWEKTNGPHVKPAVYEKKVGKPTKSRRKAPHEVQGRHGPKISKHGVEMHCKYCNEAGHNQRGCKLKKAGLRPNQQPKKSIQNPEVITTEVQSQSQVQTQSHVESQSQQLLTQVNNAMVSQMFEESSQVTQMNLAPRPLPDNQFVMANKPTARPMPLTTTAKEGKLRATKRKAAGDGPEKRATKKK

SEQ ID NO: 200003 - protein, 182 aa, Oryza sativa
  unsure (1)..(182): unsure at all Xaa locations
  Clone ID: PAT_MRT4530_95515C.1.pep
MYAMRQSTPRAMLRGCAELMLAGTSPEDASDAETIRHRDDTQDLELGNLAHSENIGAPLGAXTEAXTIRPLVGALSFHQLFEGTGLGGRIDQAKSKAKATVIMATFFSLTAPEGIALGIATSSRYSKHSSTTLAVEGAFNSAAAGTLINMHLDEPLAADTNKPKLQTNKKLQLGGYLALFPG

SEQ ID NO: 200004 - protein, 680 aa, Oryza sativa
  unsure (1)..(680): unsure at all Xaa locations
  Clone ID: PAT_MRT4530_95516C.1.pep
LDLSDSDDDFGVKFKFRSFSKEDVNNPVFKVGMVFXCVELLRKAITEYSMKNRVDIKLPRNDQQRLRAHCAEGCPWNLYAXKDSRANAFMVKTYNGEHKCQKEWILKRCTAKWLAGKYIDAFRANEKMTLGGFAKSKLQRARRLAFKAIYGDEIKQYNQLWDYGAELRRSNLGSCLFLNISDGCFGTLYMSLDACKRGFLKGCRPLIYLDWCHIKTKFGGQILTAVGIDPNDCIYPIALAVVETKSLSSWRWFLQTLKEDLRIDNTYPWTIMTDKQKVHFKGEKSENQLWACARSSSVIEWVANMEEMAALNQDAHDWLKKMEPSTWVRAYFSDFPKCDILLNNSCEVFNKYILEARELPMLSMLEKIKQQLMTRHFNKQKEVAEQWTGPICPKIRKKXVLKNADLANTCYALPAGKGIFEVHDRNFKYIVDINAKHCDCRRWDLTGIPCSHAISSLRYQRINVELVLPACYSVQAFSNAYEFNIWPCQDTAKWEKTNGPHVKPPVYEKKVGRPTKSRRKAPHEVQGRHGPKISKHGMEMHCKYCNEAGHNQRGCKLKKAGLRPNQQPKKSIQNPEVITTEVQSQSQVQTQSHVESQSQQLLTQVNNAMVSQMFEESSQVTXINLAPGPLPDNQFVMANQPTGRPMPLTTATKEGKLRATKRKAAGDGPGKRATKKKYNC

SEQ ID NO: 200005 - protein, 152 aa, Oryza sativa
  Clone ID: PAT_MRT4530_95517C.1.pep
MAYIDEKVDWFDNVEAKTWCAVSLDGFLEMLGYDKSPGFKAYWLLPGKTLEDGLRVIETQADFEVMAKVVDRANKFVIYFDQDDTIAGVDWDDVVSHPICQLPKVMSPGKKSVAEKAKGKVFEVVGESDSDDSASDSDYVDSDYEGAITGTK

SEQ ID NO: 200006 - protein, 533 aa, Oryza sativa
  Clone ID: PAT_MRT4530_95518C.1.pep
MGNCFTKTYEIPITSGTMRRPASTAERSKARGGDEPGTWRRPSFPRHGAPPHRPPTGSSSAAGALSRRASGGGGEMGPVLQRAMVSVRSLYQLDRKLGSGQFGTTYLCTERATGNRYACKSVSKRKLVRRTDVDDVRREITILQHLSGQPNIAEFRGAYEDNDHVHLVMEFCSGGELFDRITAKGSYSERQAAAVCRDILTVVHVCHFMGVIHRDLKPENFLLASADDDAPLKAIDFGLSVFIEEGKVYKDIVGSAYYVAPEVLQRNYGKEADIWSAGVILYILLCGTPPFWAETEKGIFDAILVNQVDFSTSPWPSISESAKDLIRQMLHRDPQKRITASQALEHRWLKEGGASDRPIDSAVLSRMKQFKAMNKLKQLALKVIAENLALEEIKGLKQMFNNMDTDRSGTITVEELKVGLTKLGSRISEAEVQKLMEAVDVDKSGSIDYSEFLTAMINKHKLEKEEDLFRAFQHFDKDNSGYITRDELEQAMAEYGMGDEANIKQVLDEVDKDKDGRIDYEEFVEMMRKGIQT

SEQ ID NO: 200007 - protein, 94 aa, Oryza sativa
  Clone ID: PAT_MRT4530_95519C.1.pep
MPTWSAASPGRNLNFAFDRQACGGAGDGETVLATDAIQFEALGKGGFHAIELRGVARGHRRDKGRRTKSSEDVPLKKAMVPREHSKHNSINSIS

SEQ ID NO: 200008 - protein, 220 aa, Oryza sativa
  unsure (1)..(220): unsure at all Xaa locations
  Clone ID: PAT_MRT4530_9551C.1.pep
MIRLQTYAAFSLMATATAVYYAFSSREQFYPAMVYLSTSKICFVLLLNTGLVAMCVAWQLVKRLFLGTLREAEVERLNEQAWRXXVEILFAVTIFRQDFSVSFLAMVAALLLVKALHWLAQKRVEYIETTPSVPMLSHARIVSFMLFLLVVDCLFLSNSLRSLIHKXEASVAIFFSFEYMILXTSTVSTFVKYIFYVSDMLMEGQWEKKAVYTFYLELIS

SEQ ID NO: 200009 - protein, 196 aa, Oryza sativa
  unsure (1)..(196): unsure at all Xaa locations
  Clone ID: PAT_MRT4530_95520C.1.pep
LSNLNICAETREGIFDAILVNQVDFSTSPWPSISEXAEDLIRQMLHRDPQKRITASQALEHRWLKEGGASDRPIDSAVLSRMKQFKAMNKLKQLALKVIAENLSPEEIKGLKQMFNNMDTDRSGTITVEELKVGLTKLGSRISEAEVQKLMEAVDVDKSGSIDYSEFLTAMINKHKLEKEEDLLRAFQHFDKDNSG

SEQ ID NO: 200010 - protein, 52 aa, Oryza sativa
  Clone ID: PAT_MRT4530_95521C.1.pep
QDGEEAHRLRQTSKAMIYRLVSRGTIEERMMQLTKKKMALEHLSCWASHERH

SEQ ID NO: 200011 - protein, 155 aa, Oryza sativa
  Clone ID: PAT_MRT4530_95522C.1.pep
MSKKTVLRVDTSCDKCKRKILQTVSGLQGVDKIDIDSEKGTMTVTGSADPVDVIERTRKAGKRAEVVTIGPPPASSSSSSSNPSTEQQQIKKQAPAAEEKVYTAAAEKRAPEPPATVYVHYIPASTWSAPAWPSYEYDQSVVYHQQDPPPACSIM

SEQ ID NO: 200012 - protein, 424 aa, Oryza sativa
  Clone ID: PAT_MRT4530_95523C.1.pep
MSSSYKIALVLSLLAAPLLCALAAGDGQHRPPSKPILTRLAKDPSTSLYTASVKNGGGQLVLDLAGPLVWSTCPGKHRTIPCGAGVCAVANRNHRPNCPYTAAGSNGGDGGRCACSATAYNPASGQCGYGDLTTVQLSANATDGKNPLFQVWLSAVASCAPQPLLGSLPAGAAGVAGLSRAPLSLPLQVAGQLKVEKKFALCLPTAGDVGAAIFGGGPFWLQAAPPQQVSDRLRYTPLLKNPKNTAYYIGVIGVAVNSVQVPLPPGALSLSARQGTGGVAVSTATPYTALRSDIYRPVRDAFAAATAGLARAPAAGPFDLCYQKSALPPTRIGPYTASVDLMLAGGQNWTIVGASAVVEVSQEAACFAFVDMGAAAAPAVIIGGHQMEDNLVVFDLEKWQFGFSGLLLGTMTRCGNFDFSIGSQ

SEQ ID NO: 200013 - protein, 106 aa, Oryza sativa
  unsure (1)..(106): unsure at all Xaa locations
  Clone ID: PAT_MRT4530_95524C.1.pep
KPHLGYITKTXNPWKSKVCHXTHQGISQHCPIHQLVTLGCNSRAASKAYCPPSTTCRRYGSSSSSAMSPRGDPKPTWQMGCTTSCGEQFSATGLVTGYLGXQGTIS

SEQ ID NO: 200014 - protein, 76 aa, Oryza sativa
  Clone ID: PAT_MRT4530_95525C.1.pep
HWKDPSTVYLERGEFYLLVDRWRAHTTTRQPLSTYFFSCIMETGPLAILHYMRFMEILHICLSQCSIVNHVNERRT

SEQ ID NO: 200015 - protein, 72 aa, Oryza sativa
  Clone ID: PAT_MRT4530_95526C.1.pep
ALMSGHVVIQCRIISMNYNDTVIAGYYTWRGGQLNWSQNTIISCIRRHGQDCELAPRPKSRESCVHGDRTDR

SEQ ID NO: 200016 - protein, 358 aa, Oryza sativa
  Clone ID: PAT_MRT4530_95527C.1.pep
MPPPAVSTAPVAPVVASSSSAAAAAPRRPRSLRLRVTPYASVSSSSSPSTFAVSIPPPPPARHSRKQLVGRDGAPAKPAKPRVFFLDVNPLCFRGSQRSLGAFARWLALFFAHVSLRDPVVAVLDGEGGNEYRRRLLPSYKAHRPRGPGTGADSRVIDVLRECNVPVVRVDGYEADDVVATLTEQVLQKGFRVVIGSPDKDFKQLISEDVQLVMPIPEIGRWSFYTLRHYVAQYKCDPTADLSLRCFIGDEADGIPGIQHLVPGFGRKTAVKLLKKHGSLENLLNTAAVRTVGKDYAQDALVKHADYLRKNYEVLSLKRDVKVQLDDRWLSTRDSCNDSSVLSDFILKFNEGQNIRGN

SEQ ID NO: 200017 - protein, 178 aa, Oryza sativa
  Clone ID: PAT_MRT4530_95528C.1.pep
SLAIVGAGGGLGSIAVQYAKAMGIHAIAIDGGEEKEKMCMSLGAQTFIDFTKTKNIVADVKATTNDGLGPHAALLVAAAEKPFQQATQYIRSKGTVVCIGLPAGAQFSAPVFDTVVRMIQIKGSYVGNRADTAEAIDFFRRGLIKVPFKTVGLSELNEVFKLMKAGQVAGRYVVDTSR

SEQ ID NO: 200018 - protein, 130 aa, Oryza sativa
  Clone ID: PAT_MRT4530_95529C.1.pep
MESVHGCLFIARQPLQARVVRCGAAARQSTLAQHRHNEAVGEGKGDSNGPHPPSHGSGGGLKREASAGAAPRGSVGCILPCTDLVAAALPHVDLVVGGELGFGMTPAVTTSGSSGLGCVTNTEITIFVAP

SEQ ID NO: 200019 - protein, 237 aa, Oryza sativa
  unsure (1)..(237): unsure at all Xaa locations
  Clone ID: PAT_MRT4530_9552C.1.pep
MAAAVAAQLRGPSAAAARRWPAPSGGVLRFAPLATSTVPASIARGSLRGVPAGVVLPKPLIAMCMKAEYTSSPVDPNAVAEHTEDENQQPTTVSPTNAEIDIDQEAVPQHKGAIIHDFCLGIPFGGILFSMGLVGFLFWRSTVSLTFGVAPGLAILALGVLSLKVWRSGKSSLPFILAQAAVAAAVAWKHFQAYTTPKKLLPWAFYSAHSAAMICFYSXVLLAGGNPPPKKKAAVAQ

SEQ ID NO: 200020 - protein, 122 aa, Oryza sativa
  Clone ID: PAT_MRT4530_95530C.1.pep
MGAAGKCRGRSWTRRLSSSSNLGRWTEEAVRQADRDVGVIVGDPLSPPGPARSASRSEVVVGRGRLPLRVGGGDVEAERVASSPVAAATSSPVVAAADAALSPPPAAGLPPAELGKFNYLPL

SEQ ID NO: 200021 - protein, 117 aa, Oryza sativa
  Clone ID: PAT_MRT4530_95531C.1.pep
MAAAAGRMEEYGVGRILDITHAYRADLPAFAPGAVTGPVVRLRDSMANGTLYNLSELKMECHMGTHVDAPGHMNQGHFAAGLDVDKLDLDLLNGPTLLVDSPRNTNYTAKAMESLNI

SEQ ID NO: 200022 - protein, 274 aa, Oryza sativa
  Clone ID: PAT_MRT4530_95532C.1.pep
MAASRLALLLLVLAVAAARHALPAAGSDAHPGYDGAEDTCGVPAAAAAAGRMEEYGGGRILDITHAYRADLPAFAPGAVTGPVVRLRDSMANGTLYNLSELKMECHMGTHVDAPGHMNQGHFAAGLDVDKLDLDLLNGPTLLVDTPRNTNITAKAMESLNIPKGVRRVLFRTLNTDRKLMWKKGGDLSYVGFTEDGAQWLVDNTDIKLVGIDYLSVAAYDHLITAHVVFFKFPNIILVEGLKLDDVKAGIYMLHCLPLRLVGSEGSPIRCILIK

SEQ ID NO: 200023 - protein, 284 aa, Oryza sativa
  Clone ID: PAT_MRT4530_95533C.1.pep
MAASALLRLLSPSSPASLHARATRRRHPRAVVRCSSPSPASLDLPLLPFQPAEVLIPSECKTLHLYEARYLALLEEALYRTNNSFVHLVLDPVVSGSPKASFAVERLDIGALVSIRGVCRVNIINLLQMEPYLRGDVSPIMDISSESIELGLRISKLRESMCNLHSLQMKLKVPEDEPLQTNIKASLLWSEKEIFEEYNEGFIPALPERLSFAAYQTVSGMSEAELLSLQKYKIQAMDSTNTLERLNSGIEYVEHNIGKNFRKQKYNFWLLQQLEIHTTILPPC

SEQ ID NO: 200024 - protein, 83 aa, Oryza sativa
  Clone ID: PAT_MRT4530_95534C.1.pep
KEAKELDRNAPSDCGQNEQRSQGAQFGSRNSCGGKQSRSTRVGDSAIRDKGGAIYKPKTKEQATRARATDQSTPARKMQLRAA

SEQ ID NO: 200025 - protein, 62 aa, Oryza sativa
  Clone ID: PAT_MRT4530_95535C.1.pep
QTLLVSGVASSAIFTTRCRRHVVLGISGYHGAASVRCFADAETSLQVLDFHPPPLGVGHHLP

SEQ ID NO: 200026 - protein, 112 aa, Oryza sativa
  Clone ID: PAT_MRT4530_95536C.1.pep
LFLPLPPPLLYVPPHSLLVVLRLPLNVDKVSFTALEQQLLSSLHSQCRFVIGLCYFDLSLFVLVKSCLCTYRHESIFLSCTFSWLFLSIFIIPYSLSCEPEIPAMSSISARR

SEQ ID NO: 200027 - protein, 184 aa, Oryza sativa
  Clone ID: PAT_MRT4530_95537C.1.pep
MDCDDKSRLELGNGNRQRPDLGVSYVKRALAGSKRRSLIKTKGCWLRRWRCIPREQHKEGSTSGGGGGDGAADEDSVQLHKRWIPLPTDAPRGKLHEVVLGEEEESSTVSIESRFVPPTKLGPSLGVLIASLRFSVGVGGADSDNGENRSSNIQQVLHRHERPAPPRLLTLRRALGGRRRCSGR

SEQ ID NO: 200028 - protein, 223 aa, Oryza sativa
  unsure (1)..(223): unsure at all Xaa locations
  Clone ID: PAT_MRT4530_95538C.1.pep
LCDLQMMISTMTGCAQSLAKELEDVAAKNKDRVTEVDLNQKFRXLTADIIAHTAFGSSYQLGKEAFQAQHELTEITMATLFQVQLPGLNYLPTERNRRKWRLQKNLRDTLMQIIRSRLSSKDGGYGNDLLGLMLGACASDEQGEASSLSMDEIVDECKTFFLAGHETTSLLLTWTVFLLSVYPEWQERLRNEVLRECGTDQCPDANSLGKLKEARNKNLFLYT

SEQ ID NO: 200029 - protein, 73 aa, Oryza sativa
  Clone ID: PAT_MRT4530_95539C.1.pep
SNDEGSEPSLLERGVALRSKNTGRGDENILSACRGHNNITPLGFPCCLYINGDSLSSCLPFQDTVGYTLSLTT

SEQ ID NO: 200030 - protein, 71 aa, Oryza sativa
  Clone ID: PAT_MRT4530_9553C.1.pep
YTHYLLACLSSSLLIPIGQLNFIFAHCSQWLFIWKQTTIFISYLFNLIFLRHSHAIISSLFVMNGYVQPAN

SEQ ID NO: 200031 - protein, 485 aa, Oryza sativa
  Clone ID: PAT_MRT4530_95540C.1.pep
MKKKVCVVGGGLVGLAAARELQREGHDVSVLEQRGGVGGQWLYDHTAAIDGADPLGVAGVQSSVYASLRLITPREVTGFSDFPFSPTTVAGGGDARRFPSHAEFLRYLRDFCDAFGLMDVVRLNTRVLRVAADRDGWAVRSRRGEVETEEVFDAVVVAVGSYTQPRLPSIDGMEAWPGRQLHSHSYRVPDSFRGEVVVVVGCGFSGKDIALELRRVAREVHLSVRSTEEAMASPAMSKMLARYGNLHLRPQIARLCEEEDGAVVAFADGSRVAADTVVYCTGYSYSYPFLDTGGKVTVDDDNRVGPLFEHVFPPELAPSLSFLGIPNMVTTRFFEAQARWVAQVLSGRRALPPAGDMLRAAEEHARAMDAAGVARRRAHDVPDLGEEFCERSCGFPRLEEWEKELIWTSITAMRDDLESFRDDFRVTDLVADGLRRHGWILAPAPEPEPLRQEDVVAGDGEGEGVQPVQANQAAVASPLGFINSA

SEQ ID NO: 200032 - protein, 90 aa, Oryza sativa
  Clone ID: PAT_MRT4530_95541C.1.pep
AARCSTRTPAHAEHPALHLPCCNQAAHDLSARAPHQACPCTAPRRTALAWTPPPDRAAGFPQKGCAATSACVTTSHRVSPSMPRDNGLHV

SEQ ID NO: 200033 - protein, 72 aa, Oryza sativa
  Clone ID: PAT_MRT4530_95542C.1.pep
MKVMVSDGNWVFDLRVFPRGLEFELASSSSRLGGSTRQKWMMGLIIAVTAATFTNPPLLCHIKKMEHSVNRH

SEQ ID NO: 200034 - protein, 380 aa, Oryza sativa
  unsure (1)..(380): unsure at all Xaa locations
  Clone ID: PAT_MRT4530_95543C.1.pep
AARRRHDALARGSVAPSSSSGEGAGVLAPVTINYASCATAPSPSSPPSPPRTAPPRGGPRSTATHAPRASLPRPPPRPPPARPPPSAAAAAPPPTAAPPPHRRRPRRCRGNPPPPLPPRSPSSAASAPSRARSPPPAATPCPARPRCGSATPPAPWRPXSPSPSPAPAPPAGCRAARTPPPAYRHRLSMIPPPPPRHHAAAWLPPAPPRPRNRTRTPRPARPRRHTLRIPPPPPLPAPPSPAPPGPRHPHPPSPHPPXPGPRPRPPAGRNLHPSPPPPNPNPPLPPSRGPPPSPSRSPATDLPPAPTTPPSPASPPEKPPAPLRVHPAPAPKWRAGXKSIPVPGPSGAPPIPRPRTRPTPGPRPRPPAGRNLHLSPPPQG

SEQ ID NO: 200035 - protein, 363 aa, Oryza sativa
  Clone ID: PAT_MRT4530_95544C.1.pep
MWEGGSHDAAAQLLPWFVGEPAAAAVGGYGGCVDVVGQGGVFGFGFEAAAAPVVTRQQRGGAAAAEGSSRGGGGKPAVVSGLLGSLQAELGRVTAREIMDAKALAASRSHSEAERRRRQRINGHLARLRSLLPNTTKTDKASLLAEVIEHVKELKRQTTAIAAAAAAGDYHGNDEDDDDAVVGRRSAAAQQLLPTEADELAVDAAVDAEGKLVVRASLCCEDRPDLIPDIARALAALRLRARRAEITTLGGRVRSVLLITADEQQQQHCDDVDDDEDGHRLLLRHGIDGAGAAADDDDECAASHRRHECIATVQEALRGVMDRRAAASSGDTSSSGGAVVAGGGGGSIKRQRMNYGVHEQCSV

SEQ ID NO: 200036 - protein, 270 aa, Oryza sativa
  Clone ID: PAT_MRT4530_95545C.1.pep
GQRNVGLTPSQEIEKLMQPASGGEREQQPPSAPCRKAEGAVGEGRRSRYHRAGEGRSSRRHAKKGEQQPLPPFSDHHAGDNGIPIPNVADNVIAKRYCMKHATLSSGTGDMKAMHEDELKKFDRVFIKVDNDTLRRLISAANVMGVKGLIDLACQRVADMLKAKRLKKMRQTSGINNHVREGEDPQKYYTTVYHSNQKADIMMTLTCRGFPNRRGPGYRAPAEVTEVFILPYPRGKPGNRGNRTVTGGKNPNYNKEGGSGRAVEEYNDDV

SEQ ID NO: 200037 - protein, 1083 aa, Oryza sativa
  Clone ID: PAT_MRT4530_95546C.1.pep
MEEVEAGLLEGGIGWLAETILENLDADKLDDWIRQVGLADDTKKLRSEIERVDGVVAAVKGRAIWNRSLARSLRRLRELLYDADDAIDEIDYHRLQHQVQRGDAWHGDPDESADGHGAEQTGRPRRGKVGEASGSGGKRRSGIWQHFESVENNAKARSCSSCSASEGGANSFAAGNSVGRKRMRTEGASADNVAASMHPWNKTELSNTIQQMTHQLQEAMNEVMKLRGSDNFVSSNFHHNTTSDSRLKTSSLLQRKMYGRVDEKNSIIKMITEAKSDGVTVIPIVGIGGIGKTALAQFVYNDPDVKSLFEDKMIWVWLSNNFDEEQLTREMLDVVCQKKQEGSCNFSKLQEILKSHMKPTRYLLVLDDVWDDMNNYRLNKLLAPFNSNNAEGNVIIMTTRIWSVAKRIGTVKPIELGALEKEDSWMLFKQCAFGDENHELCGSLSIMGQKIEDKLDGNPLEAENIGELLREHHTVEHWNNILKTEDWKSMQLSGGIMPSLKRSYDMLPYQLKQCFLYCSLFPKGYSFSKEQLIQIWIAQGFVEKSSERLEQKGRKYLAELVDSGFYQHVERTSEHFVMHDLMHDLAKLVSQSEFATIDGSECEELPSTIRHVSILTDSAYNKYEDGDFSRNEEFERRLLKVRSRSKLKTLVFIGEYDSHFLKSFQDAFKEAKHLRLLQITSILVYCTHLRYLGLENETQRTLPQALSKCYHLQVLHIGSCGTPNIPEEINNLVSLQHLVAQKGVWSSIANIGEMTSLQELTNFKVENSIGFEITQLQRMSELVELGVSRLENVTTKQEASGASLKDKHHLERLHLFWKGVRNGYDSDGNYNEYDSDLSYSDSDMNSENECDGNMIPEPSMHSETEEERLQTTDSNDVPSLDHIPDTASEVLEGLEPHRNLKYLWISWYNGAKAPTWLATSLTHLQTLRLENCGEWQRLSLERLSLLRKLVLIKMKNASPISKALMMSSKCANSRMMKKKRCIPFSMNWTLEPSQTVLRLFIDSEMLMMMMMTMDLHKLFFGPLTDDETLMLMKVLHKLFFGPSLSDDDHVDKLRHGDDEVTMKASSDGELVMIKANSDSELVM

SEQ ID NO: 200038 - protein, 389 aa, Oryza sativa
  Clone ID: PAT_MRT4530_95547C.1.pep
MDGGVGEEGKQQPHLVLAHKLFLLSHPDVDDLAKVDLRADVLAAVKSDDMASLYESLGAGGVLETDAALLAEMRGRIEEEIRKLDEKIADAEENLGESEVREAHLAKSLYFIRVGEKEKALEQLKVTEGKTVAVGQKMDLVFHTLQIGFFYMDFDLISKSIDKAKKLFEEGGDWERKNRLKVYEGLYCMATRNFKKAASLFLDSISTFTTYELFPYDTFIFYTVLTSVISLDRVSLKAKVVDAPEILAVIGKVPHLSEFLNSLYNCQYKSFFAAFSGLTEQIKLDRYLQPHFRYYMREVRTVVYSQFLESYKSVTMEAMASAFGVTVDFIDLELSRFIAAGKLHCKIDKVACVLETNRPDARNAFYQATIKQGDFLLNRIQKLSRVIDL

SEQ ID NO: 200039 - protein, 489 aa, Oryza sativa
  unsure (1)..(489): unsure at all Xaa locations
  Clone ID: PAT_MRT4530_95548C.1.pep
MAGATAAAVSSSYVALALLSLAAAAAVAGATAAAVSSSFLALALLSLCAAAAGGSPQLDAEAARQQEADRVTRLPGQPAVRFAQYAGYVTVNETHGRALFYWFFEATAAADKKPLVLWLNGGPGCSSVGYGESEELGPFLVQKGKPELKWNKYSWNXNLMFLESPVSADDAYIFLLNWFKRFPQYKSHDFYIAGESYAGHYVPQLSEKIFDGNKQGPKENYINFKGFMIGNALMDDETDQTGMIDYAWDHAVISDRVYADVKKYCNFSMENVTDACDSALTEYFAVYRLIDMYSLYTPVCTEVSSSAAFGQRQVAVHGAAPKIFSKYHGWYMRPAGYDPCTSDHAEVYFNRADVQEALHANVTNIGYNWTHCSDVIGKWRDAPFSTLPIIRKLVAGGIRVWVFSGDTDGRIPVTSTRLTLNKLGLKTVQEWTPWYDHQQVGGWTILYEGLTFVTIRGAGHEVPLHAPRQALSLFSHFLADKKMPPTAFP

SEQ ID NO: 200040 - protein, 491 aa, Oryza sativa
  Clone ID: PAT_MRT4530_95549C.1.pep
MAGATAAAVSSSFLALALLSLCAAAAGGSPQLDAEAARQQEADRVTRLPGQPAVRFAQYAGYVTVNETHGRALFYWFFEATAAADKKPLVLWLNGGIFNIKKYDTFLPYAGRTPERDRERERPGCSSVGYGEAEELGPFLVQKGKPELKWNKYSWNKGTYCLFMPNPAFSDDAYIFLLNWFKRFPQYKSHDFYIAGESYAGHYVPQLSEKIFDGNKQGPKENYINFKGFMIGNALMDDETDQTGMIDYAWDHAVISDRVYADVKKYCNFSMENVTDACDSALTEYFAVYRLIDMYSLYTPVCTEVSSSAAFGQRQVAVHGAAPKIFSKYHGWYMRPAGYDPCTSDHAEVYFNRADVQEALHANVTNIGYNWTHCSDVIGKWRDAPFSTLPIIRKLVAGGIRVWVFSGDTDGRIPVTSTRLTLNKLGLKTVQEWTPWYDHQQVGGWTILYEGLTFVTIRGAGHEVPLHAPRQALSLFSHFLADKKMPPTAFP

SEQ ID NO: 200041 - protein, 473 aa, Oryza sativa
  Clone ID: PAT_MRT4530_9554C.1.pep
MTIDIESLVKDVTICWQRAEGAKSRSGCKIPSLDQRDRPAAMCIGPNHHNPFYRQMEEEKKAMLYSILTQVDEQHKAAVLTRLMDAIKALENEARDHYLDRAESMSSSEFVQMLVIDGCYILGKFVLPHSCCPSTSDDGAQNGSAMQNMELVRDVFYRLDNQIPFCVLDEIHKVLHGKIIRSCTAVADVLVTHVGDLLENLSYSRVHALDVHASPWHLLHLLHTRLQPTAEWGSEKPTKGAAAHVVVSCASTPGFYRWRPATQYDAAGVRFRKFDGSSCILDVKLDGATLRVPSLVVDTNTYALLRNLMMLEQHNPDQLGSHVTAYCVFLSQLAGTPGDVALLARKGIIVHLLPSDSDVAVMFAGLCVGITIGMDEPKHNYLHKERNDLERIYNSRLMVQHTRNCVTLPHRNPMLVVALLAATLGSCRAGREQSARKVFDRSFCYRQQAVEQCEAKETLDWMPMWLALAGSPI

SEQ ID NO: 200042 - protein, 157 aa, Oryza sativa
  Clone ID: PAT_MRT4530_95550C.1.pep
MAKLYVQAVPPPDLNRNTEWFMYPGVWTTYICILFFSWLLVLSVFGCTPGMAWTVVNLFHFAITYHFFHWKKGTPFADDQGMYNTLTWWEQMDNGKQLTRNRKFFVVVPVVLYLIASHTTDYQHPMLFLNTLAVAVLVVAKLPNMHKVRIFGINAGN

SEQ ID NO: 200043 - protein, 83 aa, Oryza sativa
  unsure (1)..(83): unsure at all Xaa locations
  Clone ID: PAT_MRT4530_95551C.1.pep
MAERRSAGRTRQSGCRPVXERGKXPPAGGTEEVAKSRDQNHRGLGRGSYYPKLALIVDSCEPLDFAKSISRAPSVYVTSRPRA

SEQ ID NO: 200044 - protein, 90 aa, Oryza sativa
  Clone ID: PAT_MRT4530_95552C.1.pep
RPACTAGKPAECCGTGSSTTTTTTTRAAAAAAARRWRRAGACCSTAGTPGSAPPPPPPRPAALAPPPPPPPPRRHHPPPPPPPPPPQPCP

SEQ ID NO: 200045 - protein, 114 aa, Oryza sativa
  unsure (1)..(114): unsure at all Xaa locations
  Clone ID: PAT_MRT4530_95553C.1.pep
ILQPATTSWWLLIKSVITNIXLAPYPASSSLPDTDSYRPPQSPPRPNITTNYLPPWLPPRPTXYCQPYHSPSTPNLRSFPIKNINLSSYNLFISYPIYPIFNHPLFIPLILLPE

SEQ ID NO: 200046 - protein, 96 aa, Oryza sativa
  unsure (1)..(96): unsure at all Xaa locations
  Clone ID: PAT_MRT4530_95554C.1.pep
TAVFRSYHKRRPSQELRSPEPACIPLIIPTIDPSHETLIFNTENLLQWLVYSYTTILGGRILGGRKKGRKGRYLLDXVITRXKVSLGNASQMLASK

SEQ ID NO: 200047 - protein, 77 aa, Oryza sativa
  Clone ID: PAT_MRT4530_95555C.1.pep
SENCARTHTQSNNQKPSSIYMTQSTKNPLSIPIVSEAATTRNRLATRASGRKIRPAFSPGEKSSLNFFAPNRAYTAK

SEQ ID NO: 200048 - protein, 63 aa, Oryza sativa
  Clone ID: PAT_MRT4530_95556C.1.pep
KLYMIIIGFIFCFFLEVQPTAITIPHNDLSIVPPLNPHWDSIWVFFQICRCPINRHHSISLQA

SEQ ID NO: 200049 - protein, 143 aa, Oryza sativa
  Clone ID: PAT_MRT4530_95557C.1.pep
FFFFFFGTNTSWSAILFSGVHQHLATAHRPTKFHITWWAIFIFFLDHTYTISIKSLSTLAGLISPHSFGRQPGVGLWVRLSRSEGDRGIFIPIYIHIRLRCCASLDMRISIIATHIDVALARTILRFFPCKGGSPCGVGMGLE

SEQ ID NO: 200050 - protein, 58 aa, Oryza sativa
  unsure (1)..(58): unsure at all Xaa locations
  Clone ID: PAT_MRT4530_95558C.1.pep
MAANXXMVAGXRNRNEFXMIRPDGDXPXXAKPGKSXNXQVXQIFXDTFGVSATGDVFF

SEQ ID NO: 200051 - protein, 80 aa, Oryza sativa
  Clone ID: PAT_MRT4530_95559C.1.pep
LGKSIGVHPLLLMVPGAVGAQLSYLLPTGSPGNVVGFSTGYISIKDMVIAGTPLKIVGVAALTILLPTLGSVVFGMDQKL

SEQ ID NO: 200052 - protein, 299 aa, Oryza sativa
  unsure (1)..(299): unsure at all Xaa locations
  Clone ID: PAT_MRT4530_9555C.1.pep
LAAGRRMSRRWSRTIYVGNLPGDIREREVEDLFYKYGRIVDIDLKIPPRPPGYAFVEFEDPRDAEEACAGRDGYNFDGHRLRVEPAHGGRGNGGSSFDRPSNFGGGGRRGVSRHSEYRVLVTGLPSSASWQDLKDHMRKAGDVCFSEVYREGGGTVGIVDYTNYDDMKYAIKKLDDSEFRNAFSKGHIRVKEYDGKRARSYSRSRSPSRSRSKSRSLSKSPRTRRSASRSRSRSRSVSSRSRSASKGRSPSRSPARSKSPNASXLQMVKHQAPRNGAQAGAHLVHGLLMRNLNRSDMLM

SEQ ID NO: 200053 - protein, 63 aa, Oryza sativa
  Clone ID: PAT_MRT4530_95560C.1.pep
EFRMRSTRRSPTISLTHGFPALHTPTSYAPSPTTTASYPMYITPATPLDVEVNRVSPQVVRDS

SEQ ID NO: 200054 - protein, 90 aa, Oryza sativa
  unsure (1)..(90): unsure at all Xaa locations
  Clone ID: PAT_MRT4530_95561C.1.pep
KKKGAGSFPLLLMREAGEGVQRESSNPQSSNKLSSRMSNLPPPLGRATEGSIAHAPSCKWESYTRGPLRGIPRALSVMHAHNRRTKKXCH

SEQ ID NO: 200055 - protein, 404 aa, Oryza sativa
  Clone ID: PAT_MRT4530_95562C.1.pep
MGFPVVGETFQFFRASPSVDMPSYYKQRLERYGPLFKTSLVGQPLVVSLDPEVNRFIFQQEEPHHVQWNRSQVHPELCVQALWAENLKESLLPELENSMRESFASWASKPRIEVQDGVSDMIFDLVAKKLIGLNVTQSRELRKNFQEFFQGMVSFPIYFPGTSFYRCMQGRKNVRNTLTDVMKERLSAPEKKYGDLVDLIVEELQSEKPVIDENFAIDALAALLFTSFATLSSTLTVALKFLNDNPKIVEELKEEHDVILKKREVMNSGFTWEEYKSLKFTTQVTNEITRISNVAPGVFRKTLTDVQVNGYTIPSGWLVMISPMAVHLNPELFEDPLKFDPWRWTEEKRSSLLRNYMPFGGGIRLCLGADFSKLFIALFLHILVTEYRYIRMLVFTHCLLSSLK

SEQ ID NO: 200056 - protein, 857 aa, Oryza sativa
  Clone ID: PAT_MRT4530_95563C.1.pep
MVTDASSGRQALTLSLLLTWAWERFGVGSSRGLGRREEERGFALSPVPTLRLIPPTEFRGSSSIRKVLTLDEEFKVLGLKIGSHSSWMENRNKEDMGPSQRNSCPKVHSSMCSELTMMLDKVSSILPLIEAARPGCKAGIQELCNLYNIVEKGKLIIQHCVECSKLYLAITGEAIVSRCERIRDSLRRSLFLIENMVPPALANQIVDVHDDLGDIKFVIDPTEEEAGKTILEMLRQSDVTEELELETFLQAASNLNLTSPKSMLIERRAIKKLLDKISGTDPKKEGVLKFLLYLVKKYGKNIKPETGERNENMQSESQSSTPSSSFVSDTSTPGKWYTPTDIPGNEDQTSMSGAATPPAEFCCPISTKLMRDPVIITSGQTYERENIERWFREGYDTCPRTHIKLENFAMIPNTCMRDLIFNWCKEHGFIISDILPPSKNAYSYLPEQLHGYSMSSLHNVSVPLIAGKVRDFVIDHSTSSVALSEASYMSDSYHVRDMEEPKDSFSQFSWSADYQECLSFRNFNQDKFLRFFYELSKLPLELQDRSIGDLKIILNEENEASCAMVSNGFVEAFFDFLMNEDGSYSMQAQKVGFQFFRVFLSNSRTNILHMNEEAFRLFASFIDSELKTEALLTLHELVQHLSCRQSHLMASIITPLLESEDAEGLKLCLKIVCNLSSDSDVKPYLISLGIVSRLSPILSEGTFAECCLEILRNLCDVEEATVLITKTDRCLGSVAEYLDTGSPKEREHAVVILLAVCSHSSEDCLLVMKEGVIPALVDLSVNGIDEAKGCSMKLLHLLRDLRRTDQLNNSCSQEVVVTDVVEGPPDSSIHKQPIPKSSRFFQRKLNIFSKPRSLTLF

SEQ ID NO: 200057 - protein, 60 aa, Oryza sativa
  unsure (1)..(60): unsure at all Xaa locations
  Clone ID: PAT_MRT4530_95564C.1.pep
XXXNNFFTNFFFFCVFFFFNNSNCPLSFYIKRGNLIHFYLPARLSWQPIFNKNDKKKKGK

SEQ ID NO: 200058 - protein, 313 aa, Oryza sativa
  unsure (1)..(313): unsure at all Xaa locations
  Clone ID: PAT_MRT4530_95565C.1.pep
MRWGSKQHVTCLKCGVQHQAYFIASHKQWRCKHCHHTFSVTSGTIFANRKASIQTYLYVLARFVNAVKGVSALEISRDAKINYRTAFVLCHKLRKALLENRDMHPLSGEVDMDGTYVHPAPXRKENKKIDRLDYRLKENKSPNKRCVMVAREHFSAEEKAENQFNRGAKRSHVFVTYSESQPVVKDFSNRFIVRESRINTDESTAYESLLLDYDLRTVNHKEEYRSDLGITNNQAESFFSRFKRMYYGHVHKMSNLYLLNYANEIAYREDNRRKANGWQSQDILGKCLTTTNENNEWCGYWQRKIVHQEVIWQ

SEQ ID NO: 200059 - protein, 249 aa, Oryza sativa
  Clone ID: PAT_MRT4530_95566C.1.pep
MAEERRRRKREEEEEAEEWERRKRGRRKRRKRRRRRGGEEDPVDVLGEEVMGRVMELLDARSVARCTAVSRAWRGVAADDRLWAPKCAELMAGKAHIPRLTMIPTASKLSTYSMAIADGKRTRITKEDLCDHDWEFRFTIAAPEYWRNLDPSWKHTGPPMRRYFHPDGYHSADPHDAVWGGHECTYTIITSFAGNGCIRDHYVRINRWPPMKVSRKEDWSWELSNHLYRYNSIPDTDKKGCTGPLFPVW

SEQ ID NO: 200060 - protein, 204 aa, Oryza sativa
  Clone ID: PAT_MRT4530_95567C.1.pep
MVEVGGGAAEAAAGRRWRLADERCDLRAAETEYVRRFHRHEPRDHQCSSAVAKHIKAPVHLVWSLVRRFDQPQLFKPFVSRCEMKGNIEIGSVREVNVKSGLPATRSTERLELLDDNEHILSVRFVGGDHRLKNYSSILTVHPEVIDGRPGTLVIESFVVDVPEGNTKDETCYFVEALLKCNLKSLAEVSERLVVKDQTEPLDR

SEQ ID NO: 200061 - protein, 777 aa, Oryza sativa
  Clone ID: PAT_MRT4530_95568C.1.pep
MDEEAKPNPNADAAPAAAEAAASSPPPLSSSESAEGKDKEEEKEEEEEEEAGDLVEKLVELVEEIAAISDFRNAYRRQFCNLSRRIRLLAPMLEEAKEGPRPLPDVSYSALRRLREALADSRELLRLGVSGSKISLVGPGFVIPGCQINAGPEQLMLFSNKLVKNIISLYFSFSLVGQSEIGLNHGEVLEREKIMKSFQDITARLEQALGLISFDELDISDEVREQVELVHAQFKRAKERSDPSDDDLFNDLVSVYNSSTSANVDPDILQRLSDKLQLATISDLNQESLILHEMASGGDPGAVVEKMSMLLKRIKDFVQSRDPEMGTPVNTTELSGKDNMASLIVPDDFRCPISLDLMKDPVIVATGQTYERGCIERWLEAGHDTCPKTQQKLPNKSLTPNYVLRSLIAQWCEANGMEPPKRAAQHHNAPASCTAAEHSNVVELLQKLLSQNLEDQREAAGMLRQLAKRSPENRACIGDAGAIPILVSLLSITDVSTQEHVVTALLNLSIYEENKARIITSGAVPGVVHVLKRGSMEARENSAATLFSLSLVDENKITIGASGAIPALVLLLSNGSQRGKRDAATALFNLCIYQGNKGKAVRAGLIPVLLGLVTETESGMMDEALAILAILSSHPEGKTAISSANAIPMLVGVIRNGSARNKENAAAVLVHLCNGEQQQQHLAEAQEQGIVTLLEELAKSGTDRGKRKAIQLLERMNRFLMQQSQAQAQAEAMAQAHAHAQSQAQVQALNEAQSQVEMQVEQLLLPTTSHLSDRRDG

SEQ ID NO: 200062 - protein, 61 aa, Oryza sativa
  Clone ID: PAT_MRT4530_95569C.1.pep
DPRTMSAVALKQDAAIIKPGDFIVLVAVPLLMIRSQRGACSILRLYLLLHLEWLPRHLDCR

SEQ ID NO: 200063 - protein, 84 aa, Oryza sativa
  Clone ID: PAT_MRT4530_9556C.1.pep
MASGALLLLASSGIGEGGEVGAAVEEASKRRGRGIKWQAAASSPEFIYGPCTNLLGPFIHHPRDHVNDSTSHAKTSLSKEVNQT

SEQ ID NO: 200064 - protein, 112 aa, Oryza sativa
  unsure (1)..(112): unsure at all Xaa locations
  Clone ID: PAT_MRT4530_95570C.1.pep
AREDASRPRGCAATSSPCVWEDREWGKESLSEALADHPEMAGRLXRRIDGSWEVKLNDTGRRAAPTGDTVGVTLDEFLGGKGLVCREVALASWTDVNADDPDMCPPMFFRNS

SEQ ID NO: 200065 - protein, 427 aa, Oryza sativa
  Clone ID: PAT_MRT4530_95571C.1.pep
MRPIRLPEPPGVGGMETPEIFTGAAAATVVVRRAVVIGNGSPGAENQCLGLVRALGLADHLTLYRVTRPQGGINEWLHFLPVSLHKLIDQVLRQFFRNTRLAPVVEGRKHYRVPNGGSVGVGLSSVLEADAKKIVAVARDTFEKEGPTLIVACGWDTISYSSSIRHLASGNVFVIQIQHPRSRLDRFDLVVTPRHDYYALIAGGQEEIPRLFRRWITPQEPPGRNVVLTVGALHQADSAALRLAAIAWHDELAPLPKPLLIVNIGGPTRNCKYGVDLARQLIASTYNVLDSCGSVRVSFSRRTPRKVSDIISKEFAGHPKIYIWDGEEPNPHMGHLAWADAFVVTADSISMLSEACSTGKPVYVIGTEYCKWKFSAFHKTLRERGVVRPFTGLEDISNSWSYPPLNDAIEVATRVREAIAERGWSVG

SEQ ID NO: 200066 - protein, 160 aa, Oryza sativa
  unsure (1)..(160): unsure at all Xaa locations
  Clone ID: PAT_MRT4530_95572C.1.pep
MEMKNPLAVGLLALLVAAMAVTAAAHDDDDVPFTDEDLESEQSMWNLYDRWRAVYASSSSHLGGDIESRFEAFKANARYVSEFNKKEGMTYELGLNKFADMTLEEFVAKYAGAKVDAAAALASVPEAEEEVVGDVPAAXDWRQHGVVTPVKDQGSCGSLL

SEQ ID NO: 200067 - protein, 125 aa, Oryza sativa
  Clone ID: PAT_MRT4530_95573C.1.pep
QVTCRRYRSIKIRKRGKEEAFPFSPSCYHSTVEDSCVVAVTFTYSHGNSLHATTTAICLQPCSGVIASIHPLDLVNLDMDITMPRCKAWNAMHIQVTTSSSRWIYRSTRREESAASQLGIRPLVA

SEQ ID NO: 200068 - protein, 180 aa, Oryza sativa
  Clone ID: PAT_MRT4530_95574C.1.pep
IVVSDRSRRRRPVGRPARRLAAPPPSSSSLRRVPRRPRPRAAAAVSRLRSRIAAEVVPSPSAAPVRRCRSHASSRGGKDPSSRGDQSDGGRGTDGDGDEIETTALFGLTTATMLRRSPATAKGRTRTATRRRPRRRSSRATATAGATAKHGWSGGGDGKARAHGARAFPTTRGEGEGGDG

SEQ ID NO: 200069 - protein, 153 aa, Oryza sativa
  Clone ID: PAT_MRT4530_95575C.1.pep
MATRVEDEEEAAAEERAPAAALLRRIMAPIAWRAAPTAASASSSSYLVAAEAGGVEKISMLSGYERLPSVYGTAFHDDDGGGAWSSSSSPPACPPRAARLLWGALTRAVQRPGRCRCPGDEEAGVTTTKERRRSSSSSWRPDPDRRWPVQGWS

SEQ ID NO: 200070 - protein, 44 aa, Oryza sativa
  Clone ID: PAT_MRT4530_95576C.1.pep
GTRGKGYYGRPSPGIKHRTRNVRDSAIWLETTILLGANPTKRRY

SEQ ID NO: 200071 - protein, 394 aa, Oryza sativa
  unsure (1)..(394): unsure at all Xaa locations
  Clone ID: PAT_MRT4530_95577C.1.pep
MGCSWALAALVLGFLVVAVHGSEPWLNQTQVYSTNANSGSNGVFVGITLIQSAAAKGAVCLDGSLPGYHLHRGFGSGANSWLVNLEGGGWCNDVKSCVFRKSSRRGSSNHMESQLQFTGIMSNRPEENPDFYNWNRVKVRYCDGGSFTGDGADASAGLYFRGQRIWQAAMDDLMAQGMRYANQALLSGCSAGGVSTILHCDEFRGLFSGSTNVKCLADAGMFLDFVDVSGQREMRDFFNGIVRLHRAFSXQNVVPNIQTPTFILNTAYDVWQLQQSVAPKRADPQGLWRGCRMNHASCNSNQLQFLQGFRNQMLDAVRGFSGARQNGLFINSCFAHCQSERQDTWYAGDSPRLGNKRIAEAVGDWFFDRADAKYTDCAYPCDGTCHHLTFRGDY

SEQ ID NO: 200072 - protein, 180 aa, Oryza sativa
  unsure (1)..(180): unsure at all Xaa locations
  Clone ID: PAT_MRT4530_95578C.1.pep
NQALLFGCSAGGVSTILHXDEFRGLFSGSTNVKCLADAGMFLDFVDVSGQREMRDFFNGIVRLQGSGRSLPRSCTSRMDKTSCFFPQNVVPNIQTPTFILNTAYDVWQLQQSVAPKRADPQGLWRGCRMNHASCNSNQLQFLQGFRNQMLDAVRGFFRARQKRXFINXCFAHCQSERQDT

SEQ ID NO: 200073 - protein, 34 aa, Oryza sativa
  Clone ID: PAT_MRT4530_95579C.1.pep
MGTATTRANFPYYCWLAAGCGAECNHHVKILERH

SEQ ID NO: 200074 - protein, 265 aa, Oryza sativa
  Clone ID: PAT_MRT4530_9557C.1.pep
MAACLPSLSPPPHQAPVPAATTALAGNLTSSLLSLPPPLPRLAVSHRRAVVAAASSRPPPPPSREGGDGGGEEEEEVERAMGMDGGIPGTSGEFLRRVSSRAYGMRRHLMESLDSLAYDVLETNPWREDSKPVYVLARRDNHLWTMKTRRSRSEVERELGMLLKGGGSGVGTKSKYSGSKFNMLVEDIREGILVFEDEDDAAKYCDILQGGGQGCEGIAEIEASSVFNICHKMKALAVLFRRGRTPPLPQSLERDLRARKRSLED

SEQ ID NO: 200075 - protein, 916 aa, Oryza sativa
  Clone ID: PAT_MRT4530_95580C.1.pep
MAASVQPRQFGHLEPGSAPVRGAASSNGAKAYPPANGIPRRADSPVRGCGFPPLVSPPPRKPPSDGSDDEEEEQEDWRELYGSHLQLEVEPPVRDARDEGTADAWIERNPSLIRLTGKHPLNCEPPLARLMHHGFITPAALHFVRNHGAVPRGDWSTWTVEVTGLVKRPMRLTVDELVNGFPAVEVPVTLACAGNRRKEQNMVQQTVGFNWGAAAVSTSVWRGARLRDVLRRCGIMPSKGGALNVCFEGAEDLPGGGGSKYGTSITRQWALDPSRDIMLAYMQNGEPLLPDHGFPVRAIIPGCIGGRMVKWVKRIIVTTAESDNYYHYKDNRVLPSHVDAELANADAWWYKPEYIINELNVNSVITTPGHDEILPINGITTQRGYTMKGYAYSGGGKRITRVEVTLDGGETWLVCVLDLPEKPTKYGKHWCWCFWSVEVEVLDLLGAKEIAVRAWDQSHNTQPEKLIWNLMGMMNNCWFKVKVNVCRPHKGEIAWLVDRRHGPGICAVRRVRSEEHLETAEAAAPGLKRSTSTPFMNTTDGKQFTMSEVRKHSSQDSAWIVVHGHVYDCTAFLKDHPGGADSILINAGTDCTEEFDAIHSDKAKALLDTYRIGELITTGAGYSSDNSVHGASNLSQLAPIREAIKAPAPVALSSPRDKVPCQLVDKKELSRDVRLFRFALPSSDQVLGLPVGKHIFVCASIEGKLCMRAYTPTSMVDEVGHFDLLIKVYFKNEHPKFPDGGLMTQYLDSLPVGAYIDVKGPLGHVEYTGRGEFVINGKPRNARRLAMIAGGSGITPMYQVIQSVLRDQPEDTTEMHLVYANRTEDDILLRDELDRWAAEYPDRLKVWYVIDQVKRPEEGWKYGVGFVTEEVLREHVPEGGDDTLALACGPPPMIKFAVSPNLEKMKYDMANSFIVF

SEQ ID NO: 200076 - protein, 41 aa, Oryza sativa
  Clone ID: PAT_MRT4530_95581C.1.pep
GLKSCSHLPKWPHQQSHQNRSVKFLERVETILFIGFKRTDF

SEQ ID NO: 200077 - protein, 170 aa, Oryza sativa
  Clone ID: PAT_MRT4530_95582C.1.pep
SFVSYLDGSVLTQTWNPRSLVSPPPSFYPSSNSASLKCTVVAALDGGAQRRFQHSLEVGDLAAASEPLAQGFGSGGCCWSHSEHDSHDSQAKATEKGPRSPLNLQGIGLLHDNSCLMLILGEATHYAQLMDLQEWSCQHLIDKQIQGRSIFVNALAILEYEGHLREKYKY

SEQ ID NO: 200078 - protein, 104 aa, Oryza sativa
  unsure (1)..(104): unsure at all Xaa locations
  Clone ID: PAT_MRT4530_95583C.1.pep
KARLILSHSEHDSHDSQAKATEKVNLXGPRSPLNLQGIGLLHDNSCLMLILGEATHYAQLMDLQEWSCQHLIDKQIQGKILHAHQRLMLFYELVLISQGCTVLG

SEQ ID NO: 200079 - protein, 91 aa, Oryza sativa
  Clone ID: PAT_MRT4530_95584C.1.pep
MRLQQASGSAAGDGTTRRWLRLAASADDERPFRPPPIVSGFGAPPHADPGVATARMTTSYSDGNDGDELWRWQLGHLGVQTGKTSARKNTF

SEQ ID NO: 200080 - protein, 222 aa, Oryza sativa
  Clone ID: PAT_MRT4530_95585C.1.pep
MEDLVSGSSVMRSAIISCSSTSEDQQAAAAAQAQPEESTWTDYFVDFMMSEEEKKSQEDHGASSYCSHGGDGVYGDCSDQKELEEEEGEEDSMISDAASCAPAAAALPDRYKELKKLKKKVFKALDHDDSLEDTASSPVNSPKVSALTQLELSPKRRCNTRDLTKEVGIGDDRGREGMDYADAMVEGVRFVDQSQKSVTPCGELKDKGLCLFPLSMLLHYHG

SEQ ID NO: 200081 - protein, 53 aa, Oryza sativa
  Clone ID: PAT_MRT4530_95586C.1.pep
MALPMKHQAPPENARGPQTPFRGFLSDIMVLVKKEKLKREELGALPLPQRTLP

SEQ ID NO: 200082 - protein, 66 aa, Oryza sativa
  Clone ID: PAT_MRT4530_95587C.1.pep
SYTSCDASDLFVPCTVDYVIKAIEILSMKGEDCYHESYVERDHILFVKVQKDYLPLAGYMGLHVRD

SEQ ID NO: 200083 - protein, 90 aa, Oryza sativa
  Clone ID: PAT_MRT4530_95588C.1.pep
RNPPGLEPVSKVCRPFKPRKDNFFPRGPPPGVLRNFPNVPGPTRPRYPAREILTPRIPFGQPPRCRRFFSRVNPVPRSLNPGQARSQGPS

SEQ ID NO: 200084 - protein, 86 aa, Oryza sativa
  unsure (1)..(86): unsure at all Xaa locations
  Clone ID: PAT_MRT4530_95589C.1.pep
MLQEGSTAYEKPFTEDMIMIDGGGGAARWPGKHGRRLDRRRSLSLDLNLEEEVTEPSYYYLLLFRGVFVQKGKEKQKMLAAIXTPS

SEQ ID NO: 200085 - protein, 102 aa, Oryza sativa
  unsure (1)..(102): unsure at all Xaa locations
  Clone ID: PAT_MRT4530_9558C.1.pep
MAACLPSLSPPPHQAPVPAATTALAGNLTSSLLSLPPPLPRLAVSHRRAEVAAAXYRPPPPPSREGGDGGGEEEDSHGPITNHPDKVGDRDKLKELAHPYEG

SEQ ID NO: 200086 - protein, 614 aa, Oryza sativa
  Clone ID: PAT_MRT4530_95590C.1.pep
MAPAAVAAAEAGSKAAAVAGKAVAACERDAEKLEFIEEMTRGFDAVQERVLAAILARNNGAEYLRRHGMEGRTDREAFKARVPVVTYEDLRPEIERIANGDRSNIISSHPITEFLTSSGTSAGERKLMPTIEDELDRRQMLYSLLMPVMNLYVPGLDKGKGLYFLFIKSETKTPGGLPARPVLTSYYKSDHFKHRPFDPYNVYTSPTAAILCTDAFQSMYAQMLCGLVARAEVLRVGAVFASGLLRAIRFLQLHWRELAHDIRTGTLSAKVTEPSIRDAVAEVLAAPDAELAAFVEAECGKDKWEGIITRMWPNTKYLDVIVTGAMAQYIPTLKFYSGGLPMACTMYASSECYFGLNLRPMCDPSEVSYTIMPNMGYFELMPHDPDAPPLPRDAPPPRLVDLADAEVGREYELVITTYAGLCRYRVGDILQVTGFHNAAPQFRFVRRKNVLLSIDSDKTDEAELQAAVERASALLSPYGASIVEYTSQADATTIPGHYVVYWELMVREGGAWPPPAEEEGRGVFERCCLEMEEALNAVYRQGRNGEAIGPLEIRVVRAGTFEEVMDYAISRGASINQYKAPRCVSFGPIIELLNSRVISKHFSPACPKYSPHKK

SEQ ID NO: 200087 - protein, 494 aa, Oryza sativa
  Clone ID: PAT_MRT4530_95591C.1.pep
MDGSAAIPPRPAPTPPAPAPAPPQVFLRRSVLPPPPAPHHAPPPPGAHVHYFRAASPIPIFRAAASSRPPRPPPPSTTTAPPPPAAPAVTPARPPPQQPAVAVAAPPPATTMATATEEVAAPATGNPMANAADNEEKNERETVQSEVAKGETVQGPDKECTTGAVKGIKRPRKPKGFKKGDAGPSLFSPNNCRYDSSLGLLTKKFINLLEGAEDGTLDLNKAAETLEVQKRRIYDITNVLEGVDLIEKTLKNMIRWKGFDMSKPKERERQISALKLLELNSITMTVTVPFYVPSKETMEEIESLYDEESRLDDEIMEAQEKLNALRVDEDRRKLLYVSKEDINAIPRFQGSTLIAVNAPRGTYIEVPDPNLDMDIYKDLDNQEKHYQIVFRSAMGPVDCFLISNHQETFNADQQMADNLDAAVTSGSSQAPQQMDYVQASEIGESNGVREHTSEPSKRDDPVPGIVKIVPSDDIAADYWLSSDADVSMTDTWGT

SEQ ID NO: 200088 - protein, 68 aa, Oryza sativa
  Clone ID: PAT_MRT4530_95592C.1.pep
MDKLTYARLTQLDLRVSKRCRNSPSADLTAVITEPDRVGTILCSATPFVAKAAKSAFTPATELWPVTA

SEQ ID NO: 200089 - protein, 61 aa, Oryza sativa
  Clone ID: PAT_MRT4530_95593C.1.pep
MRMQGSGGAGARVRRGGCWWDPHVSNFLLFSLSSISFRWLRPLHRCYCVAHVCAPTEGGAC

SEQ ID NO: 200090 - protein, 107 aa, Oryza sativa
  Clone ID: PAT_MRT4530_95594C.1.pep
MTERGAPHRETAQAPLCRFGRGLRVRAAAKQSTLYSVGKVLLLYFKGIPHAPFPFQTGLSFSLRTEIDMVAVESHFDGTAHTYLHSRRRRAQRGIVVLVADATSVRP

SEQ ID NO: 200091 - protein, 150 aa, Oryza sativa
  Clone ID: PAT_MRT4530_95595C.1.pep
MFSFGTFDFVFDASGQIQQVSPGVVVSIQDIRFPAGARFRFGELNFTTNKAGVLRPMTPRASSPAATSLVPFGLANFTAVAAKIGHVDNFSARGREAILKAKLGEHDVFMTPQHNIVATKALLDNIKFPEDSAINSTIGQIKAMVEAATV

SEQ ID NO: 200092 - protein, 298 aa, Oryza sativa
  unsure (1)..(298): unsure at all Xaa locations
  Clone ID: PAT_MRT4530_95596C.1.pep
MMQSHHPSPARLGLTASSPSLPPNPAAGNPTSSPPQGNPSAAAAVGAAAAAAPTLTTSPSLLPLLPPLPRAQALLQLISALASNLFELSPSRAAWISAYRGSLPTFLPSPSSAPPPPLPAPISSTKEALSLLNTLQTQLFEAVAELQETLDLQDARARLARETRAKDASILAFAKKLREAHHVLDRLVDDYADYRRDPKRPRXPRRRNDPEPVSDGDFGASLHSKLNLDDVLTYAHRISYTTFAPPEHGAGLPLRGALPPXAPQENEMRMSQLYQFADLDVGVPKSQEAKERTAAGDA

SEQ ID NO: 200093 - protein, 51 aa, Oryza sativa
  Clone ID: PAT_MRT4530_95597C.1.pep
VEASAAGASAIGSRRIKDRLVVREEPASWLRPPRCDLSTLPVCVVRFASTK

SEQ ID NO: 200094 - protein, 238 aa, Oryza sativa
  Clone ID: PAT_MRT4530_95598C.1.pep
MDPSKGEAIHDEHFGLSLVAGGLCKEVLKEETAVGLWLKLEQICMTKDLTNKMHLKQKLFLHKLQDDESVMDHLSTFKEIVADLESMEGIWLFLKLVKKLFGLEAQLGHRLYSSRVVLSKSRSPALFQGDPPPTTLICSAQAAGTLVHGHRGMLGSLPLAPSPYDPVFVIDIVAASRSSRFTGQQLPRPRHRFGETLHVVVPIAAASTRRSITAVTGHLFTINAATSTHAIPLHCLHP

SEQ ID NO: 200095 - protein, 141 aa, Oryza sativa
  unsure (1)..(141): unsure at all Xaa locations
  Clone ID: PAT_MRT4530_95599C.1.pep
HWAEITLRQHPRXDHRNALFXLNSRIPLVRTSSESAVRRPGKAXEGAVPGPSPGRHAAARSRRASSSSSPPAADGFGAGTPEPSPQSQSFSRSYGSVLPTSLAYIVPLARGCSPWRPDAVMSTTGRGRYSVLRIFKGRRTS

SEQ ID NO: 200096 - protein, 294 aa, Oryza sativa
  Clone ID: PAT_MRT4530_9559C.1.pep
MQCICTRVTPSRSVGEISRSRSRNDLPLGVSPSSRMLTTCTLKTPSYGNKSKSKEKINPRDMFTFSYRFNTDIPMTETPGASIDEYLQNRPRIVGAVFPDKRKRTKLSDEEWSVQLLPIQFLFLSASPVIVMRFVSKSGGKEYPPHVPVKATSLLLMEVTDYKLDGLDSNAMPSHLALTVRGSLYPRPEGRKSLRGHVEMSVGFNLPPVLALVPEGVIRGVGETKEMVSWKLERSSTRLCPLILSDWYMGPTFPKGPHVLRQLALQMKQDFDNGLAADFKRYRREKLTEKKTTP

SEQ ID NO: 200097 - protein, 1411 aa, Oryza sativa
  Clone ID: PAT_MRT4530_955C.1.pep
MAERNWMYNGWHYGSAPSDEWIEKTNMFLDRAFSIPDLLQDGSIKCPCGRCRNYMRHTRDIIEAHLCKFGFKENYETWTAHGEEHIRNNEPVSPLAHEEGFDQPDRMDEMLLDIGAVQPPGIDEEPTSSASAFYRMVDGANESVHDNTMHTSLSAIARLLALKSEYNMSIAHYDDTLQLIHELLPPDSKLAEDFYHSKKLLRGLGMTYIKIDVCYNDCMLYYKENEHKDKCDFCNTPRFEDGQNKVPRKVLRYLPITDRLQRLYAHEETAKAMQSHKQSTCGKLVHPCDGEAWQQFDIDFPTFGRDARNVRLAISTDGFTPFNIGAAPYSCWPVFVSPLNLPPGVLLKPEYIFLSLVISGPEHPGKKLSILMQPLVDDLFKLWEGVETWDASRKERFNMRAAFLWSVHDCPAYDHEFRFQANAFRKNTVVLDEAPRILKGEEVRDQMYAHVADRNNYGKTHNWTHVNCFWQLPYFHKLLLPHNIDVMHNEKNVAETIWNTCFDIPDKTKDNVKARQDLVDICSRPSLHLELKGSGKWHKPRAAFCIDKNDKTIIFKWFQDLKFPDGYAANIRRGVNLLRRRIFDLKSHDYHIFIERLLPVAFRGFLPENIWVCLAELSFFYRQLCAKELSKDVVHSLEQNVAVLLCKLEKIFPPGFFNLMQHLIVHLPREARLGGPVLARWMYPYERYIGRLRKKVRNKARVEGSIVEAYLVEENTNFLSLYFSHNCMANSSIDSTLRQISYGFPRRITTYGCYDVNGYRFRSEKYESAKSGLSTVNTGVCVSCVDDDNNVIDYFGVIEDIIKITWEGSMNLELVLFDCRWFDPTNSSVRRTENLGLVEVNHTSRLSNFEPFVLASQVTQVYYLPYPCDSRPDLKDWWVVHNVTPHGWLPPSTTNESAPPNDQPQIDTFYQEEGLEGHFVIDLGDDIEIATTYISDEITNEKDLDYLAKYHEQPSPSVCPASQLSNTSSANGASSRSVPSTNGTQVNPANSNAEGQSQGSHRASTEQAEQQATQRGRKERSRTSLAVPRPGRKVGLIPRGEMQFKYVNWHAAEYKYTSQLGVILKREYPGTVKDLDNDEELKAEANRVLQQYANKRVNDMMYQLRVDAVKLYFFKVRGEKIKDEVARTIELSEEEYLLARVEWVSESDWPSLCHHWDTEQYLEKRKKAQDSRLQSEDDSRNRGGSRPFTETQQWLAHDFGPEKATGLNTFGVMKSGAKNVDSTGTHGRIDNQKAEKIMADYTAVTNSGTQGDSDGHELDPKALYSICNGLPHGRLPIGNGAVSKSTVIAAGKETVPRPSTPSANQTLRNENLKLTRENAELRRRMDSNERLIRFLYEKTGVEPPSEEDVVPPANEDLMSPAHVQQEAENDGTTDTNMGNEENVVCEVNIGCEANNGCNRYQVCSSGRVIAA

SEQ ID NO: 200098 - protein, 52 aa, Oryza sativa
  Clone ID: PAT_MRT4530_95600C.1.pep
MVPVDLERPSCGREHAFRHPIDRGHEMRLVVATVFGLKRWVAGQTTGCRIYC

SEQ ID NO: 200099 - protein, 328 aa, Oryza sativa
  unsure (1)..(328): unsure at all Xaa locations
  Clone ID: PAT_MRT4530_95601C.1.pep
VVCKGFSPPPVGKGASRRPAAARRPGRLGRWHGPLGACAPNVGRGGRRAQAPLASLDSDLEAFSHNPAHGSFAPLAFQPSAMTNCVNQRFLSYXVELLSRHGHQXGKTNLSHDGLNPAHVPYWWVNNPTLGEFCFTMIGRADIEGSKSNVAMNAWLPQASYPCGNFSDTSSFKLRRSKGSXATLSRFVFVLEIRIKRAFTLLFHTRFLFSLSSXLGHLRYLLTDVPPQPNSPPDNVFRPDRPEGLGPXSQKEGPGPASDSRNKXNNVKSSGISLAPEGSHLSYTSQVISQSRTRVKLNRVFFPXADSAKPVPLAVVSLDSRQGQWESR

SEQ ID NO: 200100 - protein, 96 aa, Oryza sativa
  Clone ID: PAT_MRT4530_95602C.1.pep
SWKDHRTLETKQTRRKPETHISPPGLHGRSDQSHCLKWPSNQQQEWDQRGDTTRGQTMQHGEQNHPGIYGGERPEQTLKERPQEVHETHMWLQVGA

SEQ ID NO: 200101 - protein, 228 aa, Oryza sativa
  Clone ID: PAT_MRT4530_95603C.1.pep
MASAKSGERGSSSFAMACSLLSRYVRQNGAAAGELGLGIRGEADANKGKETMELFPQNSGFGSEAAAVKETPDAREQEKRQLTIFYGGKVLVFDDFPAEKAKDLMQMASKSSSTAQNCVLLPSSATATVADNTKVSAVPAPASALPVAQANAPKPVRPNAADLPQARKASLHRFLEKRKDRLQAKAPYQGSPSDASPVKKELQESQPWLGLGPQVAAPDLSLRQESSQ

SEQ ID NO: 200102 - protein, 236 aa, Oryza sativa
  Clone ID: PAT_MRT4530_95604C.1.pep
MDFDLFNSYPESQLDLMSTMLQLEQLTALSDQSLFMAAPTSPPVSPMGTPSPQFSPPPQMSVTTTTAGGGYQDQYNSMPATYGAGAGVHQLDFAMSSPGSDSGAPQGSSSSSSSEAMREMIFHIAALQPVEIDPEAVRPPKRRNVRISKDPQSVAARLRRERISERIRILQRLVPGRTKMDTASMLDEAIHYVKFLKSQVQSLERAAAATGAAAHRAAAFGAAYPAALPMQHHAPW

SEQ ID NO: 200103 - protein, 80 aa, Oryza sativa
  unsure (1)..(80): unsure at all Xaa locations
  Clone ID: PAT_MRT4530_95605C.1.pep
LASFSSQSLLLPSCTNLARTPCPAFIGTTSDILLSAKPGSHFSLSGQXDKHWDSQGINWLICILFEVLSDCLRYHSSTLF

SEQ ID NO: 200104 - protein, 160 aa, Oryza sativa
  unsure (1)..(160): unsure at all Xaa locations
  Clone ID: PAT_MRT4530_95606C.1.pep
RIYLLFLFGHFFFSPAIHPGPGGGRSPTPPGGKQGKKRKEEIPRPRRRRRGHSQRERKRGLSFTKLSSRLFARREXMRILMGRLDAAGKTTILXYKLKLRRESSPTYPQPIVLNVETVEXQDISLTVXDVGVRTRSAPVEHYFRNPGPIFVGQHDRERVV

SEQ ID NO: 200105 - protein, 71 aa, Oryza sativa
  Clone ID: PAT_MRT4530_95607C.1.pep
YTMFIPVRVCARTHCRWVQFCSSVKIVAMVIAPPHPHPLPAAPSAARRRRQNPAPLLDRVAGGGEDQFRSR

SEQ ID NO: 200106 - protein, 394 aa, Oryza sativa
  Clone ID: PAT_MRT4530_95608C.1.pep
MALAQALVHYYPIAGRLSCNDDEDGGGDFYIDCTSELGVMFVAASADCTMEELMRVADNQPTDDETAVVQQLAFNCTPDVGDDGPPPLLWVQVTTLSCGGFVVGVTWSHGLADGVGIAQFIQAVGELARGLPSPSIVPVRQDDIVATQVVPPFTMALLQFLPGLKPLDLTFNNVTVPTSLINHIRRFRGRRTNDDGGQHSTTTITAFEAVAAVLWKCRTRAVMASPEAPAILVFVVNARKYLAGVNDGYYGNCSMMHMAMAKSGAVANGDIMDVVEIIRRAKERIPEQFGEGSDRMVRELSDGQQVDGYESLLYLTSWRNIGLEEVDFGSGKTARVMTYPQRMLFSLLEKTTPICFMLMPTKEGARVMSGCVTPDHVDAFQQQILKLNANYTAT

SEQ ID NO: 200107 - protein, 120 aa, Oryza sativa
  Clone ID: PAT_MRT4530_95609C.1.pep
MVVSVRSSHGHIIILAREGLVGGMSRGPSAGSTKTTRTMRCWLSPRGKAIRKSSWAKLDDVDRRVCHQAHYPDEPSLRAKAVKRSRRVLLELEAASAEGLGDTAPHGGLAPLMGWPKEFT

SEQ ID NO: 200108 - protein, 116 aa, Oryza sativa
  Clone ID: PAT_MRT4530_9560C.1.pep
MLTRAGGVGGRRAGKRRRWSATAAVAKVGRWRRWGRDQERQQLLQAGAEAASAAGEQRRRRRHRSPPAASIHAFATTVTVSAFPSLLRRHANLRFPFRRHTTGSISRPSRAYAAIR

SEQ ID NO: 200109 - protein, 892 aa, Oryza sativa
  unsure (1)..(892): unsure at all Xaa locations
  Clone ID: PAT_MRT4530_95610C.1.pep
TLAICAVGGDNKALANYLPMALADSTRSWLMGLPRRSIDSXESFEAXFIVNFQGTYERRSTHFDLYHVVXNMSLLDYIXHFSEARNKIPKVTDDVITATFQKGIRDKLLIGKFNRKPSXIVMKLFETTNSYAKAVDTVNASXRKSSRVAIGAPRRIXLNNQKDRKHKPEDLVATTSNXQSQRRPNHCDKVMNGQCLNHPNSKHRWPMTATSTKSAXKITNGEGTSGQNKNNGEGPSKIPGPSXNHIFGGPPAYESKRKQKSTDREINTIXPEVPQYLWWSEVAMMFDRSDHLGRVAHPEWYILVQDLVVHNVKLKRVLIDGGSALNILFTKTLDKMQIPRSKMKSSSAPFHRVVPMISSMLLGQISLPVTFGLGIISRQNICFEVADFEAAYYAILGRPALAKFVVVPYYTYLMLKMPSQQRVISLRSDVKQAVTSDKESCEMTQSHGRALDQQEVXLVASTSHEGELPAKKILKSRESDAKTKKIPLDQANPSKTTNSKDIFAWKPSDILGIPREVIEHSLNVKTDAKHIKQRLHLFAQDQRDAMKKEQSKLLAARFIKDVYHPNWLANPVLVLKKMGQWCICMNYTDLNKYCLQDPFGLPHIDQVVDSTAISDLLSFHDCYLGYHQISMKESDRLETSFITPFGEYCYITMPFSLKNSIATYQHMIQKCLQSXLGRNVEAYVDDVVIKMKEKDNLIADLEETFQNIRVFRMKLNPENCSFEVASGKLFDFMVSHCGIEAIPEEMNGMQNMKPPSTXKDIQKHTRCLSALSRFVSRLGEXRHALFQWTPKAKTFEDFKNFLMTPHMLASPYPQEPLPLYVSATSHVVSAVLDIKXEGHIQKVQRPIYFISDVLAGSKTRYAXDQKLLHGVLITVRKWAKYFQSHLDAMVRS

SEQ ID NO: 200110 - protein, 82 aa, Oryza sativa
  Clone ID: PAT_MRT4530_95611C.1.pep
TSDILFGGYALRKDQKPSPPMGSGNAPFKNAASFSSIKFFDAGGNAHPSIFVSDLYQIVTLSLLLKMMGSFMGDLAIFASSL

SEQ ID NO: 200111 - protein, 603 aa, Oryza sativa
  unsure (1)..(603): unsure at all Xaa locations
  Clone ID: PAT_MRT4530_95612C.1.pep
AVGGDNKALANYLPMALADSTRSWLRALKLVHRQLPRHLRETXTHFDLYHVVPXMSLLDYIXHFSEARNKIPKVTDDVITATFQKGIRDKLLIGKFNRKPSXIVMKLFETTNSYAKAVDTVNASXRKSRPSXNHIFGGPPAYESKRKQKSTDREINTIXPEVPQYLWWSEVAMMFDRSDHLGRVAHPEWYILVQDLVVHNVKLKRVLIDGGSALNILFTKTLDKMQIPRSKMKSSSAPFHRVVPMISSMLLGQISLPMPSQQRVISLRSDVKQAVTSDKESCEMTQSHGRALDQQEVXLVASTSHEGELPAKKENTLIIFLXDSKDIFAWKPSDILGIPREVIEHSLNVKTDAKHIKQRLHLFAQDQRDAMKKEQSKLLAARFIKDVYHPNWLANPVLVLKKMGQWCICMNYTDLNKYCLQDPFGLPHIDQHERVXPLGDLVYHPVRRVLLHHNAFQSEECXSHLPAHDSEMLAIXLGRNVEAYVDDVVIKMKEKDNLIADLEETFQNIRVFRMKLNPENCSFEVASGKLFDFMVSHCGIEAIPEEMNGMQNMKPPSTXKDIQKHTRCLSALSRFVSRLGEXGMPFFNGHLKPKPLKTSRIFL

SEQ ID NO: 200112 - protein, 917 aa, Oryza sativa
  unsure (1)..(917): unsure at all Xaa locations
  Clone ID: PAT_MRT4530_95613C.1.pep
DLYRVDWPTGFKSRGIEKYDGKTVXTLAICAVGGDNKALANYLPMALADSTRSWLMGLPRRSIDSXESFEAXFIVNFQGTYERRSTHFDLYHVVXNMSLLDYIXHFSEARNKIPKVTDDVITATFQKGIRDKLLIGKFNRKPSXIVMKLFETTNSYAKAVDTVNASXRKSSRVAIGAPRRIXLNNQKDRKHKPEDLVATTSNXQSQRRPNHCDKVMNGQCLNHPNSKHRWPMTATSTKSAXKITNGEGTSGQNKNNGEGPSKIPGPSXNHIFGGPPAYESKRKQKSTDREINTIXPEVPQYLWWSEVAMMFDRSDHLGRVAHPEWYILVQDLVVHNVKLKRVLIDGGSALNILFTKTLDKMQIPRSKMKSSSAPFHRVVPMISSMLLGQISLPVTFGLGIISRQNICFEVADFEAAYYAILGRPALAKFVVVPYYTYLMLKMPSXQRVISLRSDVKQAVTSDKESCEMTQSHGRALDQQEVXLVASTSHEGELPAKKILKSRESDAKTKKIPLDQANPSKTTNSKDIFAWKPSDILGIPREVIEHSLNVKTDAKHIKQRLHLFAQDQRDAMKKEQSKLLAARFIKDVYHPNWLANPVLVLKKMGQWCICMNYTDLNKYCLQDPFGLPHIDQVVDSTAISDLLSFHDCYLGYHQISMKESDRLETSFITPFGEYCYITMPFSLKNSIATYQHMIQKCLQSXLGRNVEAYVDDVVIKMKEKDNLIADLEETFQNIRVFRMKLNPENCSFEVASGKLFDFMVSHCGIEAIPEEMNGMQNMKPPSTXKDIQKHTRCLSALSRFVSRLGEXRHALFQWTPKAKTFEDFKNFLMTPHMLASPYPQEPLPLYVSATSHVVSAVLDIKXEGHIQKVQRPIYFISDVLAGSKTRYAXDQKLLHGVLITVRKWAKYFQSHLDAMVRS

SEQ ID NO: 200113 - protein, 94 aa, Oryza sativa
  unsure (1)..(94): unsure at all Xaa locations
  Clone ID: PAT_MRT4530_95614C.1.pep
RQQDLIRSGHIAHNIIQTRIEDSNVFATPQXNAVVAVTLIDTHIDKAPENMTLMLNKVKTMIVATAAQQENDAGASRRPKESNADSPRTLVGCH

SEQ ID NO: 200114 - protein, 106 aa, Oryza sativa
  unsure (1)..(106): unsure at all Xaa locations
  Clone ID: PAT_MRT4530_95615C.1.pep
MAAMHPPLTGSSSPSLSSPSLSSSSSSRRSSGKPARRCAVARERLFXRCRVWPPRATSIHVEATAAHVIVVKRPPAWEACPRSAAPSARRDPPHRRWRRRATHPHH

SEQ ID NO: 200115 - protein, 107 aa, Oryza sativa
  Clone ID: PAT_MRT4530_95616C.1.pep
IPIGVYVQRLPAKPQGRIHFFPGVFDDFHLYHPMEERKRPSQSKGPKYQVLPSGRPLVGPQHPRKFTLMHIRGSRHVKMMFNISPLLISFLKCWAQYIASVLQYDYE

SEQ ID NO: 200116 - protein, 457 aa, Oryza sativa
  Clone ID: PAT_MRT4530_95617C.1.pep
MAAPPPPRPQPHVMVLPFPAQGHVMPLMELSHRLVGLGFEVEFVHTDFNRDRVINAMANETGAIPDGIHMVSFPDGMDPAGDRANIAKLGDGLPAAMLGGIEEMIRSEGIRWVIADVSMAWVTELAATVGVHVALFSTYSAAVVAHRLQVPKLIQDGVLDEIGNVRRNEMIQLRPTMPPVLAVELPWVTLSGTPDGRRMVIQNVFKTNPTISSAEVIICNTFQDIEPGALALVPNVLPVGPLEAPATSRLAGHFWPEDTTCLAWLDEQDACSVVYVAFGSFTVFDMARVQELADGLVLSGRPFLWVIRQNFTNGAGEGWLEEFRHRVSGKGMIVGWAPQQSVLSHPSIACFVSHCGWNSTMEGLRHGVPFLCWPYFADQYCNQSYICNVWGTGVKLQADERGVVTKEEIKNKVEQLVDDKEIKARAAKWKHAACTSIAEGGSSHENLLKFVNLLREQ

SEQ ID NO: 200117 - protein, 798 aa, Oryza sativa
  Clone ID: PAT_MRT4530_95618C.1.pep
MALPITVLFLLFTLHIPASCKVTDTISAGETLAGNDILVSSNGKFALGFFPTSSKSSHNASNWYLGIWFNQVPKLTPAWVANGDEPVTGPTSPEATISGDGNLVILDQATKSIFWSTQADITANTTMVKLLDNGNLVLQNTSNSSVVLWQSFDYPTNTHLAGAKLGRNKVTGLNRRLVSRKNSVDPASGMYSYELTDNNGSTRFILAALNSSIPYWSSGEWNGHYFGSIPEMTGQRLIDFTFVNNDEEVYFTYTLLDNATIMRFMLDISGQTKIFLWVEHVQDWVPTYTNPKQCDVYGICGAFTVCEESKLPICKCMKGFSVRSPNDWELDDRTGGCVRNTPLDCGINRNTSMQDRFHPMPCVGLPSNGQIIEDVTSAGGCAQICLSNCTCTAYYYGNTGCSVWNDELINVKQLQCGDIANTDGAILYLRLAAKEVQSIKSSGRSIFIGVAITASVASFALALFLIAKIPRNKSWLLGHRRKNFHSGSGVIAFRYADLQHATKNFSDKLGAGGFGSVFKGLLNESTVIAVKRLDGARQGEKQFRAEVGSIGIIQHINLVKLIGFCCEGDRRLLVYEHMPNLSLDTHLFHNDATVLKWSIRYQIALGVARGLAYLHDSCQDCIIHCDIKPENILLDASFVPKIADFGMAKFLGREFTQVLTTMRGTIGYLAPEWISGTVITSKVDVYSYGMVLLEIISGTRNSSKEFATRDDYEYFPLLVAHKLLDGNAGSLVDQNLHGDVDLEQVERAFRVACWCIQDNELDRPTMSEVVQYLEGLLEVGIPPVPRLLQAIAGNPYSK

SEQ ID NO: 200118 - protein, 120 aa, Oryza sativa
  Clone ID: PAT_MRT4530_95619C.1.pep
MIIMPHILANNSCPLCPFQQHAYWCQPTSQQQTDANGYCTCCGEEAGWALDANGMGRAWGTYDADAHNNSRVPDRRAHARIGDSGSTTPAVRICGFYCNIADPSIGSRIIKFWRVTSGII

SEQ ID NO: 200119 - protein, 385 aa, Oryza sativa
  unsure (1)..(385): unsure at all Xaa locations
  Clone ID: PAT_MRT4530_9561C.1.pep
MGKASKGSRRGKKAWRANISTDDIEDFFEKQTRDAHAGAAAIPSLPSDSLFFVDKPASAASTSSAADAAAADVAPKDIPVQRKIEKKREKVLYHESVLKRNPYVQPVPSSLTTKKDKKKSKKKESKETQEAKIVPMEDDSGDKILDIWGEDVKGDHKAKKRSTASVIPAVEVEAPGCSFNPPFEAHQDSLAQAVADEMRKIYTKELGPKPVPLIVPGEAITEEDKFFLDADDGDEAVEEGDEDQAADALAVQRKTKTKRVTRVELNKRARRKERLRAEAEAKKMENLSKEIDSLPDIINEIAKEDEEKEKRHIRRTVAKQERLKSAPPRLGRHKFEPAPVQVLLTEVISGSLFNLGXCCNLARDRYKSIEKRGILAPSRKIRKQR

SEQ ID NO: 200120 - protein, 363 aa, Oryza sativa
  Clone ID: PAT_MRT4530_95620C.1.pep
MGALRRWLPCCCCCCRGGGGGGGGGSVGDGLVWDVALKAHASGDYSVAVAQANEALEDQAQVFVSPAATLVGVYDGHGGPEAARFVNKRLFSLIQEFAAQSGGISAEVLEKAFGETEEEFVASVQRSWPSQPRILTARAAGAAHGRKGKNRVVPERLSRDHNVADEDVRRELKELHPDDSHIVLNTHGVWRIKGIIQVSRSIGDVYLKKPEICKSNPMLQQTICPFPLRRPVMSAVPTIKTRKLRPGDQFVIFASDGLWEQLTDEAAVAIVAGSPRRGVAMRLVRAAQLEAARKKDVKYERIRTIEKGQRRHFHDDITVVVLFLDKCRGKAGRGDEIDGTDGPVDVFSLSPDDREDPTRPVLR

SEQ ID NO: 200121 - protein, 401 aa, Oryza sativa
  unsure (1)..(401): unsure at all Xaa locations
  Clone ID: PAT_MRT4530_95621C.1.pep
MGALRRWLPCCCCCCRGGGGGGGGGSVGDGLVWDVALKAHASGDYSVAVAQANEALEDQAQVFVSPAATLVGVYDGHGGPEAARFVNKRLFSLIQEFAAQSGGISAEVLEKAFGETEEEFVASVQRSWPSQPRILSVGSCCLVGAIEDGTLYVANLGDSRAVLGRRSAAGAAHGRKGKNRVVPERLSRDHNVADEDVRRELKELHPDDSHIVLNTHGVWRIKGIIQIKLLIDAYXVSRSIGDVYLKKPEICKSNPMLQQTICPFPLRRPVMSAVPTIKTRKLRPGDQFVIFASDGLWEQLTDEAAVAIVXGSPRRGVAMRLVRAAQLEAARKKDVKYERIRTIEKGQRRHFHDDITVVVLFLDKCRGKAGRGDEIDGTDGPVDVFSLSPDDREDPTRPVLR

SEQ ID NO: 200122 - protein, 68 aa, Oryza sativa
  Clone ID: PAT_MRT4530_95622C.1.pep
LPMMWPAHGPRRCAGRPPSGYAPSPCRRTYSLQSLIGSRDVGGELDHKIKTSRDQRRGEVLPQGRDFR

SEQ ID NO: 200123 - protein, 145 aa, Oryza sativa
  Clone ID: PAT_MRT4530_95623C.1.pep
MNTDAARRARRPTRWHGSGAPAVEEAEAAAWIRSGGGGGGGRGGRLDDGGDMDLEGVDDDNSTTAARQWDLEGVDDDDSTTAAARRRPRLSSPPMPSVVVLASETATDDIFPPPPSHFSSAHPLASPLPHRRLDSVARPVSYKPV

SEQ ID NO: 200124 - protein, 60 aa, Oryza sativa
  Clone ID: PAT_MRT4530_95624C.1.pep
VHSAPGVGAPTLDVVPARRAEVSRYSLPHAAVLADVAVAHPRCQHAGQDGEHDGRENELV

SEQ ID NO: 200125 - protein, 87 aa, Oryza sativa
  unsure (1)..(87): unsure at all Xaa locations
  Clone ID: PAT_MRT4530_95625C.1.pep
DMLDTLVTNKMGGXMIGPTRLWGTNNAEAKSPCWIAXQVPRSPSAYKHPARSEVARSFDVIHFGMGRDPGXXSLCQTQIPLTPLGNL

SEQ ID NO: 200126 - protein, 172 aa, Oryza sativa
  Clone ID: PAT_MRT4530_95626C.1.pep
MAENPLLDEVVAMYFHLVDNPDDARALLDDAHFNAAENDHEIAMVGIQLRHIQHQTNELMTQPMTDAEREAQRVQLEEDYRGIKVDADFLLENRRQLRQVVKMLVFIWTYAIIRRALRRFLPAVALTFVAGTAALAVYVELRRGGTVPAFEALGRIFTWLTSFFLLGYRVRL

SEQ ID NO: 200127 - protein, 34 aa, Oryza sativa
  Clone ID: PAT_MRT4530_95627C.1.pep
KARDIVQVMYITHSFRCDTYRCHNIFLSCVPLDC

SEQ ID NO: 200128 - protein, 38 aa, Oryza sativa
  Clone ID: PAT_MRT4530_95628C.1.pep
MSQPADAPIPLPLRSEPQANASSDGSDFISNNLLLNGL

SEQ ID NO: 200129 - protein, 1442 aa, Oryza sativa
  Clone ID: PAT_MRT4530_95629C.1.pep
MKLILMVAFQAMSLISISTASLQYNFYGSSCPNAEQTISNVVYGLIDADPSMAPALLRLHFHDCFVMGCDASILLDPTKANGSPEKTAIPLRGYDAVNKIKAAVEAVCPGKVSCADILAFAARDSVAKSGGFVYPVPAGSRDGNVSSAFSVFSSIPSPFFDAGELVQSFAAKGLTVDDLVALSGAHSIGTAHCSGFKNRLYPTVDASLDASYAAALRAACPDGSAADDGVVNNSPVSPATLGNQYFKNALAGRVLFTSDAALLTGQNDTAEKVRENAGDLTAWMARFAASMVKMGGIEVLTGARGEIFGIALGFNLLFEYDDLITGICFATVVPNLLPYAISHLGKKMVGTLNACIAGFALLCYVLGLLVSQPQIPLTTNVIFPKLSGESAYSLMALLGANVMAHNFYIHSSVVQGQKRSAFAVGALFHDHLFSVLFIFTGIFLVNHVLMNSAAADSTNTLLLTFQDVVELMNQIFVNPMAPTIFLVVLLFSSHIISLTSAIGSQVISQHLFGINLPLSGHHLILKAFAIVPALYCAKVAGAEGIYQLLIICQIIQAMLLPSSVVPLFRVASSRLIMGAHRVSLHLEILTFLAFLLMLFSNIIFMAEMLFGDSGWLNTLKGNTGSPVVFPSTVLITVACVSVAFSLYMAVTPLKSGSHEAELQQEWSVPSQKELLNTTQDREETCAGNVTYEEDQRSDVVPSPRIQPVDCLKSALDYIDSSDTAIESDHDSQHSTAHTSTAPESCHSPSFIPEESKSVVAVDWPEPLEPISNAIVAEESTVESVDSKSTGERDIEVEPALLMDNDKEAPNILESDNKSLGGNNPSCASDDGPPSLTFSRGKGSDAGNGSGSLSRLSGLGRAARRQLAAILDEFWGHLFDYHGKLTQEASSKRFDILLGLDVRTPSSTVRADSQANEIPKSPMVRDNLQGSAFLGSSRDLMSTKNEMSNLDLTYGLQMGNNIGSSAWSQGMQLPSTQLQSSSNSLLDQGARLNSNFSTPSYADNNQFYQPATIHGYQLASYLKQMNANRNPYSSMPLDPQRLPKSSASAVPTYVDSVMHARNQNLLASLGATPSQIAATSRIAYSKKYHSSPDISALIAASRSALLNESKLGGGTIGSQSYLSRLASERSQYTNSVARPAAPLAFDELSPPKLPGDIFSMQQSPNPSARSLWAKQPFEQLFGVSSAELTKSEFNPAGRSGGMTKDDFSYKESEAKLLQSLRFCISKLLKLEGSGWLFKQNGGSDEDLIDQVAAVEKLLQQGTSDNQLLLGDTQQPPCDKADIQYMRVLPNCGDDCIWRASLVVSFGVWCIRRVLDLSLVESRPELWGKYTYVLNRLQGILDPAFSKPRSALSACACLHRDIRVLNSLRHSSLVATNSIPRQIRGSFTTASVVLEMIKDVETAVSGRKGRSGTAAGDVAFPKGKENLASVLKRYKRRLSSKGQQ

SEQ ID NO: 200130 - protein, 82 aa, Oryza sativa
  Clone ID: PAT_MRT4530_9562C.1.pep
STSFRKDKHMQTDTDFMAEILTCEHRSFFDGSLTRRRATHREILEWLFELYIHHCKLTKPSRGPYRLRERNPLTWIAHQGKS

SEQ ID NO: 200131 - protein, 646 aa, Oryza sativa
  Clone ID: PAT_MRT4530_95630C.1.pep
MWGLEEEKFVIWAKNIKERQPTTTSEWAALGGAAARGGRRLTGATGGGRRVEASGSGEWRRRGYTGVPQAAARRRGGVGTGGWRGRAGQPAGKRRRAVGEAARRRLDCQRPARPQGGRAGRTGGGRGRAGQPAGKRRRAVGEAARRRLDCQLPSSQRGRKAGGQAAGRKRPAAPATPWAVGHSHSTGAAGQATASLLDCYFALAIGFLIEQGDAFRGHDESDTSLSKEKVTAVIMDEIGNRNFSVLIDESRDVSIKEQMGVILRFVNDEGKVMERFLGLQHIERSIDAILVEMNHRFSEVSSELLVCMSSLNPRNSFSNFDVDKLVRLAEIYAEDFLVGDLMLLRTQLGNFISNVRRSKEFLGCKDLAKVAELMAMSLISISTASLQYNFYGSSCPNAEQTISNVVYGLIDADPSMAPALLRLHFHDCFVMGCDASILLDPTKANGSPEKTAIPLRGYDAVNKIKAAVEAVCPGKVSCADILAFAARDSVTKSGGFVYPVPSGRRDGDVSSAFSVFSSIPSPFFDADELVQSFAAKGLTVDDLVALSGAHSIGTAHCSGFKNRLPVSPATLGNQYFKNALAGRVLFTSDAALLAGRNDTAEKVRENAGDLTAWMARFAASMVKMGGIEVLTGARGEVRGFCNATNS

SEQ ID NO: 200132 - protein, 152 aa, Oryza sativa
  unsure (1)..(152): unsure at all Xaa locations
  Clone ID: PAT_MRT4530_95631C.1.pep
IRCDTYQVSDDSTHVSGDTCKVSCDTCKVSDDFYHVSRDTREVSCXVSDNFYYVSGNTNEVSDDTYEVSGVRGMGHVGAGGTGGXGTATPTVGTGVVTPAGDGDGVGGGRARRRGPLTATVGNGRGDGGGRARIDGFGHVAWVRIAFAEEEH

SEQ ID NO: 200133 - protein, 1466 aa, Oryza sativa
  Clone ID: PAT_MRT4530_95632C.1.pep
MKLILMVAFQAMSLISISTASLQYNFYGSSCPNAEQTISNVVYGLIDADPSMAPALLRLHFHDCFVMGCDASILLDPTKANGSPEKTAIPLRGYDAVNKIKAAVEAVCPGKVSCADILAFAARDSVAKSGGFVYPVPAGSRDGNVSSAFSVFSSIPSPFFDAGELVQSFAAKGLTVDDLVALSGAHSIGTAHCSGFKNRLYPTVDASLDASYAAALRAACPDGSAADDGVVNNSPVSPATLGNQYFKNALAGRVLFTSDAALLTGQNDTAEKVRENAGDLTAWMARFAASMVKMGGIEVLTGARGEIFGIALGFNLLFEYDDLITGICFATVVPNLLPYAISHLGKKMVGTLNACIAGFALLCYVLGLLVSQPQIPLTTNVIFPKLSGESAYSLMALLGANVMAHNFYIHSSVVQGQKRSAFAVGALFHDHLFSVLFIFTGIFLVNHVLMNSAAADSTNTLLLTFQDVVELMNQIFVNPMAPTIFLVVLLFSSHIISLTSAIGSQVISQHLFGINLPLSGHHLILKAFAIVPALYCAKVAGAEGIYQLLIICQIIQAMLLPSSVVPLFRVASSRLIMGAHRVSLHLEILTFLAFLLMLFSNIIFMAEMLFGDSGWLNTLKGNTGSPVVFPSTVLITVACVSVAFSLYMAVTPLKSGSHEAELQQEWSVPSQKELLNTTQDREETCAGNVTYEEDQRSDVVPSPRIQPVDCLKSALDYIDSSDTAIESDHDSQHSTAHTSTAPESCHSPSFIPEESKSVVAVDWPEPLEPISNAIVAEESTVESVDSKSTGERDIEVEPALLMDNDKEAPNILESDNKSLGGNNPSCASDDGPPSLTFSRGKGSDAGNGSGSLSRLSGLGRAARRQLAAILDEFWGHLFDYHGKLTQEASSKRFDILLGLDVRTPSSTVRADSQANEIPKSPMVRDNLQGSAFLGSSRDLMSTKNEMSNLDLTYGLQMGNNIGSSAWSQGMQLPSTQLQSSSNSLLDQGARLNSNFSTPSYADNNQFYQPATIHGYQLASYLKQMNANRNPYSSMPLDPQRLPKSSASAVPTYVDSVMHARNQNLLASLGATPSQIAATSRIGTMMAERSYYVPSTLDGNENAGSSAYSKKYHSSPDISALIAASRSALLNESKLGGGTIGSQSYLSRLASERSQYTNSVARPAAPLAFDELSPPKLPGDIFSMQQSPNPSARSLWAKQPFEQLFGVSSAELTKSEFNPAGRSGGMTKDDFSYKESEAKLLQSLRFCISKLLKLEGSGWLFKQNGGSDEDLIDQVAAVEKLLQQGTSDNQLLLGDTQQPPCDKADIQYMRVLPNCGDDCIWRASLVVSFGVWCIRRVLDLSLVESRPELWGKYTYVLNRLQGILDPAFSKPRSALSACACLHRDIRVLNSLRHSSLVATNSIPRQIRGSFTTASVVLEMIKDVETAVSGRKGRSGTAAGDVAFPKGKENLASVLKRYKRRLSSKGQQ

SEQ ID NO: 200134 - protein, 88 aa, Oryza sativa
  Clone ID: PAT_MRT4530_95633C.1.pep
MEAAILVRRGFARRQPGQGLPATAADGGGFARLQLAAGGFARRWPGQELLATAVDGGGFARRWPGEGLPAIAADGNDTDGGGFGFVQR

SEQ ID NO: 200135 - protein, 729 aa, Oryza sativa
  Clone ID: PAT_MRT4530_95634C.1.pep
MEEARGPWMPKGAARHPGGVGTGGGRARAGQPAGKRRRAVGEAARRRLDCQRPARPQGRRAGRTGGGRGRAGQPAGKRRRAVGEAARRRLDCQLPSSQRGRKAGGQAAGRKRPAAPATPWAVGHSHSTGAAGQATASLLDCYFALAIGFLIEQGDAFRGHDESDTSLSKGKFKEMVDWYKDKKDLTKACAEKVTAVIMDEIGNRNFSVLIDESRDVSIKEQMGVILRFVNDEGKVMERFLGLQHIERSIDAILVEMNHRFSEVSSELLVCMSSLNPRNSFSNFDVDKLVRLAEIYAEDFLVGDLMLLRTQLGNFISNVRRSKEFLGCKDLAKVAELMVQTGKNRTYHLVYRLIELSLILPVATASVERVYEYFADIYAIAGFHSTLMAKQYYATSSLVIGYALCSSLLAIINKYAVTKFGYPALLTALQYLTSAGGVWILGKLGFLCHDPFNLENAKKFAPAAIVFYLAIFTNTNLLYHANVDTFIVFRSLTPLLVAIADTAFRKQPCPSKLTFLSLVVILGGAVGYVITDSAFSLTAYSWALAYLVIITTEMVYIKHIVTNLGLNTWGFVLYNNLLSLMMAPFFWFLTGEYKSLFTAIESRGERWFQVDAFVAVALSCVFGLLISFFGFATRKAISATAFTVTGVVNKFLTVAINVLIWDKHSSPFGLICLLFTIAGGVLYQQSVTKKGITAPQHEPESSEQTKDDNEGIELDEEKQSLVPTSKSSNA

SEQ ID NO: 200136 - protein, 103 aa, Oryza sativa
  Clone ID: PAT_MRT4530_95635C.1.pep
LARVVLGFGWAGTGEASKEVIHEARLVFLGCVGLATAGRRVILAGRRRGWGTLVVPLSRVRVRALVAHIFPSERMCYLLLCLSSELNCHANSMIRSSKPSFSR

SEQ ID NO: 200137 - protein, 77 aa, Oryza sativa
  Clone ID: PAT_MRT4530_95636C.1.pep
QMQGCSGPIHDPMHVCVLWSEGCVSLVAGGGPQHQECAEELTASAVESGDYRPPSSSDGGLIISRSWPCGRARRGLL

SEQ ID NO: 200138 - protein, 39 aa, Oryza sativa
  Clone ID: PAT_MRT4530_95637C.1.pep
ERARGRPPITECWSTRSCTGSDRYPAWKVCSECNAQNVR

SEQ ID NO: 200139 - protein, 93 aa, Oryza sativa
  unsure (1)..(93): unsure at all Xaa locations
  Clone ID: PAT_MRT4530_95638C.1.pep
RPSGGGGGNLPFXVIXSPFKKKKVLVVAGVACNRGSAVLRFPIGVLVLGVRLALSLHYAMVLCKIRLGTFGWASISSFMNKGSSSRFALAREE

SEQ ID NO: 200140 - protein, 58 aa, Oryza sativa
  unsure (1)..(58): unsure at all Xaa locations
  Clone ID: PAT_MRT4530_95639C.1.pep
LVSSKVCXIVAIIXVXRXVXLSVSYMQRLTIGPLSISKTCXHVSVYNLAITVMVVLTN

SEQ ID NO: 200141 - protein, 55 aa, Oryza sativa
  Clone ID: PAT_MRT4530_9563C.1.pep
HQGNKLWHQWITAKLLIRLQLIGKAGTATARYRSRNSRVRHTPPSALLHNYVRSI

SEQ ID NO: 200142 - protein, 118 aa, Oryza sativa
  unsure (1)..(118): unsure at all Xaa locations
  Clone ID: PAT_MRT4530_95640C.1.pep
PTWGGGAAQEITTAATTTAPRPPAAEAGSIRGRSYTVDDQAATGAETAGRLTTTEPACAHRVVTAATLAPSERPGRMVGRIQVAAPCQEFAYIHYHDLQDXPHFNGWWDVVSSGPVVA

SEQ ID NO: 200143 - protein, 116 aa, Oryza sativa
  Clone ID: PAT_MRT4530_95641C.1.pep
SKIPVHSTNQHTDLPQFTLVQFYLLTNTFHSPWSICSDCRMLQYEIPADSSLLTMHSWDGKIYSETISKQASNKTYLEKKLLELLFFYSIGLERPQTVLVHEQYQHSSGNNDVCQF

SEQ ID NO: 200144 - protein, 69 aa, Oryza sativa
  Clone ID: PAT_MRT4530_95642C.1.pep
PERRTEQRLHGVAGGERWQISRCDQNRKCRVEHGEANGGTFAGCDGRCQRWRQRERQGWSCPLQALLHV

SEQ ID NO: 200145 - protein, 52 aa, Oryza sativa
  unsure (1)..(52): unsure at all Xaa locations
  Clone ID: PAT_MRT4530_95643C.1.pep
PRPPXPPSGGEARVGDDPRETGPCEPCRVVNPWRWCFRPFSTTRTATCCARA

SEQ ID NO: 200146 - protein, 57 aa, Oryza sativa
  unsure (1)..(57): unsure at all Xaa locations
  Clone ID: PAT_MRT4530_95644C.1.pep
QGKFSVSCNLAYMRGYSLKIDDLDDSQILHIIYYLFFIMVLCILCIMDXSRCITGSL

SEQ ID NO: 200147 - protein, 129 aa, Oryza sativa
  unsure (1)..(129): unsure at all Xaa locations
  Clone ID: PAT_MRT4530_95645C.1.pep
MIERNIVAGSVHGCRHHRRIQPPMLPPPPDLPREKGERGRREPLPPDPPATAVDVATILGXRLRPPPTRRHCEREREMRGRGRRDGAERAATNEGGETGRRARPQPLVGERTPPPPLVGSXEGHRRSRL

SEQ ID NO: 200148 - protein, 61 aa, Oryza sativa
  Clone ID: PAT_MRT4530_95646C.1.pep
MIFPRDKINTIPLEYSRVKCYNGISVRLRINSATIIYQKYFCAIAGNYISSNIVKKYQQSP

SEQ ID NO: 200149 - protein, 98 aa, Oryza sativa
  Clone ID: PAT_MRT4530_95647C.1.pep
LGRCPKPLLFFFRGFQTSQEAFPWPLKGSFMGLLGGSGQDWHPIGLFPRYFCQLRGFFSLFLKPFGGVPPSPWGFPFGRNDPFRPGAKLLSFPPVLRC

SEQ ID NO: 200150 - protein, 252 aa, Oryza sativa
  Clone ID: PAT_MRT4530_95648C.1.pep
MSNDTNSKDGTPRRNVPSCHNTSAVVPVQEMSITFSTAGALPPHPQILLEERAAGGTAVGKRGGGLRAERRWANAAAVCGRRRELEESLQSTVAMTMYNKSEIASPYQPSYSIRYENGDRLSPEHEKAILERLLPYHPQYEKKIGCGIDYLTVGLHPEFENSRCLFIVRKDGEQVDFSFWKCIKGLIRQKYPMFRVLRHTVRSKGTPLHFGEHDPTREKFGEKNDMRYKQIHPYDGSWAVSHSLPVYLDRLV

SEQ ID NO: 200151 - protein, 604 aa, Oryza sativa
  Clone ID: PAT_MRT4530_95649C.1.pep
MVRELRLDSFYARLRAAAAASAADASSPLLILPSAADADALCALKVLTHVLSADSIRFSIYPVASAAAAASLLASFSASHPLCLLLINWGAHRDLRAVLPPAATAFVVDSHRPIHLHNLSAANDRVVVLFTTDDEHTADLSYDFDVSSLADASDLSAQGEADDHLRVAEEDEDSDASDSDSDGEGGRRKRRRLSDDAEADGDPERLFGKLRREYYRLGTFHGKPSGCLMYELAHALRKNTNELLWLACVSLTDQFVHERITNERYQAAVMELEQHINGSGNLDPSGVGAVVTLKDGTKIRAPEASRIAYEDEPRLMLLREWSLFDSMLCSSYVATKLKTWSDNGLKKLKLLLARMGFPLADCQKRFQYMSMEVKRKMRDEFDRFLPEYGLTEFYYRSFLRVHGYRSKVSAADVVYGVTALLESLNAESKDSKGSSAAEQFWVAYSALSLSNVDQLRKGMQSAIEIQRAILRQGSSAITKTGFIRSAKKFRWVKLDDPVDTDKLCQPQALTKFCFFLMDALRERGARMKPLICACLAREPEKVLVVGVCGKPRLGAVKGNAFGNAFRSAAEEIGADYFHDMFESSWIVLDVVAVSSFMIRLTEKL

SEQ ID NO: 200152 - protein, 70 aa, Oryza sativa
  Clone ID: PAT_MRT4530_9564C.1.pep
MEMLMNVDDGGRMSLDGSGDGSEIVMAATITPAASPFDLPKEDVVVPPHVRLLPDTGVLWTRSPAAEITS

SEQ ID NO: 200153 - protein, 124 aa, Oryza sativa
  unsure (1)..(124): unsure at all Xaa locations
  Clone ID: PAT_MRT4530_95650C.1.pep
AQAKYVGSTTAGLXPRIMGIGPTVAIPKLLAKHGITLADCDVVEINEAFASMAVYCRDNLGLDAETKMNPRGGAIALGHPLGATGTRQIVTGLSECRRTGKKILLTSMCIGTGMGMAGLFVNEQ

SEQ ID NO: 200154 - protein, 92 aa, Oryza sativa
  Clone ID: PAT_MRT4530_95651C.1.pep
TSCAAVSHHLGPASHAKAVVADAYLAVPNRDLDTAPAWTLSADSVLLTTIKGITCLVLPMWSCICSRDNMSSPYTVAGALLLSMGILLAAVI

SEQ ID NO: 200155 - protein, 144 aa, Oryza sativa
  unsure (1)..(144): unsure at all Xaa locations
  Clone ID: PAT_MRT4530_95652C.1.pep
GPESPGTPHVVLPNIXCHPTRGSFMCLVRGPLERAPRYACAQADKASQLNRNYTHYSTERTPIMADPTFASSIDTGDPESRDGPMDALKATLGTDPVATVEELMRTMTVADRTERPGSSDTVVALNKMMKLTHQKMTGANDRTE

SEQ ID NO: 200156 - protein, 502 aa, Oryza sativa
  Clone ID: PAT_MRT4530_95653C.1.pep
MEMMVQKQRHEEGEEERGGLCAREIKELDFFSAAGAGAGRRDDDDVLRADGISSSHAGFMVSTALDLLTAVNDGDHHEEKKGQSNIHQSKQMDAAATTVEGELRQAGEENRRLRRRLEELTSSYGALYHQLVQAQQLHTKHQQQAPIAGVQLLDALAAASPASHRRRAAAAVDGDRTADSDGGEGDENVSPSLGSKRPAAAATLTRLTPESGSGGENNGGGEQAPAAEMAPCRKARVSVRARSEAPMISDGCQWRKYGQKMAKGNPCPRAYYRCTMASQCPVRKQVQRCAKDKSILITTYEGTHSHPLPPAAAAMAKTTSAAAAMLLSGPAVSRDALFAAHHHVVAPPPFFHHPYAGSTMATLSASAPFPTITLDLTQPPPTTTTTAAAAMLQLHRPYAFSSLPFSMYGAGGGSHRPPVVLPPPSSVVETMTAAITRDPNFTTAVAAALSSIMAGGGAQARTPPRGGSDAAGDINGGGGADHATAGARAAAAATQPCGTSPT

SEQ ID NO: 200157 - protein, 828 aa, Oryza sativa
  Clone ID: PAT_MRT4530_95654C.1.pep
MSTRLELLVVFVFIVAPALAATKPSYIVYLGGRHSHGDDGGVISPEEAHRTAAESHYDLLGSVLGDREKARDAIFYLYTKNINGFAARLEAEEAAAVAERPGVVSVFPDRGRRMHTTRSWQFLGLERPDGSVPPWSPWEAARYGQNIIIGNLDSGVWPESLSFNDRELGPIPNYWKGACRNEHDKTFKCNSKLIGARYFNNGYAKVIGVPLNDTHKTPRDANGHGTHTLATAGGSAVRGAEAFGLGGGTARGGSPRARVAAYRVCYPPFNGSDACYDSDILAAFEAAIADGVHVISASVGADPNDYLEDAIAIGALHAVKAGITVVCSASNFGPDPGTVTNVAPWILTVAASTMDRAFPAHLVFNRNRVEGQSLSPTWLRGKTFYTMISAANAAVPGYPPADALLCELGALDGKKVMGKIVVCMRGGNPRVEKGEEVSRAGGAAMILVNDEASGNDVIADAHVLPAVHINHADGHALLAYINSTKGAKAFITRAKTVVGVKPAPVMAAFSSQGPNTVNPEILKPDVTAPGVSVIAAWSGAAGPTGLPYDQRRVAFNAQSGTSMSCPQVSGVAGLIKTLHPDWSPAAIKSAIMTTATELGNDMRPIMNSSMSPATPFSCGAGHVFPHRAMDPGLVYDLTVDDHLSFLCTIGYNATALALFNGAPFRCPDDPLDPLDFNYPSITAFDLAPAGPPATARRRVRNVGPPATYTAAVVREPEGVQVTVTPTTLTFESTGEVRTFWVKFAVRDPAPAANYAFGAIVWSDGNHQLDQEYSNSYQISYVYESSMSLTDKMRKLKELLHKSENRICADCSSPDPKWASANIGVFICI

SEQ ID NO: 200158 - protein, 48 aa, Oryza sativa
  unsure (1)..(48): unsure at all Xaa locations
  Clone ID: PAT_MRT4530_95655C.1.pep
QAGNLNYXYQPPSPQVQYXQAGSAQPQFVPQYNQFEPMPQQSQGTPQQ

SEQ ID NO: 200159 - protein, 107 aa, Oryza sativa
  unsure (1)..(107): unsure at all Xaa locations
  Clone ID: PAT_MRT4530_95656C.1.pep
AVTKICVLLHDQQNPHLDLIMRILCYVKGTLNTGLHIGIGPXQSLTAYSNTDWACCLDSWCYIFVSCVFLSDDLVYWSSKRKTMVSHSGAKTEYRAMAHAAADQCSR

SEQ ID NO: 200160 - protein, 47 aa, Oryza sativa
  Clone ID: PAT_MRT4530_95657C.1.pep
LEKNSACHPTKYRMHSFAFPTINLHIYDHFQYQRTNSIQEKSVFSYY

SEQ ID NO: 200161 - protein, 49 aa, Oryza sativa
  Clone ID: PAT_MRT4530_95658C.1.pep
MCGQVVADPRTTMGAVVVADCNGCRNGLGPAWSGRQRTTADAIRARTAW

SEQ ID NO: 200162 - protein, 52 aa, Oryza sativa
  Clone ID: PAT_MRT4530_95659C.1.pep
GNIHSYEFLHNMCRVLTELSIYKIAKTFENFLNFKSFDKVKKKRKKAIVTRD

SEQ ID NO: 200163 - protein, 536 aa, Oryza sativa
  Clone ID: PAT_MRT4530_9565C.1.pep
MGREAPSPPPARDAGSSSGQKRKAFTMVDQDGGSEDTWLKLSLGPVIYTDATNVDDSPVTTTFPKELPPPPAAVGPPIFMASATTSLIDHGKEAARMATDALFNGDATGSSSLHLQRHHESSSARHPTQRRSTASTTSSTSGSAGDVPAITGDGINGGSDDNNGAAGMVNNDRVLVNNPPYPWATNRVAVHHSLVELSRRGIFTIKGEARCRRCDVRKEFVYDIEAKFRELEDYLRRNCMSMNDRASERWKNPIVPNCDGCGQQNCMRPVIAAEKERINWLFLLLGETLGLCTLDQLKFFCAHTNQHRTGAKDRDSVVATATRSRDLYKRGGDRRRRRAMRRLLLTGFPASSALTFRPRIRFFPRANPRSMAAAGPACCAPAAAAAAASSSASASAAAAAGDGGGGAQKPWLLIGLGNPGRMYKGTRHNVGFEMIDAIAEAEGISVSSKQFKSMVGKGLIGDVPVMLAKPQTYMNASGIGRPTGKLDAIGFVLRSFTKEEQEERFRLLRDSNEECTIAVVVRSTQNSCTKHKDHSP

SEQ ID NO: 200164 - protein, 73 aa, Oryza sativa
  Clone ID: PAT_MRT4530_95660C.1.pep
VDSRGSPKRKSSRQARLSRPPRLATPIAEANSAHARVCSSPTITSTGFTQTLNWYWAAEIEEKRIHEEQTHFE

SEQ ID NO: 200165 - protein, 129 aa, Oryza sativa
  Clone ID: PAT_MRT4530_95661C.1.pep
SLQNLDWIRYGNASYVDERHRHRYEVNPEMVPEFEKAGLSFVGRDESGTRMEIIELPTHRFFVGAQFHPEFKSRPGKPSPLFMGKSAFHLYLILPETYMLFIYLFKPNDQFRLQSRIVKLNNMPEFQAK

SEQ ID NO: 200166 - protein, 121 aa, Oryza sativa
  unsure (1)..(121): unsure at all Xaa locations
  Clone ID: PAT_MRT4530_95662C.1.pep
EVLCAYGMRSRIXKESKFGMSGYVKFVSCTRGFPRVIRTSSMSLVRGFRLLSSGINRGGATHRQHYDGQTGRXPAVRPAKSTGVAGDLRAVRPIXSTPVRPTAQARSDRQDSFGQTDLRRI

SEQ ID NO: 200167 - protein, 90 aa, Oryza sativa
  Clone ID: PAT_MRT4530_95663C.1.pep
MEKAKQLQRPLLLEGFTGWGGGAWGGSQRSRSRSRSRLPRMARGLAEQHRWVPHVSERARERGTGTDEDSSRESEREREERFSRHVVGSP

SEQ ID NO: 200168 - protein, 43 aa, Oryza sativa
  Clone ID: PAT_MRT4530_95664C.1.pep
MEFRRSSGPSSTHHVLYRDQLALQQRILNPRRLTASGQVAGFR

SEQ ID NO: 200169 - protein, 104 aa, Oryza sativa
  Clone ID: PAT_MRT4530_95665C.1.pep
MSKTKRHQQEISMQQYDHQIAQQESGGCHNEGVDGCRFSPTGLSGGALTLDMGGGHARKYTPFPNAQCINPRPRRRANLMWKNGKSRIKSEKVIKRIWKYAYQK

SEQ ID NO: 200170 - protein, 271 aa, Oryza sativa
  Clone ID: PAT_MRT4530_95666C.1.pep
MESQVLRDAGAAVLTGATALAVLRFWEEVGNRALLDQKLCRKLVHITVGLVYFLMWPLFSADDVYAPFLASIVIAFNIIKVTLIGLGIVKDDGVINSMTRNGDPRELLKGPLYYACAMTLATVIFWRTSPISIAVICNLCAGDGVADIAGRRLGRIKLPYNPDKSYAGSIAMFLAGFLASILYMCYFHLFGFVEESWTMVIAFGVTSLAAAIVESLPISTRLDDNLTVPLASVLVGVLVFYYIGARNLCCMSADSSDISALVQNQMVLGRF

SEQ ID NO: 200171 - protein, 44 aa, Oryza sativa
  Clone ID: PAT_MRT4530_95667C.1.pep
KDSERENKMFPALKVALACVQANPKGRPSIRHVPKTLDPLNGSG

SEQ ID NO: 200172 - protein, 64 aa, Oryza sativa
  Clone ID: PAT_MRT4530_95668C.1.pep
TRGEGRRRSDRRRGAVVTTAEKKKAVASRDCRRQGDCRSRSPRRWLQYPPLHFGTIVPPIADQV

SEQ ID NO: 200173 - protein, 58 aa, Oryza sativa
  Clone ID: PAT_MRT4530_95669C.1.pep
VAPVVAAASAGRYLLDTAGFDCCAGARDSSVDAPALARDAGVGGRHCLRRCSARSLYQ

SEQ ID NO: 200174 - protein, 252 aa, Oryza sativa
  unsure (1)..(252): unsure at all Xaa locations
  Clone ID: PAT_MRT4530_9566C.1.pep
GEAHRRAARTGLRRRIATEEGWTGRPARRPTRVDRGXEIAISPAEWGEVGRRERRDSKIESRPSRARARAGERGKWARGRGHEGDVGDVARETQERGAVTVAGRGGASWRRETGPTGGPHLPQRRRYFTTEWQALGWLAAGTPGQPLITDTSRFFSSHAGGQPLITDTSRLFSSPLPTCGDGRRGGSGGRPSARSGGRGGSGSGGGPRATSAGSRLPDPATSPTASPPIAYLLLHPVSSGGQRSAAFTLPIL

SEQ ID NO: 200175 - protein, 268 aa, Oryza sativa
  Clone ID: PAT_MRT4530_95670C.1.pep
MSGGLPGFHNAPVSRAVVVAAALFSVAFGFRGRFLDLGLSYEASLPAPTRQLMRLPLPSLPMQNVYGKLRIWKLITSLFAFSSTPELIFGAALLYYFRVFERQIGSNKYSVFIVFSTAVSVLLQILSLAYLKGPSLNPLTSGPYGLIFASYIPFFFDIPITTKFRIFGLRLSDKSFIYLAGLQLLFSSGWRSIIPGLSGILAGLLYRLNIFGIRRLKGVHPTTEDPMESSIATLVSMGFDRGSAIRALALTNYDVNLASNILLEAQSM

SEQ ID NO: 200176 - protein, 80 aa, Oryza sativa
  Clone ID: PAT_MRT4530_95671C.1.pep
RLVKAQVLLQILNESTCSLSFSLHVHTEMFPSKGLLSDLKLQGHALGLGLCFGAGPALGFGRAGFPLVWACPFFLAPSSR

SEQ ID NO: 200177 - protein, 95 aa, Oryza sativa
  Clone ID: PAT_MRT4530_95672C.1.pep
MDHAWEKGKWRLGAEGHDAVVKEQRGGVDPTNACARRADGTAPGRRLLVVIVGWGDRVTRCPSLLPNPPPPLLSPPPPPPPLPEHVAVAPAIALL

SEQ ID NO: 200178 - protein, 50 aa, Oryza sativa
  Clone ID: PAT_MRT4530_95673C.1.pep
HQRELNFYYSCPTLINRVICFFYIKKQLNFVGQKKKKKKKKKKKKKKKIM

SEQ ID NO: 200179 - protein, 67 aa, Oryza sativa
  unsure (1)..(67): unsure at all Xaa locations
  Clone ID: PAT_MRT4530_95674C.1.pep
NTSLFCTLCPHSCTPGKNFPIGHPSQIAPGQARLTXEFFGNRLPEKKLXLVDMSILLILLSPEPGCH

SEQ ID NO: 200180 - protein, 46 aa, Oryza sativa
  Clone ID: PAT_MRT4530_95675C.1.pep
KQPSRVFLLPLATGIIFCVSKFANPQKSFVQISHPLNIAISIDQDR

SEQ ID NO: 200181 - protein, 174 aa, Oryza sativa
  unsure (1)..(174): unsure at all Xaa locations
  Clone ID: PAT_MRT4530_95676C.1.pep
GCRLQPPSTTIFIDAATTVGALTSLTVIVATPPDPPLPSPLPPLSPELRAXPSSPPSLSSPPPPENSPSPVVVALPXPDAPPQPXPPSDAPPQPSAPPDAPPQPXPPPDSPPQPXPDSPPPPSPPPDPPSLSPLPPPSLELPAAAQAHRHRHSRWAEENDQWATRGASERRATM

SEQ ID NO: 200182 - protein, 151 aa, Oryza sativa
  unsure (1)..(151): unsure at all Xaa locations
  Clone ID: PAT_MRT4530_95677C.1.pep
MAGGGPRACRRRPRSGHGGRRRRVLAXPPSPTALSSLPAPMPSGGGILWTWRRSGGXGSGASSPSSKTTAAAPWIXKMVAAVARPRPPSSPATAAWIGAGPEVVGVDGVPARESRSASSARRVLVLASLINGPRAQLFERGSHSFAGNRRS

SEQ ID NO: 200183 - protein, 202 aa, Oryza sativa
  Clone ID: PAT_MRT4530_95678C.1.pep
LANFYTAVYPPDPSKSGESSAAAEVPPLAPAPEPVTGIPVGMFYPAPPMERVVSCRMAPAAGGAWTTALCDCSDDCNTCCMACWCPCIPVGQIAEIVDRGSSSCALNAVLYCLVFHVSAGMCQWVYSCAYRARLRAAYDLPETPCSDCLVTFCCQTCSIAQMHRELKNRGLDPNLGWEVNSRRTMTMTPPQHQAMEGMTTRS

SEQ ID NO: 200184 - protein, 174 aa, Oryza sativa
  unsure (1)..(174): unsure at all Xaa locations
  Clone ID: PAT_MRT4530_95679C.1.pep
FFFFFFFFFFFFFFFFFFFFFFFFFFGNPGPKKNNGGGRVKKETGKXXXXXPKKKXNPPPFXXSXPXEKXXXXQKPXXGDXGXPFXXKXKXFXQKIWXXPPQKKXFIXKGPXPXXPPPXFXXXFXPFPXPPGEKKTRXXFPPXXXPFPPXRKGXFFFPPXXPPXXFXFKTPXPX

SEQ ID NO: 200185 - protein, 43 aa, Oryza sativa
  Clone ID: PAT_MRT4530_9567C.1.pep
PSWKCLVEPVSGSLVQDIIHLACLTRFREQKNIVCMVTCLSSP

SEQ ID NO: 200186 - protein, 105 aa, Oryza sativa
  unsure (1)..(105): unsure at all Xaa locations
  Clone ID: PAT_MRT4530_95680C.1.pep
MSDVVPGATVGDMGSGPGGLEVPRHAPRALAPPCPEALAQLPCGGGNVRCHPTDALSFGAPSXKDDHHKSSPIYEGMTRLSPVSGGGRRWVPLKDKLRLSFRAKG

SEQ ID NO: 200187 - protein, 101 aa, Oryza sativa
  Clone ID: PAT_MRT4530_95681C.1.pep
IPLPHRYKVPDFSKFSGQDNVSTYEHVSRFLAQCGEASANDALRVRLFPLSLSGSAFTWFSNLPYNFINSLADLEKQFHSYFYSGVHEMKLTDVTSIKQKH

SEQ ID NO: 200188 - protein, 95 aa, Oryza sativa
  Clone ID: PAT_MRT4530_95682C.1.pep
MQHKRALEANSPDIASSPLGQKIRDSSTTPDLPGGGPIHIGKHACIHSNNHRVIDGTPYLILLHYADQLMRSTRWHVAVYSGKHGVFYANTTTSG

SEQ ID NO: 200189 - protein, 217 aa, Oryza sativa
  Clone ID: PAT_MRT4530_95683C.1.pep
MLFHYYTSFVECNRQGETLVNEGVIIMKDIVETELGKVGTGVLNVGLPAYVILIALLRSTKANASILLGLLLSVGSVLTSNKRPKHTLYEWFFDPLLVIKEQIKAENFTEEEEKYLKMRVLLIGGPDRVKGSLPDVPSLDERKKAEIDAFARRLQGITKSISRYPTAKRRFDILVKQLLSELERTVLTRHDNCNAWFCKYNQSVKSMFHGVRNCYDT

SEQ ID NO: 200190 - protein, 212 aa, Oryza sativa
  Clone ID: PAT_MRT4530_95684C.1.pep
SKVPKMTSEENKAVTPNEPIEASSSGSKRKRGRPRKSEYGMHEKPYSVQPIQSVPPLHSTEDSSNIQQDGIQINHKSGGSVGPSANLVKTSLSQASTYTSASLQSNSVKDGIVGKYFVGKMSNKVPGFSLITVKVKDNLVLKGWIPDESDLRPITPKDDLAPDLPMLRPSQVRKRPSTIYKQAAGPIPVPLEDVTFAKPLQMRKPVEKSVAK

SEQ ID NO: 200191 - protein, 94 aa, Oryza sativa
  unsure (1)..(94): unsure at all Xaa locations
  Clone ID: PAT_MRT4530_95685C.1.pep
YRGHVGQGESAAAALXGASSFSIVAPRAHSSSSMSGTSRLAPSLAMAPHSTSGVAARSTSNTGXPHSTSGAHLPVLGPRRERSDEWDPPRVACT

SEQ ID NO: 200192 - protein, 157 aa, Oryza sativa
  Clone ID: PAT_MRT4530_95686C.1.pep
TRAEPRFIPSLSMFPTFDVGDRIVAEKVTYYFRKPCINDIVIFKSPPVLQEVGYTDNDVFIKRIVAREGDVGEVHKGKLVVNGEVRNEEFILEPPSYDMNPVQVPENSVLVMGDNRNNSYDSHVWGPLPSKNILGRSIFRYWTPGRIGSTTTDCLIP

SEQ ID NO: 200193 - protein, 295 aa, Oryza sativa
  Clone ID: PAT_MRT4530_95687C.1.pep
MQWGTSLRCEGWRSRADEETVDGMVKCEKWIRDDEERSEQSKTSWWLNRLIGRTKKVSVDWPYPFVEDCMFVLTLTAGLEGYHVNVDGRHVTSFPYRTGFVLEDATGLSLNGDLDVQSVFAGTLPTAHPSFSPQKHLEMLPIWQAPPLPDEPIEIFIGILSAGNHFAERMAVRKTWMSAAQKSSNVVARFFVALNSRKEVNAELKKEAEFFGDIVIVPFMDSYDLVVLKTVAICEYGVRVVSARYIMKCDDDNFVRLESVKDELKKIPRGKSLYVGNMNYHHKPLRTGKWAVTYE

SEQ ID NO: 200194 - protein, 84 aa, Oryza sativa
  unsure (1)..(84): unsure at all Xaa locations
  Clone ID: PAT_MRT4530_95688C.1.pep
RDGARHRAQGDGDGMAGDATATARGGSGREADGDGRAARQRQGAGLEGVAARXRRRLAAHGDGDATATACGTMGREGGTVAAAR

SEQ ID NO: 200195 - protein, 83 aa, Oryza sativa
  Clone ID: PAT_MRT4530_95689C.1.pep
YALSREQQNRKGGKMYIQDKVEEYADEVFDLLDNGAHMYFCGLKGMMPGILDMLKRVSEEKGRNFDEFVENLKHKNQWHVEVY

SEQ ID NO: 200196 - protein, 162 aa, Oryza sativa
  Clone ID: PAT_MRT4530_9568C.1.pep
MLRRRQATVAACTATATAPACAARSSDMRGDGGGSGEKRGDGGGSGVCDGSVEKPGDGDCSGVRGDGSRARVNGWSPAVRRGGGRASISCAQATADGGRGAGDNGSSSAVKAGGDESSGTASKRYKSWSKKATTTKGINVFYSKTNTVKLGVKSEGAHKNRT

SEQ ID NO: 200197 - protein, 161 aa, Oryza sativa
  unsure (1)..(161): unsure at all Xaa locations
  Clone ID: PAT_MRT4530_95690C.1.pep
LIDSPSTINIIFFFALLAIAACTASAQVDAVTQIYRQYQLHPHLMLQQQMLSPCGDFVRHQCTTLTTPFFQSPVFQLTNCQVMQHXCCQQLRMIPQQSHCQDINSVQAIVHQLHLQQFAXIYFNHTQIQGQPMLYLILSPICGIYPTYNTAPCNIPTVPGI

SEQ ID NO: 200198 - protein, 171 aa, Oryza sativa
  unsure (1)..(171): unsure at all Xaa locations
  Clone ID: PAT_MRT4530_95691C.1.pep
MSPSGRLPAPPRAPRVRPRLALVPSPEAAESTPGTRTRKIGGAASVFSLFNLKPQNKFWSESVIRTEFDDLEGSTSRDSSKKALLNFTRAGNIANYMSLAEVDSIYLSVPVNFIFIGFDGQGGHEFKLGPEXLERWFTKIDHIFEQTRIPPVGEVLTPFYKTSVKKLKQYD

SEQ ID NO: 200199 - protein, 42 aa, Oryza sativa
  Clone ID: PAT_MRT4530_95692C.1.pep
RPCPKRWYHVPRSWLNRGGNLLVVLKKYGGDLAGVSLATRTT

SEQ ID NO: 200200 - protein, 292 aa, Oryza sativa
  unsure (1)..(292): unsure at all Xaa locations
  Clone ID: PAT_MRT4530_95693C.1.pep
MGRLSLLLVVFTAAAAVVGLAGASFRDECDIPWEPQNARFTDDGNGLSLSLVSNYSGCMLRTKKQFIFGSVSTLIQLXPRQFGRHRHHILHIVGXGDNHDEIDFEFLGNETGQPYTIHTNIYANGVGDKEMQFKPWFNPTDGYHNYTVSWTACMIVWYIDGTPIRVFRNYEKSNGVAFPMKRPMYGYSSIWAAEDWATQGGRVKADWSKAPFVANYHGLNINVCECSTTSGGGNSCAAKCASTYNSKSSVCQLSDSELARMRKVQDEYRIYNYCVDPKRYNGSVPVECSLPQ

SEQ ID NO: 200201 - protein, 44 aa, Oryza sativa
  Clone ID: PAT_MRT4530_95694C.1.pep
MGRMHGGPARSGEVGVTPAAHEADAERTWSPGPTGTTGNVKVFG

SEQ ID NO: 200202 - protein, 1351 aa, Oryza sativa
  Clone ID: PAT_MRT4530_95695C.1.pep
MFCAINMILPMNDINIISLYLQPSPTFTISPKPSPSQASTVPRHSADTSNEKHMSLITIICIFIGALIAVLVIAMFICFCKLRKGKRKVPPVETPKQRTPDAVSAVDSLPRPTSTRFLAYDELKEATNNFDPSSMLGEGGFGRVFKGVLTDGTAVAIKKLTSGGHQGDKEFLVEVEMLSRLHHRNLVKLIGYYSNRTGLGASRPLDWDTRMRIALDAARGLAYLHEDSQPCVIHRDFKASNILLEDDFHAKVSDFGLAKQAPEGCTNYLSTRVMGTFGYVAPEYAMTGHLLVKSDVYSYGVVLLELLTGRRPVDMSQPSGQENLVTWARPILRDKDTLEELADPKLGGQYPKDDFVRVCTIAAACVSPEASQRPTMGEVVQSLKMVQRSEFQESIPTPPARPNVRQSSTTYESDGTSSMFSSGPFSGLSPFETENISRTAFSEDLHEGRASESLTTHLKAGGASDLTSFIGRVRCSPAVALALVVAAAAAAAATAKLYSPADRILVNCGSTTDGLDAEGRRWVADATNDTWLTDSGKSSIMAAADELETMLPSSIPYMTARVFTMDTVYNFTVNPRDRHWIRLHFYPSSYNGLEPQDFRFSVFTTTGYTLLHNFSVYFTTKALTQAYLIREYSLPRVPEGHFGVTFSPSPMMNVTYAFVNGIEVISMPDMFNNPATMVGFADQTADVSAAAFQTMYRLNVGGAYIPPSNDSGLTRPWYDDTPFVQGPLRGLVYNAGPHFHIKYPSDAAEYAAPPEVYLGGRSMGRDQRLNQNSNLTWSLHVECNFTYVVRLHFCELQLIHGNQRVFDIYINNRTAQTDVDVLEMATERGVPVYKDYAVRLSNDTADEHLWVAVHPSVMLRPQFYDAILNGLEVFKVNNTGGSLASPDPVPYKLLAEKELGWGGPPEFSTDNPANMASVMGGTAGGAAAAGIVAAICVVVYSNKRSKKLGGGGADSHTSAWLPLYHSHTSGKSSGHITANIAGMCRHFSFAEIKAATKNFSNDLAIGVGGFGVVYRGVVDGDVKVAVKRSNPSSEQGITEFQTEVEMLSKLRHRHLVSLIGFCEEDGEMVLVYDYMEHGTLREHLYHNGGKPTLSWRHRLDICIGAARGLHYLHTGAKYTIIHRDVKTTNILVDDNWVAKVSDFGLSKSGPTTLNQSHVSTVVKGSFGYLDPEYYRRQQLTDKSDVYSFGVVLFEVLMARPALDPALPRDQVSLADYALACKRGGALPDVVDPAIRDQIAPECLAKFADTAEKCLSENGTERPTMGDVLWNLESAMHFQDAFDAAAGRPVPALDAAAGSSSHLDDGSTASINTLATSSTSHPHEPCVDVVLEPDDVVAERATFSQLVQPTGR

SEQ ID NO: 200203 - protein, 298 aa, Oryza sativa
  unsure (1)..(298): unsure at all Xaa locations
  Clone ID: PAT_MRT4530_95696C.1.pep
VEMLSRLHHRNLVKLIGYYSNRESSQNLLCYELVPNGSLEAWLHGTLGASRPLDWDTRMRIALDAARGLAYLHEDSQPCVIHRDFKASNILLEDDFHAKVSDFGLAKQAPEGCTNYLSTRVMGTFGYVAPEYAMTGHLLVKSDVYSXGVVLLELLTXRRPVDMSQPSGQENLVTWARPILRDKDTLEELADPKLGGQYPKDDFXVRVCTIAAACVSPEASQRPTMGEVVQSLKMVQRSEFQESIPTPPARPNVRQSSTTYESDGTSSMFSSGPFSGLSPFETENISRTAFSEDLHEGR

SEQ ID NO: 200204 - protein, 81 aa, Oryza sativa
  Clone ID: PAT_MRT4530_95697C.1.pep
CHGARPLVTAGAGGAPAPRSPSSVSGEEALRQHELYGDGLPVLAPASGMAAGNKEEDMTSLRMSSCMLDKFKRRKNGTMGE

SEQ ID NO: 200205 - protein, 56 aa, Oryza sativa
  Clone ID: PAT_MRT4530_95698C.1.pep
HLLRIFSVSFYVCHCYLCMHISHGSCSHILFSSFFFLLASFIILYLNNCPALHKKQ

SEQ ID NO: 200206 - protein, 101 aa, Oryza sativa
  unsure (1)..(101): unsure at all Xaa locations
  Clone ID: PAT_MRT4530_95699C.1.pep
SYFTNLYYRGIAGFFCSTAPLHLKDPLPFNFLVYLHKNAIELPFLSSFLPFSLLPHPPPEAGHGRFHLRXWQXAAAESRRRRRLTAARSGDRPSPQQRGHA

SEQ ID NO: 200207 - protein, 541 aa, Oryza sativa
  unsure (1)..(541): unsure at all Xaa locations
  Clone ID: PAT_MRT4530_9569C.1.pep
MPLHLASSPAAAAKVCAGVRASPRHLLPRALDHQSRRVLSLSSSSSAGRAAGVRAMAAAEAGASTATQAKSSARVKPALGSWAVLSVLPVLGHRLLASGFSIISTGGTASSLEAAGVNVTKVEQITNFPEMLDGRVKTLHPSVHGGILARRDQEHHLKALNEHGIGTFDVVVVNLYPFYNKVTSGVISFEDGIENIDIGVYRKXLEILKGKSKTLRILEAKRSGKGMLSLRQVSGGWLAQESDDLTPEDITFTTVSERAPQDSELSDAKFAWLCVKHVKSNAIVIAKNNCMLGMGSGQPNRLESLRIAFRKAGEEAKGAALASDAFFPFAWNDAVDEACQNGIGVIAEPSGSMRDGDAVDCCNKYGVSLLFTGNLISLTFCNKIHGDNKISLRQVSGGWLAQESDDLTPEDITFTTVSERAPQDSELSDAKFAWLCVKHVKSNAIVIAKNNCMLGMGSGQPNRLESLRIAFRKAGEEAKGAALASDAFFPFAWNDAVEEACQNGIGVIAEPSGSMRDGDAVDCCNKYGVSLLFTGVRHFRH

SEQ ID NO: 200208 - protein, 99 aa, Oryza sativa
  unsure (1)..(99): unsure at all Xaa locations
  Clone ID: PAT_MRT4530_956C.1.pep
TSTAASPARRRTPAAASTRRRTSPASPSPPAYGVVDEAEPGXRRRGSCSRPPARRSARRRRRRRGSSPXRRSAGRRRTRWPRPPRTPAAPPPPSPSSPP

SEQ ID NO: 200209 - protein, 925 aa, Oryza sativa
  unsure (1)..(925): unsure at all Xaa locations
  Clone ID: PAT_MRT4530_95700C.1.pep
MGSDKQSGSPLLGTLKMKSVRTILTHTYPYPHEHSRHIMTAVIIACLFFISSDNMHTLIHKLDNNIKWWSINFCKCITKLLGEVILSLVLXIAGTRPGIWTIFQNCTIXSLEDYFCICFSHCGNLAVHKSKSFSRNSDPNLLAFLENEKGTTWISNFLRMNELKDQICSSWFAPVGSASDYPLLSKWVIYGELVCSGSCAGPSDEISPLYSLWATFVGLYIANFVVERSTGWALTHPSTVLEEEKLKRQMKPDFLDMVPWYSGTSADLFKTAFDLMVSVTLFVGRFDMRMMQAAMKRTTDETQNDDLLYDYFNEREDLWFDFVADTGDGGNSSYTVARLLAQPSIQTVIGGSMHTLPRGNLLLIGGDLAYPNPSSFTYEMRFFSPYEYALQPPPWYRAEHIALDKPEVPLGISKMKDYDGPQCFIIPGNHGGWFLPQKKSYFALRLPQGWWVFGLDLALHGDIDVYQFKFFAELCRNKILLIHYISEVLQIGENDSVIVMTHEPNWLLDWYWKETTGKNVSHLIQDYLNGRCKLRLAGDLHHFMRHSANQIDNPTSVQHLLVNGCGGAFLHPTHVFKNFEQFSGATYECKAAYPSFDDSSGIALGNILKFRKKNWQFDTIGGFIYFILVFSMFPQCNLGHILNEETWSGRLGSFSNTIWSALLYIFEHSYVSSVGSLTLLLASYSFVPSKLSRRKRAIIGGLHVLAHLTAALLLMLLLELGIEICIRNHLLATSGYHTLYDWYRSMESEHFPDPTGLRARLEQWTLGLYPACIKYLMSAFDVPEVMAVTRINICKNGMMSLSRSVLMMYYTSVFIYFWIFSTPVVSLIFGSYLYICINWFHIHFDEAFSSLRIANYKSFTRFHIKKDGNLEIFTLAVDKVPKDWKLDPKWEAEERRPHQLSHHRKHPSKWRSSSSPDPVTSIQLT

SEQ ID NO: 200210 - protein, 47 aa, Oryza sativa
  Clone ID: PAT_MRT4530_95701C.1.pep
MRAQAPTYEPPAHRNDVSTNPPQQLAGTQDNGATVTSLGVRGGATTT

SEQ ID NO: 200211 - protein, 68 aa, Oryza sativa
  Clone ID: PAT_MRT4530_95702C.1.pep
MDDFEEHGISSREDSDCSEANCAISDYVPSKDATGEHSAGKDNSSAESESNRVEVQQSSDSAINKMEV

SEQ ID NO: 200212 - protein, 306 aa, Oryza sativa
  Clone ID: PAT_MRT4530_95703C.1.pep
MAMVQYSENIKYDEEFFVNSRDNKLFTCRWTPHKQEPKAMDQYSENIKYDELHKYSDTAARLVRAGYAVYGIDHEGHGRSSGQRCYIPNFGDIVSDCANFFTSICEKPENREKKRFLYGISMGGGVALLLHRKEPTYWDGAVLLAPMCKIPDDMRPHPIAVSALKMVCAVAPSWRIIPTPDIIDKVCKDPEMRKQVRSNPYIYRGKLPLKTCHELLMVSLDIEKNLHEVTLPFLVLHGGDDIVTDPSVSKLLFEEASGRDKTFKLYPGMWHALTAELPDDVERVYSDIISWLDERSDCAGSVPETF

SEQ ID NO: 200213 - protein, 58 aa, Oryza sativa
  Clone ID: PAT_MRT4530_95704C.1.pep
TSAKLGKIRVVRKAIAKYLTVINQRNRERVRETLKGKKYYPIDLRFKKTRALRGLSKS

SEQ ID NO: 200214 - protein, 74 aa, Oryza sativa
  Clone ID: PAT_MRT4530_95705C.1.pep
GLLSRQDFGNTKRGGYQARKVDGFRDKVFYAGSGLLNQQVMPHSCPGIDPAECIIDCMIWVNIVPLLAPGPLLI

SEQ ID NO: 200215 - protein, 83 aa, Oryza sativa
  Clone ID: PAT_MRT4530_95706C.1.pep
PLVQNEGLEGSGFSRFPGWFSGNFKCCSLKPFSLLGCLTLLWGGYVEGVITPLNLGVVLCERKKEGKGKKKKKRKPQKFKKTP

SEQ ID NO: 200216 - protein, 130 aa, Oryza sativa
  Clone ID: PAT_MRT4530_95707C.1.pep
EGYERPASLHPPFGTPESSSGSRNSDAARAGNNHSTKKIVDRKNDSVRMNNPGKGSIRWPVPIEDGASPVKSERGLVLDMRQNHVNAARHPNQVSSQAKEYENQQKLRKATLTSSLGSAGDWNRDRNKRM

SEQ ID NO: 200217 - protein, 391 aa, Oryza sativa
  unsure (1)..(391): unsure at all Xaa locations
  Clone ID: PAT_MRT4530_95708C.1.pep
RMPPRKQTSHKSKHQRDRSPTPSSHDDLDSDWSGREDAVPQVARVAWADTLPPRRSTQALGGGGDGEGSSHQPQTPPHQPNVPTGPFRIHTPKRDPAVIRQVYDWKRKTEVVAPRRDEDPRPLRRTATDSRFWTLFQQDFDESVIKSKAHPTVPMQWINXEELQAHDDPVLNFVIANCELMGIRSFVTLQQNWCSEVIAQLYATVFFDPYCAMHWMTQGSYYYVSCPRFVEIWGFDVCSLLNLPDMHDLPIPANTNLLPLYTPNDPNVVLGKVDGLKPYFACLNRMFCRSFVPKDGDASSINHLSRTVLLRFNPXPHRFHVLHFVWEEIRMASIQYKKGLVYAPHIMRMIETVTQLQFHHDVTHSQLHLRLVKAVRLAKTQLLVSSSTESR

SEQ ID NO: 200218 - protein, 139 aa, Oryza sativa
  unsure (1)..(139): unsure at all Xaa locations
  Clone ID: PAT_MRT4530_95709C.1.pep
LPEGINRPITRSFGAQLLKKAQENAVGVNKIVVQNPVRKEPAPKSARSYLVPIIPPRPAPAPXVNENKKPSKSEGTGSSGSGGGSAHKYSRKKVVNTLTSGLTARSKHSCGITEKPKEVVEDIDKLDGDNQMTCGPHHF

SEQ ID NO: 200219 - protein, 98 aa, Oryza sativa
  Clone ID: PAT_MRT4530_9570C.1.pep
GDCSGVRGDGSRARVNGWSPAVRRGGGRASISCAAAAQATADGGRGAGDNGSSSAVKAGGDESSGTASKRRARPPPSLTGGAHLSSPTSRRARRPPVP

SEQ ID NO: 200220 - protein, 59 aa, Oryza sativa
  Clone ID: PAT_MRT4530_95710C.1.pep
KNPSQRKYPPKPWSNVQVFILQNVPPVGGIGLFCQLSFTSAKGITHRAMLFLGLSSWEL

SEQ ID NO: 200221 - protein, 44 aa, Oryza sativa
  Clone ID: PAT_MRT4530_95711C.1.pep
MAGSVEASACDVKANDDMVAEKAVMKLATRRFLLPKTHQLSMLI

SEQ ID NO: 200222 - protein, 171 aa, Oryza sativa
  Clone ID: PAT_MRT4530_95712C.1.pep
MAVGAAAAVMGMRMAATKECDVAAASLAEFHASPAGVCGLVESGATAVPPSCHRSSFRQATAVRARRHLHRCDRRPSTAAAAAVGWGWWTVPQIFYGRIQLGGQPHQYEELHQYWPEEPHQYTHGEGYHCMQGTMSHHYNMDNVRNNEWADRDDERTVWDRSNLYVSMPIS

SEQ ID NO: 200223 - protein, 1126 aa, Oryza sativa
  unsure (1)..(1126): unsure at all Xaa locations
  Clone ID: PAT_MRT4530_95713C.1.pep
WTGKIKNTRDNILIITSYTANHAITRLIDSGSTTTFLSPKVVHKAHLDISNHEPIPVTIANGGTLFTEAQCVDQPYEIQGVQFVSTFKVLDIKGYDVIFGCDWILQHSPLSLDLKNRQLSLLLNGTQEVTLSDLISQGAVGALFMVQPLTCAAAELSSTHSPVISKVLADFADVFAEPQDLPPSRDCDHTIPLLSDAKPVNVRPYRLPHHKKNALEDLVQQLLSSNTIRPSVSPFSSPAILVKKKDGSWRLCIDYRQLNAQTIKNKYPIPVIEDLLDELHGAAYFSKIDLRSGYHQIRMHPSDIYKTAFSTHLGHFEYIVMPFGLTNAPATFQALMNKILAKYLRKFVLVFFDDILIFSRTLDDHALHLQLVLQLLRDNNLFAKPSKCVFGQQHVEYLGYIISAQGVATDPEKIAAVQNWPIPTTVTQLRGFLGLAGYYRRFIKHFGIICRPMFNVLKKNEFQWGPDQQQAFEALKLKLSQAPVLALPDFTQPFVLETDASGYGIGAVLMQGGQPLAYFSKSLGIKAAAFSTYDKEALAILEALKKWKHYFLGSSLLIRTDQASLKYINEQRITDGIQHKLLIKLMSFDYKIEYRKGKENKAADALSRMAPPHNIQALNVVVPEWITQVLASYNLDDKCKLLLTKLSVNAQAQPPFSLQGGLLRYKDRLYIGKDLVLQHQLMETFHASPLGGHSGERGTYHRLKLIFYWPGMKSAVINFIKECPVCQKNKTEHVHIPGLLQPLPIPELAWTHITMDFIEGLPKSDNKDVIWVIVDRLTKYAHFIALSHPFTSEHIVDLFKTHFYRLHGLPTVIISDRDRLFTSNTWKQVFNAAGVKLNFSSAYHPQTDGQSERVNQCLETYLRCLTFTKPRKWSSLLDQAEWWYNTNFHTSLNMTPYQALYGQKPPMIGEALLPSTLLEGFRNRQQAKDALLDTVKASLDKAQARMKHYADANRTERTLEVGNMAYLKMQPYRHNSLGLHSSLKLHSRYYGPFRVIEKIGSVAYKLLLPXHSQIHPVFHVSQLKRHAGRKAIPEPGLPLIDSYGNILTAPVAVLERRLIPRNNAPVVQWKIQWENLPSEAATWEDASFITKVFPNFTPXGHGSFRGEGKIKSDSENDKKKLVVKKK

SEQ ID NO: 200224 - protein, 118 aa, Oryza sativa
  Clone ID: PAT_MRT4530_95714C.1.pep
MSSNPVGVDNTFRRKFDKEEYLERARQREREEKEEARKGKEKGPPVQRQPLKHRDYEVDLESRLGKTQVATPIAPLSQQAGYYWKARECVVKDSANYLDHINGKKHQRALGMAMRVER

SEQ ID NO: 200225 - protein, 78 aa, Oryza sativa
  Clone ID: PAT_MRT4530_95715C.1.pep
MADAVAAAAEFGPRQKMTLDADLVQVLTDGDAVRMEELLMGREGCGSDDGGYRRTDALQVSINVGAAALRAAAPRQKS

SEQ ID NO: 200226 - protein, 138 aa, Oryza sativa
  unsure (1)..(138): unsure at all Xaa locations
  Clone ID: PAT_MRT4530_95716C.1.pep
MVSLRAAIVLVVAASSVAVAFSHAEGNEGPDFTYIEGAMDGPSNWGKLSPEYRMCGEGRSQSXDSTXNTKTVVPRSDLDTLDRNYNAVNATIVNNGKDITMKFHGEVGQVIIAGKPYRFQAXXWXAPSEKXSTASVSV

SEQ ID NO: 200227 - protein, 205 aa, Oryza sativa
  Clone ID: PAT_MRT4530_95717C.1.pep
MSFSSSMSKQQVLEVAGDEVGGGGGEEVMELIPGLPEEVAEKCLLHLPFLYHRLFRTVSSTWNRFLTVSPAKFPSAAAASVSLSLPFLFAFAFDPASRRLQCQALDPFSRRWLLLPPVPGGAAAAGSFAVVGLPRRGEIYVIGGVVEGGDKAVRSVAVYSAARNGWEEAAGMGTARGYMAAGEVGGRLVVAGEDGEAEVFDPEEG

SEQ ID NO: 200228 - protein, 60 aa, Oryza sativa
  Clone ID: PAT_MRT4530_95718C.1.pep
SNHHQFASFICIIVSTKQDQSNNKKNKKKKMMMMRLRDYLLFQPMNTNARSIESMSLARA

SEQ ID NO: 200229 - protein, 140 aa, Oryza sativa
  unsure (1)..(140): unsure at all Xaa locations
  Clone ID: PAT_MRT4530_95719C.1.pep
RRSRHQQTTVLPRCTCLRXSGGWYDPSHRRVIRTAAIANLRPXMKEGQGYPGXGEGMSHVLVKIHQNTGVGYYASQRPEPVYIARVLCICSLAKHSTNRGLRTSPSVPGRTGKGGPARSPSEEPHAPSVCISNLRFRMLI

SEQ ID NO: 200230 - protein, 328 aa, Oryza sativa
  unsure (1)..(328): unsure at all Xaa locations
  Clone ID: PAT_MRT4530_9571C.1.pep
LLALLLPPLLLATGAATAAAAAAVAAAAASCCCRWPWWRRXLEELGSDPSCGGRRRWRLATAAGDGGWXRRQRQTTADGGGGSSCWLRRLVTAAXQTAVGGGTVAXGGRRHGSLGRLAEGVADDCIWPTRQRLEEGLETGLAQRGAADGSGGWLGARGAGGGDGGRLGVRGAADGGRPDWCERHIRWRRPAXCERRGRRWRRRPRSEEELPMNVAWSSAHEGWPAGGVGVVVPHVGRGXVVVEYRCRVISYVFLCWSSSGRSXFSGGWSGVSLLPILCVGAIGVWVVVYFFXFFLVTTLQGCNLVIFFCSINTTCETLKKIDIARISV

SEQ ID NO: 200231 - protein, 70 aa, Oryza sativa
  Clone ID: PAT_MRT4530_95720C.1.pep
EVLNECNFIHCVVKVLPYATVHCAFCRMHVCASQILSCLSQCSRLYSALVPLIGYILALVLECRHSMYAV

SEQ ID NO: 200232 - protein, 294 aa, Oryza sativa
  Clone ID: PAT_MRT4530_95721C.1.pep
MPFSEHVRHRCRIQITYKGQGGEINGWIATIQRAAIRVPATPLPSFSLPRLASLNLSRWLGGDDVAEFEWEEIEKIGKIRKTRLIFWIKRTRPDGAVGCPARSLASALSTASIVRQRIGMSHVTLASREITQAHAYPVRDRSQCVTGHRPQTTVLPRCTCFRRSGGWYDPSHRRVIRTAAIANLRPLMREDRVIPVSDEGTRQVLVKIHQNTGVGYYASQRPEPVYIARVLRICSLANHSTDQGLRTSPSAPGRTGKGGPARSPVIEMMPHSNELNSGSSDHNRDEPIESVIGM

SEQ ID NO: 200233 - protein, 74 aa, Oryza sativa
  Clone ID: PAT_MRT4530_95722C.1.pep
WFALPKAFCGGFLKAFFFGFGGPVFWPKIFWYWGGLFVPPNKRPILAFFKVQFVPFRLGKPKFCGKKGPGARSF

SEQ ID NO: 200234 - protein, 114 aa, Oryza sativa
  Clone ID: PAT_MRT4530_95723C.1.pep
LSSLPSPPSRSLERARRGVERPAGGAGDGAGSSRLAERAGLRPPHWPAGGPGERLTEQATVRGAVGLRSRRAAGRRAAGEEEAVAARYTPSAPRCVRGRRRHHLKCLVLAVERP

SEQ ID NO: 200235 - protein, 54 aa, Oryza sativa
  Clone ID: PAT_MRT4530_95724C.1.pep
FGFFLPISISAWQLFALSSSQQHLAHTFLTPTPTGETLKPRLLNIKFKNSLVLP

SEQ ID NO: 200236 - protein, 500 aa, Oryza sativa
  Clone ID: PAT_MRT4530_95725C.1.pep
MAGRQQLVVVGMVVVMVMMQWTGGAAARHHHHHHHHKKSYEEVFDRQEADRVQRLPGQPAELGFRQFAGYVTVNETHGRALFYWFFEAASDVATKPLVLWLNGGPGCSSLGYGALEELGPLLVNNNDTLIINPESWNKEANLLFVESPAGVGFSYTNTTTDLAHFGDNLTAHDAHAFLVNWLERFPQFKGHDLYIAGESYAGHYVPQLATKILHFNKKKKEHDDDDRIINLKGIMIGNAAIDSSSDDRGLVEYAWDHAVISDEIYAAIKGNCTFPDDGNETDKCNTAWNGFFTAMGDIDIYSLYTPSCTAALNGTTTITNGTRSRFADKVLRLRRGLPYNTYNPCVDYRVIDYLNRGDVQAALHANVSGGIPYSWAPCSDALTNWTDAPPSTLPDIAALVRAGLRVWVFSGDTDDRVPVTSTRYALRKLKLKTVRPWKQWFTSDQVGGYTVLYDGLTFVTIRGAGHMVPMITPVQARQLFAHFLAGDDMPANPILAPTPP

SEQ ID NO: 200237 - protein, 88 aa, Oryza sativa
  Clone ID: PAT_MRT4530_95726C.1.pep
PVLQPQCCPQLRLVGPQFPFPALCSVQAIVQQLQLQQGGVVFFGQTPAPAPALLAFNLPSLCGIFPNSSLAPRGLPPLGGVWDLIVIV

SEQ ID NO: 200238 - protein, 60 aa, Oryza sativa
  Clone ID: PAT_MRT4530_95727C.1.pep
WGRPEASAHASGPWVCMMSKTSRSDSWQIATLDNCHACPPRRDNKLATSRRITFMYGVLY

SEQ ID NO: 200239 - protein, 95 aa, Oryza sativa
  Clone ID: PAT_MRT4530_95728C.1.pep
LFFSIVFFFMFSSPATSFLIFLYGLLFVVLFTSSNSIWFICILFIVYLFDIYLFSLYCIISFLLNWYALFLYYRTSSLSFILIGSVFFSPLIVFI

SEQ ID NO: 200240 - protein, 49 aa, Oryza sativa
  unsure (1)..(49): unsure at all Xaa locations
  Clone ID: PAT_MRT4530_95729C.1.pep
LFRFSPVDRXLVVSQAGGLHLLLIGRLLFPILATLCHHQGKIVTKAKSS

SEQ ID NO: 200241 - protein, 43 aa, Oryza sativa
  Clone ID: PAT_MRT4530_9572C.1.pep
IQKKNIQSIDSLLLLYCSLITVHPYMILGILVYTCTNNVIACC

SEQ ID NO: 200242 - protein, 109 aa, Oryza sativa
  unsure (1)..(109): unsure at all Xaa locations
  Clone ID: PAT_MRT4530_95730C.1.pep
FFFFYXLFFXQKCISYLXYCLLDNCAGNSTSCHRSGHQVHSIHAAHRCNSSPLHAGPHGGHPQGQAGSITSMWSACLCIQAAKISARISCAIIPSASLHSCAIXILAHM

SEQ ID NO: 200243 - protein, 488 aa, Oryza sativa
  unsure (1)..(488): unsure at all Xaa locations
  Clone ID: PAT_MRT4530_95731C.1.pep
HEEAAQLPPRVVPGSRCSDPDXRPESSLKAKPPSPAASRRPPPRAGLIAVAPPASMGDCVVVENGHPVPKEEDAPVVAVERLPEGAGKPREEGSRGQRKQGGIRREPSFSRWCKDCSAMSNAPPGGASPASAASDDDSEEFELPLLPSDSGGGGGSHLPMDIEAGAAARSDDLPISPWLIAKVIALIASWYTLSTCLTLYNKEMLGKHMWKFPAPFLMNTVHFTMQAVASRVIVWFQHRGLEGAASAMTWRDYFLRVVPTALATALDINLSNISLVFITVTFATMCKSAAPIFILLFAFLFRLEKPSFNLLGIILIVSFGVLLTGLRNPFTLMSYVTPVMAITTAVLSIAMDPWHDVRASHFFDNSTHIIRSSLLMLLGGALAFFMVLTEYVLVSVTSAVTVTVAGIVKEAVTILVAVLFFNDTFTWLKGLGLGIIIFGVSLFNLYKYHRFKKGHRNKNCDKNPQTSSGASKYVILDDDDMENQGNSG

SEQ ID NO: 200244 - protein, 77 aa, Oryza sativa
  Clone ID: PAT_MRT4530_95732C.1.pep
ALQALYRTQWCIKTTISVLAVLAVITGRVHSRLWVRCSSSCKYSLSRHARVKVHASQGGVAIRYCHCLGRDKEEGNL

SEQ ID NO: 200245 - protein, 68 aa, Oryza sativa
  Clone ID: PAT_MRT4530_95733C.1.pep
ARGRERESTSLVFFFFFFKQRPYIILLLREIADRRGYRITTIKPTTKINVLLFLKKNLVGLWDYHCGN

SEQ ID NO: 200246 - protein, 196 aa, Oryza sativa
  Clone ID: PAT_MRT4530_95734C.1.pep
MAATLPRARPPSGEGHIALGGSLLQLVFGKEWPPPYLGPHYPRGGPRGIGGQPPPTSLWEGVAATPPRASLPSGEGHMEFGGSLLQLVIGREWPPPHLWGQPPPSKHDTPGPISPTVAPGELGGGSLVTFIRRLNFPLSSRSPRRCRLGSLAPSNLYPRSSQAGRHSQPAGPKIAATEEPAQGAPGVDGDQSSTQS

SEQ ID NO: 200247 - protein, 81 aa, Oryza sativa
  Clone ID: PAT_MRT4530_95735C.1.pep
YIYICIYMYIYIYIYICICIYICIYVYICIYICICIYMYIYMYMYVYVYVCICICMYMYICICMYIYIYIYIYIYIYIYIY

SEQ ID NO: 200248 - protein, 347 aa, Oryza sativa
  unsure (1)..(347): unsure at all Xaa locations
  Clone ID: PAT_MRT4530_95736C.1.pep
IADKTLHEFAAPSAENVAIGPQINMGDMDFDLKSSLITMAXASPFCGKPNEDANAHLQQFLENCNTYAIKGVSPDTVRLRLFPVSLLRRAKQWFYANRAAVNTWDKCSTVFLSKFFPMEAWERLQEYVAACPHHGIDNWLIMQNFYNGXPMSRDHLDVAAGGAIFSKLVRGAADLIEKMVSNMGWSEERLQTRQRGMHTVKETELLAAKLDLLMKRLDDHDKRPQGTIKALDSHVTCEVCGNMGHSGNDCPETYEEAMYMGNNNNGYHPQGGQGWNXPRPYYLGGNNNGNFSNQSSLKDLVFAQAKTTDALSKKLTANDKICHTLKIPNYSDVPGESDFAGEDFEEF

SEQ ID NO: 200249 - protein, 1498 aa, Oryza sativa
  Clone ID: PAT_MRT4530_95737C.1.pep
MEFVTGAMSSLIPKLGELLKEKYNLQKNIRGKIESLSAELRRAQAVLRMVSEVPQDQQNELVKLWASDLREASYDMEDIIDAFLVHVDDDGPKPADPHVLRRLGKQVKKLFKKTKHRVTIADAIQEMEKKLLEIDARHGRYPVDNIVIPARPTPIDPHILNIEKMANNLVGIDEPRDELIKMLSQHERDNNLNTSNRKTKIVYVVGMGGLGKTTLATAVYEKIKVGFPLNAFVPIGQNPNMKAILWNILHRFGLEKYLNCPNMEMLTVQELIGELKQFIKGKRSRMGSQCYKSTSLSCLSAVLSMPVGSLTQSSSNPLTFEACIAPKHPGFCPRQLGRASMFTMWRVVGLVSTLVYVGLTRTKASNLHADKGGPGTNQAATPSLPSQTIATTPGYQGARLTRDSRTRGARNSPPPPTSARRWRPHPPADDFHSGHGGGGATKEAATAVAFYPVCAELLSNQSSMSSSHRPPARHTFLQSRLPPPVAAASSRRASHLWFPDVTGKRACLRAHGAYGGRALEVLLAHHVVTGMPADMNYLADTGWVVTTRARRARLPSLVENDIWDKPSWQILESGLQDNDYGSKILVTTRKSEVATIISDVYNMKPLSHDNSKELLYTRTGSEGKSLDSSSTEACDKILKKCAGVPLAIITIASLLASRSGLDWSEVYRAIDFGEDNYEMANTKRILSFSYYDLPSHLKNCLLYLSMFPEDYKIDKNHLIWIWIAEGFVPEKQNTNLGLYELGESYFNELINRSMMIQPIENEFFGCIEGCRVHDMVLDLARSLTSEQNFVTVLDNDEQRKPESTNARRLVLHRTSITSYRFGNMDMKKVRSFVATECNNGNNSVAPPRFQVLRVLSLDKCNGMEDYYIESILQYAGRLGHLRCLQLSSHTEFHRLPKELGDLKFLKILDLGDCGGTIEELPEELGLLTHLLCLRIPRRLEMLPAGLIGKLTSLQELCISLIEEVAVRHFVQELGNLRELRVLYAKIYIGLKDESMQRDFLQSLGCLHKVHTMNIYSIEVRECTRPDAAGSVSCPRLWQLSLPCIKFFSLPVWINSSTLGCLSHLDVKVQVVKEQDMETLGRLPMLCYLKLDSQYTRLISIKKPADDGYFQKLRFFKTPRSFVRFDLHGCESSSGASSFMPRLEHIEFSVDVRFLKDAADLHAGLNNLLAGFNDFGRTSLKSVDARIHCKDALAAEVQEAEVALANAAHGHPNRPVLRTDRAYERMMRSPDDDKPTSWSDQKVFEIHVYPSSNDHHRYLSYLRLLKKPRLEKLIVNIYVSKDGMVGDVDEAVAAARNVVDHHINHPTLEINRMEERYSDQFPHMSSTLLLIIDSAPDHPPHGLIDEDIKCNLAAFERALRIVQSTSECPKENLLREPKISVCNLLYMQADKVYTLQVQESEGDRISIYRKELAITIIEYAESFNVAPKGMADPWMDVRIIKGIIRAVIGGMDTEHIQQGTAALQEQIVNKLLKMFHCNEVARVNIEVSHRCPDVLPPPR

SEQ ID NO: 200250 - protein, 207 aa, Oryza sativa
  unsure (1)..(207): unsure at all Xaa locations
  Clone ID: PAT_MRT4530_95738C.1.pep
ASXVFVCXVTGGGXXCXGLLXAGVAVWSTALQLXVVHHLQKKXSLGSFNLLGHTAPAQAASLLXLGPFVAFWLPXXRVDAFNCAAVVTFFIXLSCPVAVGTYLCQFLCVGRFTAVSFRVLGHLKTILVLXLGFLFFGIVGLCFHVVLGLLLAVIGLFWCGNASFCPVVLGGSVFSVPCVLSPFSFRSYLCPKVLRLCCLPFFSGSFA

SEQ ID NO: 200251 - protein, 463 aa, Oryza sativa
  Clone ID: PAT_MRT4530_95739C.1.pep
MPPPLPWRRLVVPLLAVVSVPFVLPLALPFLLRSSSSRQPLSVHRLDWLPPLSPLPRTPDPSTPPPPPLTLPLAPLTTPPPPPPSTLPMAPPTRSSPAASPPPPEKGEGGGTTCDLYDGEWARDEAARPLYAPGTCPYVDEAYACASNGRPDAAYTRWRWAPRRCRLPRFNATDFLATLRGKRLMLVGDSMNRNQFESLLCILREAIPDKTRMFETHGYRISKGRGYFVFKFVDYDCTVEFVRSHFLVREGVRYNRQKNSNPILQIDRIDKSASRWRKVDVLVFNTGHWWTHGKTARGINYYKEGDTLYPQFDSTEAYRRALKTWARWIDKNMDPAKSVVFYRGYSTAHFRGGEWDSGGSCSGEREPTLRGAVIGSYPRKMRIVEEVIGRMRFPVRLLNVTKLTNFRRDGHPSVYGKAAAGKKVSRRKQDCSHWCLPGVPDAWNELIYASLVLEPKPRSWKHH

SEQ ID NO: 200252 - protein, 101 aa, Oryza sativa
  unsure (1)..(101): unsure at all Xaa locations
  Clone ID: PAT_MRT4530_9573C.1.pep
SPAASKTDYVTKGSMDYGFHAPTMSWPVPDTLMIEPTESDSNALLYWYCEALLXNDGXITHIERGPADVNNNVLKSAPHALQLLMIDXWTKPYCREYTAIP

SEQ ID NO: 200253 - protein, 129 aa, Oryza sativa
  Clone ID: PAT_MRT4530_95740C.1.pep
MEDATGRLHVVEAHKATGFTLNRESSVFEENKQLCSRCQVCGQEGSVVGLERTERVLPTGTTFTVVGEAYKDRGTVLIKRPRELGRFYVSRRGIDQIISDLKEASTGKDATAAIFAFCGGVLLAFHALL

SEQ ID NO: 200254 - protein, 128 aa, Oryza sativa
  Clone ID: PAT_MRT4530_95741C.1.pep
RRCSQRRRAVASATATMRASSTCPGRRRRGGRRRRRRWRPSSPRRRAAWRGASRPSTTMTSSRTLRWMAGTSGSGYARKEDMWQQPVKMSGGCTDQSCPNESFLYPCICSYSVTPCHVFSCNLFKLTR

SEQ ID NO: 200255 - protein, 70 aa, Oryza sativa
  Clone ID: PAT_MRT4530_95742C.1.pep
MPPLLLALVFDVMGHTVLGLGLPMPNLDLAGHIVLSLSLLPKLGRIERWAIFPAPKLIHTPCLTPLESAI

SEQ ID NO: 200256 - protein, 149 aa, Oryza sativa
  Clone ID: PAT_MRT4530_95743C.1.pep
MAWRMERRQSHDKGRGTSLLSYGWSSRCELLLAPGIDVSHSSFFNRADAPGAHGAPAGFLDTFDVAINGALRAAPAAASPAFLLPNLNDDATATLHAQAVAVLNHDRRFGWRCHGRWRRTGGGAVGIGDYRGTDSEVEQKSARTEGVGG

SEQ ID NO: 200257 - protein, 84 aa, Oryza sativa
  Clone ID: PAT_MRT4530_95744C.1.pep
MWEAGWTTFIMYFLIINVPYADASIMGGSTHYTQNIHIVIFTLFNIIFNPTIRHFPGMYNKMYNPFVPIIVTINHFFTLNTLLI

SEQ ID NO: 200258 - protein, 191 aa, Oryza sativa
  Clone ID: PAT_MRT4530_95745C.1.pep
GSEADAIPPELTTLFVRPGACNNSELLLAPGIDVSHSSFFNRADAPGAHGAPAGFLDTFDVAINGALRAAPAAASPAFLLPNLNDDATATLHAQAVAVLNHDRRFGWRCHGRWRRTGGGAVGIGDYRGTDSEVEQNGLNPQIWGGTEEVTCQKPAATRSSMAEMEAGVAFPDTEPSRDGGRDDRRPAATTY

SEQ ID NO: 200259 - protein, 46 aa, Oryza sativa
  Clone ID: PAT_MRT4530_95746C.1.pep
PPNFLVRSSFPFSLLLLPLVDSCCLCSVLLNMIPCCFIGSSQNSVL

SEQ ID NO: 200260 - protein, 90 aa, Oryza sativa
  Clone ID: PAT_MRT4530_95747C.1.pep
SSEPLQPRHRLRPRLRIVKHCAGLVSPPSKDRRRSRPLAVRLRCPRVVSAVPVRRRRYVLCLGLEAKPWFVFGVGPSAVPCLPPLRRRQM

SEQ ID NO: 200261 - protein, 504 aa, Oryza sativa
  unsure (1)..(504): unsure at all Xaa locations
  Clone ID: PAT_MRT4530_95748C.1.pep
MAHVLVVPYPSQGHMNPMVQFARKLASKGVAVTVVTTRFIERTTSSSAGGGGLDACPGVRVEVISDGHDEGGVASAASLEEYLATLDAAGAASLAGLVAAEARGAGADRLPFTCVVYDTFXPWAGRVARGLGLPAVAFSTQSCAVSAVYHYVHEGKLAVPAPEQEPATSRSAAFAGLPEMERRELPSFVLGDGPYPTLAVFALSQFADAGKDDWVLFNSFDELESEVLAGLSTQWKARAIGPCVPLPAGDGATGRFTYGANLLDPEDTCMQWLDTKPPSSVAYVSFGSFASLGAAQTEELARGLLAAGRPFLWVVRATEEAQLPRHLLDAATASGDALVVRWSPQLDVLAHRATGCFVTHCGWNSTLEALGFGVPMVAMPLWTDQPTNALLVERAWGAGVRARRGDADADDAAGGTAAMFLRGDIERCVRAVMDGEEQEAARARARGEARRWSDAARAAVSPGGSSDRSLDEFVEFLRGGSGADAGEKWKTLVWEGSEAAASEM

SEQ ID NO: 200262 - protein, 66 aa, Oryza sativa
  unsure (1)..(66): unsure at all Xaa locations
  Clone ID: PAT_MRT4530_95749C.1.pep
RSLTXXAXXEXXQAXFMCSTXXXAVALSPARWSTSPXTXALHLSFLFCPHXSARXRXRVSXXXNAX

SEQ ID NO: 200263 - protein, 202 aa, Oryza sativa
  Clone ID: PAT_MRT4530_9574C.1.pep
LGRGSAGRVVEKQPIAPSPAAVRRRAPMEVTLRRFELSDVDAMMAWASDPAVAAFCRWEPYQSTEPLLAYLRDTVLPHPWFRAICLATGAGAGDGDGRPVGAVSLAPTADACRGELGYVVARAHWGKGVATAAVRRAVAAVLGGEVSGLARVEALVDVDNRASQRVVEKAGFRREGVLRRHYWHKGRVRDLVMYSFVSSDQL

SEQ ID NO: 200264 - protein, 46 aa, Oryza sativa
  Clone ID: PAT_MRT4530_95750C.1.pep
NVFYFNNSGASGLQKILFHFPKFHIIQTARLFQPNLPPPFFILKNF

SEQ ID NO: 200265 - protein, 102 aa, Oryza sativa
  Clone ID: PAT_MRT4530_95751C.1.pep
EKWAFIQEILPPVQTPGLRESKREDEKNPGQVFKRPQKKFAVFGDQGNFSRGARARGPGAGFFKGGSGPFTKVSGTCFGDPFFFSWGGSSGSGFFFWGLRDG

SEQ ID NO: 200266 - protein, 91 aa, Oryza sativa
  Clone ID: PAT_MRT4530_95752C.1.pep
MGPGYHVVALPQGESGPRWGGGHSFPKISQRRLPLNATWPSPKGSQAREEAAPQCHVALPQGESGLRWGGGHSLAETRGRRLPQAPCGPPP

SEQ ID NO: 200267 - protein, 859 aa, Oryza sativa
  Clone ID: PAT_MRT4530_95753C.1.pep
MAVASLPPSSNGRMVEPAGTMVQWWEEWQLRVLVLTSLFLQCFLFFSATFRKHRIPAILRASIWLAYLGSDAVAIYGLAAIFSRHGKNAGDDGGRGESSMLEVLWAPVFLIHLAGAQDSITAYDAAEDNALWARRAVAMSSQAAVAVYVFCRSWSGGKVPARCPVALFVTGFLKMGLMLWALRRASATRIATVGRKAAAVEANWSLERYLQWASKSAIEATRNIQTNDDGDGGGGENRSAARRHRSATSELQLDLIDLEYQNDLMELFIDFPNTYTSRLSYLSLFLKLEPYDAYCRLCDLVDYAFQIFYTSRNAAYPFAIWFVFLRFIFFMLASTAIGGFDGLDSNIDGLDANDVKHYWYHVEHSSSTEKAVDLIREDLRSGWVEDDLRSAAAYRRFNDRRGQWTLRREQCYGEMGWSVAKLPFDEAVLIWHIATDICLHCTEDIDISSSPAASADEVTAVMEISNYMMYLLAYQPDMLMLGTRQSLFMAAHHEIVHALRHQGRHQQQPSERDLARCLAGGDDDEYSTPATEEQAGAGSRLLERRGGGGRHLAHARRLAGAMMKLDAGKRLRVIGGVWVEMICYSASRCSGSLHLKSLGVSGQEFLTVVWLLLHRMGMEVLADKLHRPELAGDDPDAVVVPGCEDGRDVGMCGVDGAPFLPCGPARVKTMGKRRDGSDHCGGVAATAGGSDSGGSTRGRRRCRRSPPSPPHLAVARAVPVRREGEGEREQSAVTAAPVVAVDAAVRTAVAEGAWTPMMPPHPAVTRVVPVRREGEGEREQSAVAAVTRAVPVRRKGEGERERRRRRGEEWKRRRWGEGEGKRRRRERGRRPPEGSGKGGVGGGGGGRLGCGGGEAAAVG

SEQ ID NO: 200268 - protein, 60 aa, Oryza sativa
  Clone ID: PAT_MRT4530_95754C.1.pep
AFTPVVLKSVNQFWSHNCGSGSLGHRIKNLWLTRRVIVKYSQGQICHGDESFFGFAKKCV

SEQ ID NO: 200269 - protein, 820 aa, Oryza sativa
  Clone ID: PAT_MRT4530_95755C.1.pep
MVQWWEEWQLRVLVLTSLFLQCFLFFSATFRKHRIPAILRASIWLAYLGSDAVAIYGLAAIFSRHGKNAGDDGGRGESSMLEVLWAPVFLIHLAGAQDSITAYDAAEDNALWARRAVAMSSQAAVAVYVFCRSWSGGKVPARCPVALFVTGFLKMGLMLWALRRASATRIATVGRKAAAVEANWSLERYLQWASKSAIEATRNIQTNDDGDGGGGENRSAARRHRSATSELQLDLIDLEYQNDLMELFIDFPNTYTSRLSYLSLFLKLEPYDAYCRLCDLVDYAFQIFYTSRNAAYPFAIWFVFLRFIFFMLASTAIGGFDGLDSNIDGLDANDVKVTYILLYSEFVVEFSNMISLRYHKWPVCKLEPQIKHTIAQFSLIGCASHSRWPREMDSNLSRRYPLIHTCQTVLSRVAMFLRCNNQHYWYHVEHSSSTEKAVDLIREDLRSGWVEDDLRSAAAYRRFNDRRGQWTLRREQCYGEMGWSVAKLPFDEAVLIWHIATDICLHCTEDIDISSSPAASADEVTAVMEISNYMMYLLAYQPDMLMLGTRQSLFMAAHHEIVHALRHQGRHQQQPSERDLARCLAGGDDDEYSTPATEEQAGAGSRLLERRGGGGRHLAHARRLAGAMMKLDAGKRLRVIGGVWVEMICYSASRCSGSLHLKSLGVSGQEFLTVVWLLLHRMGMEVLADKLHRPELAGDDPDAVGTAFLSTDDATIADTIKTRNLDLEPGHWSVKPTWSQICTRVPESLLQVNWIFGFREEINKLADRLAEEAKSNRPSSTVYVCQSISHLAYPNTGCHANNIRDNFNLTNFVIQHVLCF

SEQ ID NO: 200270 - protein, 106 aa, Oryza sativa
  unsure (1)..(106): unsure at all Xaa locations
  Clone ID: PAT_MRT4530_95756C.1.pep
MEQWRASMETEAPSMPLSEFSIFIFFTAVAATAGGSDSGGSTRGRRXPPLPAIATAPRRRPRRSSPPSPPHPSSPSTLPETGGRGGEGAVRRRRRHPCRAGGEAAL

SEQ ID NO: 200271 - protein, 72 aa, Oryza sativa
  unsure (1)..(72): unsure at all Xaa locations
  Clone ID: PAT_MRT4530_95757C.1.pep
GGECAQTDLMYKLCRVKTNQLAVLTVMSGVWICIEYRLVFILLNAKIYXQIMMRFENDLLAAMEANEVPIYT

SEQ ID NO: 200272 - protein, 93 aa, Oryza sativa
  Clone ID: PAT_MRT4530_95758C.1.pep
PSLMDLCYCQHTRKHRRLGAASCEHTVVREHVMWRSGGGRLDMWLVAYRTGARWGQRGGAAHMGYTCLILIGPGCPKVLNGGSKVMRDGGQLG

SEQ ID NO: 200273 - protein, 131 aa, Oryza sativa
  Clone ID: PAT_MRT4530_95759C.1.pep
CIEQGLRSTVIFVMAGCSLATLRGQHRGRWIQSHSKLPTRIMSINLPKSNHSHKIQLPCQSNLGRKQKTGAFAPLGFHGRCCRIETSVKCYFLQSLVDSESMISPNLLLLSDEALLTISIVFAYLAGVVPS

SEQ ID NO: 200274 - protein, 118 aa, Oryza sativa
  unsure (1)..(118): unsure at all Xaa locations
  Clone ID: PAT_MRT4530_9575C.1.pep
MRECILIYIVXAGFHLCNACWKLYCFXYGIXPDEQMHTYKTGGGGDDTVNTFLRETVALKLVXSTVFDDLEPTYIDDVMTVDYRQLLHHEQVISGHDDAXSDNYVHGHYTIGIEIADL

SEQ ID NO: 200275 - protein, 1245 aa, Oryza sativa
  unsure (1)..(1245): unsure at all Xaa locations
  Clone ID: PAT_MRT4530_95760C.1.pep
MASSSSSIPFALHGQSVSEKLTKSNFVLWKAQVLATLRGAQMAGFLDGSNKAPEATIVITKDDGKTTEKVANPALAQWVAQEQQVLSYLLSSLSRDVLTQVATLGKATEVWXGIESLFASQSRARVINTRMALSTTKKGNKTVAEYXPLDEEDLVSYILVGLDFDYNSVVSSVAGRADSISVSELYALLVGFETRLDLLQNNSSPSANTVSRGGRGGGGGGRGQGGNNGGRGGGFRRGRGDGKPKPTCQLCGKIGHVVAKCWKRFDPSFTGEEKVASTAATNNSYSIDTNWYIDSAATDHITSEMEKLAIKDKYHGNDQVHAASGSGMDIDYVGHTAICTPTRDLWLKNILHVLEAYKSLVSAHCFARDNRAFVELHPCFFLVKDQVTRRPLLRGRCESGLYPLPTDKQAHGAIKPSLSRWHSRLGHPSFSIVDRVVSTNNLHVTRDSSRRLKPCKQIGGGEFQRLNSFFNNVGIEHHVACPYAYQQNGSVERNHHHIVEVGLSLLAHASMPLKFWDEAFTTAAYLINRTPTRVLSYETPLQRLFNLPPDYFLLRTFGCACWPNLRPYNTRKLAFRSKQCAFLGYSTMHKGFKCLDIAAGRVYISRDVVFDVQVFPFAQLHSNAGARLQSEIQLLTPNLLPSIMLDHGGAVVHDQPLINNPNPTDSSGESAGQNSGANGENSAANDSESTSINHDFMQNCDLASSGEHYTADDDPNADSADSVSRQVDPEADAAAHGSAASSPPTTPSHVDSDAFGPTMSLQDAGPTPTPATGSPTPTISAVESEATPEAQPIPGPITRAHHGIHKPKKYTDGTVRYACLTDTEEPSSLQEALHDKNWKIAMDKEFAALVHNKTWHLVPPQKGTNVIDCKWVYKIKRKADGIIDRYKARLVAKGFKQRYGIDYEDTFSPVVKATTIRLVLSLAVSQGWSLQQLDVQNAFLHGYLEEDVYMRQPPGYEESKVPHYLCKLDKALYGLKQAPRAWYSRLSKRLQELGFTSSKADTSLFFFNKKGLVMFLLVYADDIIVASSCSQAVTVLLENLEKDFALKDLGELHYFLGIEVKKDGDGLLLSQERYANEILKQVSMTGCKPVSTPLSTVEKLSAHEGEKLGVNDSSQYRSIVVALQYLTLTRPDISFSINKVCQFLQNPFVVHWAAVKRILRYLQGTVKLGLKIEKSPSSVVSAFSDADWAGYLDDRRSTGGFAVFLGSNLISWNARKQATVSRSSTEAEYKALANATAEVMWNSSS

SEQ ID NO: 200276 - protein, 60 aa, Oryza sativa
  Clone ID: PAT_MRT4530_95761C.1.pep
PPPDPSRGQPPPLLHPGRGQPPPPDMGGGRSRFPRTLRSRSRARCSPPRPPLLLPIPPAP

SEQ ID NO: 200277 - protein, 1360 aa, Oryza sativa
  Clone ID: PAT_MRT4530_95762C.1.pep
MAAGDHLRPGSYLGDVSALSFLPSSPRPLLLAGTGSELLVYDVDAARLVASFQVFDGVRVHGIQPRCPDGPSPGDVTVLVFGERRVKIFRIRADFEDGEACGVRLELEQRLPGFDHWVLDACFLEADGLLAIGLSDNSVALWDLSQRVLHARVKSPEKCLLYSMRMWGNSLESLLVASGTILNEILIWKIVPRALEKSLLCSYKSNTLGVEDYENMHISDKQYITIHLGRLKEHEGSIFRIAWSSDGSKFMSVSDDRSARIWMLSSQSQNFVNKADGQNDVQIIPKLTLFGHSARIWDCYVSNSLVITVGEDCSCCIWAMDGKLIKKFREHIGRGIWRCLYDPSTLLLATAGFDSAIKVHHLYNSSCHDKMEDKVVSDDVNYDSEVFSISSPTVSGQYGPMDSVPVKVIICLVHHSKSEYVRYLHFVKENDLYVATNNGYLHHAELSNSNNVRWTKVTQVAEVAPIICMDVMVMHSDISLNRDDIIALGDGRGNVTVVHLTACDLGPKVNSSFTWPAEKDRQLLGVYWCKSLECRHIFTADPRGVLKLWDIRNALFSNTLDITTSQKVPLIAVFESSFGARIMCLDAFPQDEVLVAGDKKGNITAFHFPKVLVEHESCGTQQNMPSCDRFKGAHGISSVTSVRIITSTSDHLQIHTTGGDGCICFFKYDRNVQKIEFFGMRQVKELGTVQSIFPPHASEKQLLSTYAIGFTSADFIIWDLENETKLLQISCGGWRRPYSYYLGMVPEYQNCFAFVKDHNIHIHRHWAPCQDKKLLPQVFHMQFHGREVHSLCFIDPAGYSNPEKSSNLYIATGCEDGTMRLTGNSINSAGKWCSSKLLGEHVGGSAVRATCFVQKGYTSLDKSCNIIPNGNSDDTLVKNKDNISLLISVGSKQVLTTWVLQPKVAENRHICSSGLDVDSKQSLKGDSAMTFQWLSTHMPPKLTNRLKTGNVKNNNEEGDSSMMQPNQFIVDQLENDWRYLSVTAFLLEHPSTKFDVALLAPQGSPVLVLKHIIAAANTADHGDTYIVVSGSTDGSITFWDLTDTIHGFMQLVSETQPHMVIDCQKRPRTGRGSQGGRRRWRTLPGRSLKKINKETSIPDGSIPNTPNATENTSETSNVEETDATNQNYAFSNLQSCNIPEVTPMHRFSGVHQSGVNCLHVSEMRACSYSTPGMSYCVISGGDDQAVHCFSFTLGSLQDCAINTSLDSPDNGAVKIICQHRVPSAHSSAVKGIWTDGIWAFSTGLDQRVRCWKMESSGKFTEYSHAIISVPEPETLDVVHDRMPTRELEFYVDFCNLIKTLKYVRQNVHSMPTRLVRVCLNNLIALIEQWIVRSLSCSAVLISLMVDGDNGKWNCPSVRPS

SEQ ID NO: 200278 - protein, 973 aa, Oryza sativa
  Clone ID: PAT_MRT4530_95763C.1.pep
MVMMMIKSVVYYGSTSIGHVEVWPKGGTDLAVAAWAREIRVDHLSPPSERCPPLAVLHAVAAGGRCLVMESRPTATADEPPPPLVAMHAACLRDGKTAVFPLGAEEIHLVAMTSKRNLPNLACFWGYKVPSGLYNSCLSMLNLRCLGIVFDLDETLLVANTTRSFEDRIDALQRKLSNEIDPQHISGMSAEIKRYQEDKSILKQYIENDQVIDGGKVYKVQTEVIPPLPDNHQPMTRPIIRLQEKNIILTRINPLIRDTSVLVRLRPAWEDLRSYLIARGRKRFEVYVCTMAERDYALEMWRLLDPDSRLINSVQLTDRLVCVKSGSRKSLLNVFHDGSCHPEMALVIDDRLKVWDEKDQCRVHVVPAFSPYYSPQAEANFSVPVLCFARNVACNVRGGFFKEFDEVLLPRISEIHYEDEINDFPSAPDVGNYLITEDENAAILNVNKDPLAFDGMADAEVERRLKEVSCSVQAVNPIPTNADVMPVAPNQQLITSSVPEAPSLGMIPLNNDQGPQPPSSWPVAQSAPVDPSQSSPAREEGEVPESELDPDTRRRLLILQHGQDTRDPAPPCPAGSPVQTSVLPVQSHGNWSHVEDEMNPRSLNRTSTGFHLESDDINYDKKQPHNPPYFPDEDNLITSDRYNRRIHRYPSQLPHSEDHHMLNRSSIAYRSFPGEDMGNRFGPSNHRSSKIEPGHQFVQNAETSAGVLEEIAVECGFKVEYQSTLCSTAELQFSIEVRILGEKVGEGIGKTRKAAKRQAVNMSLRNLAEKFLTSDPDKMMILKENGFSSNSNSFRYSGGSRDDTSPVASTSNESRYMGERVDTLRKPAGSVAALKELCTVEGYNLVFQEQPSRPRGSSGKEAYAQVEIGGQILGKGVGATWEQAKLQAADEALGNLKSMLGIFAHKSSGFQSFTLLPAALHGHVWFIQQPGSAGVGPRLKESIYLHWLKIFMRSSNLGGYVHNVVPLSVYLYA

SEQ ID NO: 200279 - protein, 72 aa, Oryza sativa
  Clone ID: PAT_MRT4530_95764C.1.pep
PFQKNPFSVPVKGPPPVWDFLKPKDFQGLLIIWRPPRQNFSNGRWGGPPPPPKKKVPPLWGEGGFPPPKEEP

SEQ ID NO: 200280 - protein, 68 aa, Oryza sativa
  Clone ID: PAT_MRT4530_95765C.1.pep
MLEQLEQMTRYVSAGDTAERDSDWVDDQATRVCIYGASQLTTHIYSRNRSMTAIEFILNGTAIAWLKF

SEQ ID NO: 200281 - protein, 46 aa, Oryza sativa
  Clone ID: PAT_MRT4530_95766C.1.pep
MDGLAEDDISAGGRFGRRGSRLEIAWCAEGIAGERRQSWLKRARIG

SEQ ID NO: 200282 - protein, 173 aa, Oryza sativa
  unsure (1)..(173): unsure at all Xaa locations
  Clone ID: PAT_MRT4530_95767C.1.pep
FSLEEKIKALRAPRPAKFQLLXEYSKALERGREERSKRPNYRAVLEYDGIISRRVDSQEFGRVKTREELLAEERDYKRRRTSYRGKKAKRNPKEILRDIIDEHMEEIKQAGGIGCHLDVPGDIAQSVLKNSPHDGTYQGSFNPTSSSYGKDSFGIPSVSCEKLPCANSFGIVS

SEQ ID NO: 200283 - protein, 121 aa, Oryza sativa
  unsure (1)..(121): unsure at all Xaa locations
  Clone ID: PAT_MRT4530_95768C.1.pep
PQGGGFATGRICVGELELAAVTAFEKICALSATKGGGGGVTFYRPAGVPGGFSVLGHYCQSNTRPLHGHLLVAKAVAGKPESESLPPLRPAHDYELVCAXXADGVGEDRKSCRGYGRTGAY

SEQ ID NO: 200284 - protein, 805 aa, Oryza sativa
  Clone ID: PAT_MRT4530_95769C.1.pep
MAPAAGEPSAAAGGGEGDTEAHAVIDVSSSETDSDPDPGFGGAGKRPRRVVATAGSGREAEKRARILAAAVPPGFLDPLPRPSAPPPPPPPPRGRRRVTRQFWNGGDYDGKPDLLSGDPSLRSDDGGGMDPDKMWHCMSLGYSAKSKVKDTIGQYGNGFKTSTMRLGADVLVLSRSCGNGGRRRTQSIGMLSYTFLRETRKDDIIVPMIDYEKGQQYWKRMMRTTSIDWQTSLATIIEWSPYSSEAELLQEFSSIKEQGTRIIIYNLWENEQGELELDFDTDVNDIQIRGGNRDQKNIQLAKQFPNSRHFFTYRHSLQSYASILYLRVPSVFQMILRGKEIEHHNIIGDMMMKNHVIYKPVMTDGFPRDIDMMTDVTIGFVKDAKHHIPIQGFNVYHKNRLIKPFWRVWALPGIQGRGVIGKKSFYKPLWHNFFMCGKLILEEAGDRQLLLHSRVLEVNFVEPAHDKQDFERTNSLARLEARLNLMQKKYWSDNCHRIGYGGNSANRKSGREYKETPENTPHTGPTSDQSPEGCRSSNYLQRKRSFGSPYSGSSNNNSKTGITSLNTSKISLPESRFSLRTTAQQTVEKTKRTLRYTRPLLHGLSHTSNDSDAQTSGTPSRSTSHILKTPEKSCHNENTLPLIPSSEAIRSEGTTRYQSEMTVSVEMTSHLRKTVTFLPLKVNKERNVTNNGDGQTVDNPETVIKLLTDENSSLKESIMKMEESLSRELHIERDKNKSLIERLENVQKQLGTANKEQEALVDIFTEERARRDQEVENQRTKLKEASSTIQNLLDQLNAARSCRKN

SEQ ID NO: 200285 - protein, 67 aa, Oryza sativa
  Clone ID: PAT_MRT4530_9576C.1.pep
MAALLAVVCLLRSSISCVATVDAATDNRHSCVVSAVAARPPIPALPASSREKTERGVSDLCESLDQA

SEQ ID NO: 200286 - protein, 41 aa, Oryza sativa
  Clone ID: PAT_MRT4530_95770C.1.pep
LLDCLALLLCLLAVVWCGVNFVDWSELAVVYGGGGAGATLC

SEQ ID NO: 200287 - protein, 49 aa, Oryza sativa
  Clone ID: PAT_MRT4530_95771C.1.pep
NQSPLFGPLEIFRGPSSSNGKGVLVCKFPPRQPWLVTAGAGSVVRLYWD

SEQ ID NO: 200288 - protein, 112 aa, Oryza sativa
  unsure (1)..(112): unsure at all Xaa locations
  Clone ID: PAT_MRT4530_95772C.1.pep
HHCTHNHRATVPSNLHSQHIVYPEVALAKIPQHSLSTSSLPRHTSRTHIIQGSPIXSSLTGFRNCLLHSTVVQLAAFPSSIPLCQSGLELPQYLLTNKSMILILALDQANCP

SEQ ID NO: 200289 - protein, 929 aa, Oryza sativa
  Clone ID: PAT_MRT4530_95773C.1.pep
MAAAAVHVLLLLLPLATITSASSAPLPLLALLSLRSSLGDPAGALRSWTYAAAASAGATRSLAPPWCAWPGVACDGATGEVVGVDLSRRNLSGTVSPTAARLLSPTLTSLNLSGNAFAGELPPAVLLLRRLVALDVSHNFFNSTFPDGIAKLGSLAFLDAFSNCFVGELPRGIGELRRLEHLNLGGSFFNGSIPGEVGQLRRLRFLHLAGNALSGRLPRELGELTSVEHLEIGYNAYDGGIPPEFGKMAQLRYLDIAAANVSGPLPPELGELTRLESLFLFKNRIAGAIPPRWSRLRALQVLDVSDNHLAGAIPAGLGELTNLTTLNLMSNSLSGTIPAAIGALPSLEVLQLWNNSLAGRLPESLGASRRLVRLDVSTNSLSGPIPPGVCAGNRLARLILFDNRFDSAIPASLADCSSLWRVRLEANRLSGEIPAGFGAIRNLTYMDLSSNSLTGGGIPADLVASPSLEYFNVSGNLVGGALPDMAWRGPKLQVFAASRCGLVGELPAFGATGCANLYRLELAGNALGGGIPGDIGSCKRLVSLRLQHNELTGEIPAAIAALPSITEVDLSWNALTGTVPPGFTNCTTLETFDVSFNHLAPAEPSSDAGERGSPARHTAAMWVPAVAVAFAGMVVLAGTARWLQWRGGDDTAAADALGPGGARHPDLVVGPWRMTAFQRLSFTADDVARCVEGSDGIVGAGSSGTVYRAKMPNGEVIAVKKLLDELLHGAAAKARPGWDARYKIAVGVAQGVSYLHHDCLPAIAHRDIKPSNILLDDDMEARVADFGVAKALQSAAPMSVVAGSCGYIAPEYTYTLKVNEKSDVYSFGVVLLEILTGRRSVEAEYGEGNNIVDWVRRKVAGGGVGDVIDAAAWADNDVGGTRDEMALALRVALLCTSRCPQERPSMREVLSMLQEARPKRKNSAKKQVK

SEQ ID NO: 200290 - protein, 97 aa, Oryza sativa
  unsure (1)..(97): unsure at all Xaa locations
  Clone ID: PAT_MRT4530_95774C.1.pep
GILRXPDLRXAPSRSWGXVPVXRVXLPXPPATGPTRTPPSTPPQQTAAGSGGGSGGRRGRAASWRGASSRRWGGVVRRYGRXVFYSYLRLVRAQALA

SEQ ID NO: 200291 - protein, 123 aa, Oryza sativa
  unsure (1)..(123): unsure at all Xaa locations
  Clone ID: PAT_MRT4530_95775C.1.pep
MAVMGEGRLWRRLTRADAGVGGRRQHRGREATVGGATLGTAVAAAPGTTVMGTEALGHRQWRGGGRLDEAAVLRATKPGCXRWRCGWRSMGRAAALRATAPXADGEGVVGRGRGGRRRCGRRV

SEQ ID NO: 200292 - protein, 95 aa, Oryza sativa
  Clone ID: PAT_MRT4530_95776C.1.pep
VFIVLITMVYRSLDSSVLSDCHMSGTKHTQYLFVPDYILASSSLSCIKFFQYFVPNTFLHLSFLTHIFLLSFNSNKQKAPKDQLRGAHLKLFYSV

SEQ ID NO: 200293 - protein, 687 aa, Oryza sativa
  Clone ID: PAT_MRT4530_95777C.1.pep
MAAARACPMGVSVDQRRAAVAVLRAAAAAGELSLGKAVHARVVRAARFDVVQYNNLIALYVKCGRLGLARQVFDAMPSRNPVSGNLLMSGYASSGRHRDALALLRVADFGLNEYVLSSAVAATAHVRSYDMGRQCHGYAIKAGLAEHPYVCSAVLHMYCQCAHMDEAVKVFDNVSSFNVFAFNSMINGFLDRGQMDGSTSIVRSMVRNVGQWDHVSYVAVLGHCASTKEVVLGSQVHTQALKRRLELNVYVGSALVDMYGKCDFPHEANRVFEVLPEKNIVSWTAIMTAYTQNELFEDALQLFLDMEMEGVRPNEFTYAVALNSCAGLATLKNGNALGACTMKTGHWGLLPVCNALMNMYSKSGSVEDARRVFLSMPCRDVVSWNSIIIGYAHHGRAREAMEAFHDMLFAEEVPSYVTFIGVLSACAQLGLVDEGFYYLNIMMKEVGVKPGKEHYTCMVGLLCRVGRLDEAERFIESNCIGTDVVAWRSLLSSCQVYRNYGLGHRVAEQIFQLKPKDVGTYVLLSNMYAKANRWDGVVKVRRLMRELGVRKEPGVSWIQVGSEVHVFTSEDKKHPYMEQITKKLQELIDKIKVIGYVPNIAVALHDVEDEQKEEHLMYHSEKLALAFGLIRTPKGEAIRIMKNVRICDDCHVAIKLISLATGRRIVVRDTVRFHCIEDGVCSCDDYW

SEQ ID NO: 200294 - protein, 52 aa, Oryza sativa
  Clone ID: PAT_MRT4530_95778C.1.pep
MAKARKPRRYSESKGISGEGISGELQRPRYDEFGIKKAQQASPRLLGPFAID

SEQ ID NO: 200295 - protein, 114 aa, Oryza sativa
  Clone ID: PAT_MRT4530_95779C.1.pep
PRCFLVPWGFWVWDLPRPPPRALGPPRSPGLGPRRPCWLLFPHFGFFSEPPVWVFPFSFGFPSRLPFVLMPCGPPFSRVVLFLTPGPPGLHFVPLLPLILDFGVYSLSPISLFT

SEQ ID NO: 200296 - protein, 91 aa, Oryza sativa
  unsure (1)..(91): unsure at all Xaa locations
  Clone ID: PAT_MRT4530_9577C.1.pep
MDSRMEIPMENTFYTRLDTLIESIIQGNPHGTATQTATYMIKSIITTTAHTTADATAVLNGTHCGTLCGKTTGETYPEPYPQTIVQTMLXT

SEQ ID NO: 200297 - protein, 354 aa, Oryza sativa
  unsure (1)..(354): unsure at all Xaa locations
  Clone ID: PAT_MRT4530_95780C.1.pep
LLDSSLLFSSPLLSTDGSRPPATPPAAPHPPARSLRPPPAAGAAAAAXPAVAPSTSSDVRLSDFERISVLGHGNGGTVYKARHRRGCPAQQPLALKLFAAGDLSAAREAEILRLAADAPHVVRLHAVVPSAAGGVEEPAALALELMPGGSLAGLLRRLGRPMGERPIAAVARQALLGLEALHALRIVHRDLKPSNLLLGADGEVKIADFGAGKVLRRRLDPCASYVGTAAYMSPERFDPEAYSGDYDPYAADVWSLGVAILELYLGHFPLLPVGQRPDWAALMCAICFGEAPEMPAAASEEFRDFVSRCLEKKAGRRASVGELLEHPFIAERDAADAQRSLAALVAEAEQSGDL

SEQ ID NO: 200298 - protein, 68 aa, Oryza sativa
  Clone ID: PAT_MRT4530_95781C.1.pep
MGGRRRRGGGEKTPYVEESDNAVRPVRSRVGGDPGRRKRSKDLFFSPPFFPPPFFLFGGNFGTDDWEM

SEQ ID NO: 200299 - protein, 30 aa, Oryza sativa
  Clone ID: PAT_MRT4530_95782C.1.pep
IPKHGQRLCLCSEVDLRKHPGFPNYRGKFI

SEQ ID NO: 200300 - protein, 77 aa, Oryza sativa
  Clone ID: PAT_MRT4530_95783C.1.pep
MELNLHQLEVAQGGGGQPDAAERSIACPQLHQLGLIMSDLETCPSFAVITVGCAVSEKALLEPREVVARSGDDRGGS

SEQ ID NO: 200301 - protein, 69 aa, Oryza sativa
  Clone ID: PAT_MRT4530_95784C.1.pep
KGGPPTPREPPPRGAKSPALRSANPPKGPPPFQKKIRGPPWGAPKNGNPLGLRAADEKKAPHGKVGPQK

SEQ ID NO: 200302 - protein, 103 aa, Oryza sativa
  Clone ID: PAT_MRT4530_95785C.1.pep
METCNVYPSLPPLHTKLPVLAYIFHSMFACSANCHLSLCVTTHIYLCSLNGSSSTSETFNNPCLSRSREFEVKDVELWGFVNASKYDEMLTICRTEKQGIWNL

SEQ ID NO: 200303 - protein, 115 aa, Oryza sativa
  Clone ID: PAT_MRT4530_95786C.1.pep
MTGKEAGEDSSADADADDIERGDARHPHRGTSSLLPLPPPAVRDNKIRHSGLSADCNNKIRASGICDKLTTRPTSSLSSWSLVKQSACRASAICRRSHRRRRFSFRRSGPHPPPL

SEQ ID NO: 200304 - protein, 71 aa, Oryza sativa
  Clone ID: PAT_MRT4530_95787C.1.pep
GKTGSIFNPGGFWNTNFPFPVQEAKQWAKIKGPLFGPHKWSWKLSFRNPFQGSPSFSIKGEGGTKLLNKNH

SEQ ID NO: 200305 - protein, 104 aa, Oryza sativa
  unsure (1)..(104): unsure at all Xaa locations
  Clone ID: PAT_MRT4530_95788C.1.pep
EGKERRRREAEERGGGGSWRKGAAAAGSAXEGGDDDAFLDLLRRKSIRLTSELFCQLRAVAAETLGDGGSGVRWLPPRAFGGTMETMGPEKARTKSVITVSNFV

SEQ ID NO: 200306 - protein, 38 aa, Oryza sativa
  Clone ID: PAT_MRT4530_95789C.1.pep
HTIYMKFSISEVVTDSSICHSACCHQIFGHQPGLTPRA

SEQ ID NO: 200307 - protein, 111 aa, Oryza sativa
  Clone ID: PAT_MRT4530_9578C.1.pep
MNTIVACALLAIAACSAYAHIDDLRQRYRHDQLQAPVLLQEQVLTPYNVFVRQQYAHSGKPLVALTCVASDKHPSVAHAQSMYAINAPSRYAIYPRNYGAPSTITTLAGVW

SEQ ID NO: 200308 - protein, 197 aa, Oryza sativa
  unsure (1)..(197): unsure at all Xaa locations
  Clone ID: PAT_MRT4530_95790C.1.pep
SRPPLGKPAPAPSLEEKERWRWEAEKGGGGGGSQRKGVVAAGSTPAPGHEGKERRRREAEERGGGGSWRKGAAAAGSAXEGGDDDAFLDLLRRKSIRLTSELFCQLRAVAAVESAGGRGGSXHAPFLQHALTFLALAFLIWPMQETLGDGGSGVRWLPPRAFGGTMETMGPEKARTKCPQQWPRLVARVAMEDDGFK

SEQ ID NO: 200309 - protein, 392 aa, Oryza sativa
  Clone ID: PAT_MRT4530_95791C.1.pep
MKGNNIFRVALLSYIILTIGGKELKSTNSGENTGLTFTNQQVNKTVQPTFKHPLFKDHEIQMEPSSSPIRLDIKSPLVAAVSHAQLSTIDCPIGTIPILRNNKLDTTMVQGISTLASNDLQQLVAGIKYWDEIYGSQASINVYEPKVKQDSNDLSASWIQIGSVPKVGKGVGIGAGSCVYPSFSGDSFARFHISWDNEELKKNCIDHNCPGFVQVSRSVGLGGRVHPISVYNGPQYVIDVLIFKDPKTKNWWLAYGSNNTPIGYWPSSQFSSMKDKCNFAFWGGYVQGPTASSDPPQIGSGHFASEGFGKAAFVRNIQAIEDENNKLVTPSIRSAHPRDDNPKLYTYDDYGLNDDSMHLQIAYELKHFLDQSLISKVFIARKKRSLVGVATA

SEQ ID NO: 200310 - protein, 57 aa, Oryza sativa
  Clone ID: PAT_MRT4530_95792C.1.pep
TELYDGIIYFICDDLHTSNTACELLLCSLILGPHIGRNRSAFRGCQRELQYHPNTSR

SEQ ID NO: 200311 - protein, 177 aa, Oryza sativa
  Clone ID: PAT_MRT4530_95793C.1.pep
MKGNNIFRVALLSYIILTIGGKELKSTNSGENTGLTFTNQQVNKTVQTEDGDIYDCVDVNQQPTFKHPLFKDHEIQMEPSSSPIRLDIKSPLVAAVSHAQLSTIDCPIGTIPILRNNKLDTTMVQGISTLASNDLQQLVAGIKYWDEIYGSQASINVYEPKVKQDSNDLSASWIQIW

SEQ ID NO: 200312 - protein, 40 aa, Oryza sativa
  Clone ID: PAT_MRT4530_95794C.1.pep
PSFSLPPHQKLMGKPRDSIRKRKLPQNQKNRLHRDVQKKK

SEQ ID NO: 200313 - protein, 128 aa, Oryza sativa
  unsure (1)..(128): unsure at all Xaa locations
  Clone ID: PAT_MRT4530_95795C.1.pep
MMMMSCCGGXCGCGCGCPCGGGCGGCPXFPVVEAXAXAKTGVLAAPSPXAXSXXLXLAVXSGVIGGCGCFACXCGSRCXGCSCCSCXFSRRRRPAGFLVWLLLLSALLGALFCLPFCPACLVGLAFCS

SEQ ID NO: 200314 - protein, 246 aa, Oryza sativa
  Clone ID: PAT_MRT4530_95796C.1.pep
MAGDDDFPTFRRRAFSLRKVWRFDLYNRGLIVQMRLGLCNTDERRRRQLATEGSRGLRQLRRSQLGVSEPRIATRLCLRCGPNEPSDLRLCHRRPTEIRLVGARATSGSNAAASARASPTSAAAASALASSACPHPHPSPSVRWCSSEMRRPFTTLEGESRGRTSTAGRGEEGRRRVARELKTWWVRRLTAETKAMRSRMSGTPVVASLLAADVEAGKMVEEPSCPPPPPSPVHVTTARRRHTPPC

SEQ ID NO: 200315 - protein, 90 aa, Oryza sativa
  unsure (1)..(90): unsure at all Xaa locations
  Clone ID: PAT_MRT4530_95797C.1.pep
CGLSDYFCLETQGDLVNSNERGCYKXLVVGVRHTHHEYKNLMTELDCHGLLKLKDAKTLLRRSIEDYHHVESVLHAAKNENASQARPYHQ

SEQ ID NO: 200316 - protein, 102 aa, Oryza sativa
  unsure (1)..(102): unsure at all Xaa locations
  Clone ID: PAT_MRT4530_95798C.1.pep
FFFFFFFFXXVTYXIFFHCVTYXMLITCIVLLVCNVDXXCTKIKLDSYHIIAVTYYCTFSPCHXXLXXNNLNSSMQCGATKRHHVEPPSDIQIDKKPFLPVG

SEQ ID NO: 200317 - protein, 44 aa, Oryza sativa
  unsure (1)..(44): unsure at all Xaa locations
  Clone ID: PAT_MRT4530_95799C.1.pep
LSGRAAAVGSASRKGWLAGQLPEMGFKVEXSRCSXAPPQECSRE

SEQ ID NO: 200318 - protein, 361 aa, Oryza sativa
  Clone ID: PAT_MRT4530_9579C.1.pep
MKALILVGGFGTRLRPLTLSVPKPLVDFGNKPMILHQIEALKEVGVTEVVLAINYQPEVMLNFLKDFESKLGIKITCSQETEPLGTAGPLALARDKLADGSGDPFFVLNSDVISEYPFAELIQFHKSHGGEATIMVTKVDEPSKYGVVVMEDETDKVERFVEKPKVFVGNKINAGIYLLNPSVLDRIELKPTSIEKEVFPRIAADNGLFAMVLPGFWMDIGQPRDYITGLRLYLDSLRKKAPAKLASGAHVLGNVLVHETAVIGEGCLIGPDVAVGPGCVVEAGVRLSRCTVMRGARVKKHACISSSIIGWHSTVGMWARVENMTILGEDVHVCDEVYSNGGVVLPHKEIKSSILKPEIVM

SEQ ID NO: 200319 - protein, 284 aa, Oryza sativa
  Clone ID: PAT_MRT4530_957C.1.pep
MAHHDVMTKDPLVRHLLSVLARPPAVDLPAMEFVKYYERRKYIEDSGVMRAMAKVAVDRSDGRLEVFEGYGFVNDELLQYIGDRSPSLKGLSLISLFSYLDISKKVFTEFISKCPCLEDLVVEEGGFIGGETGFTLSVEVTEMTEISVRNFQPCGEIVLAIAKSCTQLKRLKLTVHTYPDSRGFFVDEPFGIATMKQLRHLILGSICIGNEELMAIIDACPHLELLDVSKCYKLDVDDALRTKCAGIKTVKLPLSLSHDGDQYAYCDYQIDEYGDFIDDYADYF

SEQ ID NO: 200320 - protein, 64 aa, Oryza sativa
  Clone ID: PAT_MRT4530_95800C.1.pep
MVEFVIDGDDLEFTLSYEEDELSFLFEKSNELMLKDQEMFQRQIENFGYAFIHGVKEVILTDDR

SEQ ID NO: 200321 - protein, 112 aa, Oryza sativa
  Clone ID: PAT_MRT4530_95801C.1.pep
MNGGVVLAGHWASEFETPNPLRSLSDSRSIRRPGKMRNNPTLHVWTCSQFNTNTPAVPAPASAATTDDNDDWGIVKELDDGVHGEASTTCCAVRPRFCGSLVLGGRFVLGLV

SEQ ID NO: 200322 - protein, 97 aa, Oryza sativa
  Clone ID: PAT_MRT4530_95802C.1.pep
FRRGSSTVNATPPPPPGPSPSPPPRPTSSPASSLSPPPSPPSSSSRVRPLPCRHLPDDDPDSDFAPDNPDLLRNSPVPDRLLVVSAGVAANLLFTFL

SEQ ID NO: 200323 - protein, 241 aa, Oryza sativa
  Clone ID: PAT_MRT4530_95803C.1.pep
MASGGGEHFLRQLSASNGGYGGAAQYQMGRGVVAEEEVELGGGGRRRGSKRWSKKRAGRGGYGGGGGGKGDAAAAAAAAAAVAGRKRVMVVVDDTSGGRHAMMWALTHVANKGDFLTLLHVLPYAGAGRGEETPSLANSLGTLCKACRPEVEVEALVIQGPKLATVLSQVKKLEASVLVLSQSKPSHFCWLSCILRSSIEEFVEQCINQAECLTLAVRKQSKGVGGYLISTRWQKNFWLLA

SEQ ID NO: 200324 - protein, 202 aa, Oryza sativa
  Clone ID: PAT_MRT4530_95804C.1.pep
MFVLSQIEHNLPMPPHLLSRPLVDAIKAELERLFLDKVVANLGLCVSVYDIRSVEGGFIFPGEGCSTYKVSFRLLMFRPFVGEVLVGKISGYDEKGLHVSLDFFSDISIPGHLMQYGTARALDGRWMLKTEDGDELYLDLDDEIRFLVSSIKYPPIPVEQKETDRAFAPMQIIGSIKGDGLGLLAWWAADEEEGEAEAEAEE

SEQ ID NO: 200325 - protein, 381 aa, Oryza sativa
  unsure (1)..(381): unsure at all Xaa locations
  Clone ID: PAT_MRT4530_95805C.1.pep
TVPIPKDWKCAKQDPRWKDAMREELNALMKNKTWELVKLPPGKKAVGCKWVFTVKQTPEGKVDRYKARLVAKGYSQTYGIDYDETFAPVAKMGTVRTLVSCAVNFGWPLHQLDVKNAFLHGDLYEEVYMEIPPGFGNSQTVGKICKLKKSLYGLKQFPRAWFERFRCAVCDMGYSQCNGDHTVFYKHRGTYITILAVYVDDIVITGDDVEEIRCLKXNGHLNVERYCDADWASSMDDKRSTSGYCVFVGGNLVSWRSKKQAMVARSTAEAEYRAMALSLSEMLWMRSLLTELRVLRSDTVMLHCDNKSAINIGNNLVQHDRTKHVEIDRFFIKEKIDSGVLMLEYIKSCEQLADCLTKGLGPSEIQSICNKMGMIDIFYPS

SEQ ID NO: 200326 - protein, 71 aa, Oryza sativa
  Clone ID: PAT_MRT4530_95806C.1.pep
LKNPINLLLHKNSKLEKGVAWDYSSASASAYPSSSSAAHQARRPRPSPLMLPCESISQPSYSSKDTKSEFK

SEQ ID NO: 200327 - protein, 301 aa, Oryza sativa
  Clone ID: PAT_MRT4530_95807C.1.pep
MTRCAVVAAVAAVLLVAGAAAAGGGEEEEAPSTCARRGPGFVDALASRCPCIRIEPSPPVEVRGEAIAKELNLRHRGVTYSVLFYAAWCPFSSKFRPIFEALSTMFPQIYHFTVEESSAMPSLFSRYGVRGFPAILLVNETTMVRYWGPKDLSSLVDFYKETTGFDPIAYFDVDHQDSTGDFRPVTPGDRSLRKIAKDEPFVLLAVLFIILKVAAHFVPIVVSHLKTFLVVRVQNLNLGIRRGSSQLLERALNVLDVKRLCSKLRLSNKTRDLRKGASNARAWASSFTSVSLGESSSSRQA

SEQ ID NO: 200328 - protein, 73 aa, Oryza sativa
  Clone ID: PAT_MRT4530_95808C.1.pep
CPTIFTVMTNTLAPARVLYFTKRLHNSLYYCLLLSYGSSSQCLINVSACLSSIPSLSRVSHHRPHMLDHVPGK

SEQ ID NO: 200329 - protein, 48 aa, Oryza sativa
  Clone ID: PAT_MRT4530_95809C.1.pep
LDEWELLPDNKSSYFMEEFTSDHGTVVGKDDQFLFGASLIMINMDHFT

SEQ ID NO: 200330 - protein, 741 aa, Oryza sativa
  unsure (1)..(741): unsure at all Xaa locations
  Clone ID: PAT_MRT4530_9580C.1.pep
MGSSELEETKAVLHMDCEKPPAISWERTFDDEGKKVAMFSMTLNDMMAIVPLMIKMLGLNLKDNAKGLASVYDPLKKWMDNCYRGVPLGGIGGIDKAGIGSWDWKLKEKNCTYHGLFPRSWTVYNGEPDPEIKITCRQISPFIPHNYKESSFPVAVFTFTLHNSGSTPADVTLLFTWANSVGGKSELTGNHKNSRMTARDGVHGVLLHHRTADGRPPVTFAIASRETDGVRVTGCPRFTMGPSNSGDVTAKDMWDQINKNGSFVGDGNAAAAATGASRPGSSIGAAVAATTTVAAGGARAVSFALSWSCPEVKFPAGRTYHRRYTKFHGTDRDAAAERLAHDALLEHMKWESQIEEWQRPILQDKSLPEWYPITLFNELYYLNAGGTIWTDGQPPKNTSLSSATEPFNLDTFSTVANGGSAVDGILSTVAVAAARSNTAAAAAAAMGTALLRDGEENVGQVLYLEGMEYNMWNTYDVHFYASFALLSLFPELELNLQRDFVRGVLLHDPCLRRTLDGATVARKVLGAVPHDMGLNDPWFEVNAYMLHDPVRWKDLNPKFVLQVYRDVVATGNAGFAEAAWPAVYLAMAYMDQFDRDGDGMVENEGRPDQTYDLWSVSGVSAYTGGLWVAALQAAAAMAGIVGDGAAEAYFRGRYHRARRVXTDQPGNGGYFNYDTRGGATSSSMHAHQRLGQAQARLRVPDARIHGQTTAAAGRSTPGASSTPGRCSAIGPLRCIQPRGTG

SEQ ID NO: 200331 - protein, 1648 aa, Oryza sativa
  Clone ID: PAT_MRT4530_95810C.1.pep
MSSGEGKEVVDTSLLVTKGDMKGLLEDLLKMGMIGPRNAAGVSAVKLELMPNELRLEGSKNYLSWCRRAQLMLRAKGMDHFLLESCEEPSDKESQAWRTWNTTNSTVVSWLMTSVAPSIGRMIEAIQNAAVVWKTLSNMYSGEGNVMMMVEAQNKVENLKQEGRTVQEYASELQQLWADLDHYDLLQLKHEDDIVIGNKWLQRRRVIHFLKGLNKEFEDRRAAMFHQATLPTMEEAISAMVQEEMRLRLMRGTNPIRSAYIAADNRECYNCGQVGHVSYNCPTSRNIGGRGSIRGGHGGTRGGFRGDRGGFGGNRGGRGGDRGGRVGGRGRGRGVPQANAVKEDGKAVTLIGEQVTQWEEWQKNKTNESSNTTTHFGNFANYAQVGEGTQAQALASTYRHPIDWIIDSGASKHVTGLHNTFTSYTPYIHSETIQIADGTSKPIHGIGSVECTSSMNLSSVLHVPSFPVNLLSVSSAIDQLKCIVVFDENSCLFQEKRTGRRIGTGVRRDGLWYINHEELGLAAVVGDVEKEISLLHCQLGHPSFEILSKLYLDLFSRVDKHRLVCDACELGKHTRSTYVGIGLRNCEPLILIHSDVWGPCPVTSVSGFKWFVTFIDCHTRMTWIYMLKHKSEVLRCFQDFHKLVTTQFDAKVKIIRTDNGTEYINNEFVSYVSDEGIIHQTTCPGTPPQNGVAERKNRHLLEVARSLMFQMNVPKYLWSEAVMTAAYLINRMPSRILGMKSPAEQLLGKREFKVPPKVFGCVCFVRDHRPSVGKLDPHAVKCVFVGYASSQKGYKCWDPIGRRLFVSMDVTFREFEPYYKSKGDLDQFLEEFSTVMEVDSREGERERGDIHEKNVGDKNGEAVVIGSIPCSIDDASKEVVEVIEDTQDEDREMVPHEEDGEEGEVVVGTIPCPMEGAERVKQKDVLVYQRRRFDSQGEKRKGLVQSQIEELPHQKCPVPESSQSLSPPASLASLETIGNTSPTLEHVELPLAQRRETRSNAGRPPIRLGFEHLSSMHDIANYITYSHVSPAYKTFIASLQTVPIPKDWKCAKQDPKWKDAMKEELNALVKNKTWELVKLPPEKRAVGCKWVFTVKQTPEGKVDMYKARLVAKGYSQTYGIDYDETFAPVAKMGTVRALVSCAVNFGWPLHQLDVKNAFLHGDLHEEVYMEIPPGFGNSQTVGKVCKLKKSLYGLKQSPRAWFDRFRHAVCDMGYSQCNGDHTVFYKHRGTHITILAVYVDDIVITGDDVEEIRCLKERLGKAFEVKDLGPLRYFLGIEIARSSKGIVLSQRKYVLDLLTDTGMLGCRASTTPIDRNHQLCAQSGDPVDKEAYQRLVGRLIYLCHTRPDISYAVSVVSRYMHDPRTGHLDVVHKILRYLKGTPGKGLWFRKNGHLNVEGYCDADWASSMDDRRSTSGYCVFVGGNLVSWRSKKQAVVARSTAEAEYRAMALSFSEMLWMRSLLTELRVLRSDTVMLHCDNKSAISIANNPVQHDRTKHVEIDRFFIKEKIDSGVLRLEYIKSCEQLADCLTKGQIVYSSGGRIKHTAAVPICGYTDQIEVCAQHLVANRDSYRLKHIAYQIHDMNMCLVVSKCGQEERLSVVSCVCLDEKGIGGQGPPCLADNTEAAELLGWEPHQDVEQHVQREDARI

SEQ ID NO: 200332 - protein, 528 aa, Oryza sativa
  Clone ID: PAT_MRT4530_95811C.1.pep
MRSSHQPLCTRAHQAAALLLVAATFFLTRLLDRSPLSAPPPPCAAPYSPWPHRDLRIYVYAEDEVDGLRALLRGRNDDVTAATCIKGQWGTQVKIHQLLLSSRFRTFDKDEADLFFVPTYVKCVRMTGKLNDKEINQTYVKVVLSQMPYFRRSGGRDHIFVFPSGAGAHLFRSWATFLNRSIILTPEGDRTDKRGISAFNTWKDIIIPGNVDDSMVKSDRLAVKPIPLTKRKYLANFLGRAQGKVGRLQLVKLAKQYPDKLESPELKLSGPDKLGRIDYFKHLRNAKFCLAPRGESSWTLRFYESFFVECVPVILSDEVELPFQNVIDYTEVSIKWPASKIGPGLLEYLESIPDGRVEEMIGRGREIRCLWVYAADTERCSAMSAIMWELQRKFLGQDVELTVYYLKRKLLGKHLRCNAVSELDLYKFAPWDLPEKSSLQSKDREWYFFCPRDRKYSSGSRTNRSTEAGYWKATGKDRPVIYNSQTVGMKRTLVFHLGKPPRGDRTDWVMYEYRLEDKELSASGVKLV

SEQ ID NO: 200333 - protein, 83 aa, Oryza sativa
  Clone ID: PAT_MRT4530_95812C.1.pep
MAAAAACSTKSHLGIDWRRNNGSCTQGGQRAPSVIVVRDLAPRGASGCHATPLGLSGRATPGPSPGHHMVGRGGEAKDDAPRL

SEQ ID NO: 200334 - protein, 89 aa, Oryza sativa
  Clone ID: PAT_MRT4530_95813C.1.pep
MSGDQMGSEPPRVAAGDAPKTEGRIGSFSRLLSGLDAGGVLRDVEPEKMKDEIRRWAKSVVSLMKDHFIYNSPGFWRWKKYCKSVSMLP

SEQ ID NO: 200335 - protein, 65 aa, Oryza sativa
  Clone ID: PAT_MRT4530_95814C.1.pep
RARRRRRAQGRRAGEDEGRDPAVGQVRRVAGAAAQLRRAAAGGSSQQQLDSSHQLAEVAYSCFLI

SEQ ID NO: 200336 - protein, 91 aa, Oryza sativa
  Clone ID: PAT_MRT4530_95815C.1.pep
DRSREIQTHRSRGPVPHNRGRVSDHDSKVKDSDRERERDTEAHRDRQQSHPFKDRSSDPYGKDKSRHRSSKDRGDHYSPHSSRDKDRHRRP

SEQ ID NO: 200337 - protein, 36 aa, Oryza sativa
  Clone ID: PAT_MRT4530_95816C.1.pep
VKLKLLHASRSRIAVSTHASALEFYCYPSSCSSGSL

SEQ ID NO: 200338 - protein, 59 aa, Oryza sativa
  Clone ID: PAT_MRT4530_95817C.1.pep
MGSPSAKYLLFSLAILLVLSSQQQALLPSAFARQLVPMPTNTAADLNLSRRNYFERFLV

SEQ ID NO: 200339 - protein, 183 aa, Oryza sativa
  unsure (1)..(183): unsure at all Xaa locations
  Clone ID: PAT_MRT4530_95818C.1.pep
LAGGWFRGGAVGQTGLVLGGASSLGETLSPEQQGGAIEGLATDLAAAMRPFSMIPHQXDRFRLSTLVPLSDAXVGYPLAWQHHEAFHAFGGACAAFNGGSXDGQGLSLSISPSLQXLEMAKQAEGLRVRYGVLYINXAGAIAISRKKAAAAVSVQKLRMALHGQEIARRLRAGRSHRPQHARG

SEQ ID NO: 200340 - protein, 71 aa, Oryza sativa
  unsure (1)..(71): unsure at all Xaa locations
  Clone ID: PAT_MRT4530_95819C.1.pep
YSIPLAGVHRRSGEXVSRTSAFDVLHREKAAIRFLGSVSRDCSLFVRDGSPSTSLACCAPSSTPATASSSC

SEQ ID NO: 200341 - protein, 161 aa, Oryza sativa
  Clone ID: PAT_MRT4530_9581C.1.pep
AIVPLMIKMLGLNLKDNAKGLASVYDPLKKWMDNCYRGVPLGGIGAGSIGRSYRGYFQQFQIFPSIYEEKPILANQFSAFISRPDGKRYSTVLSAPNADVLKGIDKAGIGSWDWKLKEKNCTYHGLFPRSWTVYNGEPDPEIKITCRQISPFIPHNYKESS

SEQ ID NO: 200342 - protein, 64 aa, Oryza sativa
  Clone ID: PAT_MRT4530_95820C.1.pep
SYHEREWVAWQRAPYTLPSVHAQMTNLWNRADPSAAPLMWPNFILPASQSVTMASIAAANVCKE

SEQ ID NO: 200343 - protein, 74 aa, Oryza sativa
  Clone ID: PAT_MRT4530_95821C.1.pep
GPELQGWTSPAVVLCRFTPCRRGAGFLQDTSAAERWIPIQAPRPFYHVRNTTAVAQRRSSWPSDPLWRPRLTSC

SEQ ID NO: 200344 - protein, 61 aa, Oryza sativa
  Clone ID: PAT_MRT4530_95822C.1.pep
MTKECLHYKERTPGVAKLKLRQHYTGTRCACSLQMVGTTIEPPGHFPVPLASERVAAARAA

SEQ ID NO: 200345 - protein, 48 aa, Oryza sativa
  Clone ID: PAT_MRT4530_95823C.1.pep
RFKPRDPQTSLCLLIFRVGGGSIECWLGVIGSRAGSAAAAGPNPLRGL

SEQ ID NO: 200346 - protein, 123 aa, Oryza sativa
  Clone ID: PAT_MRT4530_95824C.1.pep
MKYVFQLPTSDLLVVEHQLSFEGYYREKMQQNKARIREKYHRGGSTRKRPHELSTSFSRKGTREWEGYNDRKLSETYARKIQKIGRGEGNYGVVDTRNRAPAPGSDQTHQRCVSYKIPSTNWG

SEQ ID NO: 200347 - protein, 74 aa, Oryza sativa
  Clone ID: PAT_MRT4530_95825C.1.pep
SACGSTDRGEVMLICGNEDGSTGCGVGMHIDCCDPPLEAVPEHDWLCPQCEMPKATKKSASRVASKSRVSKRKR

SEQ ID NO: 200348 - protein, 85 aa, Oryza sativa
  unsure (1)..(85): unsure at all Xaa locations
  Clone ID: PAT_MRT4530_95826C.1.pep
MRECISIHIGQVDIQVVNACXELYCLEHGIQPDGQMPGDKTVGGGDDAFNTYFSETGADKHVPRAVIDDLEPTXIDEVRTGDYRQ

SEQ ID NO: 200349 - protein, 58 aa, Oryza sativa
  unsure (1)..(58): unsure at all Xaa locations
  Clone ID: PAT_MRT4530_95827C.1.pep
MAAPDVEYRCFVGGLAWATXDRSLKXAFSTYGKILXSKIXNDRKTGRSRGFXFVTFSS

SEQ ID NO: 200350 - protein, 103 aa, Oryza sativa
  unsure (1)..(103): unsure at all Xaa locations
  Clone ID: PAT_MRT4530_95828C.1.pep
RRITPYNLWRDDDPDAAWNISLQSCVHRLPTDPAIRGSQWPVEWPLRLEKPPYWLKNSEAGVYGKPATEDFQADYEHLKQVISNSYMNDLGXDWSSVRNVMDM

SEQ ID NO: 200351 - protein, 469 aa, Oryza sativa
  Clone ID: PAT_MRT4530_95829C.1.pep
MEFPRRGQSSHPADADDDDRRRLRFPDSTPPSGREARPAPAQGDAVTAALGRRREELLWELHKTKIHREMLLCQLGDLLPAREYAWRSTPWEEQANANANAHAHGALSAPRSGDEEITPWWRRSPSAVTPPVYPHVERSPSPPIARGWPADDDERQERGEPSGSPAMAPPVRHAPHVEQSTPVPIKSPAAEAVCMPSGSPAMAPPVQPAPHVEQSTPLPAKEPAAVAKVEADAIVQTAANADADQALLGKGATPGGQGCTGQKGEEGDFAIDGHGRQLLGEMNVSKSTEQPKPTESISGGHTDELVQKRYQDNKPADQEIATLDKQKRVGSNDEIELTPERRSSGVKRQLASGTSLAKKPRSQGSSITCSLCKVTMTSPRALVEHRASLLHRSNLAPLRSGNKATTEAAQPAEKKTEKPEASEWNSSAHHHQNRMYYCDICEVRCSSEKMMASHLAGKRHRERHNSIFM

SEQ ID NO: 200352 - protein, 109 aa, Oryza sativa
  Clone ID: PAT_MRT4530_9582C.1.pep
QHERPSSTRGQKSPAEHTQGAKETSTTEPRRPARRFLEWRNMLGSQDQNSFYDCVRVGDFSIATINQRGGLSFGKSPYLGIGRLKECCDHLGTEPINPCVALGLRSFFP

SEQ ID NO: 200353 - protein, 107 aa, Oryza sativa
  Clone ID: PAT_MRT4530_95830C.1.pep
RRRRWRPSRRGIGGVSQRGDAVTLIGPSKAHSEEEHWRGPSDHRRLPRMNVGRDTRSISEVGWCNGSARIPFRWQRRESRRGRRQRHRSGRRESTTAQWRGVASRVA

SEQ ID NO: 200354 - protein, 57 aa, Oryza sativa
  Clone ID: PAT_MRT4530_95831C.1.pep
TRCHGVRRRAFFVFNGAGKGIPSPTKGHAGICGPALSDRLTAESAPGMIAAERCGQD

SEQ ID NO: 200355 - protein, 98 aa, Oryza sativa
  unsure (1)..(98): unsure at all Xaa locations
  Clone ID: PAT_MRT4530_95832C.1.pep
PTRPDAWVPSYVIIGFNLCLIKEPILELGLFWWEPIMFLLLXTIGLVLYSSLLXGILSNTXEYFQCFGELRIFYSDSXLLILPXALLGTXGMARPXPX

SEQ ID NO: 200356 - protein, 302 aa, Oryza sativa
  Clone ID: PAT_MRT4530_95833C.1.pep
MAAARNPLRRWKPFLAAFASVDDAIEIEAADLGISRSEIRRARGRIVGMLRGAEDDREAEELCSVLDEVMAESLLTLRLVPVTPRTLATTDLAGVVGALRKHDSERIRGLATDIVRRWRAAVKRDLVRIGVAMEKLSQTPERIEAADRPVSDLDAKECSGRHGLGNKAEGANPSAEEEAAGRRDGVKPNHSDGGEKLMTAATKRKLDEAQKRRKTADMAAAAKPEGSNSLPLLKMVAPAVVASHGRRESIELHNDEEKIAAAKRKLREGYQDAEEAKKRRKIHVIEDPKMLKHKQEKMDIRS

SEQ ID NO: 200357 - protein, 33 aa, Oryza sativa
  Clone ID: PAT_MRT4530_95834C.1.pep
LFSRKGAKHPVYASFNTTYILWIVKGHPIHDLC

SEQ ID NO: 200358 - protein, 97 aa, Oryza sativa
  Clone ID: PAT_MRT4530_95835C.1.pep
MAQILNKKAAAVFFFTSLMVMATVNFSSGHTTQGGYGEMDSCMVLVNCDMNKCMSDCQIKGFNGGLCDGESNDHCCCTDEARTNNRFLLSKSTTTVV

SEQ ID NO: 200359 - protein, 336 aa, Oryza sativa
  Clone ID: PAT_MRT4530_95836C.1.pep
MAAPPPPANQFVYIDAAALHSVLPFPSLISHLGAGLPAFAAGIHCPHRVSFPLPTAPSASLLLMPSWSAHPSLPYLALKAVTSFPANSPRLPSVHAAVSLFDSASGVPLASLDGSALTLLRTAAVSALAASLLASPTRPPSTLALAGAGALAPYLAEAHLSALPSISRILIWNRTKAKSAALAARLRDAHPGVAVEEADSMDEAVSAADVVSCATGSQEPIVRGELLKPGAHLDLVGSFTPAMRECDDEALRRGRVFIDFEAAMQEAGELVGALQRGVLRREDVAGTLAELAAGSVAGRRCDDEITVFKSVGTAVVDLLAAQLAYETYIATTTKKT

SEQ ID NO: 200360 - protein, 351 aa, Oryza sativa
  unsure (1)..(351): unsure at all Xaa locations
  Clone ID: PAT_MRT4530_95837C.1.pep
ARGKFDEETIGGTEMADDENLTXEQIEAEIKKIKEANAEDEEFPDEVETPLDVPAKRRFAKYSARGSFRTSSWDPKESLPQDYARIFAFDNFTRTQKHVLAKMAERDEGTLKDCAQRGSFVRLLLKNVPTEIASKLVHPSRRLPVVVSGLLQHESKISVLHFSIKKHDSYEAPIKSKDSLIFNVGFRQFTARPLFSTDNINCNKHKMERFLHHGRFSVASVYAPICFPPLPLIVLKSRDGEQPAIAAVGSLKSVDPDRIILKKIVLTGYPQRVSKLKAVVRYMFHNPEDVKWFKPVELWTKHGRRGRIKETVGTHGAMKCIFNSSVQQHDTVCMSLYKRAYPKWPEQLYQI

SEQ ID NO: 200361 - protein, 94 aa, Oryza sativa
  unsure (1)..(94): unsure at all Xaa locations
  Clone ID: PAT_MRT4530_95838C.1.pep
RGGQTGCPWARRGPPGGGGPKGGGPQKGPQGKPGGPPAGGGRGTNGTRGPVXKPGGTPPPTGETGASGTKGPGPLGTWGAPRRPPAPAKKGAVF

SEQ ID NO: 200362 - protein, 225 aa, Oryza sativa
  Clone ID: PAT_MRT4530_95839C.1.pep
MCNFSILLQVELISTVYFKGQVQWTATAGTTGDCCSTASSSLAGKGHSAEYTADGARFEVPLVYLGTMVLGELLVMSQEEFGFAGDDGRIMLTCDASVMEQVMCLISRDASEEVERMFLSCMASSCHSVRGISHQFYSVGERRAIRDRLPRPAEVGLHAAAGGGAAEEVVVGVDVAVLEREAGGAGLGGDGVLLAAEGRRVTMSQCWKTAVMRVAEDELDTDKLQ

SEQ ID NO: 200363 - protein, 274 aa, Oryza sativa
  unsure (1)..(274): unsure at all Xaa locations
  Clone ID: PAT_MRT4530_9583C.1.pep
MDLDKSTSTNASLKKLQDDDALPGRGTMERETRGIEPEPVLGRMVAVEDYILYAKQRTPVVSVLGSTQRQHARCGGAAVKDDGTVSFIYIIDDLRVRGLSGYEVAADFIGRRIQPLQARVHPAFDYSGPEDTARVSPRGLNSETVERCVGQVMISGPTTASNIVVPLCEEGTAEREAAINALPLTDVIGLLVDHQAAASLKEGIAKEAFDVVAAPTTSGSNVPKRERKFSSVLGTRRKAPNPSXAVRAKAVQDGSGATSSASPAAASTDVVVAT

SEQ ID NO: 200364 - protein, 167 aa, Oryza sativa
  Clone ID: PAT_MRT4530_95840C.1.pep
MEKEQLIRGSEINLAVMEDGTWDNNSRKNTITTQSRTTGFSFQDCNIYADDDLLRGAPAGSSMETYLGRPWQPIPNSPPFSDTVKLMADSSDTVARTCHAAQEHPLNLFRGISANQAHDLLHHRRIARQHDPAIVAGKAKLLLRHDEELAEDHRAKQSPVVPAVAVH

SEQ ID NO: 200365 - protein, 562 aa, Oryza sativa
  Clone ID: PAT_MRT4530_95841C.1.pep
MELAVGAGGMRRSASHTSLSESDDFDLSRLLNKPRINVERQRSFDDRSLSDVSYSGGGHGGTRGGFDGMYSPGGGLRSLVGTPASSALHSFEPHPIVGDAWEALRRSLVFFRGQPLGTIAAFDHASEEVLNYDQVFVRDFVPSALAFLMNGEPEIVRHFLLKTLLLQGWEKKVDRFKLGEGAMPASFKVLHDSKKGVDTLHADFGESAIGRVAPVDSGFWWIILLRAYTKSTGDLTLAETPECQKGMRLILSLCLSEGFDTFPTLLCADGCCMIDRRMGVYGYPIEIQALFFMALRCALQLLKHDNEGKEFVERIATRLHALSYHMRSYYWLDFQQLNDIYRYKTEEYSHTAVNKFNVIPDSIPDWLFDFMPCQGGFFIGNVSPARMDFRWFALGNMIAILSSLATPEQSTAIMDLIEERWEELIGEMPLKICYPAIENHEWRIVTGCDPKNTRWSYHNGGSWPVLLWLLTAACIKTGRPQIARRAIDLAERRLLKDGWPEYYDGKLGRYVGKQARKFQTWSIAGYLVAKMMLEDPSHLGMISLEEDKAMKPVLKRSASWTN

SEQ ID NO: 200366 - protein, 193 aa, Oryza sativa
  Clone ID: PAT_MRT4530_95842C.1.pep
MGGPGASSTMSFEQAFLKNLLLSLQDCSTTKPLDAMSLHERKRAVKSSADFAMATARGGGARWPKAIVLQQQPASTTARARRCGRIVRRCCGRKTRSGAGGGGEMARRLQVRRRAMALRKVIPGGGDAMDEAALLREAMDYVVHLRAQVDVLRRVSEAVQLQRRYTSSTSLRDYSWSKCALKGEEDSSMNMKR

SEQ ID NO: 200367 - protein, 802 aa, Oryza sativa
  Clone ID: PAT_MRT4530_95843C.1.pep
MAAAVAVEQEAACLQSFELYESKSRFYIFGTNTGKTHWRLLKINRSEPSDLDLHECCTVYTQSEYHELLKNLDEDHRLTGGVKFVTKFYGIIGFIKFVGPFYMLIITEQRKIGEIFDHPVYQVIKTSMVELANSKTRSRFLNSKDENRYKKILNTLDLRKDFFFSYSYHIMRSLQKNLSDPQEGWNIYESTFVWNEFLTQGIRNFLGSTLWTVALVYGFFKQDKISISGKDIMFTLIARRSRHFAGTRYLKRGVNEKGRVANDVETEQIVYGAGPRPTEVSSVVQNRGSIPLFWSQETSKMNIKPDIILHQKGENYEATRLHFENLRRRYGDPIIILNLIKKRERRESILRREFDRAIRIINKNIPEENHLRFLHWDLHENSRGKPTNVLDVLLKVAFRALRLTEFFYCQLAPSTGSDTAHHWPSLLSGLDPFLCEENSNSDNTDCTEIVGDISQEDISGSSDSSCNGTTEDKAENNESPPLKPPKFQKGVLRTNCIDCLDRTNVAQYAYGLAALGHQLHVLGSVESPELGLDDPLAHHLMHFYERMGDTLAVQYSGSAAHNKIFSAKRGHLKLFIRSQEFFRTLQRHYSNTCIDANKQAAINLFLGYFQPQEGKPALWELESSSVDHIAVHARTIKRVRSDGSILYGSNTSISGCSGCHNEDKELLNAAPLDVKSGSQFPVLESDSVHGNEISLTCESEVSNLRYTPMIPQTHHVPGGVETESSIHSGDSNFLDLEWLSTSGNSSDERSIAISTPDVNLSAENVISGINSETMENQDADIYTQNLPEHFVQWVNHGDTFWY

SEQ ID NO: 200368 - protein, 41 aa, Oryza sativa
  Clone ID: PAT_MRT4530_95844C.1.pep
SSSHQVLFLGVLSFHWWFAIVDYNARKHFFSKIFGFTLKNL

SEQ ID NO: 200369 - protein, 777 aa, Oryza sativa
  Clone ID: PAT_MRT4530_95845C.1.pep
MRRPRGLLGWGALVAFFFVMNWWMFSRLQDPAARSHFRLRRRHSPAANASLSTLEEVSGAGKGKRPHQVMLTRLLALAAHALAEAETRPEPQDLWKEPINATMWRPCSDKRTWEPSEGTNGYIMISANGGINQQRVAICNAVTISRLLNATLVIPKFLYSNVWLDKSQFGDIYQEDYFINYLKSDIRIVKELPVELQSLDLEAIGSLVNDTDVMKEAKPSLYVKKILPILLKNRVVHLVGFGNRLSFDPIPFELQRLRCRCNFHALRFVHKIQETGALLVERLHGHRPHPSPLEDNLLGHFASKSVLKGNKNETSKYLAVHLRFEIDMVAYSMCYFGGGKDEEEELEMYRQIHFPALTELRKTTKLPSAAFLRSEGKCPLAPEEAVLMLAAIGFKHSTNVYIAGAEIYGGRHRMAAISRLYPALVSKETLLSSSELEPFRNFSSQLAALDFIACAAADAFAMTDPGSQFSSLVQGYRMYYGGGDLPTIRPNKRRLASILLKNATMEWNEFETRLCSHPRHSLRTDDTPTKENPVPSLKPPCTPPVRSIAPPPPPPPMSFLAGRLAAKEGAYFLQESKHAAGRLAEKLPASAPAPAPAPGSTSPSPDVLPEILRHAVPIKATPPPGEPSLSASSRWAVPRGGAEAAGLSPDALNPLRSYVSLPQATFGPKSSFDKLGKKGRHDPRILMFFALHMWRSIHLSSVKDDIDYMDIMYYIWQLPNEQPNYSSSTANERRRDRHPPPMDPEKLKAIFTDWKGIYCCNYIGVWRINGCPIIHSR

SEQ ID NO: 200370 - protein, 59 aa, Oryza sativa
  unsure (1)..(59): unsure at all Xaa locations
  Clone ID: PAT_MRT4530_95846C.1.pep
RSTPTKRTTSLAPGASACSXVVLPSRCGTPPLVQCHMIQQRRATATFAVLGDPRRSRLA

SEQ ID NO: 200371 - protein, 63 aa, Oryza sativa
  Clone ID: PAT_MRT4530_95847C.1.pep
QDINVVQAIAQKLHLQQFGHLYFGRVLAQAQALLAFTLPSTYGIYPRGNSAPGSISTLGGVLY

SEQ ID NO: 200372 - protein, 453 aa, Oryza sativa
  Clone ID: PAT_MRT4530_95848C.1.pep
MSFPCYFPELQPAKVNPSGTSAGGLPYIQGFRAESSMLLLLKLQIHTLSSSFSSSPRVLCWVLAVLGYSYRLQASSLSAGELTDLQGKFFMETFFRKDTPIIRNVKIYSSKELRKATKNFCSGHKLGQGSFGCVYLGKLRNGQKVAIKVLSSESRQGTREFLNELSVISNINHHNLVKLHGCCVDGDQKMLVYNYLENNSLAQSLFGNSHSSIQLDWKTRVKICIGVASGLKYLHEEVRPVIVHRDIKASNILLDKDLSPKISDFGLAKLFPGNMTHISTRVAGTLGYLAPEYAIRGQLTKKADVYSFGVLLLEIVSGRCHTDPRLPRHAGAAGERARGLYESGDLKSLVDGTLKGVFDTEEAQRLLKIGLLCTQDTPKIRPSMSTIVKMLKGECAIGDKIMRPGLITDVMDLKIRTVEPVQFSASPPKSPSDSNSQVSMLAVAGSTVVEESP

SEQ ID NO: 200373 - protein, 134 aa, Oryza sativa
  unsure (1)..(134): unsure at all Xaa locations
  Clone ID: PAT_MRT4530_95849C.1.pep
MAYSSRLNRXLKPNKLLLRRIDGRFXVRSHVDLTFYSLVGSGRSXGRGGTTAPLFSRIQTSLISVWRAIARAQVEVRPQWENGPPNNASSQTKNYEITSPFWAAPGPIPLSLPRPTPLSPFLGQPPLSSLGPSA

SEQ ID NO: 200374 - protein, 346 aa, Oryza sativa
  unsure (1)..(346): unsure at all Xaa locations
  Clone ID: PAT_MRT4530_9584C.1.pep
SIKNPIYCVSRGGGRADRVHGKWGPRVSRSVHGGPGARGWRRSAPWVPRVSRTHGRGRLTAGPTWQPRGRARGRPRRRGRRERRXTRAPMVAAGDQRRGGVAPEREEGRGKRRGRSTAYPETAKAXKTGGPNREKTRPARLGIKRATVFPPFGGAKRNRRTGSAATRQKRTEGSPSKEKVRTGGGGGTELGGDGEKEGARREHDFDGESERRAAETEERSSGSNYIATGGRESGRRERKXGAEISAPLNTPARFAGLIPSESEGEREGKEGESGEGIAGGTGGRRRGGRREMTGGPHPSARVAGGPACQRRARAGRPMGRGXEREREREGMGRAGPRGKKGGGKEL

SEQ ID NO: 200375 - protein, 176 aa, Oryza sativa
  unsure (1)..(176): unsure at all Xaa locations
  Clone ID: PAT_MRT4530_95850C.1.pep
GKPGIFKGKQRPSKKQWQLGQKKKKGGGFGGKKTNWFLPTAPTPQTGKLVQARRFRTNPRGGKNSMGYGDTRTWDPNKGGKKRGGPGLGGGGPPKQSPGAPAGXPPLKKEGNSRGAPPPFLTSTTRTGGPTLKKSGGHGEXPLAPPGSGPSRGTPGAPFWGTRIRPPGGAAPPSRG

SEQ ID NO: 200376 - protein, 271 aa, Oryza sativa
  Clone ID: PAT_MRT4530_95851C.1.pep
MLVSFSPLFDASGSLTLASPMPLHSHLLLLLLALSTSVVAGSVSSSPSVCAGGGGGGGDAAIVAAAFRGVRNFQLPPCGAVRELRLPSRNLTGAVAWAALANLSGLAVLDLSGNALQGAIPGGFWRAPSLRHVDVSGNQLGGALRVVEASPRLESLNVSGNRFTGVAGAEALAGLRVLDVSANRIRAVPQGLRRLARVSRLDLSRNAMQGRFPGDLPPLAGLRFLNVSYNNFSGVVDGGAVKKFGHSAFVHSGNTSLVFSENSTARRPPPP

SEQ ID NO: 200377 - protein, 444 aa, Oryza sativa
  unsure (1)..(444): unsure at all Xaa locations
  Clone ID: PAT_MRT4530_95852C.1.pep
MSMAFSCAGARLQQGRVGVGKCRGGGGGGGGAAVXVRRSGXCLYPGGRRGLGVRGIRAELPPRACADGGGGATTSGSTVAVPDAGEVADHVKEVSTHGVTIVQILTLRGEVADVDGSGGNGKLPSSGGGGDGDNGGGGGGGDGGDGGDEGDDEFGPILSFDQVVQEVEKRGVSLPSLPADMIEAAKSVGIQKLLLLRYLDMQASAWPLGPAIRSCSLLRNRMLVDPSFLFKIGTEIVIDTCCATFAEVQKRGEEFWSEFELYAADMLVGVVVNVALVGMLAPYARFGGGSASPGLLGRVRHAYDSLPSSVFEAERPGYSFSIQQRIGTYFFKGILYGTVGFFCGLVGQGIANLIMTAKRSVKKSDDDVPVPPLLKTSALWGAFLGVSSNTRYQIINGLERVVEASPVAKRVPAVSLAFTVGVRFANNIYGGMQFVDWARMTGCQ

SEQ ID NO: 200378 - protein, 723 aa, Oryza sativa
  Clone ID: PAT_MRT4530_95853C.1.pep
MAGGGREENLSWEVFRRVVSYIVQRNHKYVLHIASLRARVGHNYLTEGGKDPPFILRSSCFQDQINWHAHEPQRQDFWTCTGVKQISQASCFSHQHAFGKPSGTKLRQFSLMAEKPPQSPSSATKTVVPPQTKIPKPTGTNEAENAQQQFMNSFTETRQGRVVQKYKLKLVADVPGTGPSKDGEVQKTQVSTDDSGSKGTTDGLGDKGDGLQDGLVEDLGEDSNREQLQFNNFQDWIDYTVQHALINQSGVLVNTLTNMVKFLVDGTIAKHQATGPVYLPGGVFPNYRYLITGNQQPATNITPVQPTAPVSAPAPAAPSSAPRQTTNPRLLTREQPQHVGQNINRLTQEQVAAMFLPNPLVANPAQSMPIQQTPPRQQTDQSVLPQVIPEHLVHNIQPNFQNYYGGNLSYQYQPPLPHVQYQQRGSPQPQFAPQFNQFEPIPQQMQGVPQQRPWADMIADVMRKQFGLKPKDYGNLYQHPYPEWFERMELSDLTAIRQRHDESVQHYSQRFREMRNKCYSLALTDSSVSRSCAFQGLIAPIKEKFSSQEFESLSHLAQKVTLHEQRFAEAKKNFKKINHVYPYMYDFDEENDSEVAAAEWVRSKKVVPCQWVRSSGKEERIDFDITKADKIFDLLLREKQIQLPDGHIIPSTEELGERRYCKWHNSGSHSTNDCKVFRQQIQVAIEGGKIKFDDSKKPMKVDGNPFSVNMVHTSGRTADGGKN

SEQ ID NO: 200379 - protein, 652 aa, Oryza sativa
  Clone ID: PAT_MRT4530_95854C.1.pep
MVSYRHFHQESKENGSKNKEHGALSRSRTRNQSSAEENKDQAAIFEKPEGTKNRHLKPLYINRFVNGKPMSKMMVDGGAAVNCIPNATFIKLDRRENDCSKGKCQLKMESPNYYFEGVVEGSNVYTKDTVDDLDDKQGKGFMSADDLEEIDIGLGDRPRPTFIIPVIKKNGKVRVCIDFQDLNKATPKDEYPMPVADQLVDAASGYKILSFMNGNAGYNQIFMAEEDIHKTAFRCPGAIGLFEWVVMTFGLKSTGATYQRAMNYIFHDLIGWLVEVYIDDVVVKSKEVENHIVDLRKVFERTRKYGLKMNPTKCAFGVSVGQFLGFLVHERGIEVTQRSINAIKKIHPPEDKKKRFISNLSGRLEPFTPLLRLKADQEFTWGAEQQRALDNIKEYLSSPPVLIPPQKGIPFRLYLSAGEKSIGSVLIQELEGKERAVFYLSRRLLDAETRYSPVEKLCLCLYFSCTKLRHYLLSNECTVICKADVVKYMLSAPILKGRVRKWIFALTEFDLRYESPKAIKGIGLVIISPRGASFEFAYTIKPYATNNQAEYQAVLKGLQLLKEVEADAIEIMGDSLLVISQLAREYECKNDTLMVYNEKCRELMDGFWLVTLKHVSREQNVEANDLAQGASGYKPMMRDIKIEVATISADDW

SEQ ID NO: 200380 - protein, 885 aa, Oryza sativa
  unsure (1)..(885): unsure at all Xaa locations
  Clone ID: PAT_MRT4530_95855C.1.pep
MKVDGNPFPVNMVHIAGRSADEGKTRGSQLNTTRIINKYQRRFCWNEAKFEPRQADVDDVEEVSARLVLSPEQAIFEKPEGTENRHLKPLYINGFVKGKPMSKMMVDGGAAVNLMPYTTFRKLDRNSDDLIKTNMVLKDFGGNPSETKGVLNVELTVSSKTVPTIFFVIDGKGSYSLLLGRDWIHANFCIHSTMHYQLKMESPNYYFEGVVEGSNVYTKDTVDDLNDKQGQGFMSADDLEEIDIGPGDRPRPTFLSKNLSLKFRTKLIELLKEYRDCFAWEYYEMLELSRSIVEHRLPIKPGVRPYQQPPRRCKADMLDAIKAEKNGKVRVCIDFRDLNNATPKDEYPMPVVDQLVDAASWHKILSWFVEVYIDDVVVKSKEVEDHIADLRKVFERTRKYGLKMNPTKCAFGVSAGQFLGFLVHERGIELRHYLLSNECIVICKADVVKYMLSAPILKGKVGKWIFALTEFDLRXCTHGCGIGLVIISPRGKXFEFAYTIMPYATNNQAEYEAVLKGLQLLKEVEADAVEIMGDSLLVISQLAGEYECKNDTLMVYNEKCRELMDGFRLVILKHVSREQNVEANNLAQGASGYKPMMRDIKVEVATITADDWRYDVYQYLQNLSQSASQKLHYKALKYTLLDDELYYRMIDGVLLKCLSADQAMVVMGERGDSTPQAILDGSDKPTSTRQLPLGRSSALVINGIWADVTQGGGAGKRGPHVSGTRGEGGGAGWWLKGRGGPPAGGAHRAAAQGGRGVDGGSARLKPADHGKAAAAAGGLRRRPADGEAAAAGVKATAHGRNSGVARRSREGEGKEERCPHRRCEGIGFRRWRMAIEWDRGAGDTGERGGGFSGGGARPEAVVGGGAWEERALKIPLKILLIDCDI

SEQ ID NO: 200381 - protein, 261 aa, Oryza sativa
  Clone ID: PAT_MRT4530_95856C.1.pep
MGRVIRAQRKGAGSVFKSHTHHRKGPARFRSLDFGERNGYLKGVVTDIIHDPGRGAPLAKVTFRHPFRYKHQKELFVAAEGMYTGQFVYCGRRATLSIGNVLPIRSVPEGAVVCNVEHHVGDRGVFARASGDYAIVISHNPDNGTSRIKLPSGAKKIVPSSCRAMIGQVAGGGRTEKPMLKAGNAYHKYRVKRNCWPKVRGVAMNPVEHPHGGGNHQHIGHASTVRRDAPPGQKVGLIAARRTGRLRGQAAATAAKADKAT

SEQ ID NO: 200382 - protein, 1391 aa, Oryza sativa
  unsure (1)..(1391): unsure at all Xaa locations
  Clone ID: PAT_MRT4530_95857C.1.pep
MMKHTQQQFMNSLTETKQGKVIQKYKLKLVADMPGMGSSKDGDTQAAKGSTNDSGDKGTYPKDGEVGVVGDGSEEQLQFNNFQDQIDYAVQHALINQSGVLVNTLTNMVKTVVNGTIAEHQATGPVYLPGGVFPNYRPLVTARLRTPDNRQVQHVVNQVVPEHLVHNVQPDQSVVAQVIPEHLHQQGGSPQLQTLPQFNQFAPQLNQFEPIQQHVQGVPQQRPWADMIADVMREQFGLKPKDTGNLYRHPYPEWFERVPLPSRYKVPDFSKFSGQDNVSTYEHISRFLAQCGEASAIDTLRGLIAPIKEKFSSQDFESLSHLAQKVTFHEQRFAEAKKNFKKINHVYPYIYDSEEDDDSEVSAAEWVRSKKVIPCQWVRSSGKEERQQIQAAIEGGKVKFDDSKKPMKVDGNPFPINMVHTSGRTADGGKNQCFQMNSARIINKYQRKYDKQQERYCEEDDGGFDPHWDCEFFRFCWNKGMRLPSIEDCPGCSDNTGSSSRSNNRGNRLGHKRVSVHQRLGPVNQDCYQDDDEDRKTQWCPSGIFTKNQKRRVQRLRNRERFQEVQQEINHQLRKTKTKQEWRVKSAVTTADEVEANKARRLLKGKATASASVNMIFMLPAEFEARQADVDDVEEVSARLVLSPEQAIFEKPEGTENRHLKPLYINGFVNGKPMSKMMVDGGAAVNLMPYATFRKLGRNPDNLTKTNMMESPNYYVEGVLEGSNVYTKDTVDDLDDKQGEGFMSADDLEEIDIGPGDRPRPTFISKNLSPEFRTKLIELLKEYRDCFAWEYFEMPGLSRSIVEHRLPIKPGVRPYQQPPKRCKADMLDAVKAEVARLYDAGFIRPCWYAEWVSNIVPVIKKIGKVRVCIDFRDLNKATLKDEYPMPIADQLVDAASGHKILSFMDGNAGYNQIFMAEEDIHKTAFRCLGAIGLFEWVVMTFSLKSAGATYQRAMNYIFHDLIGWLVEVYIDDVVVKSKEIENHITDLRKVFERTRKYGLKMNPTKCAFGVSAGQFLGFLVHGRGIEDKKKLQELIGKINFIRRFISNLSGRLEPFTPLLRLKADQKFTWGAEQQKALDNIKKYLSSPPVLISPQKGAPFKLYLSAVCTHGCGIGLVIISPQGASFKFAYTIKPYATNNQAEYEAVLKGLQLLKEAEADAIKIMGDSLLVISQLAGEYECKNDTLMNVEANDLAQGASGFKPMVKDVKVEVATISADDWRYDVYQYLQNPSQVVSRKLRYKALKYTLLDDELYHRTVDGVLLKCLSTDQAKVAIGEFTKWVEAIPLKKVDSGDAVQFVKEHIIYRFVPPYKLVYGHEAVLPWEIRISSRRTELQNELTADEYYNLMADEKEDLVQSRLRALAKVTRDKERVARHYNKKVVPXLFLKGSLFGS

SEQ ID NO: 200383 - protein, 60 aa, Oryza sativa
  Clone ID: PAT_MRT4530_95858C.1.pep
MRSGSPAVAFPALCLEGEEEEEERESEYAALPPPDYAMPMPRPQDGGTLKRHQLSLSRHS

SEQ ID NO: 200384 - protein, 1969 aa, Oryza sativa
  unsure (1)..(1969): unsure at all Xaa locations
  Clone ID: PAT_MRT4530_95859C.1.pep
INWHAHKTKGKIXRTCTEVKQIFQASCFXASTRFWHARWVTASMSADKQPLPSTGKSADLQSKIPKPNASDVNEGNIVPVTIDKLSPEQKKDFKLMTKSAQEQFMKSFAETRGKVYEKYKVKVVAADEVVSSSSQGDKGITDGSGNKGDDFQDGVVEDLGEDGNEVQPQFNNFQDRIDYAVQHALINQSGXLVNTLTNMVKSLVDGTIAEHQATGPVYLLGGIFPNYRPLVTGNQQGVSNVSNVPPVQLTAPVSAPAPAAPSSAQRQMINPQLLTXREQPQHVGQNINRLSQEQIASMFLPTXRLVDPLSRSSFASCPTRGIASASVCSSVQSVCADTVASAKGASAETMGRYXADVMREQFGPKPKDPGNLYRXPYPEWFERVPLPNRYKVPDFSKFSGQDNVSTYEHVSRFLAXCGEASAVDALRVRLFPLSLSGSAFTWFSSLPYNSINSWADLEKQFHNYFYSGIHEMKLSDLTTIRQKHDESVQDYIQRFREMRNRCYSLALTNSQLADLAFQCLIAPIKEKFSSQEFESWSHLAQKVTLHEQRFAEAKKNFKKINHVYPDMHGSHEEDDSEVAAAEXVWSKKVVPCPWVRSSGKVERFDFDITKAEKIIDLLLREKQIQLPAGHIIPSAEELGKRKYCKWHNSGSHNTNDCKVFRQQIQVAIEGGKIKFDDSKKPMKVDGNFFPVNMVHTAGRPADQRKIRGSQLSSTRIINKYQRRYDKQQERYCEEDDEGMRLPSIEDCPGCSDTAGGSSRSYNRGNRMSQKRVPVHWRLGPVNQDYHHDKDEDRKTQWCPTGIFTKNQKRRKTKTKQEWRIKSTVTTADEVEADKAKRLLKGKATASALVNMVFMLPAEFEARQANVDEVEEASARLVLSPEQAIFEKPEGTENRHLKPLYINGFVNREPMSKMIVDGGAAVNLMPYATFRKLGRNSDDLIKTNMVLKDFGGNPSETKGVLNVELTVGSKTVPTTFFVIDGKGSYSLLLGRDWIHANCCILSTMHQCLIQWQGDKIEIVPADSQFKMESPNNYFEGVVEGPNVYTKDTVDDLDDKQGQGFMSAGDLEEIDIGLEFRTKLIELLKEYRDCFAWEYYEMPGLSRSIVEHRLPIKPGVRPYQRPCLYDASFIHPCRYAEWVSNIVPVIKKNDLNKATPKDEYPMPVADQLVDAASGHKILSFVDGNAGYNQIFMAEEDIYKTAFRCPGAIGLFEWVVMTFGLKSVGATYQRAMNYIFHDLIGWLVEVYIDDVVVKSKEIENHIADLRKVFERTRKYGLKMNPTKCAFGVSASQFLGFLVHERGIDVTKRSINTIKKIQPPEDKKKLRELIGKTNFVRRFICNLSGRLDPFTPLLRLKADQEFTWGXEQQKALDNIKEYLSSPPVLYLSAGEKSIGSVLIXELEGKERAVFYLSRRLLDAETRYSPVEKLCLCLYFSCTKLRHYLLSNECTVICKADVVKYMLSAPILKGRVGKWIFALTEFDLRYESPKAIKGQIIADFIVDHRDDSIGLVDXHVPWTLFFDGSVCTHGCGISLVIIPPRVASFEFARTIKPYATNNQAEYEAVLKGFQLLKEVEADAIEIMGDLLLVINQLAGEYECRNDTLMIYNEKCRELMDGFRLVTLKHVSQEQNVGANDLAQGASGYKPMMKDIKVXVSMITADDWRYDPYQYLQNPSQLASRKLRYKALKYTLLDDELYYRTIDGVLLKCLSTDQAKVVIGEVHEGICGTHQSAHKMKWLLRRAGYFWPTMLEDCFRYYKGCQDCQKFGTIQRSPTSAMNPIIKPWPFRGWGMDMIGQINPPSSKGHKFILVTTDYFTKWVEAVPLKKVDSGDAIQFVKEHIIYRXGIPQIITTDQGLIFVFDEFVQFANSMGIKLLNSSPYYAQANGQAEASNKSLIKLVKRKISDYPRQWHSRLAEALWSYRMACHRSIQVPPYKIVYGHEAVLPWEVRIGSRRMDLLNGKYLKKYYPSVWVNA

SEQ ID NO: 200385 - protein, 97 aa, Oryza sativa
  Clone ID: PAT_MRT4530_9585C.1.pep
TFPSLKKSLGRFTMAGCHDLSPISTNQSKGISSDSPHPLCESLVQFLEEESCKKLGILLRPWTQELHTLIPTYGLQQFNLGTSSYSIWCLLPQISKC

SEQ ID NO: 200386 - protein, 385 aa, Oryza sativa
  Clone ID: PAT_MRT4530_95860C.1.pep
EFESLSHLAQKVTLHEQRFAEAKKNFKKINHVYPHMYDFDEENDSEVAAAEWVRSKKVVPCQWVRSSGKEERIDFDITKADKIFDLLLREKQIQLPDGHIIPSTEELGERRYCKWHNSGSHSTNDCKVFRQQIQVAIEGGKIKFDDSKKPMKVDGNPFSVNMAIFEKPEGTKNRHLKPLYINRFVNGKPMSKMMFDGGAAVNLMPYATFRKLGRSADDLIKMNMVLKNFGGNPSETKGVLNVELTVGNKIVPTTFFVIDGKGSYSLLLGRDWIHANCCIPSTMHQCLIKWQGDKIEIVLADSQLKMESPDYYFEGVVEGSNVYTKDTVDDLDDKQGKGFMSADDLEEIDIGLGDRPRPTFISKNLSPEFRTKLIELLKEYRDCFA

SEQ ID NO: 200387 - protein, 193 aa, Oryza sativa
  unsure (1)..(193): unsure at all Xaa locations
  Clone ID: PAT_MRT4530_95861C.1.pep
FYLSRRLLDAETRYSLVEKLCLCLYFSCTKLRHYLLSNEYTVICKADVVKYMLLAPILNGRVGKWIFALTEFDLRYESPKAIKGQAIADFIVDHRDDSIGSVDIVPXTLFFDGSLCTHGCGIGLVIISPRGTSFEFTYTIKPYATNNQSEYEVVLKGLQLLXGVEADAIEIMGDSLLVISQLAGEYECKNDTL

SEQ ID NO: 200388 - protein, 354 aa, Oryza sativa
  Clone ID: PAT_MRT4530_95862C.1.pep
MAAECGSGNCDAWAARDPSGILSPYKFNRRAVQSDDVSLRITHCGVCYADVAWTRNILNNSMYPLVPGHEIAGVVTEVGADVKSFKVGDHVGVGTYVNSCRDCENCNSSLENYCSQHVVTFNGVDTDGTVTKGGYSTHIVVHERYCFKIPDGYPLEKAAPLLCAGITVYSPMMRHNMNQPGKSLGVIGLGGLGHMAVKFGKAFGLKVTVISTSESKRKEAIDLLGADNFVVSSDENQMETLKSSLNFIIDTASGDHPFDPYLTLLKVGGVMALLSFPSEIKVHPANLNLGGRSLSGSVTGGTKDIQEMINFCAANKIYPDIEMIKIDYINEALQRLVDRDVRFRFVIDIENSFK

SEQ ID NO: 200389 - protein, 294 aa, Oryza sativa
  unsure (1)..(294): unsure at all Xaa locations
  Clone ID: PAT_MRT4530_95863C.1.pep
MFLPNPLVANPAQSMPIQQTPPRQQTVLPIQQQNLQHTSAGLGTPDNRXRQHVVNQVIPEHLVHNVQQDQSVLPQVIPEHLVHNIQPNFQNYYGGNLSYQYQPPLPHVQYQQRGSPQPQFAPQFNQFEPIPQQMQGVPQQRPWADMIADVMRKQFGLKPKDYGNLYQHPYPEWFERVPLPGXYKVPDFSKFSGQNNVSTYEHVSRFLVQCGEASAIDALRVRLFPLSLSGSAFTWFSSLPYNSVNSWADLEKQFHSYFYSEIHEMKLSDLTAIRQKHDESVQHYIQRVKEMKDN

SEQ ID NO: 200390 - protein, 194 aa, Oryza sativa
  unsure (1)..(194): unsure at all Xaa locations
  Clone ID: PAT_MRT4530_95864C.1.pep
MAINLSQSLDLNIYRLKDYDQINWHAHEPQRQDFWTCTGVKQISQASCFXASTRFWQAQWDQXRQFSLMAEKPPQSPSSATKTVVPPQTKIPKPTGTNEAENAQQQFMNSFTETRQGRVVQKYKLKLVADVPGTGPSKDGEVQKTQVSTDDSGSKGTTDGLGDKGDGLQDGLVEDLGENKHKRPIAVQPLSKIE

SEQ ID NO: 200391 - protein, 118 aa, Oryza sativa
  unsure (1)..(118): unsure at all Xaa locations
  Clone ID: PAT_MRT4530_95865C.1.pep
MMTYSLPDCEALRRRQCDGRGAASAAQDHVWDDWWRRSARVNHVCCRRGALYHMLGGIYXSLGATEARLPMGEVLPGCRRGDLQPAPGSLLAFCSGDMRNAPGGGCFWLGFPRTPRTG

SEQ ID NO: 200392 - protein, 164 aa, Oryza sativa
  unsure (1)..(164): unsure at all Xaa locations
  Clone ID: PAT_MRT4530_95866C.1.pep
MHVYIYIYICTYIYFSVNIYFGNIYVHKMLSALNYKYVCNICIYTYIHRHIYIYICIYIHAXIYILQCIYMYCNIYIYIYIYIYIYIYIYIYIYIINHVAIGPYMYVYICICMYVCIYVYICIYMYICIYIYVYTYTCIYVYVYTYTCIYVYVYVYRKIIKLGF

SEQ ID NO: 200393 - protein, 75 aa, Oryza sativa
  Clone ID: PAT_MRT4530_95867C.1.pep
FVDAATVWNTKWKQSKADYPILPDFGDYKRVRASAGIALQWQSPIGPLSFSYAKPIKKYAGDEIEQFQFTVGSTF

SEQ ID NO: 200394 - protein, 574 aa, Oryza sativa
  Clone ID: PAT_MRT4530_95868C.1.pep
MAMAGADGPTAGAAAAVRWRGGESLLLLLLRWPSSAELVAAWGAARASAVAPALAAASAACLALSAMLLADAVLMAAACFARRRPDRRYRATPLGAGAGADDDDDDEEAGRVAYPMVLVQIPMYNEREVYKLSIGAACGLSWPSDRLIVQVLDDSTDPTVKTWYDRLRKTLVQQAHPAQADMDVHQSTKRKNKELMTRVPILECDSNHGLASIISSYLIAVGLVELECKSWGNKGKNVKYEVRNTRKGYKAGALKEGLLRDYVQQCNYVAIFDADFQPEPDFLLRTIPYLVRNPQIGLVQAHWEFGTAGVWRISALEEAGGWKDRTTVEDMDLAVRAGLKGWKFVYLADVKVKSELPSNLKTYRHQQHRWTCGAANLFRKVGAEILFTKEVPFWWKFYLLYSFFFVRKVVAHVVPFMLYCVVIPFSVLIPEVTVPVWGVVYVPTTITLLHAIRNTSSIHFIPFWILFENVMSFHRTKAMFIGLLELGGVNEWVVTEKLGNGSNTKPASQILERPPCRFWDRWTMSEILFSIFLFFCATYNLAYGGDYYFVYIYLQAIAFLVVGIGFCGTISSNS

SEQ ID NO: 200395 - protein, 384 aa, Oryza sativa
  unsure (1)..(384): unsure at all Xaa locations
  Clone ID: PAT_MRT4530_95869C.1.pep
CLLDLFDVCCRSSTILLFPGHHHLPSPSARAGSSHPGRRIWDTEPPPPATVSPPAAPXEGEEARGGEALPPVATRGRRAPGARERREGAEGAATAGSAXQLPSTSPPSSDPPASAANPPPPPPPDDPRDLPRLPPRHRPRPSATPLHHGAPPAWPTGPHLLPXPGHWPRRPPPAGXAAAAAPPRLAAAAPPPPPRRPPRRRPRPPPRRPSRPDPPSAAATAAGXPPRTSPMPPPPDPPSAPPPPXPPPRCPGRRPSRPAGPQPPPXPPDLEEARPGPPPPRRPXAAPPDVAEARSGRPPPXVRPAAAPLLPLDLAEGRASPALPPPPPPPPLAGERAPRRRCSVGEPSPTPLLAGGGRHCRRRRRSRGEGTAPPPLAGIVCHRR

SEQ ID NO: 200396 - protein, 666 aa, Oryza sativa
  unsure (1)..(666): unsure at all Xaa locations
  Clone ID: PAT_MRT4530_9586C.1.pep
MDEVVATMDISEANEGYASCGSVIEMSRQMKATRVGARAQSWPACPGIPAVGRVGSVLLFTARMGKGLCHVFYDGFQXAMECRVKACLVGWPGLAWDELGPRSGCQFGPNHRRPWVKAVLGGQLCEEEDVVNCLPKLRKTVGSASEAREAVKPDVKQEKKCSSVKVLSLVSDLSLPFVFPLSLSKXLQQMADNEKGNKVRSQEMGTSSSRVNEAPDTNCVAVVQHLINQNKLLIEILQQHRMPILNPSQMQPQAQLEAIQALTPQVSAPPTSQKAPHAMSHVDSKEASIIGFMCDEQGHYARNCPQQKRKAPMRTEDEVRKMIITSTEWPPPGMTKRQRRNSFRGAPXLTEHLLANGGRVSDSEDSDQVSSDDEDEKSPQGFNQNKMEHKACSHCGEIGHVASSCATTCFHCKEDHPPGECPMSRITCFLCEGTDHVPKDCQLSFLLTKKMANQHARSNGEKHQGNTNPRQDYSFSLTPVPGQRNQNEKRKYXVRKDICCFNCQEMCHFTDKCPKPRNIATSTSVHATPHNQKLAPQRIVIHASRSIPIARVATAPTPVIALPQGVNAQFQPQPPVDKTEASICVVPLDVPAQQPRNQVQDEEPERKKVIVYFNCREEGHYSRDCPLPRQNQPPHFRQFTGSRHTNRQVVTGANAVPVKPSASQKQ

SEQ ID NO: 200397 - protein, 287 aa, Oryza sativa
  Clone ID: PAT_MRT4530_95870C.1.pep
MPPLRRRLLLLCLYVAAASRLAPCSTAAALPDPAPLDPALIFPSATPAQPGSATIPAFPEQSDAASGTSSTCPLTPSPSLLPAVTSSCVDGGGALTTRLRCCPPLAAWLFAAYAPAALAQRPAKSAAAAAVDMPVPPDDSEACAGAADRALRAEGAALPRPPGANGTCDVAFCYCGVRLRRLTCGPPPAEGGQWAPADAAARRLEKDCAEPGVPGCSKCLRALTTSCTVNRQRRCSHHVYITIKIILVTHESDNTHLSHDCIAPLLLSNALLGDMAFNESHGQEGSH

SEQ ID NO: 200398 - protein, 57 aa, Oryza sativa
  Clone ID: PAT_MRT4530_95871C.1.pep
VVYTPQIIPSFINSQITTNQEPTNVIIRHKLWLVLPPQVPNHTGGIPTKNKKTRGTK

SEQ ID NO: 200399 - protein, 153 aa, Oryza sativa
  Clone ID: PAT_MRT4530_95872C.1.pep
MAIPVAVSEVPTEHFVRDIGAAMGVRFLACEATYYNGDLVGGALIPKPAANHGANWIPRDTVFCLIMHMSARYILLNSLELFMEGRDGGGGAGGRDSFSANSASTSSAKKSRIDTSMVSWDWYRHLGSVGVGWDRFLRRTLSDVTVKWCQSGV

SEQ ID NO: 200400 - protein, 382 aa, Oryza sativa
  Clone ID: PAT_MRT4530_95873C.1.pep
MEEESSTLIRRRTSLPATTVMMVVLLLLLCCNCGVEVVVATADESSPAPVGKGGSDHGSCPGGDGDGEGYRKQLWVFGDSYADTGNLGNLGRELTHAWYYPYGITFPRHPTGRFSDGRVLTDFVASAVGIATPVAYKLRRRGGHGGEVASRGMNFAVGGSGVLDTGYFQRNISSQIDLFQKQLRGCGPTGVALVVVSGNDYSAVVDKNNGTSEAAIAYIPTVVRGLREQLRRLRDEVGMKKVVVTNLHPMGCTPYFTRLLNYSGCDTLANAGSDQHNAALRSVLHDLDPANTTFLLLDLHTPFLNLITAAADDKFPVRLRPCCETFTADGHCGQEDEAGNKQYTVCDDPERHFYWDDVHPTQAAWAAVAQAFTPAIHRFLST

SEQ ID NO: 200401 - protein, 46 aa, Oryza sativa
  Clone ID: PAT_MRT4530_95874C.1.pep
PQQTKTVQCSVKLLSDKRLIETNKFPMHTKDTSDLLKKKFGTRPRA

SEQ ID NO: 200402 - protein, 107 aa, Oryza sativa
  Clone ID: PAT_MRT4530_95875C.1.pep
MLSVNISSDHLVPAEPNEAHEVKIGHTDFVSIEGVRRGEKGGAPRCGGHHLITPWLRVFPSHALQRPMSIIVGIHRITTKATPPCRLLIRISRSSPATASPNPCQPH

SEQ ID NO: 200403 - protein, 314 aa, Oryza sativa
  unsure (1)..(314): unsure at all Xaa locations
  Clone ID: PAT_MRT4530_95876C.1.pep
MSKNKKFWSNNLIHQASGYNMKKGVFFILEKSESKENXRIPLXEYLKDPSLRVDRKIRRQVFKYTLLDRELYRRKIDGVILKFLDNDQSKVAMGEVHEGICGTHKSARKMDXLLRRVGFYWPKVIDDCFKYYRGCEVCQRIGNVQLALTAVLNPIIKPWLFRGWALDFIGQIYPSSSKGHRFVLIAMNYFTKWAEAVPFMNFIYTEANGXAESSNKSLLNLVKEKIKERQKKWHEVLSEALXAHRISKHGATEVTPFELVSGQKPXLPVEVSLGSLRYFKXDDLSVEDXKTMMGGNFEDVIGKCLNTLKEMEAL

SEQ ID NO: 200404 - protein, 182 aa, Oryza sativa
  Clone ID: PAT_MRT4530_95877C.1.pep
MAAHLAGGHSAPPCRSAQTPDAEYSPPHRSPAEPNEAHEVKIGHTDFVSIEGVRRGEKGGAPRCGAQRQQKGERSDDKKAAEGRTRVAGRSGAYQRPMSIIVGIHRITTKATPPCRLLIRISRSSPATASPNPCQPHRPLIHAARSSLGAPPLGPCRPELDGHAAPLSETGEVVVATCISRP

SEQ ID NO: 200405 - protein, 109 aa, Oryza sativa
  Clone ID: PAT_MRT4530_95878C.1.pep
MTKMIEALGFGERPGVALGHTLLWAKPTTQLQGPKLKIRFGLDEQLRSVSSTRAKENCSTKALPYDHITAKQSSIESSVKRPRTNCVDSILPPDKAKQVRKRRDTSSAQ

SEQ ID NO: 200406 - protein, 99 aa, Oryza sativa
  unsure (1)..(99): unsure at all Xaa locations
  Clone ID: PAT_MRT4530_95879C.1.pep
PRVRLEFLRIWPNGXNTTDEAIVAYIVNHPCLQSYSERMSHSEHLEHIYPIHAAHSTTDISALATFTWRDKFWRSQNYILRLLMVPMEEHIWYMECGMI

SEQ ID NO: 200407 - protein, 457 aa, Oryza sativa
  Clone ID: PAT_MRT4530_9587C.1.pep
MGKKARLGFVATIASLLSAVARLHHPPMFAATAGKECLGFVAVGSSASVGKMGDERSGGGHLGRRNDRSGGGTMVRGVGAIAREARRRMTVEEDEAGEEEQGSKPASQIEGKEMESLPVPSVQSMVAADGGAHVPPRYIRPRDEAVATDGETEIPVIDFQRLQLGHDEEMARLDRACQDWGFFQLINHSVPEDVVDGMKANARGFFELPAETKKQFAQERGQLDGYGQLFVVSEDQKLDWADILFLNTLPVQNRNFRFWPNQLAKFRSALDKYSAAVKSIVDFLLVTVANNLGVDPEVIANKCGTDGIQAVRMNYYPPCVQADKVIGFSPHSDSDLLTLVLQVNEVDGLQIKRNETWFPVRPLEGAFIVNVGDILQIFTNGRYKSAEHRAVVDMKKERLSIAAFHSPSVHAVIGPLKEMVAHEHEAVYRSIGHDEFMKLFFSSKLEGKSFLDRMKKL

SEQ ID NO: 200408 - protein, 50 aa, Oryza sativa
  Clone ID: PAT_MRT4530_95880C.1.pep
TSEGSLSAIREVNIIFSHQCIDCILQIVQGIGIVEVNSIVVAAMDSPSNV

SEQ ID NO: 200409 - protein, 669 aa, Oryza sativa
  unsure (1)..(669): unsure at all Xaa locations
  Clone ID: PAT_MRT4530_95881C.1.pep
MVSFSYSDCQILNMLTISSNYLITNLPGLPRRGTAPPRGRWSASAASAASRGVAAKAARRGVREYVEAAREMVRRPDGGPARWFSPLECGGGGGRLPGAPTMLYLPGIDGVGLGLIRHHERLAKMFDMWCLHIPVEDCTSFEGLVEYVESAVKSEGQRARDRPVYLVGESVGACIALAVAARNPDIDLVLILVNPGTSFHKSQLQSLSVFLDLVPEPFHLTTPQLLNFLTGSVNFSMRIFMTCLMDKXILFYSTGEEMQSLLDVLPKESIVWKLKMLRTASSFVNSRLHAVKAQTLVLASWNDELLPSREEAERLRDALEKCRIRNFKDNGHKILLEAEFDLATAIKGAGYYRRSLETDFVSDYLPLTPDEFQKATDHIRMLQYIANPVMLSTLPDGKIVRGLSGLPKQGPAVIVGYHMLLGFELGPLVTGVLRSSGIHIRGLAHPFMFDKKKEKIMPDPSYYDMHRIMGAVPVTAGNFYKLLAEKHFVLLYPGGAREALHRKGEEYKLFWPEQSEFVRMASRFGATIIPFGVVGEDDICDMLLDYDDLMKIPFYDILDRMLNEDGVKLRTDSTGELKYQRIHPVVAAPKIPGRFYFIFGKPIETRGREKELRDKENAQHLYLNVKSEVESCMKYLKEKREKDPYRNILARLLYQMVHGLDAEVPTFDP

SEQ ID NO: 200410 - protein, 390 aa, Oryza sativa
  Clone ID: PAT_MRT4530_95882C.1.pep
MTMILRLQREKAEAMMEARQFRRYAEEKMSHDAAELAALEDLLAKRDAALRALQSSSSSRGGGGGRGVGGGSGRATPSFPGSSPHHYPSTPTPASAAAAANYPPLRCFIDHPPTASEADALDAQTPREHLTRLAHRVHMLERGVHPMATTTTTTPIIRVAPGSAFPRPTRAYSDADSLEFCDGEYFPDDVDCGASDRVYTVDAIHGRPLAVPEGSCTPGGSSCCGGGGVPWAEDEEMRRLSARLQALEADRETMRQAIVSMGAEKAQVVLLKEIAQQLCKEATPPLPPSAVTVGHHLYKGAAAPPAVTVKMRPPRPPVVMHRRVIDAPPAAKTSYIGAVAKWFTSIVSRYKKTPRTKYPIGQCGNNVGLLLLLDKAPRPGHGHQKMPKKI

SEQ ID NO: 200411 - protein, 159 aa, Oryza sativa
  Clone ID: PAT_MRT4530_95883C.1.pep
GNLASVVVAVDGSEESMNALRWALDNLRLRPDGALVVLHVQPPPSIAAGLNPGPIPFGGPSEVEVPAFTQAIEAHQRRITQAILDHALKICSEKNVEVKTDVVVGDPKEKICEVTANLKADLLVMGCRAFGPLKRMFLGSVSNYCINNVVCPVVVIKGT

SEQ ID NO: 200412 - protein, 108 aa, Oryza sativa
  Clone ID: PAT_MRT4530_95884C.1.pep
SQFTSWFHRTDSTGELKYQRIHPVVAAPKIPGRFYFIFGKPIETRGREKELRDKENAQHLYLNVKSEVESCMKYLKEKREKDPYRNILARLLYQMVHGLDAEVPTFDP

SEQ ID NO: 200413 - protein, 120 aa, Oryza sativa
  unsure (1)..(120): unsure at all Xaa locations
  Clone ID: PAT_MRT4530_95885C.1.pep
ECARARVIKEKTRGAAVTVRRASRATTHADAGDGGGSAAAPPARTATPRDGAAAGAVERVRGVGGVAGRGRKGGEERGEGVRGGGAPTMLYLPGIDGVGLGLIRHHERLAXMFDMWCLHI

SEQ ID NO: 200414 - protein, 129 aa, Oryza sativa
  Clone ID: PAT_MRT4530_95886C.1.pep
IQKLHGNRADFMYNIHPGAPILWSSMNYEPRISLSKCSSMSRIYPLSEIIIAYPAEKKEMSHCDLVSFIKRCKIKQVPANLPKDQHDHINTPEKRMKRIQLLIHTIRKIHSLNRSQIFLNKFSLFLRIP

SEQ ID NO: 200415 - protein, 371 aa, Oryza sativa
  Clone ID: PAT_MRT4530_95887C.1.pep
MGTAAVAAAERPKQRRSSHLWKKALLHFSLCFVMGFFTGFAPSSSSSWRAGSGGGGGVQPRHQLAASHVAVNQQVSLVPDAAAAEAAGVGNGAVVDVGDDEGGEGARRMLIVVTTTRGERRRRRGELLRLAHTLRLVRPPVVWVVVEPPADAAATAEVLRGTGVMYRHLAFRPEENFTTADAEAHAQRNAALAHVEKHRLSGVVHFADAAGVYDAHFFDEIRQIEAFGTWPVATMSAGEKKVVVEGPLCSDSKVVGWFSRDFNDGTTRAVTYNTEADLNPAGAAGTRAHTIDVSGFAFNSSILWDPERWGRPTSLPDTSQDSIKFVQEVVLEDRTKLKGIPSDCSQIMVWQYTMPMQVHAQTSTPKTHNRR

SEQ ID NO: 200416 - protein, 111 aa, Oryza sativa
  unsure (1)..(111): unsure at all Xaa locations
  Clone ID: PAT_MRT4530_95888C.1.pep
DESPNGVQQRMRFVAMGMCTMYYTCSYALRGLLTERYIFLXETAYNAYRRSCYLLFYTIGGFSPLAVLCFALALTTFFSVVLSTLTYLLFFSDFLMNHYRILRYWLSMHYM

SEQ ID NO: 200417 - protein, 138 aa, Oryza sativa
  Clone ID: PAT_MRT4530_95889C.1.pep
MPIWSSVDPVATVAQIAGVDAYGLISMVTERAEKVRRNKYECRQLAEHVETVGGLLHHVERDDPRIAAPLEKLEGTLREAVVLVSSCEASSYFRRFFRGAKIAEQFQRIKEKIDFYLQAPALPRHHLHLHHQRLLPAS

SEQ ID NO: 200418 - protein, 475 aa, Oryza sativa
  Clone ID: PAT_MRT4530_9588C.1.pep
INLQNKPNIHHNSKRLRSVKVLSLVSNLSLPFVFPLSLSKPLQQMADNEKGNKVRSQDIGTSSSRVNEAQDTSCAAVVQHLINQNKLLIEILQQHRMPILNPSQMQPQVQLEAVQALTPQVSAPPTSQKAPHAMPHVDPKEASIICFMCDEQGHYARNCPQQKRKAPMRTEGEVRKMIITSTEWPPPGMTRRQRRNTFRGAPQLTEHLLANGGRVSDSEDSDQVSSEDEDEKSPQGFNQDKMERKACSRCGEIGHVASSCASTCVHCEEDHPPDRCPTSRITCFFCEGTDHVPKDCQFSFLLTKKMANQPAGFNGEKHQGNTNPRQDYSFSLTPVPGQRNQNEKRKCRVREDICCFNCQGMGHFADKCPKPRNIAAGTSVHATPCNQKLAPQRMVIHASRSSPIARVATAPIPMSALPQGVNAQFQPQPPADKTDASICVVPLEAPIQQLRNQVQDEEPECTTILCNDSLSKELS

SEQ ID NO: 200419 - protein, 117 aa, Oryza sativa
  Clone ID: PAT_MRT4530_95890C.1.pep
SVSQARSAADRSTAFSAVVSSLSFVVFVSSCDRRPGSLPSCRILWQRLLLGEVRGSPPSCAAGGLMRWPCRAPCSDDASSPLVARCLAVVAFLASAVGLTDSVAGIPLLPVLVPLGE

SEQ ID NO: 200420 - protein, 83 aa, Oryza sativa
  Clone ID: PAT_MRT4530_95891C.1.pep
CPPPPGPPPNPGRGGPNRETGPEPPRKPGIPKGGPNPHGQQQGKKDPQHKNGEPTNLHTKMETRAKTGKPGGNKRGPTPKKRG

SEQ ID NO: 200421 - protein, 48 aa, Oryza sativa
  Clone ID: PAT_MRT4530_95892C.1.pep
KPDNQLLKLLTIFLKRPKHKCISPNRPFNGPTGTPRPAGEDYNKYSWA

SEQ ID NO: 200422 - protein, 93 aa, Oryza sativa
  Clone ID: PAT_MRT4530_95893C.1.pep
PPPGTRATAVAILSLPPPHTPTRRPGPPDPVTPASSPADPAPLRRGETKRPSLPLPLPLPLHPLHFRIGGRRRLGGLRLMVTKGKTCNALGTV

SEQ ID NO: 200423 - protein, 372 aa, Oryza sativa
  Clone ID: PAT_MRT4530_95894C.1.pep
MTTMSTAPRTATTITMARLFQPPPLYGLEYRGAGFGRRSTAVVVKPKDAAASSSTPSPSVDLPPLLWSPIPTFPESPILQGKILKSFKASKASHTDPKQPFEHVDHDRFTIFGCETFTVPTTSQRGQRLYFLYSMVHSRAPDCEVAEISPRGSLGSPYLVYKGVIMIRERCTALNCVMQELLYLDNILPPTDVGLDLVFTPRIHVYTKEIVDRLVSADQEAGGDGTPPFCNLPLRPLESTCYAIKQPGKGKGPMVEAIRAPAYTFPNMSAIIWPHLGGLPNEQRSSLQESIAEYDRQAKESAVEIERHFRIVVDKQHMLCQRVIDAPQANRAAAPQPIVPQPARCQEVNRRQSNVQPTGAETNPNEEDEQQQ

SEQ ID NO: 200424 - protein, 87 aa, Oryza sativa
  unsure (1)..(87): unsure at all Xaa locations
  Clone ID: PAT_MRT4530_95895C.1.pep
SCRLXTDSIXPXPXNPQPNPPPPPPPPPLAALGPPPASPEXKLSAPKSRSSNPTPGAPRSAGXXSRIGESERPSTDWGSRDSALLSS

SEQ ID NO: 200425 - protein, 60 aa, Oryza sativa
  Clone ID: PAT_MRT4530_95896C.1.pep
LFPPSFLFWSISAWIIVRSPRASLAASRLCWFSGLPVQPPLLPMLFLLIFGSSVISLTSP

SEQ ID NO: 200426 - protein, 66 aa, Oryza sativa
  Clone ID: PAT_MRT4530_95897C.1.pep
LSICTHDAYDVHTRLHAHTVTVTLRAALRISRRQIENARHIGQVSRGVGTARSLAGAGGEAEAVRH

SEQ ID NO: 200427 - protein, 63 aa, Oryza sativa
  Clone ID: PAT_MRT4530_95898C.1.pep
WICIVVPGQVNNVRIVGSIRQSDPAPLRSSQRISVLRDQVLGLHHSYVKHVLKLHTHLFTTSV

SEQ ID NO: 200428 - protein, 148 aa, Oryza sativa
  unsure (1)..(148): unsure at all Xaa locations
  Clone ID: PAT_MRT4530_95899C.1.pep
ACINTETSIKQNDADNSVTLASAGSNRCYLLLRTQAWCGASACASRTRGSTSRGGPVPNSPYSESYYARSLAVVLQRRDWENPGVTQLNRLAAHPPFASWRNSEEARTDRPSQQLRXLNGEWDAPCSGALSAAGVVVTRSXTATLASA

SEQ ID NO: 200429 - protein, 1514 aa, Oryza sativa
  unsure (1)..(1514): unsure at all Xaa locations
  Clone ID: PAT_MRT4530_9589C.1.pep
MPISAGPSMTGNENAVAATQGDSMSKDPPAEAGNGTSTTPELEKDSNAAEPCLSDKNHEPTRTASEATRSWCPIHKTRKHTLQACWVFLNAHAEIRACRERGIQRVSPTRDVYCPIHKTKNHDLSSCKVFLSAIKMSSPKVQPSSVSLREEDKRQGTTLTSDRFVGAIDIDSHEPSVLHLLKDYGSSSTSTPCEVLAIDGTSTSARANAEAENQVVTPAQRISTLNTILREAPYDPVLNDDLAWWQERLRESVTNLSHTFEGAAADAHPEQPPTGGVDGENPEQRESPYRATPSPRGTGDLRDHLNGRREARRTQGNGSRSRHHIPSRHHDNEERGGRSNEDRDRDDRDNRERRAPGNTSRGRRHNGEDDRDRPRDNDGGRRWDSREPGRCPRNPTPEPSDSSSSSSSSSSSSSDRHPRRTHDRRQPTAPSAGCRAFGRSLRDVRWPERFRPGTIEKYDGSTNPEEFLQVYSIVLYAAGADDNALANYLPTALKGSARSWLMHLPPYSISSWADLWQQFVANFQGTYKRHAIEDDLHALTQNSGESLREYVRRFNECRNTIPKITDASVICAFKSGVRDHYTTQELATRRITTTRRLFEIVERCAHVDDALRRKNDKPKTGGEKKTATDAPELSKKKNRKSAKRKAQAEVLAAEYANPSKRPDPQGSDARKAWCPIHKTDRHSLEDCLVFKKSLEKHMALEKGKRGAAPNMKWSEQKIEFSEEEHPKTAVIPGRYPIVVEPTIRNIKVARVLIDGGSSINLLFASTLDAMGVPRSELTPTNQPFHGITPQSSSKPLGKITLPVTFGQANNFRKEQITFDVAEFDTAYNAIIGRTALAKFMAASHYAYQVLKMPGPKGIITIQGNAKLAVQCDKRSLDMVEQTPNPPATTEPPKKLSDMPGVPREVIEHKLMVRPDAKPVKQKLRRFAPDRKQAIREELDKLLKAGFIREVLHPEWLANPVMVRKANGKWRMCVDFIDLNKACPKDHFPLPRIDQLVDSTAGCELLSFLDAYSGYHQISMVKENEEKTAFITPFGVFCYVKMPFGLITAGNTFQRTVQGALSDQLGNNVEAYVDDIVVKTKTSDSLIDDLRETFDNLRRYRLMLNPEKCTFGVPSGKLLGFLVSGRGIEANPEKIKAIENMKSPQXQRNNQIDNETWTMAFDGALNSQGAGAGFILTSPSGDQFKHAIHLNFRATNNTAEXEGLLARIRAATAFGVKRLIVKGDSELVANQXVRKQEKRFDGIKVRHVYRKENVEPDELARRTSRREPLEPGTFLDILAKPSVKEVSGEVNPDTPDISSEATEAERAVADIKTTDDWRTPLIKFINSDELLEDDAEAKKITRKAKIYGTIGNDLYKKAPNGGGYRFLFVAIDKFTKWIEAMPTGEIKADNAIKFIKGIFCRYGLPHRIITDNGSQFISADFQDYYIRLGVKICFASVSHPQSNGQVERANGIVLQGIKTRVYDRLMSHDKKWVEELPSVLWAVRTTPTTSNKETPFFLMYGSEAMLPSELRHQST

SEQ ID NO: 200430 - protein, 463 aa, Oryza sativa
  Clone ID: PAT_MRT4530_958C.1.pep
MEKQNIDFGKILGEIQESLVSLNSQYQAIGDSSGCIEVGCRDLHEEVGDLRQQLDLIGKSKQAASSASSPCVSLAGEERKEAAPSTSFPRVPLTGEERKAPLLPMPPLTTHLAAAEGGSKWAIGHHVQPNFRGKTPGALATLGQTPGKGTYDSNHFQFQKFEHSGFDGGEFDSDFGERQYNYRVPKLDFPKFDGSNPQDWRMKCEHYFDVNNTFPGLWVRISIIYFMGRAASWLRSSRAHLRFPMWEDFCTAVSEKFDRDQHEALIRQMDSIKQTGMEEVLENPQNSSIKDIKKSEGNSAYKSAVKGAWPLPLPPGKGGVPIVGRSEDKRSTNSVRNPRTMSDKVAALKTYRRAQGLCYVCAEKWSPSRKELLILVDSGSSVSFVSTQLASGLTGLQPLAHQLIVRVANGSKLKCEAVIPNCMDWLKEHSPMSIDWFKKIIALSLQGTQVTIQGCSPNWLSVI

SEQ ID NO: 200431 - protein, 108 aa, Oryza sativa
  Clone ID: PAT_MRT4530_95900C.1.pep
MDEVAEGFVPREMRRLPGGGGGDLGGGRSGASAASSSGKGGKGIWVWGAVSTSNDAHNMAPCLVALPKVAEGRVPLGENARLAWGTAQMQKLMAVCEGTGRRHPLLMA

SEQ ID NO: 200432 - protein, 51 aa, Oryza sativa
  Clone ID: PAT_MRT4530_95901C.1.pep
MPSHKTFRIKKKLAKKMRQNRPIPYWIRMRTDNTIRYNAKRRHWRRTKLGF

SEQ ID NO: 200433 - protein, 492 aa, Oryza sativa
  Clone ID: PAT_MRT4530_95902C.1.pep
MAGLVMSCCNPIPNVTNDGAGNPEALAAQTIYTVNEIEALYELFKRIDGAVIEDGKINMEEFNLRVFGPEKGGTCLLIRVCSSFIHLPSDAPIEDKINLAVRYGRVGDELLQPYKVINPDVGRKSRLNCGKSAVAKAEAHLVRTAVKLYVVEEIPVIPLKIRVMCYFQGNLPLNRMHHPRRLIEAEQGKGTKLARGCCSTSSDFAQKLLLDLRRRRERLGFNSPAPPQSTSSSNAAALLRCPTLPRKGRAASNTFSDCTPPPPRRPSRRGCLSWRPTMTRRASGSSLRRAPPPPTSPRHGASDPAQPRHQERRLASDHYSCVPSSEFDHAIAAAIAAAVYHLTSIRKQPHHHPCLSPEAAAAARRCVEREVAALRHMHGHPHVVGLLDVLATRSTVYLVLKLARGGGGVIATSVSPFPLSPQRARRRRRRSSGGGSVRKRSGAQWRSGSARRRSGGGGSVRKRSCAQWRSGSARSGGGGAARRGGGAAAAAR

SEQ ID NO: 200434 - protein, 130 aa, Oryza sativa
  Clone ID: PAT_MRT4530_95903C.1.pep
MIASDCLSACAGEKNEIMDGSGNCGPGIHIAGFVDDTESVVIQLPVAKYLTVDGHTLLPHFTHLGFRRRRRRFFVPAATMPSHKTFRIKKKLAKKMRQNRPIPYWIRMRTDNTIRYNAKRRHWRRTKLGF

SEQ ID NO: 200435 - protein, 77 aa, Oryza sativa
  unsure (1)..(77): unsure at all Xaa locations
  Clone ID: PAT_MRT4530_95904C.1.pep
TDPIYLRTRGSTSRGGPVPNSPYSESYYARSLAVVLQRRDWENPGVTQLNRLAAHPPFASWRNSEEARTXDRPSQQN

SEQ ID NO: 200436 - protein, 158 aa, Oryza sativa
  Clone ID: PAT_MRT4530_95905C.1.pep
MADAAERMRPHSRSSCKLHVADAISSASVCCVSGPPQPAHATLAHGTLAATTINLRRSVVMTDEGSDCQGELCKEAYDYNVLLLRRCHELNTSLASSHELNTRKSAPDVGTLGADLPRLLQHEQAVNQQRRQQAQAGYCDCLNLIKSKLVISLPFIWC

SEQ ID NO: 200437 - protein, 149 aa, Oryza sativa
  Clone ID: PAT_MRT4530_95906C.1.pep
GSRFLYLWGDTPKVGPPLGIPEGSIPSWNRCRGFPFFREEVGSPLPFPGGLPQGGYRGLVLNGAPHLDITFVGPHQWVRPLGFNVVPPWGPWFSPPRVWGFPPVLGPNLPFSPVKGGGPPPPGFPPKECLHMLAKWAFPAGGLLISFLY

SEQ ID NO: 200438 - protein, 167 aa, Oryza sativa
  unsure (1)..(167): unsure at all Xaa locations
  Clone ID: PAT_MRT4530_95907C.1.pep
MSLASVARALSRRSAPSSSRARQGFSLGGLGGTTRSPPPPSSPLPSLHGGEGGGLGLGFVRGYLTAALGRPAAVKAGTDWRSILANPQFRGLFSDGSXKNYENYYPKGRKEAPKGDXSNRSDSKPDSSADDQWNFQETASKQLQNFLGPVLVVGLMLSSLSAGSSDQ

SEQ ID NO: 200439 - protein, 83 aa, Oryza sativa
  Clone ID: PAT_MRT4530_95908C.1.pep
ITPNFLWSSSRPTLTPSLHALSQSSEQSAQQIHFHPPQTPTHTTHNWTVFRSHRVVSCTPGAIPGPCVTLRGCTQYFPNKCES

SEQ ID NO: 200440 - protein, 87 aa, Oryza sativa
  Clone ID: PAT_MRT4530_95909C.1.pep
IPQTQKGVPKKPGSKTLLTKKLGGVLFGHPKIPPKLVFSRKGLFGNKTHGKWARGGPLRAPQHPPGGGENDFNPKKKNLFEEPKPPG

SEQ ID NO: 200441 - protein, 232 aa, Oryza sativa
  unsure (1)..(232): unsure at all Xaa locations
  Clone ID: PAT_MRT4530_9590C.1.pep
WQRRLMHGRGGRGLPEEMSTRRKVXRRGQRRSGDIRATPWLGRERGRHSGAGKGDGDVGRRSGDAAEAAGGEIVAATPRLPAGRHSRRSPRETEGKPGWRRWRRRWRRRRRGRPAHGRGGTGGWRRPAAREREEDGGERCCGRGGAREGAKTRERTEGVAFYRMGEGAGHGRGRNGDGNGGRRQWRAAEEDAGVPGDWGRHSRGKLGGIEEDSMGINFPYLILESQERITRI

SEQ ID NO: 200442 - protein, 55 aa, Oryza sativa
  Clone ID: PAT_MRT4530_95910C.1.pep
ARGGYPLISRPGRHLPRRRRLAGNPPSPRRCPPLARRRAVIRRQIRSDMVVLFGA

SEQ ID NO: 200443 - protein, 108 aa, Oryza sativa
  unsure (1)..(108): unsure at all Xaa locations
  Clone ID: PAT_MRT4530_95911C.1.pep
RFFPPNFREISLGLSPPGLFPXPPKRLRGFPPPPGGLKISKGGWGAPPRGKNFSPPPKTRKGFFPRKLSGPFLKEALFPKRGQKTRFLKKNFKPPLGGGNIRYWARGF

SEQ ID NO: 200444 - protein, 111 aa, Oryza sativa
  Clone ID: PAT_MRT4530_95912C.1.pep
KRLFTVRTPSAVTPPCRVGKILPRFLLGPPAWPPFLPGYPLPLGSLNPWPGPFQRDLFSFWALKVLFGILATPTKICTAGRSPRVRPRVFGGAAAPSYLWGKGPPPNARGG

SEQ ID NO: 200445 - protein, 66 aa, Oryza sativa
  Clone ID: PAT_MRT4530_95913C.1.pep
MDLRPSNTTHYRESCYALQVPVRNSRVDPRVRDAFVRIIGFDNVRQVQLISFIAYKPPGCEESGGN

SEQ ID NO: 200446 - protein, 337 aa, Oryza sativa
  unsure (1)..(337): unsure at all Xaa locations
  Clone ID: PAT_MRT4530_95914C.1.pep
CRGGGLAVARISPSRCRSATRRRRSPCRSRSRRRXTTTTSAPPAGGAMHPLAPAGAAPPPPLEELERVRRVGSGAGGTVWMVRHRGTGKEYALKVLYGNHDDAVRRQIAREIAILRTAEHPAVVRCHDMYERGGELQILLEYMDGGSLDGRRIADERFLADVARQVLSGIAYLHRRHIVHRDIKPSNLLIDSARRVKIADFGVGRILNQTMDPCNSSVGTIAYMSPERINTDLNDGAYDGYAGDIWSFGLSILEFYMGKFPFGENLGKQGDWAALMCAICYSDPPEPPAAVSPEFRSFVGYCLQKNPAKRPSAAQLMQHPFVAGPQPQPLAAPPPSS

SEQ ID NO: 200447 - protein, 99 aa, Oryza sativa
  Clone ID: PAT_MRT4530_95915C.1.pep
PKGFKMVENGVLEQPKGVSRNRPRAQSNDHPVDPGYLPELTWEHKLSNIGYDLPSFRLTWRETFQLAGLGLRLGRHILEETSKGRAAVIDPMKKRIAKS

SEQ ID NO: 200448 - protein, 98 aa, Oryza sativa
  Clone ID: PAT_MRT4530_95916C.1.pep
ASTYTGRQTIQKEKGLGPSKVDDSDGHAFFDLDNEDQHLKSKLKDLNIINANHMDIAGTRKAVVNDHPHHELMAFKIIQVKVVKERIKNNMGKVCMKC

SEQ ID NO: 200449 - protein, 130 aa, Oryza sativa
  Clone ID: PAT_MRT4530_95917C.1.pep
WRRAAMAARGQGGAAWQRSGRSRRCGVSATTWVADAAAVRAVRPYGRAAPCGTRLTAIVRRHTAHRRTGRQPCGGAWGAWGARGEAVWRRHECGILGVGASAQRWCCSGAAAVLTEEDACLPPLDGDRTV

SEQ ID NO: 200450 - protein, 60 aa, Oryza sativa
  Clone ID: PAT_MRT4530_95918C.1.pep
PNSEEQRFGFHQPPFNSVDHLHLHCLALPFTPSWRQVKYTPLGPLGGFIEAESLLERIRP

SEQ ID NO: 200451 - protein, 128 aa, Oryza sativa
  Clone ID: PAT_MRT4530_95919C.1.pep
MRAAPDAATDHRVPGLYLVTYLRVCRYYQLSSQKQFRAPPALGCPFRVAVADGDARAGRLLRSKLPPAARNLPAHFSENRTDLLRASGATRRHATTGKGNPGVFSSGQAKMFPHGFAQNGTRFRLDYL

SEQ ID NO: 200452 - protein, 105 aa, Oryza sativa
  unsure (1)..(105): unsure at all Xaa locations
  Clone ID: PAT_MRT4530_9591C.1.pep
SAIKASIVXLGXXHHQKAWFGSLKSDSSITMNDTMPKKGGGGKKATAFDEMRXRVVEIAARIQKRLLFCSFFSXXSSSSSRSPPLFPAQAAQTXTHFQLLVFLPP

SEQ ID NO: 200453 - protein, 161 aa, Oryza sativa
  Clone ID: PAT_MRT4530_95920C.1.pep
MKKLFCFRGGTVARRSERAPMAEWCVFCPIARRDPACNTVLLYSDDRVMAFKDINPSAFRHYLVIPIEHIPTVNNLQRTTEDHQLVSHMLAVGRDLLNRDAPNSEEQRFGFHQPPFNSVDHLHLHCLALPFTPSWRQVKYTPLGPLGGFIEAESLLERIRP

SEQ ID NO: 200454 - protein, 89 aa, Oryza sativa
  Clone ID: PAT_MRT4530_95921C.1.pep
MGGRVRQRQSEWWWSTGQNGEWFVGDRGWQRTQQHMPTETESKRRHEKAEKYAILLAEKAPLNWRKNIGILEDYNPIGKFPMKPFETKD

SEQ ID NO: 200455 - protein, 56 aa, Oryza sativa
  Clone ID: PAT_MRT4530_95922C.1.pep
ASATFYSTTPLPNPTTPRTTGEERLHSTRGRRRLVMHRRTQGAALARGGLARGEAV

SEQ ID NO: 200456 - protein, 60 aa, Oryza sativa
  Clone ID: PAT_MRT4530_95923C.1.pep
GCGTPYLSVGWRALLACTSSVQIIKNKINSPQHYKLMRLYYFILPSVIRSPNISLLGIRT

SEQ ID NO: 200457 - protein, 332 aa, Oryza sativa
  Clone ID: PAT_MRT4530_95924C.1.pep
MVSDSELVERLREVLRSSDLNTTTTAILRRRLEEDFGVDLSDKKLFIREQVDLLLSEVAGKAEQEEAEVPKEEEPETGAEAAGGEPGGAEGEGEEEEEEEEEEEEEEEEEDSSGSRKKRRSDGANTDGKRKGGGFTKLCSISPTLQEFVGASELARTEVVKKLWAYIRENNLQDPSNKRKILIKFLITDEYTTTQNCARALQYIIRFLKSEHGGPVTSASPERSTPKEKPQKRERNEGKKQKGGSSGSGSGFLVPLQLSDDLVKFIGTGESMLSRSDVVKRMWDYIKENKLQDPSDRRKIICDEKLKDLLQVESFNGFTVSKLLAPHFTKTK

SEQ ID NO: 200458 - protein, 88 aa, Oryza sativa
  unsure (1)..(88): unsure at all Xaa locations
  Clone ID: PAT_MRT4530_95925C.1.pep
MKEILHIQGGQCGNQICAKFWEVVCDEHWIDPSGRYTWHSYLQLERVNAYLNEALCGRFXVPCAVLMDLXPFTMDSVPTGPYGQNFPP

SEQ ID NO: 200459 - protein, 76 aa, Oryza sativa
  Clone ID: PAT_MRT4530_95926C.1.pep
MASSMHSSSSPSPSSRRLKLNTPPTLTLSCPAHARSSLAAAAASSASRSAWTRSVPTAGASAPATTVTSPSSPSTS

SEQ ID NO: 200460 - protein, 209 aa, Oryza sativa
  unsure (1)..(209): unsure at all Xaa locations
  Clone ID: PAT_MRT4530_95927C.1.pep
SSEKRRKKKASMATTIAAMAMLKPSKIVARSSPAPSGSGRVPSISLKSLAKKGMSVSSSSAAAAPVAAAAMAGAFFSALASTDAALAAQQIADVAAAAAGADDNRGLALLLPIAPAIAWVLYNILQPALNQLNRMRSEQVLVAGLGLGAAAGAGLAFPPEXRRQAQEVARLAAEAAAAEGGDNRGLLLLFVVXPGRSAWVLYNILQAGG

SEQ ID NO: 200461 - protein, 108 aa, Oryza sativa
  unsure (1)..(108): unsure at all Xaa locations
  Clone ID: PAT_MRT4530_95928C.1.pep
LSFGAPKFHFFALCFTLIHPGKTLIFPNLILSHHTPFSPFEPFPICPPXSPFPTFAPPPFQMVPPLYPLINXPPLTGFPTPAPLHFPPPYPPFSSFFSIPFPPLAPVF

SEQ ID NO: 200462 - protein, 170 aa, Oryza sativa
  Clone ID: PAT_MRT4530_95929C.1.pep
MATTAAKMSKGVAGLPGLLLRRRRRLRKIIETGKTRCPLGKIIWKSRAPVRCKFFMFLAVHNACLTADNLQRRGWKLSPVCHLCSNDGETCQHIFMGYSYTQQIWGRVRTRLGLSCSSPSADFAVWWLAARKSVAKVDRKTFDARVILVTWLIWKERNARVFEGIAATIP

SEQ ID NO: 200463 - protein, 320 aa, Oryza sativa
  Clone ID: PAT_MRT4530_9592C.1.pep
MAAAGRARRRPRRHGRREAVRPRPDGRRRRPPARRSGARERGGKGEAKWRSSAHPGSTATTGTATEAERGGGAARVDEDGGVPAVGGRNEGVDEVGEDAAKPKEAMPKREEVRGDDGGGPKLGGDGGERGRRRELDSDGERERRAAETEEGGTGSVYIVLGAAGFAAAAALGHGRGGGSGGRTGMTGGPHPSARVAGGPARQRHAGGEEADWPAGERREREGARASTPPPVDGRPGAPSPHAHYSFSIARRLSACLHPAACRRPPRCSPASCALLLLRRLPSLATLSHLAPPRRRRCPVPPHPTKEKTEREKEGEKKRMK

SEQ ID NO: 200464 - protein, 88 aa, Oryza sativa
  unsure (1)..(88): unsure at all Xaa locations
  Clone ID: PAT_MRT4530_95930C.1.pep
PRVRSHVRPRVRKMTWVTARLLREDYSSQYALSSYDKLXSFYTSDRMMRTIIHSNTLANXAAERAAXDDGQKIXTYSVIKHTMDDLFY

SEQ ID NO: 200465 - protein, 429 aa, Oryza sativa
  Clone ID: PAT_MRT4530_95931C.1.pep
MVSTNAGGIASKQASSMAPNPGKATILALGHAFPQQLVMQDYVVDGFMRNTNCDDPELKEKLTRLCTVPDPNLIICSYKYIYSTIIELACKTTTVKTRYVVMSEEILKSYPELAQEGQPTMKQRLDISNKAVTQMATEASLACVRSWGGALSEITHLVYVSSSEARFPGGDLHLARALGLSPDVRRVMLAFTGCSGGVAGLRVAKGLAESCPGARVLLATSETTIVGFRPPSPDRPYDLVGVALFGDGAGAAVVGADPTPVERPLFELHSALQRFLPDTDKTIDGRLTEEGIKFQLGRELPHIIEANVEAFCQKLMQEHPQAADKLTYGDMFWAVHPGGPAILTKMEGRLGLDGGKLRASRSALRDFGNASSNTIVYVLENMVEETRQRREEAAEEEDCEWGLILAFGPGITFEGILARNLQARARARD

SEQ ID NO: 200466 - protein, 2059 aa, Oryza sativa
  Clone ID: PAT_MRT4530_95932C.1.pep
MAAAKVVANLQILGLCLLHLCLAASAAAYYPDMLLETSFIPRDYARYADELSPFDPVGAGVLARDLSFANGDWGQDAGRAPLMPSQGGDSPFLRLATFAVTHIDTDALRRRRPAMSAVNVSGVLSFTITRNCCCSSEYAVPHRQVSPEFKLLPGASRLTILFEGVYTETRSPGNDDDIGGGERVLCMVGNGVLPMRGGDSADPWAWARNAGDGSFEPPVMADGNMVLMLRYPKVHTLTTRAVRGELTSTSAASHNAYFDAVRLVSRIGQYSSYLFRPEHGELAANGCSTSTTRPFVCDDGVEGNCAGDLHGGASFCDILTELSPGDHGVLAVVPNWNCNSTDEFCSQLGPFQTGGGATNTTDRMLTGFAIAMQDLRCEPHGGEKPAARVSAVFRAVSPWEDQQLAVRRTGLGGATLSAEGVWRASTGQLCMTGCLGVIDAAAVGDEACHYRVSLHVPTTFSIRRRSIIVGQITAGDGSHFPLSFHQSVPPKHPWNRFGRSEASLRVAYDYTKVENAGELLRRSEPSGFRSSSIAKALVSYPRKAGAAAAAADEMMSLSDLADDLSLHFQPGPRLPFLPEQKVWPQWPALHLDMLSVGPLVGSYSPPLRTLPSTTVARAEIDGGVEQQQHQLLNVSAVLSLSGKMFGWSPVMSLEGVYNQEDGRIPTATACISSTRDAGDPLHFNTTELRTTPISYRGGRRDAPPDTLTEQTIEGLVCIAMLSGTIAAAVGQLRYIASHPDVAPYVSLVALGVQAVGYTATLVTDAKMLPAWPTYNYRMYVGHLHWNMDSTVKALTLAALLLTLRLAQKVRRSRARARARSPAEPGRVPSDGAVLLRSSGVYLAGLVFVLAVHAVATHTSSTSKQEVFFVEQKAAAASHAPPSCMRTRGAVVERYVGLVKEWFLLPQVIGNAVWRVNCKPLRNAYYGGVTAVWMLPHVYRYLRPPEVYIYRPEVQDDAMAFYEKATDVVVPVVAVALALLIYVQQRWNYKIVGDGIPFSNGIAPLHTRFLSIHSLAAVAVPHRCRARPRRLLRRRRARPPPPPRPSPVDAVAVPRRRCGVRPPSPPPSPPRPSPTTVAPVLCRRRRRRRPREHSYLRFADVKRQCRSVLTSASELADNAYRVKRVKRELSFEKGDWRQDAGTDPLVPFDGGDAAEDGRRPPLDPLRLATFVVTHVDDDDERRARNAVNVSGLLVLTISRTSASPEIGYHVPVVSSPVFELLPGSTKLRIVFEGVYTEAARSGNGGGERVLCMVGAGVLPTRGADGADPWGWAKNSGRAGFQPPVATDESMLLVLRYPKELTLTTRAVVGEMRSTRAMSDAAYFDTVKLVSGPTWNRQYEFRRPEELAAAAGTCRPLTSSDDGGNRARDLYKGRHLCDVLERYIHGVITARPTWRHCNSTATGAPCPFEMDRAEDAAIVGIVLHDLRCLGYDLDMAGNPGGVKVSVVFRALSPREHWYTAVQRTALSGATLSAEGVWNASAGEVSMVACRGIGGKACHFRVCLSFPATFSITGRDMMLGEITTVDVNETGGGARSSLSFRQRMPPPRLQRCVSGILPVVYRYNYTKVKLAGEFLRRNSSPSDLREIIARSLPLSYPNCGGNGDGKRSLADLADRLTLRFTAMPSLFSPPGWMERPVLHLEVFFLGQLIERFMPASDDATTRSSAIPGDEPCLQEQRLLNVSAELTIFGDLRVASSAMSLEGVELELEEGMDCSIEVKVEYPPPTTHWFVRSTARVQIASTRVAGDDPLHFDTVKLRAQPVRYPRRWPDFVSRAIVDSVLCVVLLTATIAAALCQLHHLKHHADVAPYVSLVMLGVQALGLVMPLFAGMEALLARVTVQPELDTTRPLPPPGSSYMLDYNPPYQAVDRTAKILAVAEFLLTLCIAWKVRRSRARLLARSPGEAARVPSDGKVFVYCSSAHLALFVVVLALNSSRDATVEQHVGLMQDMFLLPQVIGNAAWSVNCKPLAGSFYVGITAARLLPRVYDLVRPTPVADVFSDDVHASATASAISREGFFPRAGDVVMPLAAVSLAGAVFVQQRWNYAIVSRMGNSSQQQKLHHIF

SEQ ID NO: 200467 - protein, 254 aa, Oryza sativa
  Clone ID: PAT_MRT4530_95933C.1.pep
MAAILRNTIVVAMGAGALGGPDALRLLLGFAGRSPLVDILVVVFVIAAVTAPALGTILLARFFRKPRAGAGGTGAAVDDPFAKMTLAVSLAVAVLVSATLILLPLFQSGGLGALAFAGAALVVGACAARARGVLLANAHGGAPATERFAKATLMVSLAAVFSLLVLCIAVGILDAPAQRLLAFAFKNPPATVAVCVATATIIGATVVTLFFRKAKNADAAAAAAPTAMAMALFHNHKMILVMVTPFVVIFFLCS

SEQ ID NO: 200468 - protein, 230 aa, Oryza sativa
  unsure (1)..(230): unsure at all Xaa locations
  Clone ID: PAT_MRT4530_95934C.1.pep
IXTXSTYFXXWXXXKDTNLXXSXXTKQNXXLXXXPLISXKSVXDMXGLDGEHQSXXXXVXTTLPXXRLXRXTXXITXXPIFFXCAPPRXEXXKXHRTXLTXXTHXCXXXXSXXXISPLXPSXXFXXFXXFLXXFXXPSLXPXPFFSSXXXXXYXPFFXXLXHXXHSXXXXXXXSXSXXHIXFXTXCXLVXXSXPPXXLXXXXLXLLPSXXIXIXRXXXXXSPTXSXPXFP

SEQ ID NO: 200469 - protein, 252 aa, Oryza sativa
  unsure (1)..(252): unsure at all Xaa locations
  Clone ID: PAT_MRT4530_95935C.1.pep
MRIKETSPGVTDRYQAANKTEEAVVKRTPPPPTRRRRRNITREYETNRTRDHHLGGGFCLAFWAPPRLAAAAASVGSSDPTSPIGRSCQWPPNLTLVVIGDVHGAGEAMSGSVGRRTSPAAVRHGGVRAPPRSDKVMERPNSKIPAMKASSSNAAAPQMIMNRSQSRRDRKIALQQDVDKLRKKLRHEENVHRALERAFTRPLGALPRLPPYLPSQTLELLAEVAVLEEXEVVRLEEQXVVSFRQGLYEGGC

SEQ ID NO: 200470 - protein, 762 aa, Oryza sativa
  Clone ID: PAT_MRT4530_95936C.1.pep
MKIKETSPGVTDRYQAANKTEEAVVKRTPPPPTRRRRRNITREYETNRTRDHHFTAGFCLAFWAPPRLAAAAASVGSSDPTSPIGRSCQWPPNLTLVVIGDVHGAGEAMSGSVGRRTSPAAVRHGGVRAPPRSDKPRVVFNSLSLVASKRVHFVFFSALIKVMERPNSKIPAMKASSSNAAAPQMIMNRSQSRRDRKIALQQDVDKLRKKLRHEENVHRALERAFTRPLGALPRLPPYLPSQTLELLAEVAVLEEEVVRLEEQVVSFRQGLYEEAVTISMAKSAYFSDTDRCTPARHGQVPDQAASASWSSLKRVTNVKQTPRRTIPSMNHGGDRPGKENQSCTTNSFRDHSRFPLKTVPKCSNPEEEKCADFQTVSAVKDQKGTEDTTVIDSENISTEANKVSEELLTCLLNIFSQMRSSSDQDEDRSSSPSVSGSCESSDGAACAGDPYGVLELGSRDIGPYKQFRAVDATSFDQNVFDNSNSLLDRRLNVYLAKIRALLQKLSSVDLVGLSHQQKLAFWINTYNSCMMNAFLEHGAPTTPQTLVAMMPKVPSIHPSTFTSFSRFITCSICICNSRAKDKRVIWRKSLTRATINVGGRVLSAMTIEHFILRLPYNAKHVNPKGVKSGNGAAAAARGVFGLDWPEPSVTFALSCGSWSSPAVRVYTACHVEEELEAAKRDYLQAAVGVSTATSISIPKLLHWYLLDFTKDVSSLMDWVCLQLPGERRRHAVEAVEASRRSPSPPPIQVVPYEFRFRYLLAT

SEQ ID NO: 200471 - protein, 117 aa, Oryza sativa
  unsure (1)..(117): unsure at all Xaa locations
  Clone ID: PAT_MRT4530_95937C.1.pep
LKARLGGASRHGRTRXQGQPKEQTKGKLYMALDRRDRAPNERNRLGKKSNSVLGIKPKRTRFGSNPHRFSLILGGKERGEREEQKPSKTWRNWARIRAEPEREAAAXGSGSAAAGRR

SEQ ID NO: 200472 - protein, 169 aa, Oryza sativa
  unsure (1)..(169): unsure at all Xaa locations
  Clone ID: PAT_MRT4530_95938C.1.pep
MRSSSDQDEDRSSSPSVSGSCESSDGAACAGDPYGVLELGSRDIGPYKQFRAVDATSFDQNVFDNSNSLLDRRLKALLQKLSSVDLVGLSHQQKLAFWINTYNSCMMNACLFCNSRXFLEHGAPTTPQTLVAMMPKATINVGGRVLSAMTIEHFILRLPYNAKHVRVRC

SEQ ID NO: 200473 - protein, 141 aa, Oryza sativa
  Clone ID: PAT_MRT4530_95939C.1.pep
VLLLIRYTYYTRTGTKPCINHHWGGRRGQNWGWEEKNHYRTKARATKQRTPPKKPKKKEKKKRGEEGHQNLSRGGRLGQPEKKRPRRAPGAGDHHKGAGSNSGRQSDPPAESRASPVLEKGSRTSQGSDLSRLSTPPKGPG

SEQ ID NO: 200474 - protein, 60 aa, Oryza sativa
  Clone ID: PAT_MRT4530_9593C.1.pep
SLKFSNSTRKQSSEQDCQTAQDCACLRINRCRTFQVKFIQHPLAFFTSISQKFSVLHASY

SEQ ID NO: 200475 - protein, 80 aa, Oryza sativa
  unsure (1)..(80): unsure at all Xaa locations
  Clone ID: PAT_MRT4530_95940C.1.pep
MVGCEHMVLMVVLMTIKDGFTIFGCETFTVPTXQAQQKPPLLYSMVHCRAPDCEVAEISPXXSLGSPCVXYXXXXLTIFF

SEQ ID NO: 200476 - protein, 380 aa, Oryza sativa
  unsure (1)..(380): unsure at all Xaa locations
  Clone ID: PAT_MRT4530_95941C.1.pep
YAAGPRCRPPIIFTAEREREAISPFPETHSCRGQKPHVPSPSPSPPFTPPATPPPPLYPXPPHPRSSSPPRASPESDPITPRPAPPPPPAVPVRAPPPLRAPASPPPPLPSLPXTSPATASPAPRPSSSPSTPSPRSQRRPRPPSSAATPSTRSPSPWSPANSRGPRPSTPCPSSSPPSPPNPARWTPSTRPSASSNPKTPKPPPPPPPGPXAPPPASPPPPPSNAPPTPPHPSGAASAXAPADSPPPPPPLLGGGTPLPPPXEPPLPRSPPPPPXTSSASPPRCSSSKTSRPLHKIPKSPSTTPSPMAPPLPPXPPPKPSPTTSSAPPSASAPPLPLPPPLRRPPSPPPXPLAGAAPPRRHQPRARPGAPPPPPRRVQR

SEQ ID NO: 200477 - protein, 386 aa, Oryza sativa
  Clone ID: PAT_MRT4530_95942C.1.pep
MAPPLPPTAPKTIADYLIRPSKRLRPTSPAPAAAASAPLSSSSLSPEQRRRADTNLALARARRHLRLAESKASGGTAKLEELLVEETWLEALPGELHKPYALELCRFVAHERLHSPVPVYPPPHLVFHALHATPFDRVKAVIIGQDPYHGPGQAMGLSFSVPEGIKIPSSLANIFKELQKDLGCTVPSHGNLERWAVQGVLMLNTVLTVREHQANSHAKKGWEQFTDAVIKTISLKKSGIVFILWGNSAQAKTRLIDETKHHILKSAHPSGLSASRGFFGCSTCISGLPYMRRHNIYLMLDNPPMAGTFLKRIRSWRGWDYLPLIGNSRPFEDIMWSVCLTTTSALKWAPLQWKHRKSPILEKIGTHLDGSLAAKQPVSCTVRRSF

SEQ ID NO: 200478 - protein, 112 aa, Oryza sativa
  Clone ID: PAT_MRT4530_95943C.1.pep
MEAAAAYTHRLRADIAEGTGRMALAIDDHDGGRRLRGSRHPLAGLRARAARPPPARRLASSATRRQLTPPACSACSLLTHGCCVCGHGPTLHMRMFVWQSHHHLNCSRAALN

SEQ ID NO: 200479 - protein, 718 aa, Oryza sativa
  Clone ID: PAT_MRT4530_95944C.1.pep
MPLVTAVATTSHRLREPPPLLAATSLLPSATPPPSPPPASSADVAAANCRNHPSPPLPTAVTSCRKSTAVADHHSRPPSRSGREARIWGGTAVIAAEHRAVAAQGPMPLSSRRAGLKPRLSRGSRCQRCAHTAAGLFLPRLHTRLHTVVGMLAGRRLDGGDPASHAGEDRSGLGGAGSSEERLLRPVGRRQRRLVRPVAAAASSAPSPPPSLPRRRRLPSPGSGRLRRHGRRDAPPPPSLRPAGFPVGHSGGGEAKGRGKARRRPARVGALASPLGLERHEPITGPRLMVNFSSPSPVAVAVATPNESIRTQERYQENGGVTEHGNIPITRVRDTLKDGVVRCTGKISVSSLQVMYGLLCGIHGCDVTSGNARPCTELECLEIVRSNVIKMKALLVGMFLTDKYHALLPFHASGGGVKDHRRRPGKAVPGAAGGGPGSARFGAALSARLGSLLPLPASPLAALARLADLLALALADAVPALAGEGDSAAVAAHLDAGVALLDACNGITARLDRLRRRRLLSRFALHLLSSSSPPLPSSVRRARAALADRDERAPASPPPPLPSLPFDQPRDRVSGAATVLLAVDAVSSLAAAAASAVLCGDALHQIAFPLVSGEFPWTEAFNAVSIQLAALATKPSEVDAVDEAVGKLKSVLDNGDGDLDEAALRAAAQEVERRMEELTAPLDRLSDAVNGVFRAALCLRNAELGSIMVGPAEKTPCK

SEQ ID NO: 200480 - protein, 100 aa, Oryza sativa
  Clone ID: PAT_MRT4530_95945C.1.pep
RFDAKGMLGRSGVQGRGSRSGSGPWELKCFGKTTWVWPAGWAVPKLHCLIQAQFKHCSAATPPRLQAVFRHLVQSSFLPPGRPAWLPSLLPGCLPGFPPT

SEQ ID NO: 200481 - protein, 488 aa, Oryza sativa
  unsure (1)..(488): unsure at all Xaa locations
  Clone ID: PAT_MRT4530_95946C.1.pep
MSGKKPTAAPPTARLSRACVMIIVVASVERFAYKGVASNLVTYLTEVVEMSTSAAAKSVSAWSGVTSMLPLLTAVLADSYWDRYSTITASSLLYVVGLIGLTLWALLHTRMPCSTLFFPLYLISIGQGGYNPSLQAFGADQLDIGDDDDDGDNGATAATEEQRSKVKSLFFQWWYFGICSGSLLGNTTMSYVQDTVGWGLGFAVPAAVMAVSVAAFFCCTPLYKQRQPRAVHRKPCRDSVLKALKSLLASVTGARKITLPSRDGDDDTDIVSELELQEKPLKLADQKQEAAMGEAAAPSVAKIISSITVSIILLMPLYDTVVVPLAGLVAGHGKGITVLQRIGVGMVLSIVAMAVAALVEARRLRAAASSSSGGRLSIFWLLPQYVLLGVSDVFTVVGMQEFFYTQVPSAMRTVGIALYLSVFGVGSFVGAFLITALEMVTAXGGGGGHDHGWFSDDPPEARLDQYYWFLALLSCVSFVVFTHLCKYY

SEQ ID NO: 200482 - protein, 35 aa, Oryza sativa
  Clone ID: PAT_MRT4530_95947C.1.pep
YLCIGTVIHRAELLRMLKELFPQYPVTSKYVLPPS

SEQ ID NO: 200483 - protein, 521 aa, Oryza sativa
  Clone ID: PAT_MRT4530_95948C.1.pep
MVVTPRLSRACVLIIVVASMERLAYKGVGSNLVTYLTEVVEMSTSAAAKSVSAWSGVTSMLPLLTAVLTDSYWDRYSTITASSLFYVFVLIGVALVALLRTRVPYSTLIFPLYLISIGQGGYNPSLQAFGADQLDIGDDDDGGDNGTPTTEEQRSKVRSVFFQWWYIGMCSGSLLGNSTMSYVQDTVGWGIGFAVPAAVMAVSVAAFFCCTPLYKKRQPRVVHHKPCRDSVLKALKSPLASVTARKITLPSRDGDDDADIVSELELQDKPLKLVDQKQEEAMSEAAAPSVGKIIVRLLPIWTMLLMFAVIFQQPMTFFTKQGMLMDHRVGAVFVIPPAMLQSSITVSIILLMPLYDRVVVPLTGHGKGITVLQRIGVGMVLSIVAMAVAALVEARRPRAAASSSSGGRLSIFWLLPQYVLLGVSDVFTVVGMQEFFYTQVPSAMRTVGIALYLSVFGVGSFVGAFLITALEMATAGGGGGGHDHGWFSDDPREARLDKYYWFLALLSCVSFVVFTHLCKYY

SEQ ID NO: 200484 - protein, 442 aa, Oryza sativa
  Clone ID: PAT_MRT4530_95949C.1.pep
MSGKKPTAAPPTARLSRACVMIIVVASVERFAYKGVASNLVTYLTEVVEMSTSAAAKSVSAWSGVTSMLPLLTAVLADSYWDRYSTITASSLLYVVGLIGLTLWALLHTRMPCSTLFFPLYLISIGQGGYNPSLQAFGADQLDIGDDDDDGDNGATAATEEQRSKVKSLFFQWWYFGICSGSLLGNTTMSYVQDTVGWGLGFAVPAAVMAVSVAAFFCCTPLYKQRQPRAVHRKPCRDSVLKALKSLLASVTGARKITLPSRDGDDDTDIVSELELQEKPLKLADQKQEAAMGEAAAPSVAKIIVRLLPIWTMLLMFAVIFQQPMTFFTKQGMLMDHRVGAVFVIPPAMLQSSITVSIILLMPLYDTVVVPLAGLVAGHGKGITVLQRIGVGMVLSIVALAVAALVEARRLRAARWSSSGGRLSIFWLLPQYGLLGVSDVFT

SEQ ID NO: 200485 - protein, 331 aa, Oryza sativa
  Clone ID: PAT_MRT4530_9594C.1.pep
MEEAAAGPLRTRVCIIGSGPSAHTAAVYAARAELKPVLFEGCLANDIAAGGQLTTTTDVENFPGFPDGILGADLMDRCRAQSLRFGTSILTETVTAVDFSARPFRVASGDTAVHADAVVVATGAVARRLHFAGSDAFWNRGISACAVCDGAAPIFRNKPIAVVGGGDSAMEEANFLTKYGSRVYIIHRRNAFRASKIMQARALSNPKIQVVWDSEVVEAYGGADGGPLAGVKVKNVVSGEVSDLQVAGLFFAIGHEPATKFLGGQLELDSDGYVVTKPGSTHTSVKGVFAAGDVQDKKYRQAITAAGSGCMAALDAEHYLQEIGAQEDKTD

SEQ ID NO: 200486 - protein, 43 aa, Oryza sativa
  unsure (1)..(43): unsure at all Xaa locations
  Clone ID: PAT_MRT4530_95950C.1.pep
KKKVPQVPGSHFNLNVYGTDIFLRRGSYLFXNELXNYSHIINK

SEQ ID NO: 200487 - protein, 49 aa, Oryza sativa
  Clone ID: PAT_MRT4530_95951C.1.pep
AALDKIEAALSKFGDGPFFLGQFSLDVSKVRVGNFFPAYIKRSNSLAHK

SEQ ID NO: 200488 - protein, 60 aa, Oryza sativa
  unsure (1)..(60): unsure at all Xaa locations
  Clone ID: PAT_MRT4530_95952C.1.pep
EVAGMKTAAAILLVAALVASHCMEMAXAIDTCHEQILVAIHSTVNVQISGDIMELTARAA

SEQ ID NO: 200489 - protein, 225 aa, Oryza sativa
  Clone ID: PAT_MRT4530_95953C.1.pep
MASPSSFCLLAALLALVSWQAIASDPSPLQDFCVADMHSPVLVNGFACLDPKYVNADHFFKAAMLDTPRKTNKVGSNVTLINVMQIPGLNTLGISIARIDYAPLGQNPPHTHPRATEILTVLEGTLYVGFVTSNPNNTLFSKVLNKGDVFVFPEGLIHFQFNPNPHQPAVAIAALSSQNPGAITIANAVFGSKPPISDEVLAKAFQVEKGTIDWLQAQFWENNHY

SEQ ID NO: 200490 - protein, 106 aa, Oryza sativa
  Clone ID: PAT_MRT4530_95954C.1.pep
MDKGNMGWAGIANRRPQWGPDHQVSCAFFFIYSAAALAFLSSNAAHNAHPSASARGEGQGRRPPAGGEKGRGRQPSGGEGGERDRPSVSSADTWTGEETGESAQYR

SEQ ID NO: 200491 - protein, 576 aa, Oryza sativa
  Clone ID: PAT_MRT4530_95955C.1.pep
MEEAWPPLAPAPEAAAPPGGGGGGGAWGAAAVAQRKEVAEESSAHAVSRLVASCANTSGVAVAVVDANAVISGGAALSSSAARLVTVPEVLEEVRDASARRRLALLMAPVETLDPAPEFVKKVVKFARETGDLQTLSDVDIKIIALAYMLEAEIHGTNHLREQPPPLRVVNVRNLKEAPLPGWGSNVQNLAEWEELDQMSEAGGDLKSRILPLKDLENHEIPNSETNSISDKQGDEEHQPAKKDVGIAWEDDENNEGWLPAVSRSTHRRYLRRKARRDALKESEQSIETSSAAPSIDDDKILSENGLNPVDGPSADTDVMEHQEVNEPEIVADHSQSDNKDNGVGNVGDVEETGGTDACIEELDNLDIKSDSEEGVDSSLADDGSSEQSWALRSLSESTVACITSDYAMQNVILQIGLRLLAPGGMQIRQLHRWVLRCHACYKVTQEIGKIFCPKCGNGGTLRKVSVTVGENGITMASRRPRVTLRGTKFSLPMPQGGRDAITKNPILREDQLPQKVLHPKSKKSNKQDDDFLGVEDIFSHSGEKKVPLKPPVRKALAMFSGKRNPNDNHFSRKKH

SEQ ID NO: 200492 - protein, 225 aa, Oryza sativa
  Clone ID: PAT_MRT4530_95956C.1.pep
MASPSSLCLLAALLALVSWQAIASDPSPLQDFCVADVHSPVLVNGFACLDPKHVNADHFFKAAMLDTPRKTNKVGSNVTLINVMQIPGLNTLGISIARIDYAPLGQNPPHTHPRATEILTVLEGTLYVGFVTSNPNNTLFSKVLNKGDVFVFPEGLIHFQFNPNPHQPAVAIAALSSQNPGAITIANAVFGSKPPISDIVLAKAFQVEKGTIDWLQAQFWENNHY

SEQ ID NO: 200493 - protein, 201 aa, Oryza sativa
  Clone ID: PAT_MRT4530_95957C.1.pep
MEPDQWHGNGKGLSPSCRCRGKLADMPCSCGVMKHWADIEEASYGGGGGGGGGSPLFDELAAAAGRRSISGAGRLKIPVSGKEGRRIMGLLGMVGDSFGCSATGERLVSAARDGDIQEAMALLELNPRLARALRRLINNKSDGGVTPLHLAALHGHAECVQLLLDLGASVSEVQEAHLSTMRPVVEVLYAVNRSKHESSKY

SEQ ID NO: 200494 - protein, 384 aa, Oryza sativa
  Clone ID: PAT_MRT4530_95958C.1.pep
MRQGQIARESVAGPIGHAENRAMNFRRNSAAGAAPPSPYYSPYPAQSTFLPPHVYLPQPLINATTYNFAQAPAAPAPPPHVNVPQPAMHAAAAPAPPLWLRTMTAANLDSEMGLIGEMMVQYPYVTIDVEFAGVVHHPPYTGSRPTPDEIYAALKSNVDEVPAVQIGITLSDAEGNLPTRSSSSPEQEIAWEVVFSDFDAGRDPHVVDSVEFLKNQGIDFDLARQIGVTSTAFGEKLLAILPPPSRRGELTWSAFGGAYDMGYLLKMLTGGQPLPETRQQFMQLVKSRLGGGRIFDSKYLVEHDRQDLRNAGLRHTADVLGVRQQEGVKMLAGHKSVVAAAIFATIRPAGGARWERRASAVSDAATSNAAATTQEKGRWRLQRK

SEQ ID NO: 200495 - protein, 513 aa, Oryza sativa
  Clone ID: PAT_MRT4530_95959C.1.pep
MAGGSCGGGSRVKVVGQVERVVGATLSYAEFVDRFMRPNLPVVLTGLTSSWRSCHDWTLAAAADRRAPDLDFLARSFPSPLVQVADCSSREFSDQKRLEMSMREFVDHWAASSSNGDSDGSLLYLKDWHFVKEYPGYVAYTTPTFFADDWLNMYLDSHPIHRDSDIANHTNEINCADYRFVYMGPKGTWTPLHADVFRSYSWSANVCGRKLWLFLPPSQSHFVFDRNLRSSVYNINDDVSEKQFPEFNNTKWLECTQEQNEIIFVPSGWYHQVHNLIWAANDSRPKNRILTENLKEDTISINHNWFNGYNLHWVWNLLHEDYKVAKDYIEDIRDICDDFEGLCQRNLAANTGMNFYDFFVFITRFALANIVELYHIQNPKDTDFISAETANHFVYNLMSIRDVASKMVSTEAFNTENICNISEQNRSAFSDIIKILEEESFRRLLVALSKAYNYIDRGQKDCLKMKDSSQKGCLSVTCLKPDCNVVGDIISFMREIHGPVDLVTLIDSALSDR

SEQ ID NO: 200496 - protein, 1094 aa, Oryza sativa
  Clone ID: PAT_MRT4530_9595C.1.pep
SDQFDYDLVDPRTSVPQYPLYPVYGYPPSTGACQVGELGAQGSTTMSSSFVDNSVNPGINQGVSTSTMLVWTQVGEIVFLVYTMVPISTGPSMTRSENAVVTTLDGSMSKDPPAEVENGTSTTSEPEKDPNAAKSCPSDENHEPTRTTSEATKSWCHIHKTRKHTLQACWVFLDACKERGIQRTSLTRDVYCPIHKTKNHDLSSCKVLLSAMRTSPPKVQQSQISLRDADKERGATVISDRFIGVIDIDPHEPSVLHLLEDQASSSTSTPRDVFAIDGTSTSARANAEAEDQVVTPAQHIRAINAILRETPYDPVLNDDLAEWTERLRELVANLSNAFEEAATGRMPGDTGRGRRHNDDDDKDRRRDNNGGRRQDSREPGSHPRNRTPEPSDSSSSSSSSSLDMHPRRTYDRRQPAAPGGGCRAFSRALRDVRWPERFRPGAIEKYDGSTDPKEFLQVYSAVFYAAGADDNALANYLPATLKGSAHSWLVHLPPYWISSWADLWQQFVANFQGTYKRHAIEDDLHALTQNPGESLRDYVWRFNECRNTIPEITDASVIRAFKTGVRDHYTTQELATRRITTARKLFEIVDRCAHMDDTLRRKNDKPKRRNQPKTHRNQARRRVARHSLEACFVFKKSLTKQLALGKGKQVRVVEKATEAATQDSDSAYPDSDLHVSHIFGGSMAYSSKREYKKVEREVCSTWQGAAPKMKWSEQKIEFSEEDYPKTGVIPGRYPIVIEPTIQNIKVARVLINGGSSINLLFASTLDAVGIPRSELTPTDQPFHGITPQSSSKPLGKITLPVTFGQANNFRTEQITFDVAEFDTTYNAIIGRTALAKFMAASHHAYQVLKMLGPKGTITIQGNAKLAVQCDKRSLDMVEHTSNPPATAEPPKKPCDMPGVPREVIEHKLMVRPDAKPVKQKLRRFAPDRKQAIREELDKLLKAGFIREVLHPEWLANPVMVRKANGKWRMCVDFTDLNKACPKDHFPLPRIDQLVDSTAGCELLSFLDAYSSYHQISMAKEDEEKTTFIMPFGVFCYVKMPFGLITAGNTFQRTVQGALNDQLGNNVEAYVDDIVVKTKTSDSLIDDFRETFDNL

SEQ ID NO: 200497 - protein, 127 aa, Oryza sativa
  Clone ID: PAT_MRT4530_95960C.1.pep
GPSYETLSIILLQHVKSNAKKQKINQLKHKKKNLNTPILVLISCTLPTVRRQVYTDLLECKMKRVATIWSISLTRRSPHAAASHNVFLNAGHHAAIACCLSAGPHSPWSLQHMLGEERERERESVLS

SEQ ID NO: 200498 - protein, 124 aa, Oryza sativa
  Clone ID: PAT_MRT4530_95961C.1.pep
HASAQSHFVFDRNLRSSVYNINDDVSEKQFPEFNNTKWLECTQEQNEIIFVPSGWYHQVHNLEDTISINHNWFNGYNLHWVWNLLHEDYKVAKDYIEDIRDICDDFEGLCQRNLAANTGNVLII

SEQ ID NO: 200499 - protein, 221 aa, Oryza sativa
  Clone ID: PAT_MRT4530_95962C.1.pep
PRVRYDLKSRVYRYGLDQEEYYVMHDLMHELARNVSYGECARITSPVKFKDIRDTVRHISILCIPQFSIDVVKKISQFKNLRSIIIVTESKLDKDTKNTLQKIIESTKSLRLFHSRLRIRFDFSSKFGKLKHLRYIDIFGISSKGIYHIAKLYHLLVLLSISSPTTVFPCRRSLLCVAKQERFMLNLYRLRHVAYGQDTYKLFGMLPISRLESIRRLSIYH

SEQ ID NO: 200500 - protein, 512 aa, Oryza sativa
  unsure (1)..(512): unsure at all Xaa locations
  Clone ID: PAT_MRT4530_95964C.1.pep
MALSTLLLPSSSSSSSKTATATDTSDRRRHHHHHNHTKRKKKPPPPPSLXAPPSHSPCCVGAGAGGLGAKHRGDNLQVELAXSATVRSARSTASSRCTTXARTVAPFEAAPVSSSWEQLKSLLSCRSATAAARVHDPAAPSSALSRLRSHGAGACGASLCAIRDVVDAASSASAASTAAASLDRDTTPLTRSSRRAHRAATSSSGGGGGHHASLRGLSGCYECRAINVEPMSRRYPRPRELCACSQCGEVFNKADSLEHHQAIRHAVKIGWQKYIKRYLCLAIFCMLAVASASPFVEVSELGPEDSGRNIVEIIFKSSWQKRDRPICQIDRILKVHNAARTVARFEAYRDAVRTRCRATAARAAADGNELLRFHPAALACPLGLNGATSLCDDDDACGVCAAIRHGFAPWAGAHPLGVRTTASSGRAHDCGAAAAAAQQAGGCRAMLVCRVIAGRVRRNDDDGGAEEEEGAFDSVAGDEAASSVYGNLEELFVANPRAILPCFVVIYRVVPE

SEQ ID NO: 200501 - protein, 77 aa, Oryza sativa
  unsure (1)..(77): unsure at all Xaa locations
  Clone ID: PAT_MRT4530_95965C.1.pep
XLLXNWPXVCNNAXVFYVSITKTKTPLRILMYDAIDFLTXVXPFVLLTKLCNYHLFYCXLIYHQMFFKHDISIFAFA

SEQ ID NO: 200502 - protein, 453 aa, Oryza sativa
  Clone ID: PAT_MRT4530_95966C.1.pep
MALNYSSCSLTSSFLMNEDCAGMMCGCGCWSEEASPLSSGGVNSLWWDELEFELELEEEEEFDPVDLLPTDPFGMNLETTFTAAIASCIEDLTVMSSAGRFGDSRDDAVFADLSYYLNKAFVLSPEFQFGGYRGVFEGPLGFGGLSAGEGDSFGFMKNPSSSGNADDSFGFVETPPTSGNAALECGDAVEVVPVQEGGVPHEGMLFALDYLGLRDILSVERVCKTLHSAVRNEPLLWKSIHIEGDLRQRISDAGLLHLTQKCPDTLQCLSIACCVNITDQGLKAVLESNPRLTKLSILGCPRLTLDGLISNLKSFNTKAVFGIKHLRVGTLFSLRKEQYEELLSLLNTDKTQEVHNRGPRFLHANRFLSDCNDGYALDIEMCPICQNYKLVYDCPDEGCDDRRSGNCKGCTVCILRCYECGRCVDKLAFKESFSLDWVCPNCQEKKDLSPPMK

SEQ ID NO: 200503 - protein, 374 aa, Oryza sativa
  Clone ID: PAT_MRT4530_95967C.1.pep
MEPRIGNKFRVGRKLGSGSFGEIYLGTNVQTNEEVAIKLENVKTKHPQLLYESKLYRILQGGTGIPNVKWFGVEGDYNVLVMDLLGPSLEDLFSFCNRKLSLKTVLMLADQMINRVEFVHSKSFLHRDIKPDNFLMGLGKRANQVYVIDFGLAKKYRDTSTHQHIPYSSSVKIDIDVICSYLPWQGLKAGNKKQKYEKISERKIATSTEAPATGQSSAMAPIANNNRLSATEEGRRSGWSDMDAMRRQVPPPAINAGSLAKQKSPIGHEQSTSKDAVFSSSTFLGRSSGSSRRPAVSSSREPSTEADQSRSRTTDASPGAFQRSGAPRWSPQMVDSSDNRRTPSGRHPSNAKNYESTIRGIQGLNFDGDDRIQY

SEQ ID NO: 200504 - protein, 103 aa, Oryza sativa
  unsure (1)..(103): unsure at all Xaa locations
  Clone ID: PAT_MRT4530_95968C.1.pep
IVCFIGGISGYLTSQCSLNFYNKPLILINPKTFFIPIXFIPFLSPIYINKFPLYVGGLIKISAQGXSEYFGANNMFKILINFPKIFQIIHYNNIKLYLIRFFI

SEQ ID NO: 200505 - protein, 483 aa, Oryza sativa
  Clone ID: PAT_MRT4530_95969C.1.pep
MAQMLSAVAMVGAASAASPIVTKSLVGVDAPASGITVVSRQDVRPDGASAVGDLTLSVSDLPMLSCHYIQKGLFFPAPDVPMASLVSLLMSSLSRALAIFPTLAGRLVTLPDDRVVIRCNDAGVEFRHAVAPNLSLDDFIVPDADVPTKLTKDLFPMDRTVSYDGHRRPLTSFQVTVLGDGAVFIGIVANHAVVDGTSFWHFFNTWAALCRGASPKLPDFRRSFFGESTAVLRFPGGVGPAVTFDADAPLRERVFHFSADAIRELKAITNRRPSGGQDAEVYGKMAHDRKNPEGLSAISSFQSLCAQIWLSVTRARQRLAPDATSTFRMAVNCRHRLRPAISPVYFGNAIQSAATTATVAELASNDLRWAAAKLNASLAAYDDGAIRRAAAAWQGAPRCFPLGNPDGAVITMGSSNRFPMYEGNDFGWGRPLAVRSGRANKFDGKMSAFPARAGDGSVDIEVCLAPDTMAALLRDSEFMQFVS

SEQ ID NO: 200506 - protein, 57 aa, Oryza sativa
  Clone ID: PAT_MRT4530_9596C.1.pep
HFTGSILSSLLLDIALLCTRARRTSVISRVVTTSTPTSHLLWEAEQTPEINYLDTAY

SEQ ID NO: 200507 - protein, 327 aa, Oryza sativa
  unsure (1)..(327): unsure at all Xaa locations
  Clone ID: PAT_MRT4530_95970C.1.pep
TKHPQLLYESKLYRILQGGTGIPNVKWFGVEGDYNVLVMDLLGPSLEDLFSFCNRKLSLKTVLMLADQMINRVEFVHSKSFLHRDIKPDNFLMGLGKRANQVYVIDFGLAKKYRDTSTHQHIPYRENKNLTGTARYASVNTHLGIEQSRRDDMESLGYVLMYFLRGSLPWQGLKAGNKKQKYEKISERKIATSTEALCRGYPTEFASYFHYCRSLRFEDSPDYQYLKRLFRDLFIREGFQFDYFFDWTILKYQQSQMTSAPPRAIAPATGQSSPMAPIANNNRPVXKGRRSGWSDMDAMRRQVPPPAYNAGSLAKQKSPIGHEXSTS

SEQ ID NO: 200508 - protein, 94 aa, Oryza sativa
  Clone ID: PAT_MRT4530_95971C.1.pep
MARCDGVDGRGKACGSIVHPLPSPLAATAPSCILHPRLPLPSSAPPLPSPPDNAATHCHRPWLPYRHPHLLPPLRASSPAAAILGSLSDGCSVI

SEQ ID NO: 200509 - protein, 81 aa, Oryza sativa
  unsure (1)..(81): unsure at all Xaa locations
  Clone ID: PAT_MRT4530_95972C.1.pep
KVVFQENQAXIMREVPIGTNERLVRGHRMPDPHSXDVDSVGCVFIKLKHRAWAVQKRASMYHPFLRRFQWLVIFHLWVFAT

SEQ ID NO: 200510 - protein, 111 aa, Oryza sativa
  Clone ID: PAT_MRT4530_95973C.1.pep
FFFFFFFFFFFFFFCFFFFFFFFLFVFFCFLGAKKKGLAKPFLKYGGGVNPLGHHTGLRPKFVTPRPLWGTRRGSPNWGGGGKIPQKPPFLTGAPQKISRGKKKTLRKKRG

SEQ ID NO: 200511 - protein, 581 aa, Oryza sativa
  Clone ID: PAT_MRT4530_95974C.1.pep
MSWLRNAVHRAVEASGGPLLTRTVRSSLGTVVHHAGQAVAGGARLINDRIGSRSYKSMRLTAKRLEDAALSYRGEDRVQLLRRWLVMLRETQRAAAAEKEAKRAGHPDQHLPVLDLYMDYETGAEPMNFIHVFLYSQALECLVLSMAKRAELLQFAQCAISGLKINPEISRLDDEILQLQQRINGMDALRSNSTSRRSKASQTVAEVNKLKVLSESLANSAAKAERRIMENRLQKEESLIFRVTKTNEVSVTEKEILAEISGLQKQKDLLEDELKKCWSVYENWEDILEKHSGCRYELRINCFTVLRSYDPLIEIFVRVILKLRLQEEELSRSIASCKVESSTVGAWIIFLEDTWKLQSLYEELRKKQANDELDKCATCFAKLINHHLYARVEELSTCIDSIKTFVDNLKIFDNRSVSAEDGNNGSSKQSNPRKYLEEEYLEAEKKVVAAFSLVDNIRAIYLSNQDYQARRDDPDVKKLFANIDKLRVEFESVPRPLLQIEIKEREERAKQSRSLQAARSSRQAGHESPIPAQLRTRLPSESDSELAKSDPEYREYSADDISGWEFDDLEDDGARLSVKSI

SEQ ID NO: 200512 - protein, 127 aa, Oryza sativa
  unsure (1)..(127): unsure at all Xaa locations
  Clone ID: PAT_MRT4530_95975C.1.pep
GGEGGKRAGHPDQHLPVLDLYMDYETGAEPMNFIHVFLYSQALECLVLSMIMEVAREXXAXLLSKVFGLCLPGGKDVHNAILSSIKELAKLFSTYHDEGLAKRAELLQFAQCAISGVKINPEISRLD

SEQ ID NO: 200513 - protein, 49 aa, Oryza sativa
  Clone ID: PAT_MRT4530_95976C.1.pep
SSLSASVSYGLRPTAMCVSDGGKFFERHLPCFLCPKPRKLAIIICANLR

SEQ ID NO: 200514 - protein, 662 aa, Oryza sativa
  Clone ID: PAT_MRT4530_95977C.1.pep
MPSSSTKVRSEEVEKYPIQVQKANGHPGNLSLLSDLPGEQTPSFPAQNALRAGRKMSFAYGMSDSNQRNFGERTYSTLTSDRAKNMRYSMRVPDFSGSVINKKVDSQKEEVKEVDSQDIAVSNDTRTDTYDGAQAQVPIRISNNRNDTKVRELELRVELLEAELRETAAAEIGLYSVIAEHGSSSNKVHTPARRLSRHFIHALKNWSRDKMGSAARSASSGLVLVAKACGYDVARLSFWLSNCVVLRAIVSETSKQSNSNAINNGSKTGPRRNSASMWESLNRKKGKLLSPEFDNWEDVDTFIAALKKIESWIFSRIVESIWWQAFTPHMQSANISSEPMPSSNAKKCYGRITVVGNQQQATLSIDIWKKAFKEASEKLCPVMEQCIARLDVAMFNAILRESDDEIPTDPMSDPITDPKVLPVPSGKFSFGAGVQLKNAIGSWSRCLSDSFGMDMDDYPEVESGDGDNGAAELRKPFYLLNALSDLLMIPKDVLMETSTRKEACTLILFNKCTLFPSELVKFSFLLCPTFSSSIIKRILDGFVPDDFCPDPVQHSLLEALESEDHLEGNTKGIRAVPCSASPILYPYPASGAILSMIGDPRKSGSAILRKSNTSDDELDELSSPLTFISKASSNPLAKLKQIGNPNSARYRLLHEVWKLDDQ

SEQ ID NO: 200515 - protein, 77 aa, Oryza sativa
  Clone ID: PAT_MRT4530_95978C.1.pep
EECVFLAFKTNPNFLVSPIAGKSSIFRALPNDVLANAYRLPKKKAQRLKHNKGNELGAFPPIQYKSYQDVFNGAESS

SEQ ID NO: 200516 - protein, 127 aa, Oryza sativa
  Clone ID: PAT_MRT4530_95979C.1.pep
AGGGPPPLLPPAIGVIVEAVPASPPTAPATSSGREEARCRQIWVAGGPLPLLPPTTGVVVEAAPTLAPTAPATRSGREEAERSPSTWLPDPPLAVTVAAAAPDPRAADMVFPRAAPLDPPPGQFALV

SEQ ID NO: 200517 - protein, 1162 aa, Oryza sativa
  unsure (1)..(1162): unsure at all Xaa locations
  Clone ID: PAT_MRT4530_9597C.1.pep
MRRAMMGVDDLIEEAKVRTVWWALCVFAISYFLTHVGIGEEILIGCKVGRDKLLLHTGDKLVTKLGILDINEVHYLGKSIRKKKPISILTLQFLRYLSFSAEFDWKGQPEQRQMLVSHFSKRQLIAHVHRLSEVAHFSSWRRKVCSPSVEAAFVKFFENILRDVVDDLGYXSNTPDGDVPELIRSLIINALGXISGKVKEFILVDLLTRDMADLIGHHLDIFRKNQSQIGVDVMGTLSSEERDERLKQHLIVSQELHPALLSSEHEYKVFQDIVGGIMALVLRPQDAQSPLVRCFSRELLTCLVLQPVMNFASPIYMNELIIYLMNNKNTNSGGGNLDNSNSSVTVTNAHSAHKGSSQGCQVESRNLSQESSGLVPANSSGMRSLVTHDGDKSKMSKIEHGSAIQSRQPDWAVGLDAATKRRSQVLAPENLENMWAIGRNYQKKMVKFEHSRGKSSGIDNIPSAGAAGKELSPNFNERITSVDDKYMVNLMQGSNRNAQSTYVTGSHPLVSQEWQDTDEAKPNEGSQVDCSSTEKPCETINNTKAQLKRSNSTPDIEKRYLAKSNQTMVSSEIARKNQGDRGSFPVSHGEVVLYVPKIRCRVVGAYFEKLSSKSFAVYSIAVTDAENKAWFVKRRYRNFERLHRQLKEIPNYSLHLPPKSFLSSSIDDYLVHQRCILLDKYLQELLSIPNIAEQHEVWDFLSATSKNYSAGKSTSVMKTLAGRILVLSLLFMLTIMNVPIKYFPHSRYLFALAPTVNVDDAMDDIVRQFKGVSDGLKRAVGTSPTSAPSSHLAENQMSLSWNQEEIDNHNLHNRNLSGAHSLSDGDSNYEDPSSSVNSASHSDNELNNSQYGSNDIKLNEAYSGFDAQASQQIEKPTRAYSDSSNMSSLNTFEDPAGIPPEWTPTNVSVHLLNLVDKVFQLKRRGWIRKQVLWISKQILQLVMEDAIDEWILRQINWLRRDEVIVQGIRWIQDTLWPNGVFFTRLDGYQGNAGPSQFDKHPSGSANQASGNRKDSASSFEQQLEASRNASEVKKLLLGGTPPTLVSIIGYKQYQRSARDIYYFLQSNVCVKQLAYAMIEQVLVSLFPELRQLIEDIHEKGPGAECEGSCRYVSPKQFSPEIDLDIYDDGVAMFLLLLWHFAHGEAAWHAKILQMDFNSVKSD

SEQ ID NO: 200518 - protein, 85 aa, Oryza sativa
  unsure (1)..(85): unsure at all Xaa locations
  Clone ID: PAT_MRT4530_95980C.1.pep
PRRRGRQPVXEAHVPARQATMIMQKKLRVVPSPSSAMAQPRSVSIGVEEDGSYTPYSSRFLRSLXSELNLIISRTNCKPNTNTNM

SEQ ID NO: 200519 - protein, 71 aa, Oryza sativa
  Clone ID: PAT_MRT4530_95981C.1.pep
YMYNVFSYSRKFNVFSYNCIHQIHVQGNCLPAAIQVLWCFNLGHETKKVLKKRFSWHNFLHHYKINNKRAR

SEQ ID NO: 200520 - protein, 77 aa, Oryza sativa
  Clone ID: PAT_MRT4530_95982C.1.pep
MKHQSIWRYVQYVLINYISVLQLVIWMFNLLLSHVQFDCLKMKLRLEEGYEDMLSCGVYPMCTKFMSNQQKQMCDSC

SEQ ID NO: 200521 - protein, 170 aa, Oryza sativa
  Clone ID: PAT_MRT4530_95983C.1.pep
MPRSRINGNFIDKTFSIVANILLRIIPTTSGEKRAFTYYRDGMLAQSEGNYAEALQNYYEATRLEIDPYDRSYILYNIGLIHTSNGEHTKALEYYFRALERNPFLPQAFNNMAVICHYRGEQAILQGDSEIAEAWFDQAAEYWKQAIALTPGNYIEAQNWLKITKRFEFE

SEQ ID NO: 200522 - protein, 90 aa, Oryza sativa
  Clone ID: PAT_MRT4530_95984C.1.pep
MLSLPPLPHKGEGRQKDIDMWDPLANSANWASQQAISSGSVVERLQAERRAAAASGRPRGGQRAAGAGVAARRAEPAAPSLLPEDRREAE

SEQ ID NO: 200523 - protein, 308 aa, Oryza sativa
  Clone ID: PAT_MRT4530_95985C.1.pep
MAVRVATAMTVLVCLVLVIAMILLRNVWGYAYSNEEEVVAYIASMLPILAVSFFVDGINGALSALLPAMLNGGLYFGPLDPVSNIITNAVGHLPPPANVMVQWSLKALVGFLICYFYYMPSLEALCYLCSTEADILTIVHLIEVDCCTRTFGVGSGTTKTSPSCATGGPGHANMDSLTTAMLTLSLRLRKIAGLLSTETAGGIELEEESGVRKPSEEFGLDVVSRLQDIIIWGYILRMRVGPLKMTAQYSPRETSVEPIEPEHDIFKRKVAAKIDDCCFANDFDGVELKPELYKPPWTAQVADGLTLQ

SEQ ID NO: 200524 - protein, 316 aa, Oryza sativa
  Clone ID: PAT_MRT4530_95986C.1.pep
MILFPPLTDSPSPSSSSPRSPAERGLVSPPMASSVPNGHGAATATGEGGTPAPPPSSSSLVFLGTGCSSAVPNARCLIQPPDPPCAVCSQSLSVPPELNPNYRCNTSLLIDYCQDEVAHKYILIDVGKTFREQVLRWFIHHKIPCVDSIILTHEHADAILGLDDVRIVQPFSPTNDIEPTPIYLSQFAMNSIAQKFPYLVRKKLKEGEEVRRVAQLDWRVIESDLQIPFVTSGLEFVPLPICLLDCLYRTGSHNVHLCWDQTLDAVKRICPKRALLIGMTHEMDHHKDNETLEEWSRREGIDVQLARDGLRVYIDL

SEQ ID NO: 200525 - protein, 200 aa, Oryza sativa
  Clone ID: PAT_MRT4530_95987C.1.pep
DDVRIVQPFSPTNDIEPTPIYLSQFAMNSIAQKFPYLVRKKLKEGEEARRVAQLDWRVIESDLQKPFVTSGLEFVPLPVIHGEDYVCLGFLFGRKSKVAYISDVSRFPPSTEHAISKSGEGQLDLLILDCLYRTGSHNVHLCWDQTLDAVKRICPKRALLIGMTHEMDHHKDNETLEEWSRREGIDVQLARDGLRVYIDL

SEQ ID NO: 200526 - protein, 193 aa, Oryza sativa
  Clone ID: PAT_MRT4530_95988C.1.pep
MSCLFFLLSSSLVHPPPPHDLWSKPGNGQGNGGEGPGLISGGQILSDTCRYLQGAAHGEWEARPHRVRPPHLMIPQQLDRDGVGEPVLLERCKQGNYRARARGGVGAHLLLGLRSKEIELELKEAASDLQHKEAACKMPPVRVHAKGIRRHCDVLAVLRRRKLGWAASACFNEGRSPGEKIVRGADCVRQEID

SEQ ID NO: 200527 - protein, 77 aa, Oryza sativa
  Clone ID: PAT_MRT4530_95989C.1.pep
MEPPLPPVRQQVMGNLAAPIADQHDKSPITIIVLQTPLPTSHQKSSPQSKGVDHSRGGAAAAIAPAPGATHLLLDLG

SEQ ID NO: 200528 - protein, 2097 aa, Oryza sativa
  unsure (1)..(2097): unsure at all Xaa locations
  Clone ID: PAT_MRT4530_9598C.1.pep
MEFTDVRSPTRIELGRHCIVSGPMSPSPTWRPVDLWYKRDPXGGPXGIESYRQHIHHSLRNPRTSVPQYPLYPVYEYPSSTVARQVGGLGAQGSTTVISSFVDNSVNTNLNQGVPTSITLVWTQVGEIVFPVYTTVPISASSPMAGNENAVATTQGDSMSKDPPAEAEIGTSTTSEPEEDPSAAKPCLFDRNLEPTRITSEVTRSWCPIHKTRKHTLQACWVFLNVHAEIRACKERGIQRTSPTRDVYCPIHKTKNHDLSSCKIFLSAMKMSPPKVQQSRIPLRDEDKEQGATLISDRFVGVIDIDPHEPSVLHLLEDYGSSPTSTPREVLAIDETGTSVCTNAEAENQVTTPAQYIRAVNAILETPYDPVLNDDLARWTERLQESVTNLNAFEEAAAAEHSEQPPTGDANGENPEQRESTHRATPPPRGTSDLRDHLNGHREARRTRDNEIRSRHRVSPRHHDNEERGGRSSEDRDRDNRCDHDDRERRMLGDTSRGRRHNDNDDGDRRRDNNGXRRQGSREPGRRPRNRTPEPSDPSSSSSYSSSSSSDRYPRRTYDRRQSTAPSARCRAFGRSLRDVRWLERFRPGAIEKYDGSTDPKEFLQVYSTVLYAAGADDNALVNYLPTALKGSARSWLMHLPPYLISSWADLWQQFVANFQGTYKRHAIEDDLHALTXNPGKSLRDYVRRFNECRNTIPEITDASIIRAFKSSIRDRYTTQELATRRVTTTRRLFEIVDRSAHANDALRRKNDKLKTGGEKKPAKDAPESSKKKNRKSGKRKAQAEVLTTXYADPPKRPDPQGSDAKKTWCPIHKSDKHSLKDCLVFKKSLAKHMTLEKGKRVRVVEKDAEAATQESDSAYPDSDLHVSHIFXVPQRRYPIMVEPTIRNIKVARVLIDGGSSINLLFASTLDAMGIPRSELTPTDQPFHGITPQSSFKPLGKITLPVTFGQANNFRTKQTTFDVAEFDTAYNDIIGRTALAKFMAASHNAYQVLKMPGPKGTITIQGNAKLAVQCDKRSLDMVEHTPSPPATAEPPKKVSKTNKTPKPDGAIKIVPLSSANPDKTELALITFLRDNADVFAWQPSDMPGVPREVIEHKLMVRPDAXPVKQKLRRFAPDRKQAXTREELDKLLKAGFIREVLHLEWLANPVMVRKANGKWRMCVNFTDLNKACPKDHFPLPRIDQLVDSIAGCELLSFLDAYSGYHQISMAKENEEKTSFITPFGVFCYVKMPFGLITAGNTFQRTVQGALSDQLGNNVEAYVDDIVVKTKISDSLIDDLREMFDNLRRYRLMLNPEKCTFGVPSGKLLGFLVSGRGIEANPEKIKAIENMKSPTRLKEVQKLTRCMAALSRFVARMGDRGQPFFALLKKQDKFVWTQEVEEAFIALKRYLSNPPILVAPQPNEELFLYIAATLYSVSTVIVVKREKVQRPVYYVSEALHDAKTRYPQIQKLLYAVIMTSRKLHHYFQAHRVTVVSSFPLGEVVRNKDVVGRIAKWVVEISQFDVRFVPXTTIKSQVLADFVADXTMPNNRSDNQIDNETWTMAFDGALNSQGAGAGFILTSPSGDQFKHAIHLNFRATNNTAEYEGLLAVIRAAAELGVRRLIVKGDSELVTNQVHKNYKCSSPVLSKYIAEVRKLEKRFNGIDVRHVYRKDNIEPDDLARRASRREPLEPGTFLDVLTRPSVKEASGEDSPVAPNISSGVTEAEHAVADIETTDDWCTPLIKFIGSEELPEDDAEAEKISRKEKVYCMISNDLYKKAPNGVLLKCVSSDDSRHLLIDIHEGICGSHAAGRTLVGKAFRQGFFWPTALKDACDMXTHKATSASTLDYPSHLAVLVLGTRYTRAIPTRTGRLQVPIXVAIDKFTKWIEATPTGEIKADNAIKFIKGIFCRFGLPHRIITDNGSQFINADFQDYCIRLGVKICFASVSHPQSNGQVERANGIVLQGIKTLLWAVRTTPTTSNKETPFFLVYGSEAMLPTELRHQSTRVQKYSDEDQEEQRTDDVNLLEEHRERVVVRAASYQQALRRYHEKRIRARTLSIGDYVLRWVQSQAGRNKLSPKWEGPYTITQVLRPGAFKIADCDGCELANSWNIDQLRKFYV

SEQ ID NO: 200529 - protein, 156 aa, Oryza sativa
  Clone ID: PAT_MRT4530_95990C.1.pep
GSPGGFGGRGGRGDSPGFGGRGRGDFSGFGGRGRGDSSGFGGRGRGDFSGGRGGRGRGFGGRGRSDRGPHDRFISDGRGRYDNRRGFGGKGRDRSYSRSPYRGRSRGYDRRSGSRSLSCRSRSRSRSWSRSRSRSRSWSRSRNRSRSPSRSMSRML

SEQ ID NO: 200530 - protein, 45 aa, Oryza sativa
  Clone ID: PAT_MRT4530_95991C.1.pep
PRVRPRVREDVVPSESPLIAFTKGDLKADEIMRALKEVTKAASGM

SEQ ID NO: 200531 - protein, 80 aa, Oryza sativa
  Clone ID: PAT_MRT4530_95992C.1.pep
MAWQMGRIMLKFRPIAPKPAEMARRRLRVWGPGRGSGRRNCSWYYYYNGRIYYLPHSQNVSAQMPLANSKFSPTTTGFNL

SEQ ID NO: 200532 - protein, 54 aa, Oryza sativa
  Clone ID: PAT_MRT4530_95993C.1.pep
CGEDGGCLNRICSDHGLVELLVMMIVWAMKLVTLCVHIYEYACPVCRLAYGRRG

SEQ ID NO: 200533 - protein, 109 aa, Oryza sativa
  Clone ID: PAT_MRT4530_95994C.1.pep
KFSDSLLSKQVENISNISREGDESSVRKSMSLDDLQEKAVFSAIIVDPQMKDTKESPEQSGSNSAVQKMISAFQSSSPQDLTRIKSESSLKGLSASSENFTQSSSDKSS

SEQ ID NO: 200534 - protein, 549 aa, Oryza sativa
  Clone ID: PAT_MRT4530_95995C.1.pep
MASTPAAAPPEWVVLDRLPLTSIDLPKDGISLSLVATPRISQLLVSPSLGLASGSVLAADPSGILLLSSSDPFLADSKSYVLWDAVYKISFPVPATPTETGAATGLVVVPGGSDHIYIMVAELSIRGSDVILRCFSTDPAKWIHKILQQPPQYKLLWCWCSDYALSHQGRLWWVDLLQGLVACDPFSDNPELHFVPLPSCCRNPNVQQSCRMGLSDNRRVGLSRGKLRLVVLSHASNSKSRIRLWTLADSEAGHWTLDFDLSSPVFDDIWTDLCDWKIAFFHPSKPHVVYFSQKQHLVAVDLQMVKVSEEDGGLYGEDADRRLSMRANKRKKSIYCFACAAEMLHPINGFDGGYAGMSVTRGVGAGDSQAGGGERRRSERREVRGKSVTPAHPLTEPEELKQNFAAADVGVGVGVGFTFTMAWEHRHPEMGNEEVNGPWAGPWVAKNLKVVLKVPTMTDEKTKQKAIEAVADIYGIDSIAADLKDNKMTIIGDMDTVEIAKKLRKIGKIDIVSVGPAKEEKKPEKKEEKKEEKKEEKKEEKKEEKKGKK

SEQ ID NO: 200535 - protein, 44 aa, Oryza sativa
  Clone ID: PAT_MRT4530_95996C.1.pep
GWPHYPTKKVKTGALLSKAILNNQVCPIGGEGSLTRVTVPHHFK

SEQ ID NO: 200536 - protein, 128 aa, Oryza sativa
  unsure (1)..(128): unsure at all Xaa locations
  Clone ID: PAT_MRT4530_95997C.1.pep
LSIGSTLYLCRYNCVVSLPQRCSGVGLRSDYSVTLCHPXDIYRVVFNDVGMVLRLLDIIIWVYMLRDSRGGPLMVTAQYGYSSTLACIPKTIPLGGYSSAFSPGWTAMTGCRKKLGNPGWSLETPGGH

SEQ ID NO: 200537 - protein, 243 aa, Oryza sativa
  unsure (1)..(243): unsure at all Xaa locations
  Clone ID: PAT_MRT4530_95998C.1.pep
MVRHNDIVVDSVHLSGGGVAGLGLGGACRQAPGLLARRIPPVAPMLLATGTHAQRHDADKPSACTSTSAKIVDFRRRAPVIRAAAARPRPVVVNADLGGXGGREPPPPPQHGRGPPSSTRIWEGGAVRSRRPLSSAXRRLNRPRRRGRAAASTLLAATARRRAPLAPLRPDPPATAXSPRPLRPDLGGRGRERAAAALRRHRPSLAAAAGRGGGGEAPLKWSACENRFSQADIKFHLDLYVCR

SEQ ID NO: 200538 - protein, 176 aa, Oryza sativa
  Clone ID: PAT_MRT4530_95999C.1.pep
MASPGVCINLVNGTSTRLPTNADLVVHYLHRRAIQEPVPCDFITNVDILQHNPWDIVPAEEKTNGKYFFIHEENERLGNHHSNRAAGDGFWRPVGSEVPIYHKRSGGADEALVGMKRTLVFHYGNSSSAKRTEWVMQEFRLAGATLIPCPVTRPATGDGSMLPCHRTGTTIATENN

SEQ ID NO: 200539 - protein, 642 aa, Oryza sativa
  unsure (1)..(642): unsure at all Xaa locations
  Clone ID: PAT_MRT4530_9599C.1.pep
MSWQRVGALLLGAQSCLLVPEVPAVGGIGSNRNNPAGATNVQVPTVQQQCKLSEFLKTGPPTFAMAVDPMEASDWLRTVEKKLGLIQCTDQERVGFATHQLVGPASGWWDSYEASRPEGHTITWNEFSSVFKKSHVPAGMITLRKREFRYLKQGDLTVTEYMHEFYRLAHYAPEDVETDEDKQEKFLQGLKDELAVQLLLEDYEDFEKLVDKAMQLESEHNRMTNCKRRIVNIPVIPGGNQRQRTEPLQITGSSVVHQEFLPQEDERNADNNTSNTNDDDTTNNHGSCPISDHSNKACNVSSIHQDVNDSINVGTQNDNLSNFDTEKDSNGDSNYGTIDANXHFSRDCPQPKHNLRHHSGHYARRRQPPLXLAGAPSGRAVFSLGLAATSSPSVSPPFRGENTGDAFSPAXSGVAATVPPPAATVAFPVRRPTSPPPPSASLHRPLPRLLLGFAGTPSPRRPLHPLRRRRPFGRPFLLPGSSAXLHHYHLRHRSGKAVLGIVSPPSKPLRGPSSSPPIVLVVDVPSVARLVVSRRRLRHRHRSGVFHVILVPVQPLPAVLVASSPVPVVVVVVVLSSFPVVVAPXSSSSSSAPRRQASCRPRLAFFQGSPPKPSPRRSSPLCPSVSAAPVRRCRSRASSRGG

SEQ ID NO: 200540 - protein, 72 aa, Oryza sativa
  Clone ID: PAT_MRT4530_959C.1.pep
KQRRGDGKLPRRSALGPRWSGARAGGGAALEDGDHAGARRRREVGARRGGKEARVLAAGFWWRNVKASLDSP

SEQ ID NO: 200541 - protein, 42 aa, Oryza sativa
  Clone ID: PAT_MRT4530_95C.1.pep
MGMGMGMDYPYRVAKAQPVLLAGSGDVFGRRKPLEGAVEASL

SEQ ID NO: 200542 - protein, 215 aa, Oryza sativa
  unsure (1)..(215): unsure at all Xaa locations
  Clone ID: PAT_MRT4530_96000C.1.pep
GESGSNYGVLLRHPRSSPPPNPRRSSRLRFPVATPLPRCRHGGAGKKSRLLVARRRGRRDRVACLPTKEEEEEEVGVAGDGGEEDGDEDGYLAREGEWGVRRMGRVGEEMRRVALVQAEAFHIPVGLFNDFFFDFFKIXAEVLSALIYRVRNSPPDRYACLVAEEVDATSQISEAPFEKIVGVVDCTVQNEADILKNLQGVDEYLYVSGIAVLPS

SEQ ID NO: 200543 - protein, 92 aa, Oryza sativa
  Clone ID: PAT_MRT4530_96001C.1.pep
CLNTMNLHQWCFKYQKPLRPMKIMLSTKVDCSLILPLALKMIHRSLSAGLMYITMSCPLYLLVFCGTDSAFCYRQKSTLAMTGRICRSIWVI

SEQ ID NO: 200544 - protein, 114 aa, Oryza sativa
  Clone ID: PAT_MRT4530_96002C.1.pep
PMGNGFVWHHLRDDYPHVPLRGAARHAKAPIKVDGPSKAKAGGCNRLPKRVPDGPSQGDVISKVWPLELCDQSLLSLLWGALHILCRKKRGGQCYDSSCQYGHILAKTAHNTLI

SEQ ID NO: 200545 - protein, 46 aa, Oryza sativa
  Clone ID: PAT_MRT4530_96003C.1.pep
GVRNALRMLRDELEITMALSGCTSVKEITRGHVVTESDRIRRCSRL

SEQ ID NO: 200546 - protein, 75 aa, Oryza sativa
  unsure (1)..(75): unsure at all Xaa locations
  Clone ID: PAT_MRT4530_96004C.1.pep
PPWPXSASSWPXGPSSSAWRHXPPSSSXGCPRRXLLQGLGXLIDXKAILLKFDQNMHLFSVTQRALSVNYRQFLQ

SEQ ID NO: 200547 - protein, 145 aa, Oryza sativa
  Clone ID: PAT_MRT4530_96005C.1.pep
SSARSIQLSYSRLSSSIDRLVEMENFPILFATQPTSSSTSSSYHFMSSSSGSHDHRHHHGLQAGGNGGGGGGSLSHGLFMGSSSSSIRMEELSNSKQAGDVVVDGGATRSPHGGDGDGAAGDDGGDAQAAAAGGRKKGEKKERRP

SEQ ID NO: 200548 - protein, 187 aa, Oryza sativa
  Clone ID: PAT_MRT4530_96006C.1.pep
LKGRTVIWIGLHYTILIFPPNLSAHQSALYQKKEQQKEHRAEVLLIKTTTDTDLDLTFLVVFFLLLIYKNMGSSSCRRRRSSVPSSPHLLPDEAHQPPHRALLGVAAAAAAAIALAQRRLVVRIAVHAVALFLLLLVVAIALVVAVLLAIEATGVVVVFHAGIRLLGGTCILLAVAASAFAAAAAAG

SEQ ID NO: 200549 - protein, 53 aa, Oryza sativa
  Clone ID: PAT_MRT4530_96007C.1.pep
CSPCGVLRRVLRSACLNVVVLSGPLSGRISIGDASSNPVVKAPAMFALLLIYN

SEQ ID NO: 200550 - protein, 69 aa, Oryza sativa
  Clone ID: PAT_MRT4530_96008C.1.pep
MKFLRGKRRVSCEIYRARGAGLRCWLDGGIVLPPRLHVRRESQWQRGSRRRATVRTRPNVGAAESIRTQ

SEQ ID NO: 200551 - protein, 410 aa, Oryza sativa
  unsure (1)..(410): unsure at all Xaa locations
  Clone ID: PAT_MRT4530_96009C.1.pep
MAAALPDDMLAEVLRHLGPRSLAACCRVCKPWRDLVDDRRLLRADLLPRSLAGIFLNFSGLCYPEFFARPSTTAGATTAISSLLDFLPFDGTKWYKIEDHCNGLLLLDCNCVVNPATRWWARLPPXPSSARGHGEMEYIHTAYLVFDPAASSHYEAYXVELEPSEWPPPLYVLPVFSSRTERWEERTFVREGEAAGNTTVPDKRISLRNDKYQVIKLPKVTRMPSEDSYFCLGRSQKGVYLALARHCCHLLVWILDESCDGIKWELKHDKDIKHILLGRNKVDLGPWILQEINYQKEEGSLSSYEWFRKKLEYELNEEATLEKSEWNSDDDNAPCNEDIIGRYNEAIDIIGFHPFKEIIFFSESFERGIAYHLNGSKVEDLGDLYPVGYDFVPSNEQMISASYPYTPCWM

SEQ ID NO: 200552 - protein, 522 aa, Oryza sativa
  Clone ID: PAT_MRT4530_9600C.1.pep
MDEVGGRWTFSRANEGYTSCGPVVEMSWHRAGVLLLGAQSCLPVPGVPAVGGIGSVLLSMARMGWKLCHVFRLYTVVVQSAIDEGRLKFTDGSKMNLDHDPFPVNAINFNDKKVLIRPEQAESTKGKGVIIGEARPKMIVPKKPEVGVWKENRSGASTSKAPRKTKVTFDMLLEKYEKQGGWGGPRRPIHERLFSPNNGRLYGKNRANEEKRERKRIKVEVRTSEVITIKVGSHDVSIPSGDEVGESSRKKSEAGTSSSQSDGLTRPFGRSDRSHTAGLIGPSGRSDRRPDSGPTDPSRLSAGRPNVVLPGASARSDRWSTSGLTRLQRRFDRRFAKGDVRASSSSNKVNRGHYLPPGTEPDPRWMPKDLTATQKRRLQRLRAQEIREKKAEEQRDKRFNELRPPPFCAMDEAEVAQFSLGPKDTVFEKPDESNRHMNPLYLKGHVDGKPISRILVDGGAAVNLMPYSLFKKLGREDDELKKTNMILNGFNGEPTEAKGIFSAELTVGNKTLPTAFFIVDVQ

SEQ ID NO: 200553 - protein, 62 aa, Oryza sativa
  Clone ID: PAT_MRT4530_96010C.1.pep
MWNRIHIHVTAVVLYVPWCRGGAAAPPPYWWITGASFRKSCFNLSNVMAAGMGMLSVQYVLS

SEQ ID NO: 200554 - protein, 187 aa, Oryza sativa
  Clone ID: PAT_MRT4530_96011C.1.pep
MVSPDTVRKDESAISDLAGHGFKEEDYYVVDYESELQTAMSTTRDLASSFSTFTAACPGRLDPVAPSTSALSSQCQARSGGAAAGGERGEAASSTSAARSRDSPRRAGSVALSSPSAARSRDDPGELDLRRRRQREEGRTGAGGGRRAEAGAPGMLMGGIWWGGCRECAMRDEDWGDLGVADICGSH

SEQ ID NO: 200555 - protein, 52 aa, Oryza sativa
  Clone ID: PAT_MRT4530_96012C.1.pep
INKDSRSFHIFHSHMPYPTTYSRSGYHSYSKSERDHVKHTHRQSTGGIIKRR

SEQ ID NO: 200556 - protein, 311 aa, Oryza sativa
  Clone ID: PAT_MRT4530_96013C.1.pep
MALDELSLRLPSFFPSSAAPLPASRYRRRRSSSKCSASELKTRLEYQGSDPCLPHGQRIPPSSMGCARLLRRLFTELNEFGESCAAAESLFVRAEEDLRHKEDERRVVADAIKKSSVENKSLTGENKSLRVDLDGANKRAAERERQLAAALEKIKSLETQLVSAEAATKAWAPPATESAKQACYTLRLALNDLVVEVAGTYGDCCARVAAGFVLSLLHEHGCDHVEDFPQIVKKGWPENDQSAASAVKTFRKSFWENGGKDGAKTQLRDQLERIARAEDAAAADASEDPEPSGAPAGREGEGNKSQDHPEV

SEQ ID NO: 200557 - protein, 124 aa, Oryza sativa
  Clone ID: PAT_MRT4530_96014C.1.pep
MPGAPASALLPPPAPVLPSSLCRRRLRSSSPGSSLLRAAEGDDSATDPARRGLSLLRAAEVDDAASPLSPPAAAPPDLAWHWEERAEVDGATGSSLALEGEGGGGSRRPSDGGVVGAQRRRRRS

SEQ ID NO: 200558 - protein, 71 aa, Oryza sativa
  Clone ID: PAT_MRT4530_96015C.1.pep
ILHTQIHQNTGVGYYASQRPEPVYIARVSCICSLANIPQIEGEEPHLAPPAEPAKGGLRGLPVRSPKLRQL

SEQ ID NO: 200559 - protein, 180 aa, Oryza sativa
  Clone ID: PAT_MRT4530_96016C.1.pep
MVSMAPSSSAAATRRLPLLLLLAAVLLLHPCHAATEASAAARRECTYTVRVKTSCASPARTADIVSVAFGDAYRNEAYGARLPAGGASGALDRCAVDAFRVGGQCGYGVCYLYLRRAGRDGWAPEWVQVFEPGAAAGEKPSTFYFGSPLPDGVWYGHNRCPKASPAMAARRTNTSASPLG

SEQ ID NO: 200560 - protein, 52 aa, Oryza sativa
  Clone ID: PAT_MRT4530_96017C.1.pep
FFSCRQKAAYDSNHRALEFSVGDWVWLRLLHRPIASLSVSVHGKLGPKFFEP

SEQ ID NO: 200561 - protein, 173 aa, Oryza sativa
  Clone ID: PAT_MRT4530_96018C.1.pep
MDRFRNVLLRKCKSLSRSLSRSSSYRNLRSMSTREHVVAGGDGGIVGGGDSKAVSAGGDGAVVFVGSSRRRYVISNKHLSHPLIAALIDDDVPAAAAGDGKEGGGGGGVVERRRSTSAATTTSSSTKPIAVNCEVVLFDHLLWMLDNAVDLRAGGDGDDDDAAMRELAQLYAY

SEQ ID NO: 200562 - protein, 1473 aa, Oryza sativa
  Clone ID: PAT_MRT4530_96019C.1.pep
MAELASGAVSSLLGVLRNEALLLGRVGNDVEFIKEEMESMHSFLEHLARTAPPVGGGGHDEQVRTWMKQVRELAHDCSNCIDIYLQHGDPAVYRARRGRCRCLWWASWLVHRVVAQHHAATRLRELKERARDVGERRIRYGVVVHDKAPLAAPSSSPPDQAADTEEEDDDDDDRNQMAAAAADSCDDHRRRLLEPRALDDYCAEKLLGWLKLQAETGRAAAAGLMPSIAIVAQGGADNAGAIARQSLDLAAVHFDRRVWINLRDVHHPWDLPLLPEEILCYILHRCQHQGTSDHVGGEYGRWQAYSYRSDVYNEIHTTIAQMKVDDKIEEIKGKIEQLESGKSNNLEKNKSSKTLNPITLSDKPLGILVEALRFAPMAPECKPLSSDEEIMQEAVEMLKEHMEAPAGKAAEPLIRLDNTQYELILQKMFPPASTKPPPQSEQAAASTLGEDHIREIVHNHKITLEIIRELLLPMRHLLDGNSVKEQTTCVTKGEGANSVAAANEEAKEKMVDEDENKTRLLMEGITQDLLSKSSKLQLLQGNYVEEQTKQLGMGGHDKISNNAVVDAIKGTKDKMYEMSLEIKDQLFIKGIVDKIKDHLDNKKAVIVLQDEEEYVSQWEKTRNALSLLGCATGSAVIVATKNNQRAKEFCFPPGEPVTYSLVGLYHDRVLKLTNQRENQDDYNRQILRDILDKCDPQEFSMKMFMHALYANPNRSNEELCKLHEALQVPQNSLATSNAKKIFKFSYRDLPREHRTCLLYLAIFPPGHKIRRSTIIARWLTEGLITKEDWPTAVRHAERCFDALINRWLVWPSDIGAAGKVKSCMVCDPIHGFITKMAKKQHILDARLSDLWARHFSIFSGLRLRASDGIDKFVHKLPKYSPQLALLKVLDLENCQCFNKNHYLKDICNKILLLKYLSVRGTNVTHLPSEINNLHELEVLDIQQTKMPEHTTRDVMLLKLRRLLAGHVNQRHSHDMGMPIGDEMSLYSSVRIPRKIEKMENIEVLSNVKASWDGNELKNIRKLWRLRKFGVVIHDKDSHLDKLLRAISDLKECLQSLSITVYETKSEGISPNKQLLLPEMFGRLVQPPKLLESLSINGLTHRVRLLPLLARGSNELAKVTLSGTELKQNDLMVMAVLPNLCCVRFQHKAYTERTLTFKVDEFQHLKYFLVEGVNMTDIIFENGAAPELEHIILSFTNICSLCGIGCLPKLMELQLKGNNSILSLPQDRIAPDMNSESRLLTFKKGEFEQLKNFVVEGPNMTDIIFEKEAAPKLQKIVLSLTNVNSLSGVEGLPKLKEIELKGHKFLLSFFANANQITKVTLCDTLLKQEDMHILANKPNMGSIVLLDKSYDESQLAFNKDEFPKLNLLIVECSTIINISFADGSAPKLEKIVWHFSRKDFCLLSGIANLPEFKELEFNGDFVPDKVRKAINAHKRKPILTHKKPQHHGPAPKEEDETRFPWISNLFSKKQEDRR

SEQ ID NO: 200563 - protein, 71 aa, Oryza sativa
  unsure (1)..(71): unsure at all Xaa locations
  Clone ID: PAT_MRT4530_9601C.1.pep
FDSRSSYTTNFCYSDPVYFTSHVTQITWSRKYSKSHQTGIQAYYPKNLTAVTFPENQVTCXLVHPVPCTGV

SEQ ID NO: 200564 - protein, 81 aa, Oryza sativa
  Clone ID: PAT_MRT4530_96020C.1.pep
MGGGVTQEALFRLHLWRQRGRGDYPILEDDHEDEDDDDDEDDKQDEVQGAGGDACGRSKQSTSEKKSRKATPKLGMKTITG

SEQ ID NO: 200565 - protein, 162 aa, Oryza sativa
  Clone ID: PAT_MRT4530_96021C.1.pep
VALPYFQLAVEAPEWWWRSVLCGGSIGIFIFFTCLPYYHARSGLPGFMQTSFFFGYMACVWYGFFLVVGTVGFRASRPFVGGVPGAPPCECPPCGCTPRSSPRGGRLCGPFARGVAPASALRLGPVVCCPPPRVGPPGGFFSRGSAGGGMIESGIKQRAPDS

SEQ ID NO: 200566 - protein, 1301 aa, Oryza sativa
  Clone ID: PAT_MRT4530_96022C.1.pep
MADVTFGAVKLVLGLIQDEARLLSGVREDLRFIMQEMESMNNVLRHLVANKGSAAADYQLRPWMKQIMELAFDSKNCVELYTQSGGGHCGWQPWTMVARHRVVTRIRELKIQAREISERQARYHIAGVAHAQQMDATTTIERWDASVPNQSRAWAGSSNNPSRRAILHDGWFGDYISVDEALSRLNPFTLDRYEVEPPARLDSDDEQQPRPQLNSDGGKEQPLAPQSDGRNKEQLPPPQSGGGNGIKQQQPLPPQSDGGDKEQPPPSLSDGGDKDQPLPPDCGVKRQLPPQSDGDDKQQPPPQSDGSDQPPPPQPDGGDTEQQPPQSDGGDKKQKHIRVVTISVQDGTDEAVAAEAVIERFKSRWARRGLWSQQLCLHVSVHRPPILSEITKVMVEKLKEKEDDEKNEAEDREWLGHKLKDEDVLLVLSGFNYPALWNQIIYSLVDIYLNRALALLSHSYGYEEGHLKEILRNILAKCCLDVFCMKMLLHALYYNPDMTKHQLQFLNISLGKEFTDHGRQDRIMAFCYQALPNSYKNCLWYSTIFARGSGVRRASLIRRWIAQGLIAQVNQSSAEDEAGHCFEAMHSQKLIVSSGLSGTRKVKSCTVHPVVSGLISRESSTVEDLLLNNQLPLDLDLLYSIRHGMQLHPANSNIKKFLNSLSSSSRLLLTVLDLEGRKGLKAGDLHTVCKIHKLKYLSLRNTDIAQLPKEIGQLKLLETLDIRGTRVQVFHTALPMLKHLLAGCIIDYPKEDIIKSKESFSTVSMPRAVATMEKMEILSRVKVSNSAKELNNIGDKLEHLKKLGVVLSGKKASLIDLFLQVDKLHRCLRSLSIRMDPPGNWDSIDVILLRPPKLLESLHICSIRSGLPPRIKELHQLAKITLRDTFLNQGALDILSMLKGLRYLRLCYHSFAEGALSFVKFVELVDLVIEDDIVNSVALGNNTYGGDPDKLEKIVWSFTHMEELSGDGCIGRRRKGLRAAAPARRRAPPAKHPHRDGGSGPPRIPHDFEDTLTMVAGDDSSKKARIRYMLLATWKPMLKPEEVPTLDVTVEDLFIVAKVAAQPLLALPNTAIGYAAEDARSQEPPFGRGGHLEHHIARTAGGIFIGEVQRRSLARWERDPRAPTPGTASTTDFRRATRLFRTDDRRGKPAMAIGCRWQPTISPVRLKIMRNTRDPPNWETFKELCHVQFGPPIRSNPLGEVKRLTQTSTVATYQAKFLTLSIREPAEDLQEAMSLARAYERKASKHGGRAKIGGAAPRWHGRGDSTSTVRRTDGRHGPMKIPPPASGGTSGTPPPRPVLQL

SEQ ID NO: 200567 - protein, 1054 aa, Oryza sativa
  Clone ID: PAT_MRT4530_96023C.1.pep
MADIAFGAVKLVLGLIQDEARLLGSVREDLQFIMQEMESMNNVLRHIVANKGSAAADYQLRPWMKQVMELAFDSKNCVELYTQSGGGRCGWQPWTMVARHRVVTRIRELKIQAREISERQARYHIAGVAHAQQMDATTTIERWDASVPNQSRAWAGSSNNPSRRAILHDGWFGDYISVDEALSRLNPFTLDRYEVEPPARLDSDDEQQPRPQLNSDGGKEQPLAPQSDGRNKEQLPPPQSGGGNGIKQQQPLPPQSDGGDKEQPPPSLSDGGDKDQPLPPDCGVKRQLPPQSDGDDKQQPPPQSDGSDQPPPPQPDGGDTEQQPPQSDGGDKKQKHIRVVTISVQDGTDEAVAAEAVIERFKSRWARRGLWSQQLCLHVSVHRPPILSEITKVMVEKLKEKEDDEKNEAEDREWLGHKLKDEDVLLVLSGFNYPALWNQVLDLLTSMSCSDCAVVLCTNDSKMAKYCCSNDSANDGPQIIYSLVDIYLNRALALLSHSYGYEEGHLKEILRNILAKCCLDVFCMKMLLHALYYNPDMTKHQLQFLNISLGKEFTDHGRQDRIMAFCYQALPNSYKNCLWYSTIFARGSGVRRASLIRRWIAQGLIAQVNQSSAEDEAGHCFEAMHSQKLIVSSGLSGTRKVKSCTVHPVVSGLISRESSTVEDLLLNNQLPLDLDLLYSIRHGMQLHPANSNIKKFLNSLSSSSRLLLTVLDLEGRKGLKAGDLHTVCKIHKLKYLSLRNTDIAQLPKEIGQLKLLETLDIRGTRVQVFHTALPMLKHLLAGCIIDYPKEDIIKSKESFSTVSMPRAVATMEKMEILSRVKVSNSAKELNNIGDKLEHLKKLGVVLSGKKASLIDLFLQVDKLHRCLRSLSIRMDPPGNWDSIDVILLRPPKLLESLHICSIRSGLPPRIKELHQLAKITLRDTFLNQGALDILSMLKGLRYLRLCYHSFAEGALSFVKFVELVDLVIEDDIVNSVALGNNTYGGDPDKLEKIVWSFTHMEELSGVSTLQSLTHIELNGRTWHLQNLEKLKREVDECGITFTLNPPENGQGSRL

SEQ ID NO: 200568 - protein, 225 aa, Oryza sativa
  unsure (1)..(225): unsure at all Xaa locations
  Clone ID: PAT_MRT4530_96024C.1.pep
LPIQFTELQDTMADALSGISLLASKSDLADLSRSVVVATSSITSLEQLAASSSVKSSGAPWLGGSGILGPQPPAPHQPRTSGAPHDSSAPTTGGGVPHFYKLEFPKFDGKDDPLNWLNHCEQFFXGQKTGDGDRVQMATYHLTGEAQDYEEHKGPPXWETFKELCHVQFGPPIRSNPLGEVKRLTQTSTVATYQAKFLTLSIREPAGSALHHGPSRGSRHQRLAQ

SEQ ID NO: 200569 - protein, 108 aa, Oryza sativa
  unsure (1)..(108): unsure at all Xaa locations
  Clone ID: PAT_MRT4530_96025C.1.pep
VKTEDSTYKLTYAKTRRRILTSEIGTASPLRXFRILSGETKXALSLISPSTNSRRKTTLLSTMSQTFKPPCRQQLDRLPQILYCLAYILVPTIPILCKYRNHDIKRRH

SEQ ID NO: 200570 - protein, 52 aa, Oryza sativa
  unsure (1)..(52): unsure at all Xaa locations
  Clone ID: PAT_MRT4530_96026C.1.pep
PGGGTCLNVFKPPIPFGGYKQNGXGREKGIPTLKNSLQVKAVVPPIKNPGGV

SEQ ID NO: 200571 - protein, 106 aa, Oryza sativa
  Clone ID: PAT_MRT4530_96027C.1.pep
YMHVQHTLYIKTHFFFFASMSRIKRLPYLTYISGKENLLLSSRAQMHTDTHTRILNILNYNGNNINQTISSYRMECINTLKYIKGAPCVFAMHTNGICYKECSMEI

SEQ ID NO: 200572 - protein, 108 aa, Oryza sativa
  Clone ID: PAT_MRT4530_96028C.1.pep
QQAAAGDPGGPSPPSPCRSGGGEAWGRPIWRHAAPPLPFLGDPAEGRHGGPADPAERRHEGGSPCPSVAGGGGTEAARAGSRGAAPVGGAAASTAGVEVGPPARGAMA

SEQ ID NO: 200573 - protein, 500 aa, Oryza sativa
  unsure (1)..(500): unsure at all Xaa locations
  Clone ID: PAT_MRT4530_96029C.1.pep
MGVHIFTDRLAFVTADWCSHLHGWLVTPLFMGVHVFTDRLAFTAVDWCLRLHGWPIMPPLLGVYDFTAGLPPSPPTGVLAYTVGMDQSEHHHRLAFAAADWCHRLHGWPIMPLLFGVNVFTXGRLVHRRLVSPPQRLAYYAAVVGRLRLHRPAASSAADWCLRLNGWNIMPPLLGVYVFTDRPPRPPPTCVSTCTAGILCRRCWASTSSPTGRVVRRRLVFPSTRLAYYAAVVGRQRLHRPTASSTADWXSPHARLAYYAAVVGRLRLHRPAASSAADWCLRLHGWHIMPPLLGVYVFTDWPPRPPPTGVSVYTVGLLCRCCWASTSSPIGLLVRRRLVSPPIRLAYYAAVVGRLRLHQPAASSAADWCFRLHSWPIMPPLLGVYIFTDQLPRPPPTGVSAYTAGILCRCCWASTSSPTGRLVRRRLVFPPTRLAYYAAVVGRLRLHRPAASFAADWCFRLHSWPIMLPLLGVYVFTDQPPCPPPTGVSVYTAGLLCRRC

SEQ ID NO: 200574 - protein, 562 aa, Oryza sativa
  Clone ID: PAT_MRT4530_9602C.1.pep
MDFDCKTARGDSSSVNRSCIVTEGTVVQAKPVSHNGKAKHWNSLSTLNNQKCSYELLSDPKKNVETSDGETASKCDSWCFTDLPSALVCEVLEHLDPKELGIVSCVSTLLHTLATDHQGWKKFYCERWGIPTPPVTLNGPLVPGGTSDWKSWKTLFVEREFRSKSFMGRFSVDVLRDHSEDVRTVFLLASVNLIFTGGNDSVIRMWDLEEGLLIDKSRPLCCTIRAIAADTRLLVTAGTNAFIHCWRAVEGNSYPFHISGNGTDQSPEFRLWGHEGPVTCLALDSLRIFSGSWDMTVRVWDRSEMKCVQKFMHADWVWSVAPHGNTVASTAGRDAYVWDIRSGELENVISNAHYGNAFSLARTHLADVLFTGGEDGAIRLFNVSEVSDDEDIKPAATWVPHTGPVHSLAFEYPWLVSASSDGRVALIDLRKLLTPRKSSKQPFRVKNFDPSSIEPPQRMLHGFGCDLFSVAIGADRIVCGGEDGAVKVWNFSEALEIEKRAQALRSMRQENRMRRKKAQVEMNANGRRSDQCGSIAMKRNQLKGDKSVTWHSKRAINDKVKS

SEQ ID NO: 200575 - protein, 81 aa, Oryza sativa
  Clone ID: PAT_MRT4530_96030C.1.pep
RRHPACQLRTSPLAHIRSLEEADGGGRHHCALHGLDAVVLLGEDLGEQLLRVAQRRPHIGGRRRHLHQPLNPGHPWCVSLP

SEQ ID NO: 200576 - protein, 491 aa, Oryza sativa
  Clone ID: PAT_MRT4530_96031C.1.pep
MADLAVLQWWLGAMVAMAAAASWSGGVLPAAEALGMNWGTQASHPLPPKIVAQLLQDNGIKKVKLFDADQDTLSALAGTGIEVMVAIPNVMLDSITDYDTAKEWVRRNVSRYNFDGGVTIKYVAVGNEPFLAAYNGTFDKVTLPALMNIQNALNDAGLGDSIKATVPLNADVYDSPQDQQVPSAGRFRADIADLMTQMVQFLANNSAPFTVNIYPFISLYLNDDFPVDFAFFDGGATPVVDNGISYTNVFDANFDTLVAALKGVGHGDMPIVVGEVGWPTDGDKHATATYAQRFYNGLLKRLAANAGTPARPGQYIEVYLFGLLDEDAKSVAPGDFERHWGILRFDGQPKYPVDLTGQGQNTMLVPAKGVTYLPRTWCVINTNAKDTSKLADNINFACTFADCTALGYGSTCAGMDANGNASYAFNAYFQVQNQKDDACDFQGLAMPTQTDPSTPACNFTIQIAATSAGHRRRAGAAVLALLALFRLFLLH

SEQ ID NO: 200577 - protein, 93 aa, Oryza sativa
  Clone ID: PAT_MRT4530_96032C.1.pep
ASDRPRSHFVGSPRASNPALYKGFPAKMGPKGLESITRGGYPTLGVLSVLKGSKLVFFLLNKKNGGSLPLVKFRAGIFLGWKNEMHSQGGGLV

SEQ ID NO: 200578 - protein, 587 aa, Oryza sativa
  Clone ID: PAT_MRT4530_96033C.1.pep
MSLDELPHKKLASSEGIRFARSDSRFRSLSPAPIPIPTAPSFRSLVDPVSDERVNHDTVTSHESEIGSGSISTVSSTVSSVESEKAAYEFLAQTPIKSTDAHLVEFSEAMRTVAKALRRVAEGKAAAQAEAEEWRRKYELEMAHKQQRKIKGYGSCANNELEKLASQLTLETPASDQAGCCGNHGICSHEVLQDESPGPNPRSSHKLVSRKASFRLSWGCNGDKNGQHKHDFVSFEKGDITTAERSNKQILLKWESSPQTVLFITKPNSNSVHVLCAEMVRWLKEHKKINVVVEPRVSKELLTEDSYYNFIQTWDDDFYEIIQSHLNKDFGKNPLLLLEFVMFITSIILIDEEKKMLHTKVDLIVTLGGDGTVLWNWLTAEMEASEQYRDCLDNVLNGPFSITLRNRLQCHVIRDAAKDELETEEPILVLNEVTIDRGISSYLTYLECYCDSSFVTCVQGDGLIISTTSGSTAYSLAAGGSMVHPQVPGILFTPICPHSLSFRPLILPEYVTLRVQVPHNSRGQAWASFDGKDRKLLSPGDALICSISPWPVPTACLVDSTTDFLRSIHEGLHWNLRKSQSFDGPRD

SEQ ID NO: 200579 - protein, 67 aa, Oryza sativa
  Clone ID: PAT_MRT4530_96034C.1.pep
MSLDELPHKKLASSEGIRFARSDSRFRSLSPAPIPIPTAPSFRSLVDPVRACSRLGTGLSQGCVSIS

SEQ ID NO: 200580 - protein, 67 aa, Oryza sativa
  Clone ID: PAT_MRT4530_96035C.1.pep
LHSELLVKCAETAHACVADWLMLHGYPTPFYCVHLLALNLPKWLRPLSSSVIIMNSTITHQKKKKKK

SEQ ID NO: 200581 - protein, 95 aa, Oryza sativa
  Clone ID: PAT_MRT4530_96036C.1.pep
TPSPLTRSSPPSTSPPLRSSWASPHPASSKFKEAILGIRSGMVLLYPCPTRPIAIPTSTDTSLPRSSAATRSSHSTPPLRASATAACRRGELGLG

SEQ ID NO: 200582 - protein, 103 aa, Oryza sativa
  Clone ID: PAT_MRT4530_96037C.1.pep
DKEKCASFEDVLRAAQEAIVLPPCVALAIRRPRSGVWDYIWVNVSELAVEELSVPEYLEFMEQLVDGQWVQFLNRHLSSKLFQDKESLYPLLNFLEDHDHCGH

SEQ ID NO: 200583 - protein, 95 aa, Oryza sativa
  unsure (1)..(95): unsure at all Xaa locations
  Clone ID: PAT_MRT4530_96038C.1.pep
RKTHLIPKRGSHLKXPXTTYXYXLMNMTDYATRRGXWMALATPSNTQHXXTELHXTETPCXSKRSPAGTPHXKAPHSRHSSQQGRASLLLXERVS

SEQ ID NO: 200584 - protein, 174 aa, Oryza sativa
  unsure (1)..(174): unsure at all Xaa locations
  Clone ID: PAT_MRT4530_96039C.1.pep
PAVAAGAGAGASGGGRRVFSVELRPGETTIVSWRKMLKEADLGAALPPPPLAAAAQPAVAPLPGPSGATHPTENDCAQSNRFNSVIEKIERLYMGKNSSDEEDLDDAPDDDQYDTEDSFIDDDELDEYFEVDNFATKHNGYFVNKGKLEQIXFDSXQTVNHSNXRRKDSSSSYI

SEQ ID NO: 200585 - protein, 58 aa, Oryza sativa
  Clone ID: PAT_MRT4530_9603C.1.pep
GRVRCTPWWMLSPAALMRTDRISEDHDASWCNGGDLLHLPGLQDTHGSSCTGLPTLHY

SEQ ID NO: 200586 - protein, 126 aa, Oryza sativa
  Clone ID: PAT_MRT4530_96040C.1.pep
MKLLVNKRVRVCVSLFGASIGHAARRTPTLLVRAIEFDWRLSAFFFPDSPHTHTPGWMEAGTTATRTGKCMHMHACHGVPRRVDGDVLPVDDDDDSGDGYVAGKGSDYQSIQHARIDAEYQPVYVL

SEQ ID NO: 200587 - protein, 749 aa, Oryza sativa
  Clone ID: PAT_MRT4530_96041C.1.pep
MGRGSHGCSVLGSSLLLLFCLGSAAAQKASTWKTLSGNPPAIIAKGGFSGLFPDSSDFAYGFVAAASSPDTALWCDVQLTRDGAGICLPDIRMDNCTNIANVYPKGKKTYSVNGVSTPGWFSVDYDSTGLSKVNLVQSLFSRVPYYDGTLPILPVESVFANYKAPAVWLNVQHDSFYSQFNLSMRSYILSVSKQYIADYISSPEVNFLTSLSGRVNKKTKLVFRLLNELAVEPSTNQTYGSMLKNLTFIKTFASGILVPKNYIWPVTQDNYLQPSTSVVGDAHKAGLEVYAADFANDFLLSYNYSYDPLTEYLNFIDNGAFSVDGVLTDFPITPSEAIGCFSNLNNSKTDNAKPLIISHNGASGDYPDCTDLAYQKAVTDGADVIDCPVQVTKDGIPICMSSIDLMDVTTVSTSQFSSQTTVIKDIKNGAGVYSFNLTWDDIAKNLKPKISNPMTTFDVYRNPRNKNAGSFMRLSDFLAFAKGKELSGVMISIEHAAFMAEKLGFGVVDAVIKALDDSGYSKQTAQKVMIQSTNSSVLVKFKEQTKYNLVYMLEEDVRDAAPSSLADIKKFANAVSVRTTSIYPESKHYLINQTSHIVQTLQSAGLPVYVYVLMNEFVSQPNDFFADATTQINTYVQKKGAGVDGIITDFPATVHRYRLSPCTSKESNLPTFMLPVQPGGLSGTIIDPAAQPPAMAPMPLLTDSDVAESPLPPVKNVTAPAPGASRAIKMRTDASIIVALLVLCASLII

SEQ ID NO: 200588 - protein, 224 aa, Oryza sativa
  unsure (1)..(224): unsure at all Xaa locations
  Clone ID: PAT_MRT4530_96042C.1.pep
LLLLLLLLLLLHISHSFTVAKPITELHALLSLKSSFTIDEHSPLLTSWNLSTTFCSWTGVTCDVSLRXLTSLDLSGLNLSGTLSSDVAHLPLLQNLSLAANQISGPIPPQISNLYELRHLNLSNNVFNGSFPDELSSGLVNLRVLDLYNNNLTGDLPVSLTNLTQLRHLHLGGNYFSGKXPATYGTWPVLEYLAVSGNELTGEIPPEIGNPTTLREXYIGYYNA

SEQ ID NO: 200589 - protein, 60 aa, Oryza sativa
  unsure (1)..(60): unsure at all Xaa locations
  Clone ID: PAT_MRT4530_96043C.1.pep
MRAAAAAAGQIDPSPGAPAKSXVKRLFERQLLRVSPAERLPTVAVVDEKDESADSNFVCL

SEQ ID NO: 200590 - protein, 105 aa, Oryza sativa
  Clone ID: PAT_MRT4530_96044C.1.pep
MERNTLLLCVRLWLSVTTGIPHAPPLPTLLRDGDPLYLDRTTICAFARKLSRGHTYLHSARDRGDVGARLPVQSDMTGDRPVTDWPISPTVAPDTTSDIGPLRTV

SEQ ID NO: 200591 - protein, 147 aa, Oryza sativa
  unsure (1)..(147): unsure at all Xaa locations
  Clone ID: PAT_MRT4530_96045C.1.pep
MAEGFGRWEADPLFPAAECVQDSADRMEGVYRLLLHERKLIQDDTSHTKRRVSMQYERDVCTALGTTKWQLEQFEREVNAAAXSNKANSRENAILQFRQFIRAIAEQISQVEDSLESLRNDSIRTPKHSYLTEHDGDELASFLSVNG

SEQ ID NO: 200592 - protein, 38 aa, Oryza sativa
  Clone ID: PAT_MRT4530_96046C.1.pep
MAGFGRTKGKEERCLWTRGRTGHKNGLIRSNDMSPSAN

SEQ ID NO: 200593 - protein, 160 aa, Oryza sativa
  Clone ID: PAT_MRT4530_96047C.1.pep
GCRQFHPEDFFVTPSTPASRESILRQERLETASGRIYQFSPWTTDRHGQCVKFRYRVRLCLEGIPMHGRTEAIVAKLIGWQCSIHFVEEYSCRRNYNRTYDLWVWTSDLSFIHKASWLILADPDEEGLAIDIPLPDVDPNRNPPPTDEKPGWLYFCHHPC

SEQ ID NO: 200594 - protein, 593 aa, Oryza sativa
  Clone ID: PAT_MRT4530_96048C.1.pep
MSGAALCAALTELGFDGEDPLDADALEWPFQYEEARPLLAWICSCLRPSNVLSPSHLAQYEQLVEEGRLLEGEDLDSAFDSISAFSSKKDNQEAVFGSEETILDIREEKLAYRAEVFELQKQLARQQAQFDLLAGQASTLIQGRRARVTAMSAVSGQLISLDEQLSSRNLEMNAVLGRITATTQELAHYHSGDDESIYLAYSDFHPYVVGDLACTKELNRWFSKQFEKGPFRLVAEEGKSKCSWVSLDDITNGLIRGDSEKSHHHQRVAELQRLRSIFATSERQWIEAQVENAKQQAILSILKSQVSSDEAHIHRDIHSLRRKGSELAGELSTLSQKVQAFVSEFISHLANQLARHQFLKIACQLERKNIASAYSLLRVIESELQSYLSAVNTRLGHCTSLIQAATEVREQGAIDDRDTLLHAVRDLLCVHSNVQATMPTYMSAHALVQQISALQSDLLSLQSELESALPADRKRCINELVSSDLSKPTHILGLVNRTVVSHVVKAVRHPNSWQSIGSMPLMRALDDMENANAQVEVSVEEVTKARTQKIKIFENRAHEVGRERQVFVDFFSNPERLKNQVRELTSRVKALQE

SEQ ID NO: 200595 - protein, 116 aa, Oryza sativa
  unsure (1)..(116): unsure at all Xaa locations
  Clone ID: PAT_MRT4530_96049C.1.pep
GPKKKQRRDKEKGRPPPIWEGKFWKRGTPGEKGGGGINNFWGKRGASPGSGLKKKQIRGGPQGGGGXEAGPRFKRKKGGGENNPRGKSGQGKRGVGGKKNGGGPWFAPGPNSKRGG

SEQ ID NO: 200596 - protein, 109 aa, Oryza sativa
  unsure (1)..(109): unsure at all Xaa locations
  Clone ID: PAT_MRT4530_9604C.1.pep
TSGSPGCRLCTSGEMNEHQGGIKDTVVVGADGDRQDHFAPAGSNHREPXPQGQDLRAQGGSGLTTAPGNGGLGRVFALLDAAAPLAAGAGPVGSVHHSGGSSSSHGAGA

SEQ ID NO: 200597 - protein, 464 aa, Oryza sativa
  Clone ID: PAT_MRT4530_96050C.1.pep
MERTDDAVEAAIWVLPNPPDWSVFLLPPAGAREGGGYDNDSRVEISITTGTGGHQERGASSSAGGLREGGAAREVERGGGDVGLTATAISGRRRGDGSLAAGSSIAGGHGGGTADDEPHSEGTVAGAVQGHLAGVGSLPTPTDEASRFEGRYEDDYNPYVDLYKFGRPAPDFWYSVWMRGPLVLHDKKLLLASDSLGVHRGGEIPDLADAITDVLDNHPGPVSYFRVDSTTWTDDNQLVKWFETLSNKSVVEITLLNIGCPVSTILPISELLSPNLTTLRVGFMKILDSDLLSFEYSSLSVLQLIGCSYRGADLNYLEIRCVSSIRQLQVGVNFAERSHRASLRNILECFPELSMLVIWRMDGIVYDKGSDVLFDSSFVGLGSVSCVKTRIQYFELEGFRGGPAEMDIARGILRHASRLAKFVLSHHKNYSEEDLVEQLEEIKTCIRASEDCIIEVHPLKDSPY

SEQ ID NO: 200598 - protein, 44 aa, Oryza sativa
  Clone ID: PAT_MRT4530_96051C.1.pep
MALGRGRVARHDGRRGLGHRDDEPEEAPSGAPGNIPTVDASSHG

SEQ ID NO: 200599 - protein, 108 aa, Oryza sativa
  unsure (1)..(108): unsure at all Xaa locations
  Clone ID: PAT_MRT4530_96052C.1.pep
PTRTPTRSETTMQKQAKWDRAANASTGGSYVILRESKSXWQQGDYEELAAKXNXQYLELKHRLVVHTSXIGGIGMDLHYNTYYTEIAXKLXAVLIASVLNSRMLGTSE

SEQ ID NO: 200600 - protein, 106 aa, Oryza sativa
  unsure (1)..(106): unsure at all Xaa locations
  Clone ID: PAT_MRT4530_96053C.1.pep
VFTCSAVALWTSGQGFLRPXVRFETYEPSQLNYIMVAAILRALTGETPIRDCDTSPAXTAEVVDKVIVADLQLKQGVKIVTDDKGTRLSYASADDAAVIEELIAKL

SEQ ID NO: 200601 - protein, 102 aa, Oryza sativa
  Clone ID: PAT_MRT4530_96054C.1.pep
RCSPCSTAGLQLDAHSPSMSVQCVTLSSPSVHWHDPSMSSYHTLISHSPRAPLVRSMSTELPSCSYIADRARVLTNFTRWGHIFSFCLIFFAVSLQIAASRP

SEQ ID NO: 200602 - protein, 102 aa, Oryza sativa
  Clone ID: PAT_MRT4530_96055C.1.pep
FCSLQATQIIRLEMAQRFVWSSVMGGSYMVITLSLLALIHSHNTQAILLTVNALLCMLQTMSKELYNTQLLYMPNVSAVNDYLMINIMNCDYDIVVQHGVGT

SEQ ID NO: 200603 - protein, 114 aa, Oryza sativa
  Clone ID: PAT_MRT4530_96056C.1.pep
LFLLNLGVDSILLGKTNFGPKGSRSNPSKRDGFIRSHWGPFFWDCDPHLFPINYYCPDKGWDLDLEATWLLFGLPKGNQIPPNQKLLVVPPLPLKNGHWRGLPLKGPLGCLQVL

SEQ ID NO: 200604 - protein, 91 aa, Oryza sativa
  Clone ID: PAT_MRT4530_96057C.1.pep
MVIKARKRAAAAVCIIILHGGIHNREDLEQQHWAAGGGRRACRAAGTAAWMGGGAAGGGLRGGTEGMREAAAGDAEGRRGGGNGIFFVEYL

SEQ ID NO: 200605 - protein, 95 aa, Oryza sativa
  unsure (1)..(95): unsure at all Xaa locations
  Clone ID: PAT_MRT4530_96058C.1.pep
MNTDITASVKSQYPVPDLYPTLTKVCWEYLRALXTVRLSTISAVFDTVFYLYLIKTGIHRPLMVTVCLIAVLGGFMYALQELVMRLMVLFATTPR

SEQ ID NO: 200606 - protein, 198 aa, Oryza sativa
  Clone ID: PAT_MRT4530_96059C.1.pep
PLLLSLPLLLIARAASLVAASFPPSDLQSHALHVAAALLLAAAVASLLAAISPPNRGLLAETALACAGAVGGLWVGQSGLVLYVDACVPAGCHRLMDAAVATPATRCDVEEARLRAVALMDLALSVHCVVVAAVAVGVHLGVAWWCGVDGGAGAGMGTGRRHNGVGGSYDAMPTVASAEAEMEHLPMKGVVGKSIAQE

SEQ ID NO: 200607 - protein, 92 aa, Oryza sativa
  Clone ID: PAT_MRT4530_9605C.1.pep
MGSLRRWGKHYRCRFSLVLAIPAPIMLTCMCPFSSMFYMIIVEVYLPAIKGEAGKFEGSNSPQPSVTKPRGSSDSVGRMRSLGNVTRSVGEK

SEQ ID NO: 200608 - protein, 128 aa, Oryza sativa
  Clone ID: PAT_MRT4530_96060C.1.pep
FTRPGVLLTYPVRPDTLFGYSTPRVFPDGFNKLKGAYGVRFTLVATLQSAHTPFQQGIYTLAFQPSGFIGFNRSIVPYTTTNLPHVRLDMASDTMVQLRVPYVNTIDFLEYTKSTKYGDLFVSFICPT

SEQ ID NO: 200609 - protein, 99 aa, Oryza sativa
  unsure (1)..(99): unsure at all Xaa locations
  Clone ID: PAT_MRT4530_96061C.1.pep
NFVFEMLDKPQAYESTRFLKTXLRKGPSGPFTITEVGDFIYLHYKEVEIVSLWVGDKPPLEPKRRKSLTARKLRNKEWIEKHRSHCDNGCRHCKRFSRG

SEQ ID NO: 200610 - protein, 82 aa, Oryza sativa
  Clone ID: PAT_MRT4530_96062C.1.pep
MRRRGDRVARGTTEQHSIGPRGRPGHRACLAGRALDGRDWAGGESVVGTARVAGVRGGKVAGKGNLFSAEEGLPERTKEHQV

SEQ ID NO: 200611 - protein, 50 aa, Oryza sativa
  unsure (1)..(50): unsure at all Xaa locations
  Clone ID: PAT_MRT4530_96063C.1.pep
SNNTVTDYQKVLEPLGFKAILMEDNELAIXPRKGQEKLGRWKRFVPGSSL

SEQ ID NO: 200612 - protein, 72 aa, Oryza sativa
  unsure (1)..(72): unsure at all Xaa locations
  Clone ID: PAT_MRT4530_96064C.1.pep
MMKPATSESDMTSLATSSPARSXKAAAAAIYVQISPSRDSHTTTATSTPTTHATPVYNNRPLDSPLHHFSYF

SEQ ID NO: 200613 - protein, 909 aa, Oryza sativa
  Clone ID: PAT_MRT4530_96065C.1.pep
MEAPRPSELAQPSPTPPQEQPVDAATTTPHHIPSSSKSIRFPLRPGKGTIGTRCMVKANHFFAHLPNKDLHHYDVSITPEVTSRIVNRAVIKELVNLYKASYLGGRLPAYDGRKSLYTAGPLPFTSQEFQITLLDDDDGSGSERRQRTFRVVIKFAARADLHRLELFLAGRHAEAPQEALQVLDIVLRELPSARYAPFGRSFFSPYLGRRQPLGEGLESWRGFYQSIRPTQMGLSLNIDMSATAFIEPLPVIDFVAQLLNSDIHSRPLSDAERVKIKKALRGVKVEVTHRGNMRRKYRISGLTIQPTRELTFPVDEGGTVKSVVQYFQETYGFAIQHTYLPCLTVQRLNYLPMEVCKIVEGQRYSKRLNQNQIRALLEETCQHPRDRERDIIKMVKHNAYQDDPYAKEFGIKISDRLASVEARILPAPRLKYNETGREKDCLPRVGQWNMMNKKMVNGGKVRSWMCVNFARNVQESVVRGFCHELALMCQASGMDFAPEPILPPLNAHPDQVERALKARYHDAMNVLGPQRRELDLLIGKLPDNNGSLYGDLKRVCEIDLGIVSQCCCTKQVFKMNKQILANLALKINVKVGGRNTVLVDAVSRRIPLVTDRPTIIFGADVTHPHPGEDSSPSIAAVVASQDWPEVTKYAGLVSAQAHRQELIEDLYKIWQDPQRGTVSGGMIRELLISFKRSTGEKPQRIIFYRDGVSEGQFYQVLLYELNAIRKACASLETNYQPKVTFIVVQKRHHTRLFAHNHNDQNSVDRSGNILPGTVVDSKICHPTEFDFYLCSHAGIKGTSRPAHYHVLWDENNFTADALQILTNNLCYTYARCTRSVSIVPPAYYAHLAAFRARFYMEPDTSDSSSVVSGPGVRGPLSGSSTSRTRAPGGAAVKPLPALKDSVKRVMFYC

SEQ ID NO: 200614 - protein, 965 aa, Oryza sativa
  Clone ID: PAT_MRT4530_96066C.1.pep
MASRRPTHRHHTEAPDPGGRGRGRGRAARYAQPQPQPQQQQQQQGRGCRARGASPPPPPQQQQQQQPRSTPTRATTVTVASSSSTTATASSSPLAPELRQAIMEAPRPSELAQPSPTPPQEQPVDAATTTPHHIPSSSKSIRFPLRPGKGTIGTRCMVKANHFFAHLPNKDLHHYDVSITPEVTSRIVNRAVIKELVNLYKASYLGGRLPAYDGRKSLYTAGPLPFTSQEFQITLLDDDDGSGSERSPAHFASPPALVQKQQYYVANLADLVVFFSFRRQRTFRVVIKFAARADLHRLELFLAGRHAEAPQEALQVLDIVLRELPSARYAPFGRSFFSPYLGRRQPLGEGLESWRGFYQSIRPTQMGLSLNIDMSATAFIEPLPVIDFVAQLLNSDIHSRPLSDAERVKIKKALRGVKVEVTHRGNMRRKYRISGLTIQPTRELTFPVDEGGTVKSVVQYFQETYGFAIQHTYLPCLTVQRLNYLPMEMVKHNAYQDDPYAKEFGIKISDRLASVEARILPAPRLKYNETGREKDCLPRVGQWNMMNKKMDFAPEPILPPLNAHPDQVERALKARYHDAMNVLGPQRRELDLLIGILPDNNGSLYGDLKRVCEIDLGIVSQCCCTKQVFKMNKQILANLALKINVKVGGRNTVLVDAVSRRIPLVTDRPTIIFGADVTHPHPGEDSSPSIAAVVASQDWPEVTKYAGLVSAQAHRQELIEDLYKIWQDPQRGTVSGGMIRELLISFKRSTGEKPQRIIFYRDGVSEGQFYQVLLYELNAIRKACASLETNYQPKVTFIVVQKRHHTRLFAHNHNDQNSVDRSGNILPGTVVDSKICHPTEFDFYLCSHAGIKGTSRPAHYHVLWDENNFTADALQILTNNLCYTYARCTRSVSIVPPAYYAHLAAFRARFYMEPDTSDSSSVVSGPGVRGPLSGSSTSRTRAPGGAAVKPLPALKDSVKRVMFYC

SEQ ID NO: 200615 - protein, 163 aa, Oryza sativa
  unsure (1)..(163): unsure at all Xaa locations
  Clone ID: PAT_MRT4530_96067C.1.pep
GRREQPPRRPSPSRGPRLGPSPSPSPRRSPAPPPSSPAALRRHPATRPTTSASSRPPXPVVKPKPRSPLAAPXPPPPSPPTPPPLPPPSPPXGPEDPRRVXTSTPSSAGSTRSTATPPATSRPPTPASPSASRCRLRAACSWRMRRRRSTGRWPTRSPSMLRQ

SEQ ID NO: 200616 - protein, 1827 aa, Oryza sativa
  Clone ID: PAT_MRT4530_96068C.1.pep
MEKPKSPLNPFSLHMFFAIGFVPGKWGSVLVVQGKNLGRSFKMAGHPPNHRGEGMIDFVAELARMTLVVGYPDAPEYTTIPPLSGELPYRVRLEVHGYVGTCLANMAVEASGGTADHACQEAAYLMMARLRERHDYIFHDTAYRYHPRRAHGDGVSSFRPTAGENDTTFGHMCAVMRGLDRMHSDLHKATKALNDGKLMRIVALKDEIARLKKENAQLKGLPAPGGVRIRTTPRKRTTAPVRIQLAPRNPPPPAAPAAPPVPPAAPAVPAVPPAPAPAPTPAFTLSFAPASAARGSASGTGGCLFGMVYTRTGSRATGEGSNGEERADGVHPNGDSGNGPPPLPENPTLAQVMAHQTQMMAAMMQQMQQQHQQMHQRMMQHAEQQHQQFGPPPPQSKLPEFLRVRPPTFSSTTNPMEANDWLHAIEKKLNLLQCNDQEKVAFATHQLQGPASAWWDNHMATRPPGTEVTWAEFCRSFRKAQVPDGVVAQKKREFRALHQGNMTVTEYLHEFNRLARYAPEDVRTDAEKQEKFMAGLDDELTNQLISGDYADFERLVDKAIRQEDQRNKMDRKRKAAQFRSNQGSQHRPRFTPGQQGGPTTMIVRQHRPFNSSNFHQGTSGSQNHQGGQPNRGAAPRPPMAPAQSAQPAQAKKETGAKPGSCFNCGELGHFADKCPKPRRAGPRFIQARVNHASAEEAQAAPEVVLGTFPVNSIPATVLFDSGATHSFISKKFVGMYGLRKDELSTPMRVRTPGNSSTSVSFSPSVLIEIQRSPFLANLILLESKDLDVILGMDWLTKFKGVIDCASRTVTLTNEKGETVVYKSPDSPKQGVSLNQIETEIPVDTVGKNLRKLEDIPIVCEYPEVFPEDLTTMPPKREIEFRIDLAPGTAPIYKRPYRMAANELAEVKKQVDEQLQKGYIRPSTSPWGAPVIFVEKKDKTKRMCVDYRALNEVTIKNKYPLPRIDDLFDQLKGAKVFSKIDLRSGYHQLRIREEDIPKTAFTTRYGLYECTVMSFGLTNAPAFFMNLMNKVFIEFLDKFVVVFIDDILIYSKSEEEHEQHLRLVLEKLKEHQLYAKFSKCDFWLTEVKFLGHVITAQGVAVDPSNVESVTKWTPPKTVSQIRSFLGLASYYRRFIENFSRIARPMTQLLKKDEKFKWTAECDKSFEELKRKLVSAPVLILPDQTKDFQVYCDASRHGLGCVLMQEGRVVAYASRQLRPHEGNYPTHDLELAAVVHALKIWRHYLIGNRCEVYTDHKSLKYIFTQPDLNLRQRRWLELIKDYDMSIHYHPGKANVVADALSRKSYCTALCIEGMCEELRQEFEHLNMGIVEHGFVAALEARPTLVDQVRAAQVNDPEIAELKKNMRVGKARDFHEDEHGTIWMGERLCVPDDKELKDLILTEAHQTQYSIHPGSTKMYQDLKEKFWWVSMRREIAEFVALCDVCQRVKAEHQRPAGLLQPLQIPEWKWEEIGMDFITGLPRTSSGHDSIWVVVDRLTKVAHFIPVHTTYTGKRLAELYLARIMCLHGVPKKIVSDRGSQFTSKFWQKLQEEMGTRLNFSTAYHPQTDGQTERVNQILEDMLRACALDFGGAWDKSLPYAEFSYNNSYQASLQMAPFEALYGRKCRTPLFWDQTGERQLFGTEVLAEAEEKVRIIRERLRIAQSRQKSYADNRRRELTFEAGDYVYLRVTPLRGVHRFQTKGKLAPRFVGPYKILERRGEVAYQLELPSTMIGIHDVFHVSQLKKCLRVPEEQADSEHIDIQEDLTYVEKPVHILDTSERRTRNKVTRFCRVQWSHHSEEEATWEREDELKAAHPYLFTSSTESRGRDSV

SEQ ID NO: 200617 - protein, 1220 aa, Oryza sativa
  Clone ID: PAT_MRT4530_96069C.1.pep
MVYTRNGTRTTGEGSNGEERTDGVHPNSDSGNGPPPLPENPTLAQVMAHQTQMMTAMMQQMQQQHQQMYQRMQQQAEQHQQQFGPPPPQSKLPEFLRVRPPTFSSTTNPMKANDWLHAIEKKLNLLQCNDQEKVAFATHQLQGPASAWWDNHMTTRPPGTEVTWAEFCRNFRKAQVLDGVVAQKKREFRALHQGNRTVTEYLHEFDRLARYAPEDVRTDAKKQEKFLAGLDDELTNQLISGDYADFERLVDKAIRQEDQHNKMDRKRKAAQFRSNQASHQRPRFIPRQQGEPTTMIVRQHRPFNSSNFHQGASGSQNHRGGQPNRSATPRPPMAPAQSAPSVQAKKETGAKPGSCFNCGELGHFADKCPKPRRAGPRFVQARVNHASTEEAQAAPEVVLGTFPVNSIPATVLFDSGAMHSFIYKKFVGMHGLIREELSTPMRVHTPGNSSTSVQFSPSVTIEIQRSPFLANLILLESKDLDVILGMDWLTKFKGVIDCANCTVTLINEKGETVVYKSLVSPKQGVSLNQIEVEIPVVTEEKNSRKLEEIPIVCEYPEVFPEDLTTMPPKREIEFRIDLAPGTAPIYKRPYRMAANELAEVKKQVDEQLQKGYIRPSTSPWGAPVIFVEKKDKTKRMCVDYRALNEVTIKNKYPLPRIDDLFDQLKGAKVFSKIDLRSGYHQLRIREEDIPKTAFTTQYGLYECTVMSFGLTNAPAFFMNLMNKVFMEFLDKFVVVFIDDILIYSKLEEEHEQHLRLVLEKLKEHQLYAKFSKCDFWLSEVKFLGHIITAQGVAVDSSNVESVTKWTPPKTVSQIRSFLGLAGYYRRFIENFSRIARPMTQLLKKDEKFKWTAECDKSFEELKKKLVSAPVLILPDQMKDFQVYCDASRHGLGCVLMQEGRVVAYASRQLRPHEGNYPTHDLELAVVVHALKIWRHYLIGNRCEVYTDHKSLKYIFTQPDLNLRQRRWLELIKDYDMSIHYHPGKANVVADALSRKSYCNALCTEDMCEELQQELERLNVGIVEHRFVAALEARPTLVDQFRAAQVNDPEIVELKKNMRVGKARDFLEDEHRTIWMGERLCVPDDKELKDLILTEAHQTQYSIHPGSTKMYQDLKEKFWWVSMRREIAEFVALCDVCQRVKAEHQRPVGLFQPLQIPKWKWEEIGMDFITGLPRTSSGHDSIWVVVDRLTKVAHFIPVHTTYTGKKLAELCLARIEFDLLR

SEQ ID NO: 200618 - protein, 57 aa, Oryza sativa
  unsure (1)..(57): unsure at all Xaa locations
  Clone ID: PAT_MRT4530_9606C.1.pep
QTIVQQLQLQQISGVYFDQTQAQTQNLLTFNLPTICGIYPNYXSAPKNNAPVGGVWD

SEQ ID NO: 200619 - protein, 98 aa, Oryza sativa
  Clone ID: PAT_MRT4530_96070C.1.pep
IPWILKRKPRARNTGGGKRLSLFLLKGPLPLGALAEYSSGRNFRGAFLFFLFPTCGVFLFPLSYLEPRCNSKASHNLVWPTGGQATQLVRGLGIGVVS

SEQ ID NO: 200620 - protein, 161 aa, Oryza sativa
  Clone ID: PAT_MRT4530_96071C.1.pep
EQPRLELSSLEGHRSSENPESRDEKTEEEVDDCPIEEVRLTVPITDDPALPALTFRTWLLGLISCAMLAFSNQFFGYRQNPLYISSLSVQIVVLPLGKLMAACLPKKVFRVKGTAWSFSLNPGPFNLKEHVLITIFGNTGSNSVYAVGIITIVKGLLPPGD

SEQ ID NO: 200621 - protein, 1521 aa, Oryza sativa
  unsure (1)..(1521): unsure at all Xaa locations
  Clone ID: PAT_MRT4530_96072C.1.pep
MVYTRTGNRTTGEGSNGEERVDGVHPNGDPGNGPPPPPENPTLAQVMAHQTQMMAAMMQQMQQQHQQMHQRMMQYAEQQHQQFGPPPPQSKLPEFLRVRPPTFSSTTNPMEANDWLHAIEKKLNLLQCNDQEKVAFATHQLQGPASAWWDNHMATRPPGTEVTWAEFCRSFRKAQVPDGVVAQKKREFRALHQGNRTVTEYLHEFNRLARYAPEDVRTDAEKQEKFMAGLDDELTNQLISGDYADFERLVDKAIRQEDQRNKMDRKRKAAQFRSNQGSQHRPRFTPGQQGGPTTMIVRQHRPFHSGNFHQGASGSQNHQGGQPNRGAAPRPPMAPAQSAQPAQAKKETGAKPGSCFNCGELGHFADKCPKPRRAGPRFIQARVNHASAEEAQAAPEVVLGTFPVNSIPATVLFDSGATHSFISKKFVGVHGLIREELSTPMRVHTPGNSSSSVQFSPSITIEIQGSPFLANLILLESKDLDVILGMDWLTKFKGVIDCANRTVTLTNEKGETVVYKSLVSPKKGASLNQIETEIPVDTEEKNLRKLEDIPIVCEYPEVFPEDLTTMPPKREIEFRIDLAPGTAPIYKRPYRMAANELAEVKKQVDEQLQKGYIRPSTSPWGAPVIFVEKKDKTKRMCVDYRALNEVTIKNKYPLPRIDDLFDQLKGAKVFSKIDLRSGYHQLRIREEDIPKTAFTTRYGLYECTVMSFGLTNAPAFFMNLMNKVFMEFLDKFVVVFIDDILIYSKSEEEHEQHLRLVLEKLKEHQLYAKFSKCDFWLTEVKFLGHVITAQGVAVDPSNVESVTKWTPPKTVSQIRSFLGLAGYYRRFIENFSRIARPMTQLLKKDEKFKWTAECDKSFEELKRKLVSAPVLILPDQTKDFQVYCDASRHGLGCVLMQEGRVVAYASRQLRPHEGNYPTHDLELAAVVHALKIWRHYLIGNRCEVYTDHKSLKYIFTQPDLNLRQRRWLELIKDYDMSIHYHPGKANVVADALSRKSYCTALCIEGMCEELRQELEHLNMGIVEHGFVAALEARPTLVDQVRAAQVNDPEIAELKKNMRVGKARDFLEDEHGTIWMGERLCVPDDKELKDLILTEAHQTQYSIHPGSTKMYQDLKEKFWWVSMRREIAEFVALCDVCQRVKAEHQRPAGLLQPLQIPEWKWEEIGMDFITGLPRTSSGHDSIWVVVDRLTKVAHFIPVHTTYTGKRLAELYLARIMCLHGVPKKIVSDRGSQFTSKFWQKLQEELGTRLNFSTAYHPQTDGQTERVNQILEDMLRACALDFGGAWDKSLPYAEFSYNNSYXASLQMAPFEALYGRKCRTPLFWDQTGERQLFGTEVLAEAEEKVRIIRERLRIAQSRQKSYADNRRRELTFEAGDYVYLRVTPLRGVHRFQTKGKLAPRFVGPYKILERRGEVAYQLELPSNMIGIHDVFHVSQLKKCLRVPEEQADSEHIDIQEDLTYVEKPVRILDTSERRTRNKVTRFCRVQWSHHSEEEATWEREDELKAAHPYLFTSSSESRGRDSV

SEQ ID NO: 200622 - protein, 182 aa, Oryza sativa
  unsure (1)..(182): unsure at all Xaa locations
  Clone ID: PAT_MRT4530_96073C.1.pep
VFYPFLSHRCCAGGPPASSSAPPTATSSKTTSAPPPPPPQRPAPPPPHPLRPRPRRPPTPTPSSTSSTRRLAPRPPSPTASASLPIPIPTPNPSLSSPPFARLDGGRDQAPPPRRRRAPPPLLLPRAPPPPHRRPAQPLLRRXRAPPRRXHXXAPXPPXRARRPRPLPRRPRAQGAAAHRRG

SEQ ID NO: 200623 - protein, 786 aa, Oryza sativa
  Clone ID: PAT_MRT4530_96074C.1.pep
MEQPRLELSSLEGHRSSENPESRDEKTEIPFYAQRYESVRCSCGAEEEVDDCPIEEVRLTVPITDDPALPALTFRTWLLGLISCAMLAFSNQFFGYRQNPLYISSLSVQIVVLPLGKLMAACLPKKVFRVKGTAWSFSLNPGPFNLKEHVLITIFANTGSNSVYAVGIITIVKAFYRREIHPLAAMLLTQTTQLMGYGWAGLFRKFLVDSPYMWWPSNLVQVSLFRALHEKEKRPKGGTTRLQFFLTVLITSFAYYIVPNYLFPTISTISVVCLVWKKSVTAQQIGSGVYGLGVGSFGLDWATVAGFLGTPLSTPAFAIVNIMAGFFLIVYVIVPAAYWADAYGAKRFPIISSHVFSANGSRYDVNQVLDTATFEFSQAGYDAAGKINLSIFFAFTYGLSFATLAATLSHVALFHGGSIWRQTKAAVSGQGGDVHTRLMKRNYAAVPQWWFQVMLVAVLGLSVFTCEGFGQQLQLPYWGVLLAAGLAFFFTLPIGIITATTNQQPGLNVITELIIGYLYPGRPLANVAFKTYGYISMSQAIMFLQDFKLGHYMKIPPRSMFIVQVSPHRLNPDIDSSEENLVGTVLASSVYFGTSWWLLESVSNICDPAKLPEGSPWTCPGDDVFFNASIIWGVVGPLRMFGRLGLYAKMNYFFLAGALAPVPVWALSRAFPGRAWIGLVNMPVLLGATGMMPPARSVNYLMWGAVGLAFNYVVYRRYKGWWARHNYVLSAGLDAGVAFMGILSYAVLQSRGINGVNWWGLQVDDHCALARCPTAPGVSAPGCPVQ

SEQ ID NO: 200624 - protein, 506 aa, Oryza sativa
  unsure (1)..(506): unsure at all Xaa locations
  Clone ID: PAT_MRT4530_96075C.1.pep
MGEGASSSGVPRSSSRGGPPPTLTPGGTGCRAFVASLRNVRWPPKFRPNLTEKYDGSINPSEFLQIYTTIIVAARGDDRVMANYFPMALKGQARGWLMTQPPDSIYSWEDLCQQFITNFQGTYPRPGEEADLHVVWRKDDESLRSYIQRFCQGKTTGDKPSSTAPSGEGRSADKWYSVHNTYRHSLADCRSVKNLAERFRKADEEKRQGRREGKAPTTSADDQRGEAKKKAPADDGDDSEKLALVVSPTIHNVRMKRVLVDEGASLSIISPAAFDALKAPGMKLQPSLPIIGVTPGHTWPLGHVELPMKMPGPSGPITVFGDVKIALACTEQSADNLAVATEPQAREASASRASKKRLASADEESALVSFLWANSDVFAWKPSDMPEVPREVIEHRLAVRPDARPIRQKVRRQAPEQQAFIREEVARLLEADFIREYIHPEWLANSVVVPKANGKLWMCINYTDLNKACPKDPFPLPXDQIVDSTTGCDLLCFLDAYSGYHQIRMA

SEQ ID NO: 200625 - protein, 1828 aa, Oryza sativa
  unsure (1)..(1828): unsure at all Xaa locations
  Clone ID: PAT_MRT4530_96076C.1.pep
RGDHPTNYRGEGIDDFVAELARMTLVVGYPNASEYSTVPPLSGKLPHRVRLEVHGXVGTCLANMVVVASGGTADHACQEAAYLMMARLRERDNYIFCNTAYRFHPRRASGDGVSTFRPTAGENDTTFGHMCAMMRGMDRMHSDLHKASKALNDGKLVRIIALKDEIARLKKENAHLKGLPIPGGVRIRTMPRKSTTAPVRIXLAPRNPPPPAALAAPPVPPAVPAAPAAPPPVPAPVPVSAPASALSFAPASAARGPASGNGGWLPATPSGSRDHSSSSSSGSELGSGETYLLDSRSRSEGPGLFLQMANTRNGSRAAGEGSNGEERTDGGYPNSASGNGPPPLPENPTLAPVMAHQTQMMAAMMQQMQQRHQQMHQRMQQQAEQQXQQFGPPPPQSKLLEFLRVRPPTFSSTTNPMEANDWLHTIEKKLNLLQCNDQEKVAFATHQLQGPVSAWWDNHMATRPAGTEVTWVEFCRSFRKAXVPDGVVAQKKREFRALHQGNRTVTEYLHEFNRLAXYAPEDVRTDAEKQEKFLAGLDDELTNQLISGDYADFEKLVDKAIRQEDQRNKVDRKRKPAQFRSNQGSHQRPRFTPGQQGGPTTMIVRQHRPFNSSSFHPGASGSXNHQGGQLNCSAALRPPMAPAQSVPSAQAKKETRAKPRSCFNCGEHGHFANKCPKPRRAGPRFAQARVNHASAEEAQAAPEVVLGTFLVNSVPATVLFDSGATHSFISKKFVGMHGLRKEELSTPMRVHTPGNSSTSVSYSPLVLIEIHLSQFLANLILLESKDLDVILGLDGLTKFKGVIDCANRTVTLTNEKGETMVYKSPVSPKQRISLNQIEVENPVTTEEKSSRKLEDIPIVCEYPEVFPEDLTTMPPKREIEFRIDLAPGNAPIYKRPYRMVANELAEVKKQVDEQLQKGYIRLSTSPWGAPVIFVDKKDKTKRMCVDYRALNEVTIKNKYPLPRIDDLFDQLNGAKVFSKIDLRSGYHQLRIREXDIPKTAFTTRYGLYECTVMSFGLTNAPAFFMNLMNKMFMEFLDKFVVVFIDDILIYSKLEEEHERHLRLVLEKLEEHQLYAKFSKCDFWLSEVKFLGHVITAQGVAVDPSNVESVTKWTPPKTVSQIRSFLGLAGYYRRFIENFSRIARPMTQLLKKDEKFKWTAECDKSFEEFNKKLVSTPVLILPDQTKDFQVYCNASRHGLGCVLMQEGRVVAYASRQLRPHEGNYPTHDLELAAVVYALKIWTRYLIGNRCEVYTDHKSLKYIFTQPDVNLRQRRWLELIKDYDMSIHYHPGKANVVADALSRKSYCNTLCTEGMCKELQQELEHLNLGLVEYGYVAALEARPTLVDQVRAAQVNDPEIADMKKNMRVGKARDFHEDEHGTIWLGERLCVPDDKELKDLILTEAHQTQYSIHPGNTKMXQDLKEKFWXVSMRREIAEFVALCDVCQRVKAEHQRPAGFLQPLQIPKWKWEEIGMDFITGLPRTSSGHDSIWVVVNRLTKVAHFIPVHTTYTGKKLAELYLARIMCLHGVPKKIVSDRGSQFTSKFWQKLQKELGTRLNFSTTYHPQTDGQTERVNQILEDMLRACVLDFGGAWDKSLPYAEFSYNNSYQASLQMAPFEALYGRKCRTPLYWDQTGERQLFATEVLTKAEEKVRTVRERLRIAQSRQKSYADNRRRELTFEAGDYMYLRVTPLRGVHRFQTKGKLAPRFVGPYKILEQRGEVAYQLELPSNMIGIHVMFHVSQLKKCLRVPEEQADSEHIDIQEDLTYVEKPVRILETSERRTRNKVTRFCRVQWSHHLEEXATWERENGLKAAHPHLFTSSSESRGRDSV

SEQ ID NO: 200626 - protein, 637 aa, Oryza sativa
  Clone ID: PAT_MRT4530_96077C.1.pep
MARNESRRFNILNICADVRGWLEANWGCTRMDPSSTPQHRRLGLGKCQRELMAGASWHTLGEHEHLFPQIKRVDIHEIGCFCEVTEEIFLGGVLNFCNFMRRILKSFVMVKPSSLVQTNQSPTCPNKSNANPMVEGIDEGIGWREEHVRPPMAMSGLPSNIEVTASQLTAIMDQLKRMEATMADHTIAISRLDNKIAEVDTKGIVGTKPSASNQHQHDGTTDSRHTVEDEKIWIAAFHLTDEAQECYTHAEEAYGTPLWRRFKEMVELRFGPPLRHNKLGTLAELRRTGSVADYQEKFMSLLSRAGPLMEVQKIELFTAGLQGKLRIDVELEAPALLDTAMSLARAYELRVQIEDPVPIEPAKPPARAPATRPAASPAAPHVAPIAAVASAPAAPAAAARAAAPVRAARVARRTLTPEEMQSQCEAGLCFNCDEKFTPGHRCKRLFWLYAPSADDNETNPPNAEDGDPGISLYAMAGVRLPGSETMQLHITINGKRLVALLDSGSTHNFINADVATDPSMLLSPCHGLRIIWDFTKLQLTLTRAGCQITWLSIGAPIDKPCEHAFACSGPDVLAGLLEEFATIFVEPRGLPSQCNHDHHIHLLPDSRPVAVRLYRYAQHQKDELERQCADMLSQGII

SEQ ID NO: 200627 - protein, 1825 aa, Oryza sativa
  unsure (1)..(1825): unsure at all Xaa locations
  Clone ID: PAT_MRT4530_96078C.1.pep
MAGHPPNHRGEGMIDFVAELARMTLVVGYPNAPEYTTVPPLSGELPHRVRLEVHGYVGTCLANMVVEASGGTADHACXEAAYLMMARLRERHNYIFHDTAYRFHPLRASGDDVSTFRPTAGENDTTFGHMCAVMRGLDRMHSDLHKASKALNDGKLMRIVALKDEIARLKRENAQLKGLPAPGGVRIRTTPRKTTTAPVRIQLAPRNPPPSAAPAAPPIPPVAPVVPVAPAPALTPVPVSAPTSALSFAPASAARGPASGNGGWLSATPNGSRDLSSSSSSGSEPGSGETYLPGSRSRFEGPDLFLQMVYTRNGSRATGEGSNGEEHTDGVHPNSDSGNGPPPLPENPTLAQVMAHQTQMMAAMMQQMQQQHQXMHQRMLQHAEQQHQQFGPPPPQSKLPEFLRVRPPTFSSTTNPMEANDWLHAIEKKLNLLQCNDQEKVAFATHQLQGLASAWWDNHMATRPPGTEVTWAEFCRSFRKAQVPDGVVAQKKREFRALHQGNRTVTEYLHEFNRLARYAPEDVRTDAEKQEKFLAGLDDELTNQLISGDYADFERLVDKAIRQEDQRNKMDRKRKAAQFRAHQGSHQRPRFATGQQGGPTTMIVRQYRPFNPSNFPQGASGSQNHHGGQPNRGAAPRPPVAPAQSGPSAQAKKETGTKPGSCFNCGELGHFADKCPKPRRAGLRFVQARVNHASAEEAQAAPEVVLGTFPVNSIPATVLFDSGATHSFISKKFVGMHGLIREELSTPMRVHTPGNSSTSVQFSPSITIEIQRSPFLANLILLEFKDLDVILGMDWLTKFKGVIDCANRTVTLTNEKGETVVYKSPDSPKQGVSLNQIRXNPVVTVEKNLRKLEDIPIVCEYPEVFPEDLTTMPPKREIEFRIDLAPGTAPIYKRPYRMAANELAEVKKQVDEQLQKGYIRPSTSPWGAPVIFVEKKDKTKRMCVDYRALNEVTIKNKYPLPRIDDLFDQLKGAKVFSKIDLRSRYHQLRIREEDIPKTAFTTRYGLYECTVMSFGLTNAPTFFMNLMNKVFMEFLDKFVVVFIDDLLIYSKSEEEHEQHLRLVLEKLKEHQLYAKFSKCDFWLTEVKFLGHVITAQGVAVDPSNVESVTKWTPPKTVSQIXSFLGLAGYYSRFIENFSRIARPMKMXKDEKFKWTAECDKSFEELKKKLVSAPVLILPDQMKDFQVYCDASRHGLGCVLMQEGRVVAYASRHLSPHEGNYPTHDLELAAVVHALKIWRHYLIGNRCEVYTDHKSLKYIFTQPDLNLRQRRWLELIKDYDMSIHYHPGKVNVVADALSRKSYCTTLCIEGMCEELRQEFEHLNVGIVEHGFIAALEARPTLVDQVRAGQVNDPEIAELKKNMRVEKARDFLEDEHGTIWLGERLCVLDDKELKDLILTEAHQTQYSIHPGSTKMYQDLKEKFWWVSMRREIAEFVALCDVCQRVKAEHQRPAGLLQPLQILEWKWEEIGMDFITGLPRTSSGHDSIXVVVDRLTKVAHFIPVHTTYTGKRLAELYLSRIICLHGVPKKIVSDRGSQFTSKFWQKLQEELGTRLNFSTAYHPQTNGQTERVNQILEDMLRACALDFGGAWDKSLPYAEFSYNNSYQASLQMVPFEALYGRKCRTPLFWDQAGERQLFGIEVLAEAEEKVRTIRERLRIAQSRQKSYADNRRRELTFEAGDYVYLLVTPLRGVHRFQTKGKLAPRFVGPYKILERRGEVAYQLELPSNMIGIHDVFHVSQLKKCLRVPEEQTDSEHIDIQEDLTYVEKPVRILDTSERRTRNKVTRFCRVQWSHHPEEEATWEREDELKAAHPHLFASSSESRGRDSV

SEQ ID NO: 200628 - protein, 85 aa, Oryza sativa
  Clone ID: PAT_MRT4530_96079C.1.pep
DSYEIDNLIKVLEKIYKSFNLLKIFFFESISFMRFLRFHAVQSNGYSCVFFLCFVILCFALNLLRESCVFFLSSFFFVYVIPQGP

SEQ ID NO: 200629 - protein, 157 aa, Oryza sativa
  Clone ID: PAT_MRT4530_9607C.1.pep
PQKKPPGFFSKQPFNPGGRGPSSVSQNLSPKKTTTFGPHGGQDWALSTIFAICPQRFIKKRGAGTHYPKKLGVWDRAHFPASIPFGPFFFHPPQKKKVRRFLFCIKKKSSSVAPKKGGGIQIPKPCVCPGAPKLFDGSFFTPPPFYGPKRVFFSTPP

SEQ ID NO: 200630 - protein, 1465 aa, Oryza sativa
  unsure (1)..(1465): unsure at all Xaa locations
  Clone ID: PAT_MRT4530_96080C.1.pep
AMMQQMLQQHQQMHQRMXQQVEQXQQQFGPPPPQSKLPKFLRVSPPTFSSTTNPMEANDWXHAIEKKLNLLQCNDQKKVTYATHQLQGPSSAWWDNHMATRPPGTEVTWAEFCRSFRKAQVPDGVVAQKKREFXALHQGNRAVTEYLHEFNRQARYAPEDVRTDAEKQEKFLAGLDDELTNQLISRDYADFEKLVDKAIRQEDQRNKMDRKRKAAQFRSNQGSHQRPRFTPGQQGGPTTMIVHQYRPFNSSSFHQVASGSQNHPGGQPNRSAAPRPPMATAQAAPSVQAKKETGVKPGSCFNCGEHGHFADKCPKLRRAGPRFAQARVNHASAEEAQAALEVVLGTFPVNSIYATVLFDSGATHSFISKKFIGEHGLIREELSTPIRVHTPGNSSTSVXFSPSVTIEIQISPFLANLVLLESKDLDVILGMDWLTKFKGIIDCANRTVTLTNERGETVVYKSPVALKQGISLNQIEVENSVVTAEKSSRKLEDIPIVCEYSEVFPEDLTTMPPKREIEFRIDLAPGTAPIYKRPYRMAANELAEVKKQVDEQLQKGYIRPSTSPWGAPVIFVEKKDKTKRMCVDYRALNEVTIKNKYPLPRIDDLFDQLKGAKVFSKIDLRSGYHQLRIREEDIPKTAFTTRYGLYECTVMSFGLTNAPAFFMNLMSKVFMEFLDKFVMVFIDDILIYSKSEEEHEQHLRLVLEKLKEHQLYAKFSKCDFWLSEVKFLGHVITAQGVAVDPSNVESVTKWTPPKTVSQIRSFLGRAGYYRRFIENFSRIARPMTQLLKKDEKFKWTAECDKGFEELKKKLVSALVLNLPDQTKDFQVYCDASRHGLGCILMXGRVVAYASRQLRLHEGNYPTHDLELAAVVHALKIWRHYLIGDRCEVYTEHKSLKYIFTQPDLNLRQRRWLELIKDYDMSIHYHPGKANVVADALSRKSYCNALCTEGMCKELQQELKHLNLGIVEHGFVAALEARPTLVDQVRAAHVNXPEIAELKKNMRVGKARDFHEDEHGTIWLGERLCVPDDKELKDLILTEAHQTQYSIHPGSTKMYQDLKEKFWWASMRREIAEFVALCDVCQRVKAEHKRPAGLLQPLQIPEWKWEEIGMDFITGLPRTSSSHDSIWVVMDRLTKVAHFIPVHATYTGKRLVELYLSRIMCLDGVPKKIVSDRGRXFTSKFWQKLQEELGTRLNFSTAYHPLTDGQTESVNQILEDMLRACALDFGGAWDKSLPYAEFSYNNNYQASLQMAPFEALYGRKCRTPLFWDQTGKRQLFGTEVLTEAEEKVRTIRERLRIAQSRQKSYADNRRRELTFEAGDYVYLRVTPLRGVHRFXMKGKLAPRFVGPYKIFERRGEVAYQLELPSNMVGIHDVFHVSQLKKCLTVPEEQADSEHIDIQEDLTYVEKPVHILETSERRTRNKVTRFCRVQWSHHSEEEATWEKEDELKAAHPHLFTSSSESRGRDSV

SEQ ID NO: 200631 - protein, 285 aa, Oryza sativa
  Clone ID: PAT_MRT4530_96081C.1.pep
VILWIEINLVLENAAGVAVALVVAAGAGHRLEGLAAGGCGGGAAGAGAGGGGGGGGLLLGGGGVVHGVVVVLLHQRRVDGRVAERHRAGVAAAAVAVAAAAGGHRHRRRVVLVRVRVRAGRHGVRRLPLLLLVVRAVRRRLVVVRRRPRRRHRPGGGGVLAPRRRRRHDHPAREHRRRRLERVDGPQLDDLTGAHLPLELLGQLVRVHALADHQQQVPVAAGQRHRLHPADSSSLFHGLLLAFVGFHGNRRRRPSAPLSLRAAPPQRRPSTALPSALPTPSLCHD

SEQ ID NO: 200632 - protein, 543 aa, Oryza sativa
  Clone ID: PAT_MRT4530_96082C.1.pep
MVAQRERAVVAVRCHAQKFPSRIPSRMCIKTPVQDRPGPSVTIEIQRSPFLANLILLESKDLDVILGMDWLTKFKGVIDCANRTVTLINEKGETVVYKSPAPPKLGVSLNQIEVEIPVVTEEKSSRKLEDIPIICEYPEVFPEDLTTMPPKGEIEFRIDLAPGTAPIYKRPYKMAANELAEVKKQKDKTKRMCVDYRALNEVTIKNKYPLPQIDDLFDQPKGAKVFSKIDLRSGYHQLRIREEDIPKTAFTTRYGLYECTDMSFGLTNAPAFFMNLMNKVFMEFLYKFVMVFIDDILIYSKSEEEHERHLRLVKFLGHVITAQGVAVDPSNVESVTKWTPPKTVSQIRSFLGLVGYYRRFIENFSRIARPMTQLLKKDEKFKWTAEYDKSFEELKKKLVSAPVLILPDQTKDFQVYCDASRHGLGCVLMQEGRVVAYASRQLCPHEGNYPTHDLELAAVVHALKIWRHYLIGNRCEVYTDHKSLKYIFTQPDLNLRQRRWLELIKDYDMSIHYHPGKANVVADALSRKSYCNASCTEDMCKEL

SEQ ID NO: 200633 - protein, 1229 aa, Oryza sativa
  unsure (1)..(1229): unsure at all Xaa locations
  Clone ID: PAT_MRT4530_96083C.1.pep
MIMVEVLEEEAVVFTPTSSGSEDASESHGPRHHRRNSPTPPRHDPSRREDPNRSGGLALSPPPGGGRPRRIGAWRRLTYGDGGSPRGTLQAAGALLRHPPVNSEPETPVQRWLDDVAKLVTTAQRQLAAGGRPAVTGGDDWVMANYFPMALKGQACGWLMTQPPDSIHSWEDLYQQFVTNFQGTYPRPREEADLHAVRRKDDESLRSYIQRFCQVRNTIPCIPAHAVVYAFRNGVRHNRMLEKIASKETKITAELFELADKVARKEEVWAWNSPGTGAAAAATPESVPLSKRRDRRGKRKPARSDDEGHVLAADGPTRAPRKGKATGDKPSSTAPSGEGRSADKWCSVHNTYRHNLADCRSVKNLAERFQKADEEKRQGRREGKAPATPTEDLRGEAKKKAPADDGDNSEDLEFQIPQGTVATIDRGEEGACVHTSRRGFKAMRRELLAAVPTHEAARKARWSEVKLTFDQXSDHPTVLARAAFDAFKAPGMKLQPXLPVIGVTPGHTWPLGHVELSVTFGDSTNFRTERIDFDVADLNLPYNAVLGRPALVKFMAATHYAYLQIKMLGPSGPITVFGNVKVALTCAEQRADNLAVATEPQAPEASASRASKKRLTSADEESALVFFLRANSDVFAWKPSDMPGVPREVIEHRLTVRPDARSVRQKVQRQAPEQQAFIREEVARLLEADFIREVIHPEWLANPVVVPKANGKLRMCIDYTDLNKACPKDPCPLPRIDQIVDSTVGAVLVVEREESGPEAPLTHDGPSSPEDPVPEAPNPQEDPEAPVGGGEALASVPEAYGPDMTRDPPGAPRQGRPRSSAPGSTDRLHRKVLADFIAEWTPVDDPVPSNVPSLPGDGEDPNTDIRGGHWVMHFDGSLNLQGAGAGVTLTSPSGDVLKYVVRLDFRATNNMAEYEGLLAGLRAAAGMGIRRLLVLGDSQLVVNQVSKEYQCTDPQMDAYVREVRRMERHFDGLELRHVPRRDNTVADELSRVASARAPLPLGPSWKDSHSHNGTQFTSELFGDYCDDMGIKLCFASPAHPKSNGQVERANAEILKGLKTKTYNVLKKHGDSWLEELPAVLWANRTTPSRATGETPFFLVYGAKAVLPSELSLGSPRVALYDEAKQDDLRRDDLDYFEERRRRAALRAARYQQSLRRYHQRHVRDRSLKVGDVVLCRVQSRLGLSKLSPMWEGPYKVIGVLRLGSVRLTTEDGTELPNPWNIEHLHRFYP

SEQ ID NO: 200634 - protein, 709 aa, Oryza sativa
  unsure (1)..(709): unsure at all Xaa locations
  Clone ID: PAT_MRT4530_96084C.1.pep
SFKLKILGKKLKLWSKNLSRIMLLLNNSNKVIDFHDLLEEDRSLSLFEWNFRRXVKHHILKLLEYRKIYWKKHCTNRWMMLGEENTNLFQSIATERYRMNTISQVLNQSGQIVNLHDQKANLFYQSFKNRMGISCSPTIDFNLNELFVPRIDLECLIDMFYTQEIDNLISIIPVDKAPGPDGFNGYFMEKCXHIIAQDFYRLAAHFHAESTDLQILNYSFITLVPKKPSPETVNDFRPISLMGSSLKFLTKLMTDRLQGVILKVVSENQYGFIKGRTIKDCLAWAFEYIHQCXQSKREIIILKLDFEKAFDTIEHTAILSVMQSMGFPQKWLNWVQMVFSSASSAVLLNGVPSTSFNCKRRVRQGDPLSPLRFVLGAELLQRIVNRAFNLGLISKPINENDGSGFPIIQYADDTLIMLKASQKEIFCFKELLDMFAQSTGLKVSYAKSSLYPLNLSXEKTDLIARLPGCSVRKLPFTYLGLPLGTTRPRVIDFAPLXDRVERRLTASSMFLPQGDRLTLIISVLSSIPTYYMCSLQLPVTVFKAIDTARRNCLWRGNCPESTRKPLASWERVFNPKEKGGLGMVNLKVQNVALLMKHLVKIYSAADIPWVNLVANSYLAAKVPHVINKGSFWLKDIIALVDVFRGTAKCNIRTGTTVLFWTDLWNDQFKCQQYQHLYASSLHKDDSVQAMCARPLEDSFMLQLSYQAYC

SEQ ID NO: 200635 - protein, 51 aa, Oryza sativa
  Clone ID: PAT_MRT4530_96085C.1.pep
KEGIHAVHLQQHANDQENMAEVAAQQTLASEFPWMKEYSTSSSESELCHIP

SEQ ID NO: 200636 - protein, 1816 aa, Oryza sativa
  unsure (1)..(1816): unsure at all Xaa locations
  Clone ID: PAT_MRT4530_96086C.1.pep
MADHPPNHRGEGMDDFVAELARMMLVVGYPNAPEYTTVPPLSGELPHRVCLEVHGYVGTCLANMVVEASGGTADHACQEAAYLMMARLRERHNYIFHDTAYRFHPRRASGDDVSTFRPTTGENDTTFGHMCAVMRGMDRMHSDLHKASKALNDRKLVRIIALKDEIARVKKENAQLKGLPAPGGVRIRTTPRKTTTAPVRIQLAPRNPPPPAIPAAPAPAPALVPVPAPASALSFAPASAARGPASGNGGWLSATPSGSRDHSSSSSSGTEPGSGETYLPDSRSRSEGPRLFLKMVYARNGSRTTGEGSNGEERTDGVHPNSDSGNGPPPLPENPTLAQVMAHQTQMMTAMMQQMXQQHQQMYQRMQQQAEQQQQQFGPPPPQSKLPEFLRVRPPTFSSTTNPMEANDWLHAIEKKLNLLQCNDQEKVAFATHQLQGPASAWWDNHMATRPPGTEVTWAEFCRSFRKAQVPDGVVAQKKREFRALHQGNRTVTEYLHEFNRLARYAPEDVRTNAEKQEKFLAGLDDELTNQLISGDYADFERLVDKAIRQEDQRNKMERKRKAAQFRSNQGSHQRPRFTLGQQGGPTTLIVCQHRPFSASNFHQGASGSQNHHGGQPNRSAAPRPPMAPAQSAPSVQAKKETGTKPGSCFNCGELGHFADKCPKPRRAGPRFVQARVNHASAEEAQAAPEVVLGTFPVNSVPATVLFDSGATHSFISKKFVGMYGLRKKELSTPMKVHTPGNSSTSVSYSPSVLIEIQRSPFLANFILLESKDLDVILGMDWLTKFKGVIDYANHTVTLTNEKGETVVYKSSVSPKQGISLNQIKVENPVTTREKSSRKLEDIPIVCEYPEVFPEDLTTMPPKREIEFRIDLAPGTAPIYKRPYRMVANELAGVKKQVDEQLQKGYIRPSTSPWGAPVIFVEKKDKTKRMCVDYRALNEVTIKNKYPLPRIDDLFDQLKGPKVFSKIDLQSGYHQLRIREEDIPKTAFTTRYGLYECTVMSFGLTNAPAFFMNLMNKVFMEFLDKFVVVFIDDILIYSKSEEEHEQHLRLVLEKLKEHQLYAKFSKCDFWLSEVKFLGHVITAQGVAVDPSNVESVTKWTPPKTVSQIRSFLGLAGYYRRFIENFSRIARPMTQLLKKDEKFKWTAECDKRFEELKKKLVSAPVLILPDQMKDFQVYCDASRHGLGCVLMQEGRVVAYASRQLCPHEGNYPTHDLELAVVVHALKIWRHYLIGNRCEVYTDHKSLKYIFTQPDLNLRQRRWLELIKDYDMSIHYHPGKANVVADALSKKSYCNALCIEGMCGELQQELERLNVGIVEHGFVAALEARPTLVDQVRTAQVNDPEIAELKKNMRVGKAQDFHEDEHGTIWLGERLCVPDDKELKDLILTEAHQTQYSIHPGSTKMYQDLKEKFWWVNMRREIAEFVALCDVCQRVKAEHQRPAGLLXPLQIPEWKWEEIGMDFIIGLPRTSSGHDSIWVVVDRLTKVAHFIPVHTTYTGKRLAELYLSRIMCLHGVPTKIVSDRGIGNPVEFXKRRLQEELGTRLNFSTAYHPQTDGQTERVNQILEDMLRACALDFGGAWDKTLPYAEFSYNNSYQASLQMAPFEALYGRKCRTPLFXDQTGERQLFGTEVLREAEEKVRTIRERLRIAQSRQKSYADNRRRELTFEAGDYVYLRVTPLRGVHRFQTKGKLAPRFVGPYKILERRGEVAYQLELPSNMIGIHDVFHVSQLKKCLRVPEEQANSEHIDIQEDLMYVERPVRILETSERRTRNKVTRFCRVQWSHHYEEEATXEREDELKAAYPHLFASSSESRARDSV

SEQ ID NO: 200637 - protein, 760 aa, Oryza sativa
  Clone ID: PAT_MRT4530_96087C.1.pep
MGGDAEAAAGREAIAAKMRGEDYAGARTLLLETLQTNPRLDDAFEMLSVLEVLCAAAETRARRPGLGRGRGVDWYRILQVLPRDDAAKIDAQYRSIVRQVEPVRDDLPGAEAALRLVNDAYAVLSDPAKKVRYDSTVANVELWCEDILQTKGICAADRSTHDYPNAELGRLSSLEADCNAVAGISNNVPSYAQQTDRSCLDVGDCSNVASSSKTKRTDSCFLADDGFQLPDENHVDKKQKSVCEKDVHCVSSPHVDLDDRFTDPLDNREDELCSITQYDVHNFENDREIVNFAAGQIWAAYDWEKFPRRYARINKIVADKEHLYVSWFKPSPQSHDENRWFSASLPFVCGIFIADECKISVTCPTMLCHQISSDNWNHHLKVYPQEGEVWAIYSDWDIGWCNDPGMRKKSTFYVVEILNSYLKGSGCTVAQLVKVDGYRSVFQRHVRSGREQLLQVHIHNLLMFSHRIPSFRFTCDVGTVFELEHSAVPENLQYENTSASVAPLYPLQGLHDDSNGFHEVAATHLSNPSTSKMDLGNPQQGMMNYNNKLSPEHFVEGQIWAVYDAPDRMPRLYVRVIRVVSHTAVSVLKLEPHPMLNEEIHWVEDGLPVACGVFRAGSETACKEISEFSHPVECDWSAKRSFYRIFPKKGEIWAMYKNWKIAFSNADIDKCEPRMVEILSDYSDEIGVNVCRLTRVKGCLTFFQRVIVEDFHLTKLISRSEMLSFSHRVPAYVVIEIKDRDIPKGSWHLEPNALPLRNID

SEQ ID NO: 200638 - protein, 110 aa, Oryza sativa
  Clone ID: PAT_MRT4530_96088C.1.pep
MKLITLSCLCLCLLLLLVTGSSSPVSVSVSGDRCPVLHHHRRLHDMVAAAVVSQPPPRPPPPAAPAAARTSGTAVETVLPRQRDDGEEIDETVYEGSKRLSPGGPNPQHH

SEQ ID NO: 200639 - protein, 220 aa, Oryza sativa
  unsure (1)..(220): unsure at all Xaa locations
  Clone ID: PAT_MRT4530_96089C.1.pep
GRVVPQGPYPYGGEYQPSHDGRRDVLDEVEIRQLLIDHVGHRCCWGSRPARTWKITSIEDCNVYVGTLETFIEERDTVTNKEPYDGGKIDGRDKGPVLAVWELDLRSEFPLLFVPEKEVMVKIPHSEVIEKCLDCESRGEIPCPICNAGQEXGFYKANQMTRCSACHGRXLLAHQDGFDTVCGMCSGKGMLACIACGSRGLVXCKTCSGYGSPSRKKHCS

SEQ ID NO: 200640 - protein, 222 aa, Oryza sativa
  Clone ID: PAT_MRT4530_9608C.1.pep
ARRLRSSSRARRRSPSSAGSRRRSRLLSAVAATPPSATRPRAPRPQGRSRLRSAVAVTPPSAIRPRAPPSAAPRRPPPPAVRRPPPPCLPPPINYRSRSNYPPSASSSYSRGSGGRRRTCMRRWPWRGRGGGTAGRLQRPVTAEPNVARSRMSSALAVVGQSSSPSASFSYGRGSVRRHRTCARRRPWRGRGSDVVGRPQRPVTAVLRAARSKAKVLRRRRP

SEQ ID NO: 200641 - protein, 62 aa, Oryza sativa
  Clone ID: PAT_MRT4530_96090C.1.pep
PSSDRHNLYDTTAKHMGLYMRIGGAGKHLMSKARTLCRHGTEHKRQPQWKYDGSSTGLSAGE

SEQ ID NO: 200642 - protein, 166 aa, Oryza sativa
  Clone ID: PAT_MRT4530_96091C.1.pep
MGDTGRFSAYLGVLADRTELRYINVGTSRRVSQLVFCSLKTQLDDTDAWRVQTRRTCTVYVRVPDLRPARTTPIELRWFGEKSGTVVYTVGEANGGLRGEHGGWDSPEASRRWRLQHMQEYLRLLEKIPVRCNGYNSTRVTIPNRTPAPSWRRTPSRTRLALALAG

SEQ ID NO: 200643 - protein, 78 aa, Oryza sativa
  Clone ID: PAT_MRT4530_96092C.1.pep
MAGIAKERRLPPALPLATLIGRELRAGGSERPSLRYGHAGFAKRGEDYFLVKPDCVRVPGDTSTAFSVFAVFDGHNGV

SEQ ID NO: 200644 - protein, 56 aa, Oryza sativa
  Clone ID: PAT_MRT4530_96093C.1.pep
MGIGVNHVTGEELQASRDEPFDCSNHLQLHHQHRERGTGVISKAPRQLRGGGRPPQ

SEQ ID NO: 200645 - protein, 263 aa, Oryza sativa
  Clone ID: PAT_MRT4530_96094C.1.pep
KKNLAQPSLNVATANIVQQPTVAFSNQLILGLLWCLVHLVISFFGSLSHLKNDLECYLISFKLLPKYRNLHLERLAYLGVVVDSREAKNALKVKQLLRWFSTIGINYLILYDIEGVLKELIQPGIETSTDGNPINSLDVVADTKASCYRHGGMFMECLSSSDGKEAIAKVANLLYSTCCNSDNKSEIAFTEADMTHALKAVGTGGPEPDLLLVYGPGRFHLGFPAWRLRYTEIMYVGPLESMKYGTIVKALYRFSRKYQNYGK

SEQ ID NO: 200646 - protein, 44 aa, Oryza sativa
  Clone ID: PAT_MRT4530_96095C.1.pep
MSNANFRGIRAKELILAGSRAAHLTSPGALQWREKQNGLPPLKK

SEQ ID NO: 200647 - protein, 99 aa, Oryza sativa
  Clone ID: PAT_MRT4530_96096C.1.pep
GHFIQQFQFINSTMASERGYSAPISRAISKIGRHEVSHGDQISKSISTSSTVHRANTAALQSQCNAPSKTKGTAKPSRLMEAKIGWSYEVRNYMLNIYS

SEQ ID NO: 200648 - protein, 81 aa, Oryza sativa
  Clone ID: PAT_MRT4530_96097C.1.pep
PLILLPGKSPVVQNFGSYRICHYQEIWMVWQHYNNRFFQLLKGWYQFFNSFQGLRGLFGPKNLEPWPGHKVAKGYPPGKRP

SEQ ID NO: 200649 - protein, 99 aa, Oryza sativa
  Clone ID: PAT_MRT4530_96098C.1.pep
MLRESYPKSSNQSNEELQILLELKNHWGSSPALGRWNSTNAAHCNWEGITCTNGAVIGISLPNQTFIKPIPPSTRLLMNITPPDLSYNNFSTTNPTDAW

SEQ ID NO: 200650 - protein, 251 aa, Oryza sativa
  unsure (1)..(251): unsure at all Xaa locations
  Clone ID: PAT_MRT4530_96099C.1.pep
MLIAEAKRALLPGPLRFDLARNRPKTTKDLFERIESFAKGEEDELRVQEEAALLGKKQSKNKQVSQGEEQKVENTNKPWKKFKHDYKQERKKQINFIGDGSHNGEGFFRQEGKGKNNWDNSKGGKSYWGNLVEVEDNXWNSVXGRGRWWNNGRGRGRESQKDQSKFCQTHGPGGHXREECSSKLCQIHGLGGHPTEECQHMTHLLEKHIDQYENNYEGARERAQNVIEAPQVLKIEAIEEVPKRVISAITR

SEQ ID NO: 200651 - protein, 162 aa, Oryza sativa
  unsure (1)..(162): unsure at all Xaa locations
  Clone ID: PAT_MRT4530_9609C.1.pep
FFFFFFLDEKIDLILPWTQNVHNVTYTFRSTGTTAXHLKHHLPTXHTHMTTDTFXDTXGTDRRYQSQGLHTTTYRRRNRLPVGCGPGPXVLLGGLVSVFSAGTHFLGIYFLRRRVVLARPRVLAGGRATYSSFVGRTGADRCGTXPFCGADSRPPPRRCGGH

SEQ ID NO: 200652 - protein, 96 aa, Oryza sativa
  Clone ID: PAT_MRT4530_960C.1.pep
MGKAAGLEKLAEHAPPVRKDALFPPPNAAGERRASSERGKAADGERGAAPLRGRSRPPASRGCSRRLSLLRQIRATKRLPFLAPATRGCRREAFGV

SEQ ID NO: 200653 - protein, 53 aa, Oryza sativa
  Clone ID: PAT_MRT4530_96100C.1.pep
MVVDDQEKMNEKNEVALRLKGKGGPIEDVEKLSPFNLSQGCKCLGFLYGANTL

SEQ ID NO: 200654 - protein, 127 aa, Oryza sativa
  unsure (1)..(127): unsure at all Xaa locations
  Clone ID: PAT_MRT4530_96101C.1.pep
EGNRTTDXXEACTXVNGAXMXXGXPRKEGMERKDVMSKNXSIYKPQASALEAHAPPNCTALPAANPANTTALILKEPPPSIPHKNITSPHPALAHHQAPPATPLPNLTAPRYSPPATPPPRPPPPPP

SEQ ID NO: 200655 - protein, 55 aa, Oryza sativa
  Clone ID: PAT_MRT4530_96102C.1.pep
MAMPNPEPNPLQRLLNRIEHLVLLQSSVDDAAASKEKDELGEGESDTLTGILRSR

SEQ ID NO: 200656 - protein, 57 aa, Oryza sativa
  Clone ID: PAT_MRT4530_96103C.1.pep
ETHTWYFKKNDKFCWIFITKLTCSDHSLTGRKERQGGAGYRLILLMAGGCCFFCSTA

SEQ ID NO: 200657 - protein, 160 aa, Oryza sativa
  Clone ID: PAT_MRT4530_96104C.1.pep
MVIAVNHDYHAIITVIALPRGGDNPGPSDKQKIVIKVCAPCEGCRAKALEVAARAADGVISLAITGDDRDKLEVVGVGVDVTRLVICLRKKVCYAEILLVEEEKEEEEKKEPECKPCYWPPYWCPPPEDPTCKPCYPRYSYAPPPPAVVVCDEPSACSIM

SEQ ID NO: 200658 - protein, 127 aa, Oryza sativa
  Clone ID: PAT_MRT4530_96105C.1.pep
MAGLVRSIGEKLLRRRSSPRRFSLDEAALMKLEGPKREEVVGMMRDWEARLDDHILANIRNIHALRTHQAGFFNCVLNRLGVPKGDLRDKWLWRSNLTAMYFTSFALGYRSTQHIINKHIQRCMKPS

SEQ ID NO: 200659 - protein, 86 aa, Oryza sativa
  unsure (1)..(86): unsure at all Xaa locations
  Clone ID: PAT_MRT4530_96106C.1.pep
KDACDMVQRCEACQSHSKHTKLPAQAXKWIEATPTGEIKADNAIKFIKGIFCRYGLPHRIITDNGSQFISADFQDCCVGHTDNVQQ

SEQ ID NO: 200660 - protein, 41 aa, Oryza sativa
  Clone ID: PAT_MRT4530_96107C.1.pep
ACIFISAFHMTLSFNQVHTCMHVCTFIFNHHATHSSLVHQF

SEQ ID NO: 200661 - protein, 1760 aa, Oryza sativa
  unsure (1)..(1760): unsure at all Xaa locations
  Clone ID: PAT_MRT4530_96108C.1.pep
MGCKMAGHPPNHRGEGMIDFVAELARMTLVVGYPNAPEYTTVPPLSGKLPHRVRLEVHGYVGTCLANMVVEASGGTADHACQEAAYLMMARLRERHNFIFHDTAYRFHPCRASGDDVSTFRSTAGENDTTFGHMCAMMRGLDRMHSDLHKASKALNDGKLMRIVALKDEIARLKKENAQLKGLPAPGGVRIRTTPRKTTTAPVRIQLAPRNPPPSAAPAAPPVPPAAPVVPAAPVPAPAPVHVSAPASALSFAPASAARGPASGNGGCLLGMVYTKNGSRATGEGSNGEERTNGVHPHSDSGNGPPPLPENPTLPQVMAHQTQMMASMMQQMQQQHQQMHQRMLQHAEQQHQQFGPPPPQSKLPEFLRVRPPTFSNTTNPMEANDWLHAIEKKLNLLQCNDQEKVAFATHQLQGPASAWWDNHMATRPPGTEVTWAEFCRSFRKAQVPDGVVAQKKREFRALHQGNRTVTEYLHEFNRLTRYAPEDVRTDAEKQEKFMAGLDDELTNQLISGDYVDFERLVDKAIRQEDQRNKMDRKRKAAQFRAHQGSHQRPHFTPGQQGGPTTMIVRQYRPFNPSNFXQGASGSQNHHGVRPVRAXKETGAKPGSCFNCGELGHFADKCPKPRRAGPRFIQARVNHVSAEEAQTAPEVVLGTFPVNSIPATVLFDSGATHSFISKKFVGMHGLIREELSTLMRVHTPGNSSTSVQFSPSITIEIQRSPFLANLILLESKDLDVILGMDWLTKFKGVIDCANRTVTLTNEKGETVVYKSPDSPKQGVSLNQIEAEIPVDTVEKKLRKLEDIPIVCEYPEVFPEDLTTMPPKREIEFRIDLAPGIAPIYKRPYRMAANELAEVKKQVDEQLQKGYIRPSTSPWGAPVIFVEKKDKTKRMCVDYRALNEVTIKNKYPLPRIDDLFDQLKGAKVFSKIDLRSGYHQLRIREEDIPKTAFTTRYGLYECTVMSFRLTNAPAFFMNLMNKVFMEFLDKFVVVFIDDILIYSKTEEEHEQHLRLVLEKLKEHQLYAKFSKCDFWLTEVKFLGHVITAQGVAVDPSNVESVTKWTPPKTVSQIRSFLGLAGYYRRFIENFSRIARPMTRLLKKDEKFKWTAECDKSFEELKKKLVSAPVLILPDQMKDFQVYCDASRHGLGCVLMQEGRVVAYASRQLRPHEGNYPTHDLELAAVVHALKIWRHYLIGNRCEVYTDHKSLKYIFTQPDLNLRQRRWLELIKDYDMSIHYHPGKANVVADALSRKSYCTALCIEGMCEELRFVAALEARPTLVDQVRAAQVNDSEIAELKKNMRVGKARDFHEDEHGTIWLGERLCVPDDKELKDLILTEAHQTQYSIHPGSTKMYQDLKEKFWWVSMRREIAEFVALCDVCQRVKAEHQRPAGLLQPLQIPEWKWEEIGMDFITGLPRTSSGHDSIWVVVDRLTKVAHFIPVHTTYTGKRLAELYLSRIICLHGVPKKIVSDRGSQFTSKFWQKLQEELGTRLNFSTAYHPQTDGQTERVNQILEDMLRACALDFGGAWDKNLPYAEFSYNNSYQASLQMAPFEALYGRKCRTPLFWDQTGERQLFGTEVLTEAEEKVRIIRERLRIAQSRQKSYADNRRRELTFEAGDYVYLRVTPLWGVHRFQTKGKLAPRFVGPYKILERRGEVAYQLELPSNMIGIHDVFHVSQLKKCLRVPEEQADSEHIDIQEDLTYVEKPVRILDTSERGTRNKVTRFCRVQWSHHSEEEATWEREDELKAAHPHLFASSSESRGRDSV

SEQ ID NO: 200662 - protein, 75 aa, Oryza sativa
  Clone ID: PAT_MRT4530_96109C.1.pep
ALYRNFIDLWEGGGVRLGANNFWERQAIGTAAQGSDDKDYMEPASAPFSSQRSLSEKYFYRAGIVEFMATFLFLY

SEQ ID NO: 200663 - protein, 40 aa, Oryza sativa
  unsure (1)..(40): unsure at all Xaa locations
  Clone ID: PAT_MRT4530_9610C.1.pep
MARGXKKHXKRLNAPKHWILDKXXXAFAPXXSFCPXKSRE

SEQ ID NO: 200664 - protein, 947 aa, Oryza sativa
  Clone ID: PAT_MRT4530_96110C.1.pep
MRVHTPGNSSTSVSYSPLVLIEIHLSQFLANLILLESKDLDVILGLDWLTKFKGVIDCANRTVTLTNEKGETMVYKSPVSPKQRISLNQIEVENPVTTEEKSSRKLEDIPIVCEYPEVFPEDLTTMPPKREIEFRIDLAPGNAPIYKRPYRMVANELAEVKKQVDEQLQKGYIRLSTSPWGAPVIFVDKKDKTKRMCVDYRALNEVTIKNKYPLPRIDDLFDQLNGAKVFSKIDLRSGYHQLRIREEDIPKTAFTTRYGLYECTVMSFGLTNAPAFFMNLMNKMFMEFLDKFVVVFIDDILIYSKLEEEHERHLRLVLEKLEEHQLYAKFSKCDFWLSEVKFLGHVITAQGVAVDPSNVESVTKWTPPKTVSQIRSFLGLAGYYRRFIENFSRIARPMTQLLKKDEKFKWTAECDKSFEEFNKKLVSTPVLILPDQTKDFQVYCNASRHGLGCVLMQEGRVVAYASRQLRPHEGNYPTHDLELAAVVYALKIWTRYLIGNRCEVYTDHKSLKYIFTQPDVNLRQRRWLELIKDYDMSIHYHPGKANVVADALSRKSYCNTLCTEGMCKELQQELEHLNLGLVEYGYVAALEARPTLVDQVRAAQVNDPEIADMKKNMRVGKARDFHEDEHGTIWLGERLCVPDDKELKDLILTEAHQTQYSIHPGNTKIMRREIAEFVALCDVCQRVKAEHQRPAGFLQPLQIPKWKWEEIGMDFITGLPRTSSGHDSIWVVVNRLTKVAHFIPVHTTYTGKKLAELYLARIMCLHGVPKKIVSDRGSQFTSKFWQKLQEELGTRLNFSTTYHPQTDGQTERVNQILEDMLRACVLDFGGAWDKSLPYAEFSYNNSYQASLQMAPFEALYGRKCRTPLYWDQTGERQLFATEVLTKAEEKVRTVRERLRIAQSRQKSYADNRRRELTFEAGDYMYLRVTPLRGVHRFQTKGKLAPRF

SEQ ID NO: 200665 - protein, 337 aa, Oryza sativa
  Clone ID: PAT_MRT4530_96111C.1.pep
MASVQQVRAAAVKNAPTVDIPIVPLATSKLPEFLRVRPPTFSSTTNPMEANDWLHAIEKKLNLLQCNDQEKVAFATHQLQGPASTWWDNHMATRPPGTEVTWAEFCRSFRKAQVPDGVVPQKKREFWALHQGNRTVTEYLHEFNRLARYAPEDVRIDAEKQEKFLAGLDDELTNQLISGDYADFEKLVDKAIRQEDQHNKMDRKRKAAQFRSNQGSHQRPRFAPGQQGGPTTMIVRQHRPFNTSSFHQGASGSQNHQGGQPNRSTAPRPPMAPAQSAPSAQAKKETGAKPGSCFNCGEHGHFADKCPKPSRAGARFAQARVNHASAEEAQAAPEVVL

SEQ ID NO: 200666 - protein, 847 aa, Oryza sativa
  unsure (1)..(847): unsure at all Xaa locations
  Clone ID: PAT_MRT4530_96112C.1.pep
AFDALKAPGMKLQSSLLIIGVTPRXHVELPVTFGDSTNFRTERIDFDVADLNLPYNAVLGRPTLVKFMATNHYAYLQMKMPGPAVPITVFGDVKVALACAEQRADNLAVATEPQAPEATASRASKKRLTSANEESALVSFLRANSNVFTWKPSDMPGVPREVIEHCLAVRPDARPIRQKVRHQAPERQAFIREEVVRLLEADFICEVIHPEWLANPVVVPKANGKLRMCIDYTDLNKACPKDPFPLPCIDQIVDSTVGCDLLCFLDAYSGYHQIRMAREDEEKPTFITPVGTFCYTTMPFGLKNAGPTFQRMTRITLSNQIGRNVEAYVDDLVVQRPVYFVSEALRDAKTRYPQAQKMLYAVLMASRKLRHYFQAHRVSVVTSYPLGQILHNQEGTGRVVKWAIELAEFDLHFKPRHAIKSQVLANFIAEWTPVDEPVPPNVSFLPRDVKDPNADIHGGHWVMHFDGSLNLQGAGARVTLTSPSGDVLKYVIWLDFRATNNMAEYEGLLAGLRAVARMGIHRLLVLGDSQLVVNQVSKEYQCTDPQMDAYVREVRRMEHHIDRLELRHVPRRDNTVADELSRVASARAPLPPGTFEERLAQPSARPNPSRDPDDTPSAPTLGDSRPSGPEGVDPDPPHQVVWMTDIRAYLDGNTLPEDRAEAEKLARISKRYVLIEGTLYRRAANGILLKCVSREQGIELIADTHQDILGPFKTARGGYQHLYVAIDKFTKWPEAYPVVKIDKHSALKFIRGITSRFGVPNRIITDNGTQFTSELFDNYCDDMGIKLCFASPAHPRSNGQVERANAEILKGLKTKTYNVLKKHGDSWLEELPAVLWANRTTPSRATG

SEQ ID NO: 200667 - protein, 144 aa, Oryza sativa
  Clone ID: PAT_MRT4530_96113C.1.pep
MATAAAPSPLLGPAGYKAMATPSPPPDPAGGEAAGYKVTAAWRWWWLPPLRQIRLEGRRRATRRRRRPPLHQIQREGRWLATRRQREGRRRLIPPLRMVTTTGLEKDVGCHRVLDVFYVNLLDVYVFMDVLGVHAFMCYLILSR

SEQ ID NO: 200668 - protein, 1802 aa, Oryza sativa
  Clone ID: PAT_MRT4530_96114C.1.pep
MAGHPPNHRGEGMIDFVAELARMTLVVGYPDAPEYTTIPPLSGELPHRVRLEVHGYVGTCLANMAVEASGGTADHACQEAAYLMMARLRERHNYIFHDTAYRYHPSRAHGDGVSSFRPTAGENDTTFGHMCAVMRGLDRMHSDLHKATKALNDGKLMRIVALKDEVARLKKENAQLKGLPAPGGVRIRTTPRKRTTAPVRIQLAPRNPPPPAAPAAAPAPPAVPAAPAPAPAFTLSFAPASAAGGSASGTGGWLSATPSGSGETDPSDSRSRSEGPGCLFGMVYTRTGNRATGEGSNGEERADGVHPNGDSGNGPPPLQENPTLAQVMAHQTQMMAAMMQQMQHQHQQMHQRMMQHAEQQHQQFGPPPPQSKLPEFLRVRPPTFSSTTNPMEANDWLHAIEKKLNLLQCNDQEKVAFATHQLQGPASAWWDNHMATRPPGTEVTWAEFCRSFRKAQVPDGVVAQKKREFRALHQGNRTVTEYLHEFNRLARYAPEDVRTDAEKQEKFMAGLDDELTNQLISGDYADFERLVDKAIRQEDQRNKMDRKRKAAQFRSNQGSQHRPRFTPGQQGGPTTMIVRQHRPFNSSNFHQGTSGSQNHHGSQPNRGAAPRPPMAPAQSGQPAQAKKETGAKPGSCFNCGELGHFADKCPKPRRAGPRFIQARVNHASAEEAQAAPEVVLGTFPVNSIPATVLFDSGATHSFISKKFVGMHGLIREELSTPMRVHTPGNSSTSVQFSPSITIEIQRSPFLANLILLDSKGLDVILGMDWLTKFKGVIDCANRTVTLTNEKGETVVYKSLVSPRKGVSLNQIETEIPVDTVEKNSRKLEDIPIVCEYPEVFPEDLTTMPPKREIEFRIDLAPGTAPIYKRPYRMAANELAEVKKQVDEQLQKGYIRPSTSPWGAPVIFVEKKDKTKRMCVDYRALNEVTIKNKYPLPRIDDLFDQLKGAKVFSKIDLRSGYHQLRIREEDIPKTAFTTRYGLYECTVMSFGLTNAPAFFMNLMNKVFMEFLDKFVVVFIDDILIYSKSEEEHEQHLRLVLEKLKEHQLYAKFSKCDFWLTEVKFLGHVITAQGVAVDPSNVESVTKWTPPKTVSQIRSFLGLAGYYRRFIENFSRIARPMTQLLKKDEKFKWTAECDKSFEELKKKLVSAPVLILPDPTKDFQVYCDASRHGLGCVLMQEGRVVAYASRQLRPHEGNYPTHDLELAAVVHALKIWRHYLIGNRCEVYTDHKSLKYIFTQPDLNLRQRRWLELIKDYDMSIHYHPGKANVVADALSRKSYCTALCIEGMCEELRQELEHLNVGIVEHGFVAALEARPTLVDQVRAAQVNDPEIAELKKNMRVGKARDFHEDEHGTIWMGERLCVPDDKELKDLILTEAHQTQYSIHPGSTKMYQDLKEKFWWVSMRREIAEFVALCDVCQRVKAEHQRPAGLLQPLQIPEWKWEEIGMDFITGLPRTSSGHDSIWVVVDRLTKVAHFIPVHTTYTGKRLAELYLARIMCLHGVPKKIVSDRGSQFTSKFWQKLQEELGTRLNFSTAYHPQTDGQTERVNQILEDMLRACALDFGGAWDKSLPYAEFSYNNSYQASLQMAPFEALYGRKCRTPLFWDQTGERQLFGTEVLAEAEEKVRIIRERLRIAQSRQKSYADNRRRELTFEAGDYVYLRVTPLRGVHRFQTKGKLAPRFVGPYKILERRGEVAYQLELPSNMIGIHDVFHVSQLKKCLRVPEEQADSEHIDIQEDLTYVEKPVRILDTSERRTRNKVTRFCRVQWSHHSEEEATWEREDELKAAHPHLFTSSSESRGRDSV

SEQ ID NO: 200669 - protein, 672 aa, Oryza sativa
  Clone ID: PAT_MRT4530_96115C.1.pep
MVYTRNGTRTTSEGSNGEERADGVHPNSDSGNGPPPFPENLTLAQVMAHQTQMMAAMMQQMQQQHQQMHQRMLQHAEQQHQQFGPPPPQSKLPEFLRVRPPTFSSTTNPMEANDWLHAIEKKLNLLQCNDQEKVAFATHQLQGPASAWWDNHVATRPPGTEVTWAEFCRSFRKAQVPDGVVAQKKRGFRALHQGNRTVTEYLHEFNRLARYAPEDVCTDAEKQEKFLAGLDDELTNQLISGDYADFERLVDKAIRQEDQRNKMDRKRKAAQFRSNQGNHQRPRFTLGQQGGPTTMIVRQHRTFKSSNFHQGASGSQNHHGGQPNHGAAPHPPVAPAQSGPSAQAKETGAKPGSCFNCGELGHFADKCPKPRRAGSKFVQARVNHASAKEAQAAPEVVLANELAEVKKQVDEQLQKGYIRPSTSPWGAPVIFVEKKDKTKRMCVDYRALNEVTIKNKYPLPRIDDLFDQLKGAKVFSKIDLRSGYHQLRIREEDIPKTAFTTRYGLHECTVMSFGLTNAPAFFMNLMNKVFMEFLDKFVVVFIDDILIYSKSEEEHEQHLRLVLEKLKEHQLYAKFSKCDFWLTEGMAVDPSNVESVTKWTPPKTVSQIRSFLRLAAECDKSFEELKKKLVSAPVLILPDQMKDFQVYCDASRHGLGGSCFEDLEALSDWQPL

SEQ ID NO: 200670 - protein, 297 aa, Oryza sativa
  Clone ID: PAT_MRT4530_96116C.1.pep
MCIDYRALNEVTIKNKYPLPRIDDLFDQLKGAKVFSKIDLLSGYHQLRIREEDIPKTAFTTRYGLYECTVMSFGLTNAPAFFMNLMNNVFMEFLDKFVVVFIDDILIYSKFEEEHELHLRLLLEKLKEHQLYAKFSKCDFWLSEVKFLGHVIAAQGVAVDPSNVESVTKWTPPKTVSQIRSFLGLVGYYRRFIENFSRIARPMTQLLKKDEKIKWTAECDKSFEELKKKLVSTPVLILPDQMKDFQVYCDASHHGLRCVLMQEGRVVAYASWQLRPHEGNYPTHDLELAVVVHALKI

SEQ ID NO: 200671 - protein, 78 aa, Oryza sativa
  Clone ID: PAT_MRT4530_96117C.1.pep
LSCNPVPSVGVILSFAKPVELLNCWLLSFYFPCHDPWFFTYEPAMVLVNTWQSPLLVVRRVHYLKQDSQKMLAIGGNM

SEQ ID NO: 200672 - protein, 743 aa, Oryza sativa
  unsure (1)..(743): unsure at all Xaa locations
  Clone ID: PAT_MRT4530_96118C.1.pep
EVKFLGHVITAQGVAVDPSNVESVTKWTPPKTVSQIQSFLGLAGYYRRFIENFSRIARPITQLLXKDEKFKWTAECDKSFEELKKKLVSAVVLILPDXTKDFRVYCNASRHGLGCVLMQEGRVVAYASRQLRPHEGNYPTHDLELAAVVHALKIWRHYLIGNRCEVYTDHKSLKYIFTQPDLNLRQRRWLELIKDYDMSIHYHPGKANVVADALSRKSYCNALCTEDMCEELQQELERLNVGIVEHRFVATLEARPTLVDQVRAAQVTDLEIAELKKNMRVGKARDFLEDEHGTVWMGERLHMPDDKELKDLILTEAHQTQYSIHPGSTKMYQDLKXKFWWASMRREIAEFVTLCDVCQRVKTEHQRPAGLLQPLQIPEWKWEEIGMDFITGLPRTXSGHDSIXVVVDRLTKVAHFIPVHTTYTGKRLAELYLLRIMCLHGVPKKIVSDRGSQFTSKFWQKLQEELGTRLNFSTAYHPQTDGQTERVNQILEDMLRACALDFGGAWDKSLPYAEFSYNNSYQASLQMAPFEALYGRKCRTPLFXYQTGERQLFGTXVLTEAEEKVRTVRERLRIAQSRQKSYADNRRRELTFEAGDYVYLRVTPLRGVHRFQTKGKLAPRFVGPYKILERRGEVAYQLELPFNMIGIHDVFHVSQLKKCLRVPEEQADSEHIDIQEDLTYVEKPVRILETSERRTRNKVTRFCRVXWSHHSEEEATWEREDELKAAHPHLFASSSESRGRDSV

SEQ ID NO: 200673 - protein, 1628 aa, Oryza sativa
  unsure (1)..(1628): unsure at all Xaa locations
  Clone ID: PAT_MRT4530_96119C.1.pep
MGCKMAGHPPNHRGEGMIDFVAELASMTLVVGYPNAPEYTTIPPLSGELPHRVRLEVHGYVGTCLANMVVKASGGSADHACQEAAYLMMARLQERHNYIFHDTAYRFHPRRASNDDVSTFRPTAGKNDTTFGHMCAVMRGLDRMHSDLHQATKALNDGKLMRIVALKDEIARLKRENAQLKGLPAPGGVRIRTTPRKTTTAPVRXQLAPRNPPPSAAPAAPPVPPAVPAAPAPAPASALSFAPASAARGPASGTGXVYTRNGSRATGEGSNGEERTDGAHPHSDSGNGPPPLPENPTLAQVMAHQTQMMAAMMQQMQQQHQQMHQRMLQHAEQQHQQFGPPPPQSKLPEFLREKVAFATHQLQGPASAWWDNHMATRPPGTEVTWAEFCRSFRKAQVPDGVVAQKKREFRALHQGNRTVTEYLHEFNRLARYAPEDVRTDAEKQEKFMVGLDDELTKQLISGDYADFERLVDKAIRQEDQRNKMDRKRKAAQFRAPQGSHQRPRFAPGQQGGPTTMIVRQYRPFNPSNFPQGASGSQNHHGGQPNRGAAPRPPMAPAQSGPPAQAKKETGAKPGSCFNCGELGHFADKCPKPRRAGPRFIQARVNHASAEEAQAAPEVVLGTFPVNSIPATVLFDSGATHSFISKKFVGMYGLRKEELSTPMRVHTPGNRSTSVSFSPSVLIEIQRSPFLANLILLESKDLDVILGMDWLTKFKGVIDCANHTVTLTNEKGETVVYKSLVSPKQGVSLNQIEAEIPVDTVEKNLRKLEDIPIVCEYPEVFPEDLTTMPPKREIEFRIDLAPGTAPIYKRPYRMAANELAEVKKQVDEQLQKGYIRPKKDKTKRMCVDYRALNEVTIKNKYPLPRIDDLFDQLKGAKVFSKIDLRSGYHQLRIREEDIPKTAFTTRYGLYECTVMSFGLTNAPAFFMNLMNKVFMEFLDKFVVVFIDDILIYSKSEEEHEQHLRLVLEKLKEHQLYAKFSKCDLWLTEVKFLGHVITAQGVAVDPSNVESVTKWTLPKIVSQIRSFLGLAGYYRRFIENFSRIARPMTQLLKKDEKFKWTAECDKSFEELKKKLVSAPVLILPDQMKDFQVYCDASRHGLGCVLMQEGRVVAYASRQLRPHEGNYPTHDLELAAVVHALKIWRHYLIGNRCEVYTDHKNYDMSIHYHPGKANVVADALSRKSYCTALCIKSMCEELRQEFEHLNVGIVEHGFVAALEARPTLVDQVRAAQVNDSEIAELKKNMRVGKARDFHEDEHGTIWLGERLCVPDDKELKDLILTEAHQTQYSIHPGSTKMYQDLKEKFWWVSMRREIAEFVALCDVCQRVKAEHQRPAGLLQSLQIPEWKWEEIGMDFITGLPRTSSGHDSIWIVVDRLTKVAHFIPVHTTYTGKRLAELYLSRIMCLHGVPKKIVSDRGSQFTSKFWQKLQEELGTRLNFSTAYHPQTDGQTERVNQILEDMLRACALDFGGAWDKSLPYAEFSYNNSYQASLQMAPFEALYGRKCRTPLFWDQIGERQLFGTEVLAEAEEKVRIIRERLRIAQSRQKSYADNRRRELTFEAGDYMYLRVTPLRGVHRFQTKGKLAPRFVGPYKILERRGEVAYQLELPSNMIGIHDVFHVSQLKKCLRVPEE

SEQ ID NO: 200674 - protein, 119 aa, Oryza sativa
  unsure (1)..(119): unsure at all Xaa locations
  Clone ID: PAT_MRT4530_9611C.1.pep
TRCTSAAEAESLACLEGLKEAMKWIXMPIILELDNAEVVQALTKQVASSSSWAMTIAXINDVIQCIQQVQVTRLREKQILXREANRVAHVLAQMAMSTRSCGEWRLCAPASILDLLSQE

SEQ ID NO: 200675 - protein, 733 aa, Oryza sativa
  unsure (1)..(733): unsure at all Xaa locations
  Clone ID: PAT_MRT4530_96120C.1.pep
MRNLLLLPLLVAVAATVPLAAALSADGVALLAFKTAVTDDPSGALSSWSDADDDPCRWAGVTCANTSSSGPRVVGVAVAGKNLSGYVPSVLGSLALLRRLNLHGNRLSGTVPPALANATSLHSLFLYGNSLTGGLPPELCDLPRLQNLDLSDNSLTGSLPPELRRCKQLQRLMLSGNGFSGEIPAGVWPEMVSLQLLDLCXNIGHAAAIPPETRESWLALAGTLNLSRNHLSGGVPPELGHLPATVTLDLRFNNLSGEIPQSGSLASQGPTAFLNNPGLCGFPLQVPCRAAPPSSFTPPPPYAAGSISGAGGPRQPVKTSLIVLISVADAAGVALIGVIVVYIYWKLRDRRGDGCGGDGDDDEERKRGLFPFPCMRADDSSDDGSDAGDDGGGGGEEGQLVAIDKGFKMELDELLRSSAYVLGKGGKGIVYKVVVGNGTTPVAVRRLGGGAAAAERYKEFAAEAGAIGRVRHPNVVRLRAYYWSADEKLVVTDFVNNGNLATALRGEHTPSPAATLSWSVRLRIAKGAARGLAHLHECSPRRFVHGEVKPSNVLLDADYNAVLADFGLARLLTIAGCADPSSASGGGLMGCALPPYAVKPASAAADHHHRPSAYRAPEARAVGARPSQKSDVYSFGVVLLELLTGRPPEHHASPSASTSSSASAVPEVVRWVRQGFEDARPLSELADAGVLRDGGARKEVVAAFHVALGCVEADPERRPRMKAVAESLDKIGS

SEQ ID NO: 200676 - protein, 1243 aa, Oryza sativa
  Clone ID: PAT_MRT4530_96121C.1.pep
MVYTRNGSRATGEGSNGEERTEGVHPNSNSDNGPPPLPENPTLAQVMAHQTQMMAAMMQQMQQQHQQMHQRMLQHAEQQHQQFGPPPPQSKLPEFLRVRPPTFSSTTNPMEANDWLHAIEKKLNLLQCNDQEKVAFATHQLQGPASAWWDNHMATRPPGTEVTWAEFCHSFRKAQVPDGVVAQKKREFRALHQGNRTVTEYLHEFNHLARYAPEDVRTDAEKQEKFLAGLDDELTNQLISGDYADFERLVDKTIRQEDQRNKMDRKRKAAQFRAPQGSHQRPRFAPEQQGGPTTMIVRQYRPFNPSNFPQGASGSQNHHGGQPNRGAAPLPPMAPAQSGPSAQAKEETGAKPGSCFNCGELGHFADKCPKPRRAGPRFIQARVNHASAKEAQAAPEVVLGTFPVNSIPATVLFDSGATHSFISKKFVGMHGLIREELSTPMRVHTPGNSSTSVQFSPSITIEIQRSPFLANLILLESKDLDVILGMDWLTKFKGVIDCSNRTVTLTNEKGETVVYKSPDSPKQGISLNQIEAEIPVDTVEKNLRKLEDIPIVCEYPEMFPEDLTTMPPKREIEFRIDLAPGIAPIYKRPYRMAANELAEVKKQVDEQLQKGAKVFSKIDLRSGYHQLRIREEDIPKTAFTTRYGLYECTVMSFGLTNAPAFFMNLMNKVFMEFLDKFVVVFIDDILIYSKSEEEHEQHLRLVLEKLKEHQLYAKFTSGYYRRFIENFSRIARPMTQLLKKDEKFKWTAECDKSFEELKKKLVSALVLILPDQMKHFQVYCDACRHGLGCVLMQEGRVVAYVSRQLRPHEGNYPTHDLELAAVVHALKIWRHYLIGNRCEVYTDHKSLKYIFTQPDLNLRQRRWLELIKDYDISIHYHPGKANVVADALSRKSYCTALCIEGMCEELRQEFEHLNVGIVEHGFVAALEARPTLVDQVRAAQVNDSEIAELKKNMRVGKARDFHEDEHGIIWLGERLCVPDDKELKDLILTEAHQTQYSIHPGSTKMYQDLKEKFWWVSMTREIAEFVALCDVCQRVKAEHQRPAVHTTYTGKRLAELYLSRIMCLHGVPKKIVSDRGSQFTSKFWQKLQEELGTRLNFSTAYHPQTDGQTERVNQIWEDMLRACALDFGGAWDKNLPYAEFSYNNNYQASLQMAPFEALYGRKCHTPLFWDQTGERQLFGTEVLAEAEEKVRIIRERLRIAQSRQKSYADNPRRELTFEAGDYVYLHVTPLEFRRRNSHPLALR

SEQ ID NO: 200677 - protein, 170 aa, Oryza sativa
  unsure (1)..(170): unsure at all Xaa locations
  Clone ID: PAT_MRT4530_96122C.1.pep
MSQTQCSKVVRGRGRNKRKWTADEDEELVKALCEVSLDPRFKVEGGGFKNCYSQGIENILAQRLPGRGIRSSPHVDSRLKVLKRKYYAIKDMLALPRFSWDGMRKMIQCEKEXYDAHCXDHPRAKSLYGIPFPYFDTFDVIYGKDRTGREEEGMSDEVVADMENENTDXV

SEQ ID NO: 200678 - protein, 40 aa, Oryza sativa
  Clone ID: PAT_MRT4530_96123C.1.pep
SQQLGPSPSNEVVGVSEKPVGRGDRLEIVHCFLDWPACPT

SEQ ID NO: 200679 - protein, 835 aa, Oryza sativa
  Clone ID: PAT_MRT4530_96124C.1.pep
MPPPPPPASATAKDVERVIADEFGLRAGELAVSLHYPEAFLLKFKHRRHCEEVVKQGFAKGRESVETDLVHPVDAGDTRVISLWAWTPNPSRIHKRVWVTITRQTRDPLLESITISETLPEHWQQEVKHPVLFHIEEIHDYTAAAVDLRNPKSCRPATRTLPPWHLGVLDGERAPPRLFENFPYHPHPPRTFTFRQGRAEGVENNTAAFQREVRDQGSRTVRDAIGRDGGRRQEKGHRDRRRDDRDDRRGRNRRYNSDHPDDLRRGGRRDDDNDDRDNGGRDVAHGRGGVRGPDVNFRRERTHSPRARDRGDTGRRDGQRHQANCGGKDDGANDRDMGNPPPAVLNPVMMAPARVIQPSLPPRNKGPLLPLRRPRVEKGNEARSAATIPAARVFTRINEEITAASVEGALRQILVAAGVAVALDKLTAPPSATPSLLEDQVRPMTPTASLTANDAPTKKQLPALSAEYNAVTSLFEAMSVNKPLSPEPLHQATPTPLTPTTMDGDDEVIFESAQINLCQRMGLAPPEGALTEKAIADFKAMFNMPLPQDAIDALAQLFGLDKEDMKAADSALAMNDPSLAQNVTANSNASPTAMISSQLGRTATDSPWGSATITMYAADAAPTFLTLFVMFKPATRPLGTRGGILILWNDDFVDLKDFAQRTFSLSATVFLKACQTSFLLTVVYGPTRDSAKQAFLRQLRDTKPADNSKWQVLGDFNIIYKALDKNNINLNRRQMRIFKDTLNACELKEIALQNRRYTWSNEQDNPTLVKLDRFFCNASWNTTFERHLLHALSTSLSDHCPLMLTGQGETPRTRTFRFENFWIQLPGFQEVVAEA

SEQ ID NO: 200680 - protein, 92 aa, Oryza sativa
  Clone ID: PAT_MRT4530_96125C.1.pep
SLIIMCLRSTKAHVIRRSLPSLFHPSFHFYKVVCSPTGSIERYFVMRHPQPSSRVYFAAPVDFRSAEIIPICSTSSLFLLLSLYSVQAIPIV

SEQ ID NO: 200681 - protein, 99 aa, Oryza sativa
  unsure (1)..(99): unsure at all Xaa locations
  Clone ID: PAT_MRT4530_96126C.1.pep
MNRPCPLYRGWSCPLQALLHVQLGVETKGNPKHAFPSKETSRPDETQSDSDLPVRPATHXWXDRPSTGGLTAQHTAVRPAYLKETRHFPNFGNFPLFRP

SEQ ID NO: 200682 - protein, 226 aa, Oryza sativa
  Clone ID: PAT_MRT4530_96127C.1.pep
MNFTNRIASDLPHVRCYTRHLRLDPMLFMPANGPNLSCLKVIKCKILCSIKFSYISRIDLERNEFTLYSDLQVKNNVLLIVGAGTVASLVLCGAEAESVVVFADDAAVVRWYSDGQAVDPRYEGDDDGGGTGDGKLAIARYWAQVGLAEGPALIPNDTSAPGGVGRGPINYGVGSNKLRKMIEAIDEYSAEDPLQPWLERGLLKSAGGDLRPDDDLYKKDLRYLKV

SEQ ID NO: 200683 - protein, 135 aa, Oryza sativa
  Clone ID: PAT_MRT4530_96128C.1.pep
MVRPDAKPIKQKLRRFAPDRKQAIREELDKLLKAGFIKEVLHPEWLANPVMVCKANGKGALGDQIGQNVEAYIDDVVVKTKTGDTLMDDLEEMFNNLRRHQLKLKPENCTFGVPSGKLLGFLVSGRGIEANPEKN

SEQ ID NO: 200684 - protein, 40 aa, Oryza sativa
  Clone ID: PAT_MRT4530_96129C.1.pep
QSQVDQQDLTGSSSSTRRLQSYLSAPVVSVLNKSDAWATR

SEQ ID NO: 200685 - protein, 249 aa, Oryza sativa
  unsure (1)..(249): unsure at all Xaa locations
  Clone ID: PAT_MRT4530_9612C.1.pep
FSRHEPGVTHVLVTGGAGYIGSHASLRLLKDNYRVTIVDNLSRGNMGAVKVLQELFPQPGRLQFIYADLGDXKLYYHNITSNTLLILEAMXSHGVKTLIYSSTCATYGEPEKMPIVETTRQLPINPYGKAKKMAEDIILDFTKGRKDMAVMILRYFNVIGSDPEGRLGEAPRPELREHGRISGACFDAALGIIPGLKVKGTDYPTTDGTCIRDYIDVTDLVDAHVKALNKAEPSKVGIYNVGTGRVRSC

SEQ ID NO: 200686 - protein, 178 aa, Oryza sativa
  Clone ID: PAT_MRT4530_96130C.1.pep
WNNTTTPSRGEVTPETPLLPPYKTRIAPPKPPLQASGASLPLPSVLSTQLLSPPHLHSWLSMPTSRCTINGLPPSTPPAAPPNSIINDSNHTVMRHPHAPVTPHVVCWGRWGGGARSATPRRGSSRPPRPTHRAPLRQTSPPLPTRSTPPPASRRSNAGSVSPPPPSQPAARFPAAGS

SEQ ID NO: 200687 - protein, 82 aa, Oryza sativa
  Clone ID: PAT_MRT4530_96131C.1.pep
PICPGGSDLPVKAKRTQTNELLKEIPWMIGILFSVYNWISLDLQFNFTKLCHTSLYWGLLLKMPRPSKLKGRENLLSKTTGI

SEQ ID NO: 200688 - protein, 70 aa, Oryza sativa
  Clone ID: PAT_MRT4530_96132C.1.pep
ARGLSSSQRRRDRINEKMRALQELIPNCNKIDKASMLEEAIEYLKTLQLQVQMMSMGTGMFVPPMMLPAA

SEQ ID NO: 200689 - protein, 71 aa, Oryza sativa
  unsure (1)..(71): unsure at all Xaa locations
  Clone ID: PAT_MRT4530_96133C.1.pep
VSLTRRGXCSVQSQDSRGPCIILSDPLKRSKADGGTSSNAVKMQPDWGRLSLSQNTHPSFSAMNLPKHHHH

SEQ ID NO: 200690 - protein, 91 aa, Oryza sativa
  Clone ID: PAT_MRT4530_96134C.1.pep
RWLQESSIAARKLADIFTKYYSLVADGALDDDDEGAVNQRSAGPHAGNESTLATFFLNRMHATCGGSKAQIHAEARAGMQDKHHQAVSIPS

SEQ ID NO: 200691 - protein, 68 aa, Oryza sativa
  Clone ID: PAT_MRT4530_96135C.1.pep
HVYWLRSEQDANVHPGLDHQLNQNLGIPESRSAAALLLGSLCILLENSLAYEKWTKGQLQTLQKKTEN

SEQ ID NO: 200692 - protein, 1177 aa, Oryza sativa
  Clone ID: PAT_MRT4530_96136C.1.pep
MIVRQHRPFNSSSFHQGASGSQNHQGGQPNRSAAPRPPLAPAQSAPSAQAKKETGAKPGSCFNCGEHGHFADKCPKPRRAGPRFAQARVNHASAEEAQVAPEVVLGTFPVNSIPTTVLFDSGATHSFIGKKFVGIHGLIREELSTPMRVHTLGNSSTSVQFSPSITIEIQRSPFLANLILLESKDLDINLGMDWLTKFKGVIDCVNRTVTLTNEKGETVVYKSPVSPKQGVSLNQIEVEIPVVTEEKSSRKLEDIPIVCKYPEVFPEDLTTMPPKREIEFRIDLAPGTAPIYIRPYRMAANELAEVKKQVDEQLQKGYIRPSTSLWGAPVIFVEKKDKTKRMCVDYRTLNEVTFKNKYPLPRIDDLFNQLKGAKVFSIIDLRSGYNQLRIWEEDIPKSAFTTWYGLYECTVISFGLTNAPAFFMNLMNKVFMEFLDKFVVVFIDDILIYSKSEEEHEQHLLLVLEKLKEHQLYAKFSYYRRFIENFSRIARPMTQLLKKDEKFKWTAECDKSFEELKKRLVSAPVLILPDQTKDFQVYCDASRHGLGCVLMQDGRVVAYASRQLRPHEGNYPTHDLELAAVVHALKIWRQYLIGNHCEVYIDHKSLKYIFTQPDLNLRQRRWLELIKDYDMSIHYHPGKANVVADALSRKSYYNALCTEGMCKELQQELERLNMGIVEHGFVAALEARPTLVDQVRAAQVNDPEIAELKKNMWVGKARDFLEDEHGTICMGERLCVPDDKELKDLILTEAHQTQYSIHRGSTKMYQDLKENFWWASMRREIAEFVALCDVCQRVKAEHQRPAGLLQPLQIPEWKWEEIGIDFITGLPRTSSGHDSIWVVVDRLTKVAHFIPVHTTYTGKRLAELYLSRIMCLHGVPKKIVSDRGSQFTSKFWQKLQEELGTRLNFSTAYHPQTDGQTERVNQILEDMLRACALDFSGAWDKSLPYAEFSYNNSYQASLQMAPFEALYGRKCRTPLFWDQIGESQLFGTEVLTEAEEKVRTVRERLRIAQSRQKSYADNRRRELTFEAGDYVYFRVTPLRGVHRFQTKGKLAPRFVGPYKILERRGEVAYQLELPPKMISIHDVFHVSQLKKCLRVPEEQADSEEHIDIQEDLTYVEKPVCILETSERRTRNKVTRFCRVQWSHHSEEEATWEREDELKAAHPHLFTGSSESRGRDSV

SEQ ID NO: 200693 - protein, 96 aa, Oryza sativa
  Clone ID: PAT_MRT4530_96137C.1.pep
GGFLLGPQKLRVFCEPKANPFLGWGGPPNFEKKRVFCSGPPPGHLNLTKEGPRVFSLQNASEAGGGIPKVWGTFLRITKRLSIKGGVKKGQKKKNC

SEQ ID NO: 200694 - protein, 280 aa, Oryza sativa
  unsure (1)..(280): unsure at all Xaa locations
  Clone ID: PAT_MRT4530_96138C.1.pep
EELGTRLNFSTAYHPQTDGQTERVNQILEDMLRACALXFGGAWDKSLPYAEFSYNNSYQASLQMAPFEALYGRKCRTPLFWDQTGEHQMFGTEVLTEAEEKVRTVRERLRIAQSRQKSYADNRRRELTFEAGDYVYLRVTLLRGVHRFQTKGKLAPRFVGPYKILERRGEVAYQLELPSNMIGIHDVFHVSQLKKCLRVPEEQADSEHIDIQEDLTYVEKPVRILETSERRTRNKVTRFYRVQWSHHSEKKATWEREDELKAAHPHLFASSSESRGRDSV

SEQ ID NO: 200695 - protein, 724 aa, Oryza sativa
  unsure (1)..(724): unsure at all Xaa locations
  Clone ID: PAT_MRT4530_96139C.1.pep
SVTKWTPPKTVSQIRSFLGLAGCYRRFIENFSRIARPMTXLLKKDEKFKXTAECDKSFEELKKRLVSAPVLILPDQTKDFQVYCDASRHELGCVLMQEGRVVAYASWQLRPHEGNYPTHDLELVAVVHALKIWRHYLIGNRCEVYTDHKSLKYIFTQPDLNLRQRRWLELIKDYDMSIHYHPGKANVVAYALSRKSYCNALCTEDVCKELQQELERLNVGIVEHGFVAALEARPTLVDQVRAAQVNDPEIAELXKKNMRVGKARDFLEDEHGTIWMGERLCVPDDKELKDLILTEAHQAQYSIHLGSTKMYQDLKEKFWWANMRREIAKFVTLCDVCQRVXAEHQRPAGLLQPLQIPEWKWEEIKMDFITGLPRTSSGHDSIWVVVDXLTKVAYFIPVHTSYTGKRLAELYLSRIMCLHGVAKKIVSDXGSQFTSKFWQKLQEELGTRLNFNTAYHPQTIXDGQTERVNQILEDMLRACVLDFGGTWYKSLPYAEFSYNNSYQASLQMAPFEALYGRKCRTPLFWDQTGERQLFGTEVLTEAEEKVRTVRERLRIAQFRHKSYADNRRRELTFEAGDYVYLRVTPLRGVHRFQTKGKLAPRFVGPYKILERRGEVAYQLELPSNMIGIHDVFHVSQLKKCLRVPEEQADSEHIDIQEDLTYVEKPVCILETRERRTRNKVTRLYRVQWSHHSEEEATWEREDELKAAHPHLFASSSESRGRDSV

SEQ ID NO: 200696 - protein, 116 aa, Oryza sativa
  Clone ID: PAT_MRT4530_9613C.1.pep
KPSIKESQVDLKRQDFLWAKSEPKFQGKRERERGDRSRWRIIGFDGPRRKKNKQEEEDEEEGGGWFLLLLLFLPQRMTTHFFFLLLLPPKNKNNGNFLLLWGSWMGVVGHLSPDAW

SEQ ID NO: 200697 - protein, 116 aa, Oryza sativa
  Clone ID: PAT_MRT4530_96140C.1.pep
MATIASMHMYGFSLQPRLCSTGGRPAKITRTKPLATHDSSAHIPPRFKELQQVLKTKLREASAAGSSASKKLLDAFVDSIFTFSHQSLRPTEVGQASMIAYTLHKMQQQFIALNFL

SEQ ID NO: 200698 - protein, 86 aa, Oryza sativa
  Clone ID: PAT_MRT4530_96141C.1.pep
SSLPRSSESNPPANRIRDGDPPGLPGRRRREGHAALHAAAGAPGGGCGGGDPVQLAAVFYLLCVGMLPWKLFVFSDVLSLAMPRYT

SEQ ID NO: 200699 - protein, 1731 aa, Oryza sativa
  Clone ID: PAT_MRT4530_96142C.1.pep
MGCKMAGHPPNHRGEGMIDFVAELARMTLVVGYPNAPEYTTIPPLSGELPHRVRLEVQGYVGTCLANMAVEASGGTADHACQEAAYLMMARLRERHNYIFHDTAYRYHPRRANGDGVSSFRPTAGENDTTFGHMCAVMRGLDRMHSDLHKATKALNDGKLMRIVALKDEIARLKKDNAQLKGLPAPGGVRIRTTPRKTTTAPVRIQLAPRNPPPAAAPAAPPVPPAVPAAQAPAPASALSFAPASAARGPASGTGGCLFGMVHTRTGSRATGEGSNGEERANGVHPSSDSGNGPPPLPENLTLAQVMAHQTQMMAAMMQQMQQQHQQMHQRMMQHAEQQHQQFGPPPPQSKLPEFLRVRPPTFSSTTNPIEANDWLHAIEKKLNLLQCNDQEKVAFATHQLQGPASAWWDNHMATRPPGTEVTWAEFCRSFRKAQVPDGVVAQKKREFRALHQGNRTVTEYLHEFNRLARYAPEDVRTDAEKQEKFMAGLDDELTNQLISGDYADFERLHRPFNSSNFHQGSSGSQNHHGGQPNRGAAPRPPMAPAQSGPPAQAKKETGAKPGSCFNCGELGHFADKCPKPRRAGPRFIQARVNHASAEEAQTAPEVVLGTFPVNSIPATVLFDSGATHSFISKKFVGMYGLRKEELSTPMRVHTPGNSSTSVSFSPSVLIEIQRLPFLANLILLESKDLDVILGMDWLTKFNGVIDCANRTVTLTNEKGETVVYKSLAPPKQGVSLNQIEMEVPVVTEEKNLKKLEDIPIVSEYPEVFPEDLTTMPPKREIEFRIDLAPGTAPIYKRPYRMAANELAEVKKQVDEQLQKGYIRPSTSPWGAPVIFVEKKDKTKRMCVDYRALNEVTIKNKYPLPRIDDLFDQLKGAKVFSKIDLRSGYHQLRIREEDIPKTAFTTRYGLYECTVMSFGLTNAPAFFMNLMNKVFMEFLDKFVVVFIDDILIYSKSEEEDEQHLHLVLEKLKEHQLYAKFNKCDFWLTEVKFLGHVITAQGVAVDPSNVESVTKWTPPKTVSQIRSFLGLAGYYRRFIENFSRIARPMTQLLKKDEKFKWTAECDKSFEELKKKLVSAPVLILPDPTKDFQVYCDASRHGLGCVLMQEGRVVAYASRQLRPHEGNYPTHDLELAAVVHALKIWRHYLIGNRCEIYTDHKSLKYIFTQPDLNLRQRRWLELIKDYDMSIHYHPGKANVVADALSRKSYCTALCIEGMCEELRQEFGHLNVGIVEHGFVAALEARPTLVDQVRAAQVNDPEIAELKKNMRVGKARDFLEDEHGTIWMGERLCVPDDKELKDLILTEAHQTQYSIHPGSTKMYQDLKEKFWWVSMRREIAEFVALCDVCQRVKAEHQRPAGLLQPLQIPEWKWEEIGMDFITGLPRTSSGHDSIWVVVDRLTKVAHFIPVHTTYTGKRLVELYLARIMCLHGVPKKIVSDRGSQFTSKFWQKLQEELGTRLNFSTAYHPQTDGQTERVNQILEDMLRACALDFGGAWDKSLPYAEFSYNNSYQASLQMAPFEALYGRKCRTPLFWDQTGERQLFGTEVLAEAEEKVIIIRERLRIAQSRQKSYADNRRRELTFEAGDYMYLRVTPLREVHRFQTKGKLAPRFVGPYKILERRGEVAYQLELPSNMIGIHDVFHVSQLKKCLRVPEEQADSEHIDIQEDLTYVEKPVRILDTSERRTRNKVTRFCRVQWNHHSEEEATWEREDELKAAHPHLFTSSSESRGRDSV

SEQ ID NO: 200700 - protein, 95 aa, Oryza sativa
  unsure (1)..(95): unsure at all Xaa locations
  Clone ID: PAT_MRT4530_96143C.1.pep
PYSNQLHFQLRTTQVWHQLRLVAQQSHNQDINIVQAIAHNLQFQQFTDLHFGRNLAQAQPQARLALNXPSGYGIAPRAYSAPSSIATLAGELSSV

SEQ ID NO: 200701 - protein, 947 aa, Oryza sativa
  Clone ID: PAT_MRT4530_96144C.1.pep
MVYTRTGTRTIGEGSNGEERTDGVHPSSDSGNGPPPLPENPTLAQVMAHQTQMMAAMMQQMQQQHQQMHQRMMQHAEQQHQQFGPPPPQSKLPEFLRVRPPTFSSTTNPMEANDWLHAIEKKLNLLQCNDQEKVAFATHQLQGPASAWWDNHMATRPPGTEVTWAEFCRSFRKAQVPDGVVAQKKREFRALHQGNRTVTEYLHEFNRLARYAPEDVRTDAEKQEKFMAGLDDELTNQLISGDYADFERLVDKAIHQEDQRNKMDRKRKAAQFRAPQGSHQRPRFTPGQQGGPTTMIVRQYRPFNPSNFPQGASGSQNHHGGQPNRGAAPRPPMAPAQSGPSAQARKETGAKPGSCFNCGELGHFADKCPKPRRAGPRFIQARVNHASAEEAQAAPEVVLVTLTNEKGETVAYKSLVSPKQGVSLNQIEAEIPVDTVEKNLGKMEDIPIVCEYPEVFPEDLTTMPPKREIEFRIDLAPGTAPIYKRPYRMAANELAEVKKQVDEQLQKGYIRPSTSPWGAPVIFVEKKDKTKRMCVDYRALNEVTIKNKYPLPRIDDLFDQLKGAKVFSKIDLRSGYHQLRIREEDIPKTAFTTRYGLYECTVMSFGLTNAPAFFMNLMNKVFMEFLDKFVVVFIDDILIYSKSEEEHEQHLRLVLEKLKEHQLYAKFSKCDFWLTEVKFLGHVITAQGVAVDPSNVESVTKWTPPKTVSQIRSFLGLAVGQPDTPADPTPSRPPSPPAGPTRQRVKGIGPPWTGTTGWSTAGPREPTAQISPKPIGRLRRAVAGHGHSRGWPDRPQRAAARRRPDNRRRRRRNAALAREAAGKEEKEEGGGSPRGAATEGTAAEGGGGAPWVDDAEGRTAVDGEGEEADEVQHTTTKPTKVTASGDRGYGGDDCRPETVNGCGGSAVDDVRRGVGMPTAWVARRGGGASSDEVRLEATNGSAASGAR

SEQ ID NO: 200702 - protein, 65 aa, Oryza sativa
  Clone ID: PAT_MRT4530_96145C.1.pep
MGSLSGDSMTWELHPKAHPPTSAKVANMDEETGTESPGPPVSGVGLIDLDRMWRTCQTVGPRSQR

SEQ ID NO: 200703 - protein, 1406 aa, Oryza sativa
  unsure (1)..(1406): unsure at all Xaa locations
  Clone ID: PAT_MRT4530_96146C.1.pep
MADHPPNHRGEGMDDFVAELARMTLVVGYPNAPEYSTVPPLSGEFPHRVRLEVHGYVGTCLANMVVEASGGTADHACQEAAYLMMARLRERHNYIFCNTAYRFHPRRASGDDISTFCPTAGENDTTLGHMCAVMRGMDKMHSDDGKLMRIIALKDEIARLKKENAQLKGLPIPGGVRIRNMPRKSTTAPVRIQLAPRNPPPPAAPAAPPVLPAVPAARAALAPVPAPAPVSAPASALSFAPASAVRGPASGNGGWLPATPSGSRNHISSSSSGSELXPDSRSSSEGPGLFLQMVYTRNGSRTAGEGSNGEECTDGVHPNSDSSNGPLPLPENPALAQVMAHQTQXMMAAMMQQMHQRMQQQAEQQQQQFGPPPPQSKLPEFLRVRPPTFSSTTNPMEANDWLHAIEKKLNLLQCNDQEKVAFATHQLQGPASAWWDNHMATRPPGTEVTWAEFCRSFRKAQVPDGVVAQKKREFRALHQGNRTVTEYLHEFNHLARYAPEDVRTDAEKQEKFLAGLDDELTNQLISGDYADFEKLVDKAIHQEDQRNKMDRKRKAAQFQSNQGSHQRPRFTPGQQGGPTTMIVRQHRPFNSSGFHQGASGSQNHQGGQXPNRNAAPRPPMAPAQSAPSTQAKKETGTKPGSCYNXGEHGHFANKCPKPRRPGPRFVQARVNHASAEEAQAAPEVVLGTFPVNSIPATVLFDSGATHSFISRKFVGIHGLIREELSTPMQVHTPGNSSTSVQFSPSITIEIQRSPFLANLILLESKDLDVILRMDWLTKFKGVIDCVNRTVTLTNEKGETMVYKSPVSPKQGISLNXHEVENPVATDEKSSRKLEDIPVVCKYPEVFPEDLTTMPPKREIEFRIDLAPGTAPIYKRPYRMAANELAEVKKQVDEQLQKGYIRTSTSPWGAPIIFVEKKDKTKRMCVDYRALNKVTIKNKYPLPRIDDLFDQLKGAKVFSTIDLRSGYHQLRIREEDIPKTAFTTRYGLYECTVMSFGHTNAPAFFMNLMNKVFMEFLDKFVVVFIDDILIYSKSEEEHEQHLRLVLEKLKEHQLYAKFSKCDFWLSEVKFLGHVITAQGVAVDLSNVESVTKWTPPKTVSQIRSFLGLAGYYRRFIENFYRIARPMTQLLKKDEKFKWTAECDQSFEELKKKLVSALVLILPDQTKDFQVYCDASRHGLGCVLMQEGRVVAYASRQLRPHEGNYPTHDLELAAVVHALKIWRHYLIGNRCKVYTDHKSQKYIFTQPNLNLRQQRWLELIKDYDMSIHYHPGKANVVADALSRKSYCNALCTEGMCKELQQELERLNMGIVEHGFGAALEARPTHVDQVRAAQVNDPEIAELKKNMRVGKARDFLEDEHGTIWMGERLCVPDDRELKDLILTETHQTKYSIHPGSTKIYQDLNEKFWW

SEQ ID NO: 200704 - protein, 49 aa, Oryza sativa
  Clone ID: PAT_MRT4530_96147C.1.pep
SIIYCPRQGMLFPCHTRSLFTTASSSTSHYIPRLLGISQDLCSKGSRLL

SEQ ID NO: 200705 - protein, 1537 aa, Oryza sativa
  unsure (1)..(1537): unsure at all Xaa locations
  Clone ID: PAT_MRT4530_96148C.1.pep
MAGHPPNHRGEGMIDFVAELARMTLVVGYPNAPEYTTIPLLSGELPHRVRLEVHGYVGTCLANMAVEASGGTADHACQEAAYLMMARLRERHNYIFHDTAYRYHPRRANGDGVSSFRPTAGENDTTFGHMCAVMRGLDRMHSDLHKATKALNDGKLMRIVALKDEIARLKKENAQLKGLPAPEGVRIRTTPRKTTTAPVRIQLAPRNPPPAAAPAAPPVPPAVPAAPVPAPAFTLSFAPASAARGPASGTGGCLFGMVYTRTGSRATGEGSNGEERTDGVHPNSDSGNGPPPLPENPTLAQVMAHQTQMMAAMMQQMQQQHQQMHQRMMQHAEQQHQQFGPPPPQSKLPEFLRVRPPTFSSTTNPMEANDWLHAIEKKLNLLQCNDQEKVAFATHQLQGPASAWWDNHMATRPPGTEVTWAEFCRSFRKAQVPDGVVAQKKREFRALHQGNRTVTEYLHEFNRLARYAPEDVRTDAEKQEKFMAGLDDELTNQLISGDYADFERLVDKAIRQEDQRNKMDRKRKAAQFRAHQGSHQRPRFTPGQQGGPTTMIVRQHRPFNPSNFHQGTSGSQNHHGGQPNRGAAPRPSVAPAQSGQPAQAKKETGAKPGSCFNCGELGHFADKCPKPRRAGPRFIQARVNHASAQEAQTAPEVVLGTFPVNSIPATVLFDSGATHSFISKKFVGMHGLIREELSTPMRVHTPGNSSTSVQFSPSITIEIQRSPFLANLILLESKDLDVILGMDWLTKFKGVIDCASRTVTLTNEKGETVVYKSLVSPKKGVSLNQIETEIPVDTVEKNLRKLEDIPIVCEYPEVFPEDLTTMPPKREIEFRIDLAPGTAPIYKRPYRMAANELAEVKKQVDEQLQKGYIRPSTSPWGAPVIFVEKKDKTKRMCVDYRALNEVTIKNKYPFPRIDDLFDQLKGTKVFSKIDLRSGYHQLXRIRKEDIPKTAFTTXFVVVFIDDILIYSKSEEEHEQHLRLVLEKLKEHQLYAKFSKCDFWLTEVKFLGHVITAQGVAVDPSNVESVTKWTPPKTVSQIRSFLGLAGYYRRFIENFSRIARPMTQLLKKDEKFKWTAECDKSFEELKKKLVSAPVLILPDQMKDFQVYCDASRHGLGCVLMQEGRVVAYASRQLRPHEGNYPTHDLELAAVVHALKIWRHYLIGNRCEVYTDHKSLKYIFTQPDLNLRQRRWLELIKDYDMSIHYHPGKANVVADALSRKSYCTALCIEGMCEELRQEFEHLNMGIVEHGFVAALEARPTLVDQVRAAQVNDPEIAELKKNMRVGKARDFFEDEHGTIWMGERLCVPDDKELKDLILTEAHQTQYSIHPGSTKMYQDLKERFWWVSMRREIAEFVALCDVCQRVKAEHQRPAGLLQPLQIPEWKWKEIGMDFITGLPRTSSGHDSIWVVVDRLTKVAHFILVHTTYTGKRLAELYLARIMCLHGVPMKILSDRGSQFTSKFWQKLQEELGTRLNFSTAYHPQTDGQTERVHQFLEDMLRACALDYDGAWDKRLPYAEFSYNNSYQANLQMALCRVPNRL

SEQ ID NO: 200706 - protein, 913 aa, Oryza sativa
  Clone ID: PAT_MRT4530_96149C.1.pep
MIVRQHRPFNSSSFHQGASGSQNHQGGQPNRSAAPRPPLAPAQSAPSAQAKKETGAKPGSCFNCGEHGHFADKCPKPRRAGPRFAQARVNHASAEEAQVAPEVVLGTFPVNSIPTTVLFDSGATHSFIGKKFVGIHGLIREELSTPMRVHTLGNSSTSVQFSPSITIEIQRSPFLANLILLESKDLDINLGMDWLTKFKGVIDCVNRTVTLTNEKGETVVYKSPVSPKQGVSLNQIEVEIPVVTEEKSSRKLEDIPIVCKYPEVFPEDLTTMPPKREIEFRIDLAPGTAPIYIRPYRMAANELAEVKKQVDEQLQKGYIRPSTSLWGAPVIFVEKKDKTKRMCVDYRTLNEVTFKNKYPLPRIDDLFNQLKGAKVFSIIDLRSGYNQLRIWEEDIPKSAFTTWYGLYECTVISFGLTNAPAFFMNLMNKVFMEFLDKFVVVFIDDILIYSKSEEEHEQHLLLVLEKLKEHQLYAKFSYYRRFIENFSRIARPMTQLLKKDEKFKWTAECDKSFEELKKRLVSAPVLILPDQTKDFQVYCDASRHGLGCVLMQNGKVVAYASRQLRPHEGNYPTHDLELAAVVHALKIWRQYLIGNHCEVYIDHKSLKYIFTQPDLNLRQRRWLELIKDYDMSIHYHPGKANVVADALSRKSYYNALCTEGMCKELQQELERLNMGIVEHGFVAALEARPTLVDQVRAAQVNDPEIAELKKNMWVGKARDFLEDEHGTICMGERLCVPDDKELKDLILTEAHQTQYSIHRGSTKMYQDLKENFWWASMRREIAEFVALCDVCQRVKAEHQRPAGLLQPLQIPEWKWEEIGIDFITGKRLAELYLSRIMCLHGVPKKIVSDRGSQFTSKFWQKLQEELGTRLNFSTAYHPQTDGQTERVNQILEDMLRACALDFSGAWDKSLSIL

SEQ ID NO: 200707 - protein, 414 aa, Oryza sativa
  unsure (1)..(414): unsure at all Xaa locations
  Clone ID: PAT_MRT4530_9614C.1.pep
MIPLNRRASQTRGGMEYFDARRKPHNVGKVIAALVLTTLCIFILKQSPGFGGSSVFSRHEPGVTHVLVTGGAGYIGSHASLRLLKDNYRVTIVDNLSRGNMGAVKVLQELFPQPGRLQFIYADLGDQKTFFTXTGSQVNKIFAENAFDAVMHFAAVAYVGESTLEPLRYYHNITSNTLLILEAMASHGVKTLIYSSTCATYGEPEKMPIVETTRQLPINPYGKAKKMAEDIILDFTKGRKDMAVMILRYFNVIGSDPEGRLGEAPRPELREHGRISGACFDAALGIIPGLKVKGTDYPTTDGTCIRDYIDVTDLVDAHVKALNKAEPSKVGIYNVGTGRGRSVKEFVDACKKATGVNIKIEYLSRRPGDYAEVYSDPTKINTELNWTAQYTDLKESLSVAWRWQKSHPRGYGSN

SEQ ID NO: 200708 - protein, 96 aa, Oryza sativa
  Clone ID: PAT_MRT4530_96150C.1.pep
MEEEKQGCSSESRRKGIKNNVGSGPVAPRLLLRGTIAPSSPCSLPPCWSPARGLLDLAPAAPRLLLHLMREERPRRTGEREGEAPAAAQGRGRGSD

SEQ ID NO: 200709 - protein, 376 aa, Oryza sativa
  Clone ID: PAT_MRT4530_96151C.1.pep
MVIDEDKCHADSTSYMLSAELNFSVTVFTSPIKALDFLQNHAEGVDLVLADVHMEEMNGFDFLKVARELHKSIQVIMMSTETTMYTMKRCVKLGAQFLVNKPLDAGTIKNLWQYVDLKVLRMEKIKDLLQGIGDESTCANETNSLAENPKNDTKKKYYLMWTPHLQKKFLHALQILGKDASPKNIKKIMGVDNIDCRQIAAHLQKHRLRLTKDLKKASFTTDTSKDESNSRIGPAESHHVCRNASTLQPRSNTQPTETTMQILSEDAEYDDVYAAMRRALQYGIVFDESKHSSDPSGDEDEQVVVGGDQDGCANEANDIDSSGDHHQVAAVVTKPCNANASQEIINKMTNSDGMQATKGSKAAVFRLVDYSESDSD

SEQ ID NO: 200710 - protein, 1261 aa, Oryza sativa
  Clone ID: PAT_MRT4530_96152C.1.pep
MVNTRNGSRAVGEGSNGEERTDGGHPNSASGHGPPPLPENPTLAQVMAHQTQMMAAMMQQMQQQHQQMHQRMQQQAEQQQFGPPPPQSKLPEFLCVRLPTFSSTTNPMEVNDWLHAIKKKLNLLQCNDQEKVAFATHQLQGPASAWWDNHMATRPPGTEVTWAEFCRSFRKVQVPDGVVAQEKREFRILHQGNRTVTEYLHEFNRLARYSPEDVRTDAEKQEKFLAGLDDELTNQLISRDYADFEKLVDKAICQEDQRNKMDRKRKAAQFRSNQGSHQRPRFTPGQQGGPTTMIVRQHRPFNSSSFHQGASGSQNHQGTPSAQAKKETGAKPRSCFNCGEHGHFADKCPKLRRAGPRFAQARANHASAEEAQAAPEVVLGTFPINSIPTTVLFDSGATHSFISKKFVGMHGLRKEEISTLMRVHTPGNSSTSISYSPSVLIEIHRSRFLANLILLESKDLDVILGMDWLTKFKGVIDCANRTVTLTNEKGETVVYKSLVSPKQGISLNQIEVENLVATEEKSSRKLEDIPIVCEYPEVFPEDLTTMPPKREIEFRVDLAPGTTPIYKRSYRMAANELAEVKKQKKDRTKRMCVDYRALNEVTIKNKYPLPRLDDLFDQLKGAKVFSKIDLRSGYHQLRIREEDIPKTAFTTRYGLYECMVMSFGLTNAPAFFMNPMNKVFMEFLDKFVVVFIDDILIYSKSEEEYEQHLRLVLEKLKEHQLYAKFSKCDFWLSEVKFLGHVITAQGVTAECDKSFEELKKRLVSAPVLILPDQTKDFQVYCDASRHELGCVLMQEGRVVAYASWQLRPHEGNYPTHDLELVAVVHALKIWRHYLIGNRCEVYTDHKSLKYIFTQPDLNLRQRRWLELIKDYDMSIHYHPGKANVVAYALSRKSYCNALCTEDVCKELQQELERLNVGIVEHGFVAALEARPTLVDQVRAAQRVKAEHQRPAGLLQPLQIPEWKWEEIKMDFITVLAEIARGIGNPAELQHSLPPADHPDGQTERVNQILEDMLRACVLDFGGTWYKSLPYAEFSYNNSYQASLQMAPFEALYGRKCRTPLFWDQTGERQLFGTEVLTEAEEKVRTVRERLRIAQFRHKSYADNRRRELTFEAGDYVYLRVTPLRGVHRFQTKGKLAPRFVGPYKILERRGEVAYQLELPSNMIGIHDVFHVSQLKKCLRVPEEQADSEHIDIQEDLTYVEKPVCILETRERRTRNKVTRLYRVQWSHHSEEEATWEREDELKAAHPHLFASSSESRGRDSV

SEQ ID NO: 200711 - protein, 1064 aa, Oryza sativa
  Clone ID: PAT_MRT4530_96153C.1.pep
MVYTRTGSRATGEGSNGEERADGVHPNGDSGNGPPPLPENPTLAQVMAHQTQMMAAMMQQMQQQHQQMHQRMMQHAEQQHQQFGPPPPQSKLPEFLRVRPPTFSSTTNPMEANDWLHAIEKKLNLLQCNDQEKVAFATHQLQEFCRSFRKAQVPDGVVAQKKREFRALHQGNRTVTEYLHEFNRLARYAPEDVRTDAEKQEKFMAGLDDELTNQLISGDYADFERLVDKAIRQEDQRNKMDRKRKAAQFRSNQGSQHRPRFTPGQQGGPTTMIVRQHRPFHSSNFHQGASGSQNHQGGQPNRGAAPRPPMAPAQSAQPAQAKKETGAKPGSCFNCGELGHFADKCPKPRRAGLRFIQARVNHASAEEAQAAPEVVLVTLTNEKGETVVYKSLVSPKKGASLNQIETEIPVDTEEKNLRKLEDIPIVCEYPEVFPEDLTTMPPKREIEFRIDLAPGTAPIYKRPYRMAANELAEVKKQVDEQLQKGYIRPSTSPWGAPVIFVEKKDKTKRMCVDYRALNEVTIKNKYPLPRIDDLFDQLKGAKVFSKIDLRSGYHQLRIREEDIPKTAFTTRYGLYECTVMSFGLTNAPAFFMNLMNKVFMEFLDKFVVVFIDDILIYSKSEEEHEQHLRLVLEKLKEHQLYAKFSKCDFWLTEVKFLGHVITAQGVAVDPSNVESVTKWTPPKTVSQIRSFLGLAGYYRRFIENFSRIARPMTQLLKKDEKFKWTAECDKSFEELKRKLVSAPVLILPDQTKDFQVYCDASRHGLGCVLMQEGRVVAYASRQLRPHEGNYPTHDLELAAVVHALKIWRHYLIGNRCEVYTDHKSLKYIFTQPDLNLRQRRWLELIKDYDMSIHYHPGKANVVADALSRKSYCTALCIEGMCEELRQEFEHLNVGIVEHGFVAALEARPTLVDQVRAAQVNDPEIAELKKNMRVGKARDFHEDEHGTIWMGERLCVPDDKELKDLILTEAHQTQYSIHPGSTKMYQDLKEKFWWVSMRREIAEFVALCDVCQRVKAEHQRPAGLLQPLQIPEWKWEEIGMDFITGLPRTSSGHDSIWVVVDRLTK

SEQ ID NO: 200712 - protein, 252 aa, Oryza sativa
  Clone ID: PAT_MRT4530_96154C.1.pep
MPVSRIAVGAPGELSHPDTAKAAVAEFISMLIFVFAGSGSGMAFSKLTDGGGTTPSGLIAASLAHALALFVAVAVGANISGGHVNPAVTFGAFVGGNISLVKAVVYWVAQLLGSVVACLLLKIATGGAAVGAFSLSAGVGAWNAVVFEIVMTFGLVYTVYATAVDPKKGDLGVIAPIAIGFIVGANILAGGAFDGASMNPAVSFGPAVVTGVWDNHWVYWLGPFVGAAIAALIYDIIFIGQRPHDQLPTADY

SEQ ID NO: 200713 - protein, 60 aa, Oryza sativa
  Clone ID: PAT_MRT4530_96155C.1.pep
SCQECIPREHSPQVHVIASAGTSTSHPRVYRLRAHAHPAPPRVRPHRKANSAGVHPAGAR

SEQ ID NO: 200714 - protein, 84 aa, Oryza sativa
  Clone ID: PAT_MRT4530_96156C.1.pep
RCNGVGLMFMQMIALCHSRGYGVVFNNVNMVLRFIIIWAYMVIAQYGYSSTLVYIPKTLSLGGYSSVFDSGRMVMTGCRNKLRI

SEQ ID NO: 200715 - protein, 656 aa, Oryza sativa
  Clone ID: PAT_MRT4530_96157C.1.pep
MEDDIWTLNLFRDGVVNGLMHVQKKMDIDIICYFNLVGLIVDIGYSECDFIYYSKKDGRGVASMVAIESDWQVDEMCKQFESEKVANLYIIQRQEEKLKEIKRQKEDPDERREGDTDVEDIFPLAINLLDTGSAPIARRNGNEVAVQHESQPSPLVVNSPLVVVNSSRAKCSQHIAPSTRKGKEDNEGDIVDLCSSDDDGHEATPCRAPNKRKSFQYKEFGVDGCFVKLTNGAQVLAASRRDGNDNLFPLAFGVVGKEDYEGWCWFLQQLKYALGGEGLLGGIKDVFPACEQRFCKRHIHQNFCTASFRGGDLKAYMDSAVYAYTKHNFEIAIEELKKEREGAWEWLTKIPTKHWARHAFDTTCKTDLVVNNISEVFNNYIIDYRDKPIVTMLDLIRTKLMGRFNSNREGIASAQWEITPHYVEKIEVEKRDARYCRVVCAGRGIWQVTCGEMTYAVNIHDRTCGCFKWDVTGVPCKHVVSTIYKSKQHPEDFVHDFFKKLAYQRAYQHSIYHVPSSDDWTKTDTPDIDPPKFSKHPGMPKNNRRKRGDEPSQPSGRARMTTITCSNCHKQGHKCTSCSRKLRLDLQIRKSKHKANRSIPAESSHVQEPRFVANFQEGFGVRVPNSPIVDRGRGRLSKMPSRRDRGRGRSTSGVMN

SEQ ID NO: 200716 - protein, 281 aa, Oryza sativa
  Clone ID: PAT_MRT4530_96158C.1.pep
MQAYYAAAAAAAGGHPYAWPPPQSVPPMAGCAVPSAAAEGKSKRKTSGGPSGEDSSGSGDGGSEDSSERRDDADEKGLSPAKWRKLGHPDIEGETSQAAAMSEQNPVKAAPNLNIGMDIWSNSTMAAMPSGQVEVNAGTHLRRDKALSQMDERELKRERRKQSNRESARRSRLRKQERPTSFCHPPNYPVTFYGLTNQECEELSQKVTELTAVNSTLMTELDKLKKDCEDMEAENSQLMDEMVQSEGSSVIATLSVKIDTSKDRHGSSSQLNKHTNDDSKG

SEQ ID NO: 200717 - protein, 54 aa, Oryza sativa
  Clone ID: PAT_MRT4530_96159C.1.pep
VALERKIDAHPNGIGVPGFRTRDLMWSICYRVLSPPPGSTFFFAGWASFSFVSK

SEQ ID NO: 200718 - protein, 73 aa, Oryza sativa
  Clone ID: PAT_MRT4530_9615C.1.pep
MSMVMDLVSQSFSSKAPVITHDGNNSNIRVDGDGTPRGMTTVRDLVSQPSSSRFRFQCMSLTIEGGLSEGHDN

SEQ ID NO: 200719 - protein, 41 aa, Oryza sativa
  unsure (1)..(41): unsure at all Xaa locations
  Clone ID: PAT_MRT4530_96160C.1.pep
XGGGLQXPYTKVFFKPXXYXXXXKLNKPQXFLSSFFXIIHI

SEQ ID NO: 200720 - protein, 136 aa, Oryza sativa
  unsure (1)..(136): unsure at all Xaa locations
  Clone ID: PAT_MRT4530_96161C.1.pep
WNTTRSDITMTTLCINEPNHQHQTDLAADLEXNSGPMSTCSKDYGVYFQMGLVPRQNSYRAASNRQNKPRIILLGEVYRVSAWFITRGDVVLXLRGSVACSFRRRIEFRHDSVQIVCLSIHIGRSGPNILIICSVA

SEQ ID NO: 200721 - protein, 59 aa, Oryza sativa
  unsure (1)..(59): unsure at all Xaa locations
  Clone ID: PAT_MRT4530_96162C.1.pep
VGFRCAGVCVXRXVVVGPGFFLLMYAXAHMLGGGGLGLXVFGLALPGCSVSFLSVGSSF

SEQ ID NO: 200722 - protein, 115 aa, Oryza sativa
  Clone ID: PAT_MRT4530_96164C.1.pep
VPILPARPTRHDHARLRAVSPPPLLLLLVLDLVPRLATPTPPPPPPTADYAPAPSDCSTALPNPSPRPPAAHRGAACAPPILHRVLLLHALTRGGMRRPRRHRHTRGGARRGGRA

SEQ ID NO: 200723 - protein, 479 aa, Oryza sativa
  Clone ID: PAT_MRT4530_96165C.1.pep
MEHLSEELIIEILKRITRTSDLNSVSLVSKQLYAIDAEQRATICIGCGLSTEDFSALCSRFPNLLKVEIDYSGSTPGNGNHIDNQGLFVLTSCCTLLNDITLSFCSKINDAGIACLTYCKKLMSLKLNSIPEVTSSGLLMVAFGCKALSSLYLNDCKGIAGSTEWLEYLGSDGSLEELIVSNCKGVSQYNFLKFGPGWMKLKTFEYENKENFFSIHPRYGSSVKANTHRYELCCENLKDLKLVRLVTEPDGPEIGLRFLLGKCKALEKLCLEYVTGVIDNDMIVLSQACKNLKSISLWLKPEHYVVGGHIEFRTGFTDESLKALALNCPLLQDVELTFTGCAHWDPPEIGFTQEGLVSFVESCPIRVLVLNGALFFNNKGMKALSSAQFLETLSLIDCNEVTDHGMRFIVHFPSLINLTLRFCHNVTNAGLSELAHAQKLQSLDVGGCGYISQKGVLGAAKSVYYEVNCKSLGHYKRMC

SEQ ID NO: 200724 - protein, 457 aa, Oryza sativa
  unsure (1)..(457): unsure at all Xaa locations
  Clone ID: PAT_MRT4530_96166C.1.pep
LKLVRIIALKDEIARLKKENAXLKGLPAPGGVRIRTTPRKSTTAPVRIQLAPRNPPPPAAPPAPPAVPAAPAPVPVSAPASALSFAPASAARGPASGNGGWLPATPSGSRDHSSSSSSGLEPGSGETYLPDPRRRSEGPGLFLQMVNTRNGSCAAGEGSNGEERTDSGYPNSASGNGPPPLPKNPTLAQVMAHQTQMMVAMMQQMQQQHQXMHQRMLQQPEQQQQQFGPPPPQSKLLEFLRVRPPTFSSTTNPMEAKDWFHAIEKKLNLLQCNDHEKVAFATRGPASAWWDNHMATHLPGTEVTWAEFCRSFRKAQVPDGVVAQKKREFRALHQGNRTVTEYLHEFNRLARYEPEDVRTDAEKQEKFLAGLDDELTNQLISGDYADFEKLVDKAIRQEDQCNKMDRKRKTAQFQSNQGSHQRPRFTPGQQGGPMSRPRKLHFPERYSNKLHKTSGNK

SEQ ID NO: 200725 - protein, 55 aa, Oryza sativa
  Clone ID: PAT_MRT4530_96167C.1.pep
MGRARCPSAPTPPRRAVVRGTGPEASAVVGGGGRRTATREKGGRRRACELGFGEA

SEQ ID NO: 200726 - protein, 999 aa, Oryza sativa
  Clone ID: PAT_MRT4530_96168C.1.pep
MVYTRNGTRTTSEGSNGEERADGVHPNSDSGNGPPPFPENLTLAQVMAHQTQMMAAMMQQMQQQHQQMHQRMLQHAEQQHQQFGPPPPQSKLPEFLRVRPPTFSSTTNPMEANDWLHAIEKKLNLLQCNDQEKVAFATHQLQGPASAWWDNHVATRPPGTEVTWAEFCRSFRKAQVPDGVVAQKKRGFRALHQGNRTVTEYLHEFNRLARYAPEDVCTDAEKQEKFLAGLDDELTNQLISGDYADFERLVDKAIRQEDQRNKMDRKRKAAQFRSNQGNHQRPRFTLGQQGGPTTMIVRQHRTFKSSNFHQGASGSQNHHGGQPNHGAAPHPPVAPAQSGPSAQAKETGAKPGSCFNCGELGHFADKCPKPRRAGSKFVQARVNHASAKEAQAAPEVVLGTFPVNSIPATVLFDSGATHSFISKKFVRMHGLIREELSTPMRVHTPGNSSTSVQFSPSITIEIQRSPFLANIILLDSKDLDVILGMDWLTKFKGVIDCANRTVTLTNEKGETIVYKSLVSPKQGVSLNQIEAETPVVTEGMNSRKLEEIPIVCEYPEVFPKDLTTMPPKREIEFRIDLAPGTAPIYKRPYRMAANELAEVKKQVDEQLQKGYIRPSTSPWGAPVIFVEKKDKTKRMCVDYRALNEVTIKNKYPLPRIDDLFDQLKGAKVFSKIDLRSGYHQLRIREEDIPKTAFTTRYGLHECTVMSFGLTNAPAFFMNLMNKVFMEFLDKFVVVFIDDILIYSKSEEEHEQHLRLVLEKLKEHQLYAKFSKCDFWLTEVKFLGHVRLLGMAVDPSNVESVTKWTPPKTVSQIRSFLRLAGYYRQFIENFSRIARPMTQLLKKDEKFKWTAECDKSFEELKKKLVSAPVLILPDQMKDFQIWRHYLIGNRCEVYTDHKSLKYIFTQPDLNLRQRRWLELIKDYDMSIHYHPGKANVVADALSRKSYCTALCIEGMCEELQQEFKRLNVGIVEHGFIAVGGWHESLRPNLPKPMAKTTSQG

SEQ ID NO: 200727 - protein, 779 aa, Oryza sativa
  unsure (1)..(779): unsure at all Xaa locations
  Clone ID: PAT_MRT4530_96169C.1.pep
RRIHRRRKLRHRVRTRRPDGAYVDGGENGRVAAQYDSERIRAELTLRSFPSGVRNCYTLPTVAGAKYLIRVVAFYGNYDGKNSSSTLQFDLHLGVNYWSTVIPDVTNTYEALFVAWANQAPVCLVNTGQGTPFVNRVELRPLEDALYPDHVKANQSMNTYRRYTMGTINIAYLYRYPSDPYDRYWWAEDSNPMWGYLNSKRDIQPESITEVPSAVLQKAVQPEXQPRQFNIYFNSYDKPYLYSPSYLAAGVVYSPSWYGESDGEFNVTLVATAKSVLLPMLNAYEIYTPIKHKTPMTFSKDVDAIMAIKVEYGVLNKNWMGDPCYPTQYAWEGVKCKNSSENIPRIISIDLSNSNLHGVISSNFTSLTALEYLNLSGNQLNGPIPDSLCKLNAGLLVFSYESNGDMCNKTTSLTRSKNRAAILAISVAAPMLVVIALFVGYLMWKAKRKPNTSAYNPPRVPEPMNAPVSEKYHWDHLEKNENRQFTYEELEKFTNNFQRLIGQGGFGCVYHGCLEDHTEVAVKIHSENSRHGFSEFLAEVQSLSKVHHKNLVSLVGYCSEKAHLALVYEYMSGGTLFDHLRDKTGVGESLNWASRVRILLEAAQGLDYLHTGCNRPIIHRDVKTSNILLGQNLQAKIADFGLSKVYVSDTQTHMSATAAGSMGYIDPEYYLTGRITESSDIYSFGVVLLEVVTGERPIIQGQGHIIQRIKMKVVAGDISSIADARLRGDYDVNSIWKVVEIAMLCTEPVAAQRPTMASVVAELKDSLHLKFTHLKFRDQ

SEQ ID NO: 200728 - protein, 75 aa, Oryza sativa
  Clone ID: PAT_MRT4530_9616C.1.pep
LYADFISFLSKFCHEKDLQLARGDVFRLLVDYEYLYLQPAKSGTELQLSPPVANSRLVNMPCKLNEPSCRIPAAR

SEQ ID NO: 200729 - protein, 1747 aa, Oryza sativa
  unsure (1)..(1747): unsure at all Xaa locations
  Clone ID: PAT_MRT4530_96170C.1.pep
MADCPLTHQGQTMGGFVAELSRIAFVIGFPREPQYTSIHPLSGEFPHQVRLEIHDIPTYLPNMEVTACGGTFEHACEEAALRMMAHLRELHDGVLNTTAYRFHPCRGSSSNSSTFKSAWGENDVTFGHMSDVMRSYDKLHAMLHKATKSLNDQKLVRIADLQDENARLKKEVPRLXGRPPPGGARIRTTPRKSTTAPVRIQLAPRNPPQPPPLAPPAAPAPAPVLAPAPSTAASSAPVLEFGFTFVPASAYRGLAGGSGGCFLXMVNTRNGSRAAGEGNNSEERTDGGYPNSASGNGPPPLPENPTLAXVMAHQTQMMAAMMXQMQQQHQQMHQRMQQQAEQQQQQFGPPPPXSKLLEFLRVRPPTFSSTTNPMEANDWLHAIEKKLNLLQCSDKEKVAFATHQLQGPASAWWDNHMATRPPGTEVTWAEFCRSFRKAQVLDEDVAQKKRVFRALHQGNRTVTEYLHEFNRLARYAPEDVRTDAEKXEKFLASLDDELTNQLISGDYANFEKLVDKAIRQEDQRNKMDRKRKATQFRSNQGSHQRPCFTSGXQGGPTTMIVRQHHPYNPSNFHPGSSGSHLGXGQHNRGAAPRPPMAPVQQTAPVPPKKDTGGKPGACFNYGESGHFANKCPKPRRAGPKFVQARVNHASTEEAQAAPEVVLGTFPVNSIPATVLFDSDATHSFISKKFVGVHGLRKEELSTPMRVHTPGNSSTSVSYSPSVLIEIQISRFLPNLILLESKDLDVILGMDWLTKFKGVIDCANRTVTLTNEKGETMVYKSPVSPNQGISLNQIEVENPVVTEEKGSRKLEGIPIVCEYPEVFPEDLTTMPPKREIEFRIDLAPGTAPIYKRPYRMTANVLAEVKKQVDEQLQKGYIRPSTSPWGAPVIFVEKKDKTKRMCVDYCALNEVTIKNKYPLPRIDDLFDQLKGAKVFSKIDIRSGYHQLRIREEDNPKTAFTTQYELYECTVMSFELTNAPAFFMNLMNKVFMEFLDKFVMVFIDDILIYSKSEEEHEQHLRLVLEKLKEHXLYAKFSKCDFWLSEVKFLGHVITAQGVAVDPSNVEXLPXWTPPKTVSQIWSFLGLAGYFRRFIENFSRIARPMTQLLKKEEKFKWTAECDKSFEELKNKLVSAPVLILPDKTKDFQVFCDASRQGLGCVLMQEGQVVAYASRLLRPHESNYPTHDLELAAVVHALKIWRHYLVGNRCEVYTDHKSLKYIFTQPDLNLRQRRWLELIKDYDMGIHYHPGKANVVADALSRKSYCNALGIGDMSDKLLQELEPLNLGIVEHGYVAALEAQPMLVDQVRAAQVNDPEIAELKKNMRVGKAQDFHEDEHGTIWLGERXLKDLILTEAHQTQYSIHPGSTKMYKDLKEKFWWASMRREIVEFVALCDVCQRVKAEHQRPAGLLQPLXIPEWKWEEIGMDFITGLPRTSSGHDCIYXVMCLHGVPKKIVSDRGSQFTSKFWQKLQEELGTRLNFSTAYHPQTDGQTERVNQILEDMLRACALDFGGAWDKSLPYAEFSYNNSYEASLQMAPFEALYGRKCRTPLFWDQTGERQLFGTEVLTEAEEKVRTIRERLRIAQSRQKSYTDNRRRELTFEVGDYVYLRVTPLRGVHRFQIKGKLAPRFVGPYKILEQRGEVAYQLELPSNMAGIHDVFHVSQLKKCLRVLGEQANSEHIDIQEDLTYVEKPVRILETNERRTRNKVTRFYRVQWSHHSEEEATWEREDELKAAHPHLFASSSESRGRDSV

SEQ ID NO: 200730 - protein, 1556 aa, Oryza sativa
  unsure (1)..(1556): unsure at all Xaa locations
  Clone ID: PAT_MRT4530_96171C.1.pep
MGCKMADHPPNHRGEGMIDFVAELARMTLVVGYPNAPEYTTVPPLSGELPHRVRLEVHGYVGTCLANMVVEASGGIADHACQEAAYLMMPRLRERHNYIFHDTAYQFHPRRASGDDVSTFRPTAGENDTTFGHMCAVMRGMDRMHSNLHKASKALNDGKLVRIIALKDEIARLKRENAQLKGLPAPGGVRIRTTPRKSTTAPMVYTRNGSRTTGEGSNGEERTDGVHPNSDFGNGPPPLPENPTLAQVMAHQTQMMTAMTQQASARWVVAQKKREFRALHQGNRTVTEYFHEFNRLARYAPEDVRTDAEKQEKFLAGLDDELTNQLISGDYADFERLVDKAIRQEDQRNKMDRKSKAAQFRSNQGSHQRPRFTPGQQSGPTTLIVHQHRPFNASNFHQGASGSQNHHGGQPNRSAAPRPQMALAQSATSAQAKKETGTKPGSCFNCGELGHFAKKCPKPRRAEPRFVQARVNHASTEEAQAAPEVVLGTFPVNSIPATILFDSGATHSFISKKFVGMHGLIREELSTPMRVHTPGNSSTSVQFSPSITIEIQRSPFLANLILLGSKDLDVILGMDWLTKFKGVIDCANRTVTLTNEKGETVVYKSPVSPKQGVSLNQIEVEIPVVTEEKNSRKLEEIPIVCEYPKVFPEDLTTMPPKREIEFRIDLAPGTAPIYKRPYRMAANELAEKKDKTKRMCVDYRALNEVTIKNKYPLPRIDDLFDQLKGAKVFSKIDLRSGYHQLRIREEDIPKTAFTTRYGLYECTVMSFGLTNAPAFFMNLMNKVFMEFLDKFVVVFIDDILIYSKSEEEHEQHLRLVLEKLKEHQLYAKSSKCDFWLSEVKFLRHVITAQGVAVDPSNVESITKWTPPKAVSQIRSFLGLAGYYRRFIENFSRIARPMTQLLKKDEKFKWTAECDKSFEELKKKLVSAPVLILPDQMKDFQVYCDASRHGLGCVLMQEGRVVSYASRQLRPHEGNYPTHDLELAAVVHALKIWRHYLIGNRCEVYTDHKSLKYIFTQPDLNLRQRRWLELIKDYDMSIHYHPGKANVVADALSRKSYCNALCIEGMCGELQQDLERLNVGIVEHGFVAALEAQPTLVDQVRAAQVNDPKIAELKKNMRVGKARDFLEDEHGTIWMGERLCVPDDKELKDLILIEAHQTQYSIHPGSTKMYKDLKEKFWWVSMRREIAEFVALCDVCQRVKAEHQRPAGLLQPLQIPEWKWEEIGMDFIIGLPRTSSGHDSIWVVVDRLTKVAHFIPVHTTYTXKGSQFTSKFXQKLQEELGTRLNFSTAYHPQTDGQTXRVNQILEDMLRACALDFGGAWDKSLPYAEFSYNNSYQASLQMALFKALYGRKCRTPLFWDQTGERQLFGTEVLAEAEEKVRTVRERLRIAQSRQKSYADNRRRELTFEAGDYVYLRVTPLRGVHRFQTKGKLAPRFVGPYKILEQRGEVAYQLELPSNMIGIHDVFHASQLKKCLRVPKEQANSEHIDIQEDMTYVERPVRILETSERRTRNKVTRFCRVQWSHHSEEEATWEREDELKATHPHLFASSSKSRGRDFI

SEQ ID NO: 200731 - protein, 71 aa, Oryza sativa
  Clone ID: PAT_MRT4530_96172C.1.pep
MGGGDGSGDGTGSGSVPPEVEVATAAVAVSAATMRGCPRDEADEAEIEAENRLSIGGEDAAASGLYIPLDI

SEQ ID NO: 200732 - protein, 623 aa, Oryza sativa
  unsure (1)..(623): unsure at all Xaa locations
  Clone ID: PAT_MRT4530_96173C.1.pep
HFRGIIYRQEGRVVAYASRQLHPHEGNYPTHNLELAAVVHALKIWRHYLIGNRCEVYTDHKSLKYIFTQPDLNLRXDMSIHYHPGKANVVADALSRKSYCNAACTEGMCKELQQELEHLNLGLVEYGYVAALEARPTLTDQVRAAQVNDPEIAELKKNMRVGRARDFHEDEHGTIWLGERLCVPNDKELKDLILTEAHQTQYSIHPGSTKMYQDLKEKFWWVSMRREIAEFVALCDVCQRVKAEHQRPAGLLQPLQIPEWKWEEIGMDFITGLPRTSSGHDSIWVVVDRLTKVAHFIPVHTTYTGKKLAELYLARIMCLHGVPKKIVSDRGSQFTSKFWQKLQEELGTRLNFSTAYHPQTDGQTERVNQILEDMLRACVLDFGGAWDKSLPYAEFSYNNSYQASLQMAPFEALYGRKCRTPLFWDQTGEHQLFETEVLTEAKEKVRTIRERLRIAQSXQKSYADNRRRELTFEAGDYVYLRVTPLRGVHRFQTKGKLAPRFVGPYKILERIGEVAYQLELPSNMLGIHDVFHVSQLKKCLRVPEEQADSEHIDIQEDLTYGEKPVRILETSERRTRNKVTRFCRVQWSHHSDEEATREREDELKAAHPHLFTSSSESRGRDSV

SEQ ID NO: 200733 - protein, 46 aa, Oryza sativa
  Clone ID: PAT_MRT4530_96174C.1.pep
STCHRDTKSSSNRKTRNRRPSTNKTIRFRSSVVLTPVLAYVAAESA

SEQ ID NO: 200734 - protein, 221 aa, Oryza sativa
  Clone ID: PAT_MRT4530_96175C.1.pep
MADHQPNHRGDGMDDFVAELARMTLVVGYPNAPEYSTVPPLSGELPHRVRLEVHCYLGTSLANMVVEASGGTADHAYQEAAYLMMARLRDHHSYIFCNTAYRFHPRRASGNDISTFRPTVGENDTTFGHMCAVMRGMDRMHSDLHKASKALNDGKLVRIIALKDEIARLKKENAQLKGLPAPGGVRIRTTPRKSTTTPVRIQLAHRDPPPPAVSRYENRLF

SEQ ID NO: 200735 - protein, 182 aa, Oryza sativa
  Clone ID: PAT_MRT4530_96176C.1.pep
LPVSRNFLMRFLTTGRSMAWKAHVLVAVLLAVVAVTAVNAQSGSPQSNQTAAVANATLSQNQTAFSALVSSLETALQARLNLFALNTTQTLQSLNLSQPITGVASVNLTGLAPNSSTINDASLISNPGLRSDLTVPACSSYLFNVTYPGNRTLCLGLSFTPSQNATALSSNSSSDQTLPLNG

SEQ ID NO: 200736 - protein, 1486 aa, Oryza sativa
  Clone ID: PAT_MRT4530_96177C.1.pep
MVYTRTGSRATGEGSNGEERADGVHPNGDSGNGPPPLPENPTLAQVMAHQTQMMAAMMQQMQQQHQQMHQRMMQHAEQQHQQFGPPPPQSKLPEFLRVRPPTFSSTTNPMEANDWLHAIEKKLNLLQCNDQEKVAFATHQLQGPASAWWDNHMATRPPGTEVTWAEFCRSFRKAQVPDGVVAQKKREFRALHQGNRTVTEYLHEFNRLARYAPEDVRTDAEKQEKFMAGLDDELTNQLISGDYADFERLVDKAIRQEDQRNKMDRKRKAAQFRSNQGSQHRPRFTPGQQGGPTTMIVRQHRPFHSSNFHQGASGSQNHQGGQPNRGAAPRPPMAPAQSAQPAQAKKETGAKPGSCFNCGELGHFADKCPKPRRAGLRFIQARVNHASAEEAQAAPEVVLGTFPVNSIPATVLFDSGATHSFISKKFVGMYGLRKEELSTPMRVHTPGNSSTSVSFSPSVLIEIQRSPFLANLILLESKDLDVILGMDWLTKFKGVIDCANRTVTLTNEKGETVVYKSLVSPKKGASLNQIETEIPVDTEEKNLRKLEDIPIVCEYPEVFPEDLTTMPPKREIEFRIDLAPGTAPIYKRPYRMAANELAEVKKQVDEQLQKGYIRPSTSPWGAPVIFVEKKDKTKRMCVDYRALNEVTIKNKYPLPRIDDLFDQLKGAKVFSKIDLRSGYHQLRIREEDIPKTAFTTRYGLYECTVMSFGLTNAPAFFMNLMNKVFMEFLDKFVVVFIDDILIYSKSEEEHEQHLRLVLEKLKEHQLYAKFSKCDFWLTEVKFLGHVITAQGVAVDPSNVESVTKWTPPKTVSQIRSFLGLAGYYRRFIENFSRIARPMTQLLKKDEKFKWTAECDKSFEELKRKLVSAPVLILPDQTKDFQVYCDASRHGLGCVLMQEGRVVAYASRQLRPHEGNYPTHDLELAAVVHALKIWRHYLIGNRCEVYTDHKSLKYIFTQPDLNLRQRRWLELIKDYDMSIHYHPGKANVVADALSRKSYCTALCIEGMCEELRQEFEHLNVGIVEHGFVAALEARPTLVDQVRAAQVNDPEIAELKKNMRVGKARDFHEDEHGTIWMGERLCVPDDKELKDLILTEAHQTQYSIHPGSTKMYQDLKEKFWWVSMRREIAEFVALCDVCQRVKAEHQRPAGLLQPLQIPEWKWEEIGMDFITGLPRTSSGHDSIWVVVDRLTKVAHFIPVHTTYTGKRLAELYLARIMCLHGVPKKIVSDRGSQFTSKFWQKLQEEMGTRLNFSTAYHPQTDGQTDYQASLQMAPFEALYGRKCRTPLFWDQTGERQLFGTEVLAEAEEKVRIIRERLRIAQSRQKSYADNRRRELTFEAGDYVYLRVTPLRGVHRFQTKGKLAPRFVGPYKILERRGEVAYQLELPSTMIGIHDVFHVSQLKKCLRVPEEQANSEHIDIQEDLTYVEKPVRILDTSERRTRNKVTRFCRVQWSHHSEEEATWEREDELKAAHPYLFTSSTESRGRDSV

SEQ ID NO: 200737 - protein, 387 aa, Oryza sativa
  Clone ID: PAT_MRT4530_96178C.1.pep
MRESVEEAVHHAVVAVAAAAVVALAVALFLLWRNKRVARAGGGAGGGGGGGDGDGGAIAVAVAPLPVVPLADVERATDGFHPSRVIGQGRHFTVYAAAPGLAAKRMRPHLVLGEPGGRRFPAALRSLAVPPHPNLAGIVGLSEGPGERVLIVERASAGSVGLNALLYHGGTDAPLLPWPERAAVAAGAARGLVHLHAHGVAHGRVRPRNVLVDAAAAARGPCGVRVSDYGLSTFLHSDDGDGDDHGRLDARAENDVYMFGAVLLHLLTGRQWDGGRLAHWALPLIRAGPPALAEVLDERAGKPADKAESRLLARTARVALACVANDGRSRPRMAEVSAILDDVEAAYRRRGRSPEHDVDGGEERFSGCLLAPSRSAHRSETLLRLPV

SEQ ID NO: 200738 - protein, 59 aa, Oryza sativa
  Clone ID: PAT_MRT4530_96179C.1.pep
PRYVIQTLYCGQDDGSQLGYTVVCAGYLDLSKWPIDEPPSYEDTSQLRQAHLTSHRDHG

SEQ ID NO: 200739 - protein, 102 aa, Oryza sativa
  Clone ID: PAT_MRT4530_9617C.1.pep
SQIRPLAAAGHGPGGRRPPTRRRGARPCQPPAACPLLRGAAPPAAAAARGPRPQAAARPARHRPARPPPACPPPRAAPRPQAAACLPAAGTFFYRHLNLSIA

SEQ ID NO: 200740 - protein, 204 aa, Oryza sativa
  Clone ID: PAT_MRT4530_96180C.1.pep
MVEVLEEEEAVAFTPTPSGSGDSSESRGPRHHRRDSPTPPRHEPSRREDPTRSGGSALSPPLGEERPRRVGARRRLTYGDGGSPRGTLQAAGALLRHPPVNSEPETPVQRWLDDVANLVTTAQRQLAAGGRPAATGMSRTPVTLSSSARRRARQSAMASRRSTAPTSSGASGSRRRHDGLYGEQDAQINIERRRDERRAARMGE

SEQ ID NO: 200741 - protein, 131 aa, Oryza sativa
  unsure (1)..(131): unsure at all Xaa locations
  Clone ID: PAT_MRT4530_96181C.1.pep
NEVTIKNKYPLPQIDDLFDQLKGAKVFSKIDLRSGYHQLRIREEDIPKTAFTTRYGLYECTVMSFGLTNAPAFFMNLMNKVFMEFLDKFVVVFIDDILIYSKSEEEHEXTSPLVLEKLKEHYLYAKFRAAG

SEQ ID NO: 200742 - protein, 193 aa, Oryza sativa
  Clone ID: PAT_MRT4530_96182C.1.pep
MARLRERDNYIFCNTAYRFHPRRASGDGVSTFRPTAGENDTTFGHMCAMMRGMDRMHSDLHKASKALNDGKLVRIIALKDEIARLKKENAHLKGLPIPGGVRIRTMPRKSTTAPMANTRNGSRAAGEGSNGEERTDGGYPNSASGNGPPPLPENPTLAPVMAHQTQMMAAMMQQMQQRHQQMHQRMQQQAEQQ

SEQ ID NO: 200743 - protein, 79 aa, Oryza sativa
  Clone ID: PAT_MRT4530_96183C.1.pep
IKKKIKKKKKKKERKKKKKEKKKIKKKNNKKKHKKKKKKKNRAGLFKEPNFPPSAYQEHTFFLVPQKLISRPLFSNPGN

SEQ ID NO: 200744 - protein, 83 aa, Oryza sativa
  unsure (1)..(83): unsure at all Xaa locations
  Clone ID: PAT_MRT4530_96184C.1.pep
EKKKGKSCLVSSRLRLPQFPSSFSKPSPRFRRWRTNPQVEREVEVEEXRRPKLRYLEFVQVAAAXXTIXLXGLYXLXKDHAGP

SEQ ID NO: 200745 - protein, 64 aa, Oryza sativa
  unsure (1)..(64): unsure at all Xaa locations
  Clone ID: PAT_MRT4530_96185C.1.pep
VSDAKPREIQDAQRGEDPGSARCGRRSLALAXETVARNPRFTLPKPIPAIPISLCRHQFLCSRA

SEQ ID NO: 200746 - protein, 340 aa, Oryza sativa
  Clone ID: PAT_MRT4530_96186C.1.pep
MGKEADTWARVFGPTCQRGRLSRAFRVRKSRGPACDWRCLATSLNFLLTHHRHQLSHLLVFSCTRWRSNAAAATDAAVDSVDLGHHLDELVRDGDLADGGWTTRGVVPRAVIVARVGAVELLDELFFFSFPPELETTAYLSILQSSPPSAPATSPRTESRWTRAQHHHWCQQQCRCHRRPSTAQPHALSYDDARPNAAPPSPPTRHRRRLDLRKGKRWDLDGEGVHVSAERNDGGKAGADVGDDAEPKLIGKGGQFTLYTPTLPLTSWRTRELVQCSWRWMRREMGVDAAPEVECLSLPPVAPLPLTRQLGVCRHSSPVGRPDKLASVALSTGAALLPAA

SEQ ID NO: 200747 - protein, 356 aa, Oryza sativa
  unsure (1)..(356): unsure at all Xaa locations
  Clone ID: PAT_MRT4530_96187C.1.pep
MPSSHLPSSLFPLPSLSLIFFFPLPLFISSSASERRAKRRSDDAVCRDWRCLATFLDFLLAHHRHQLPHLLIFGCTRWRSNAAAATDAAVDSVDLGHHLDKLVRDGDLADGGWTTGGAVPRAVIIARVGAVELLDELFFFSFPPELETTAYLSILHANSPMKATPSSPPSAPATSPRTESRRTRAQRHHXRKTGHSTNQSLKTSDLEWNYELKLPFINHPDRNQRKGERWDLDGEGVHVSAERDDGGKAGADVGDDADAGDRAGGEAEPLQLVADEGAGCNVPPFLGRARLHLAAFIGHRLPSQTNTSLFCTLCPHSCAPRKNFPIGHPSQIAPGQARLTLEFFGHRLTEKKLQLV

SEQ ID NO: 200748 - protein, 314 aa, Oryza sativa
  unsure (1)..(314): unsure at all Xaa locations
  Clone ID: PAT_MRT4530_96188C.1.pep
MPSSHLPSFLFPLPSHLLLPSPSLHLLFRKRVKRRSDDAVCRDWRCLATSLDFLLTHHRHQLSHPLVFGCTRWRSNAADATVDSVDLGHHLDELVRDGDLADGGWTTGGAVPRAVIVAGVGAVELLDELFFFFLSFSPELETTAYLSILHANSPMKATPSSPPSASATSPRTESRRTRAQRHHXCQQQCRRHRRPXDGEGVHVSAERDDGGKAGADVGDDAGAGDRAGGEAEPLQLVADKGAGAVPPEVERLSLPPAAPLPPTRRPGVRRRSSLVGRPDKLASVALSTGAAPPATGCERRWPPAADRACPASGG

SEQ ID NO: 200749 - protein, 417 aa, Oryza sativa
  Clone ID: PAT_MRT4530_96189C.1.pep
MILGWNSGLAKQGDEKGRTPLHFAASTNRLSMRAMVKLLLEHDRSCVYQPDDEGSYPIHVAAALGGVAGLFAVRLMIEFCPDSAGLRDGTGRSFLHVAVDNLCPSVVALARFSPGLRSAVMNMQDGNGNTALHQAVHVCDIMIFFFLLIDRRVLLDVKNNMGYTPVDLARFKNHLKGLNYPVNPQCMMSSSLTHTAGNHPSGDNPTDSLNEKRVEKEERGELSTIYKDAAQNLTIGAVLIVTVTFAATFTMPGGYVSSSDDDGERRGTPTLAGTCAFDAFVVANTLAFMLSGMATFSLMYAGYTPLDFAFRERCVKLSMGLLHSSVRSVGAAFLTATYVMLARVAPKLVIAVYAAAAVGLVYINFEVWMLGWMTLALLSRGDILAALIVGLQTVAVAFWFSWPFAVIFVLPLILKGH

SEQ ID NO: 200750 - protein, 379 aa, Oryza sativa
  Clone ID: PAT_MRT4530_9618C.1.pep
MALKPTLAALLFSLAAIHGIVVVAVDAAAAAVSRGGSARRIPAVFAFGDSTLDAGNNNRLVTAVRADHPPYGQDFPGGAPTGRFCDGKIMSDFLVEALGVKGLLPAYHSGSEVLSDADAATGVSFASGGSGLDDRTATNAGVATMASQIADFSELVGRMGAGKAGEVVNKSLFLVSAGTNDMIMNYYLLPSKYTLDQYHALLIGKLRSYIQSLYNLGARRLLVAGLPPVGCLPVQMTLAALRQPPRPQGCIAEQNAEAEKYNAKLRKMLTKFQSTSPGAKAVYADIYTPLTDMVDHPQKYELTAFDVAFGTSVNPGFAETGKGCCGTGLLEMGPLCTDLMPTCTTPAQFMFWDSVHPTQATYKAVADHFLRTNMLQFDD

SEQ ID NO: 200751 - protein, 163 aa, Oryza sativa
  Clone ID: PAT_MRT4530_96190C.1.pep
MMGRCASPRCALAAALIAAVVAATSSSLAEATATPPLPVLPVPTAAQLRWQRREVIMFFHFGMNTFTDSEWGTGREPPAAFRPAALDASQWMDAAAAAGASLVVLVAKHHDGFCLWPSAHTAHSVRASPWRGGRGDVVREFADAARARGLDIGIYLSPWDRHD

SEQ ID NO: 200752 - protein, 64 aa, Oryza sativa
  Clone ID: PAT_MRT4530_96191C.1.pep
SRSSSLEKSTARPVPKLAESHGEQVIIPGPALTGSGELSLFSLETDDNSCRGIHCLTWVFWCKR

SEQ ID NO: 200753 - protein, 125 aa, Oryza sativa
  Clone ID: PAT_MRT4530_96192C.1.pep
MKACCLIYSSLAKDHQLEFSKKKKKKKKICRLAAWQSHLGPSPTCDGPVWEAYDPISEHSQATEPAATAAAAASVSSCPQTPNTSTAPGRFVLNDGAFALLLHLPPPGPSCFCLYWSSSQIKIRP

SEQ ID NO: 200754 - protein, 142 aa, Oryza sativa
  Clone ID: PAT_MRT4530_96193C.1.pep
MSGEEEENAAELKIGEEFLKAKCLMNCEVAIILEHKYEQIQHMSDGDPSSQVSQVFEKSLQYVKRFSRYKNPDAVRQVRETLSRYGLAEFELCTLGNLCPDTSDEASALVPSLRSGGRFVGDPGSEKIDKMLNDLSLIKKFE

SEQ ID NO: 200755 - protein, 96 aa, Oryza sativa
  unsure (1)..(96): unsure at all Xaa locations
  Clone ID: PAT_MRT4530_96194C.1.pep
MANDGDIMCVWDAESNLEEVQIWYYWSFRRSTTGQTDGIEPVRPAGXRRSGWRQLQTTAVHFGGQTGATSSVRPTASRLLDRCIYFGQTTCHRIEG

SEQ ID NO: 200756 - protein, 131 aa, Oryza sativa
  unsure (1)..(131): unsure at all Xaa locations
  Clone ID: PAT_MRT4530_96195C.1.pep
LHKTSPVSELRPAWLLLRQILFFLLFPSFPLSXSFLPVDHTDADGGRRMARSGAATRGGGRRHSPRCSPSPRRPLPTAEHRRAPLGLPDLEAAAGFAATRRRSSERDGDGGGGARGGMAAARHDDLDDDDD

SEQ ID NO: 200757 - protein, 832 aa, Oryza sativa
  Clone ID: PAT_MRT4530_96196C.1.pep
MGEQERREAEGGGGGGEAAAANTSGMQRVKVYRLTDGGKWDDRGTGHVNIDFLEDSKELGLTVLDEEDNETLLMHNITSEDIYRKQEDTIISWRDPEVATELALSFQEAAGCSYIWDNICDIQRNIQFNNLGGFIADESFRSVNGELRELPPVELSNLPLILKTILEGGITDQMRVAELITQDREFFPKLLDIFRICEDLENLDDLHMIFKLVRGIILLNSSSIFDKIFSDEFILDIIGALEYDPDVPKVQKHRAFLKDHVVFKEAIPIKNVSVVSKIHQTYRIGYLKDVILPRVLDDGTLASLNTMIHSNNAAVISLLKDDSCFIQELFARMRLSNISMESKRELVLFLHEFCTLSKSLPLVQQLRLFRDLSGEGVFDIISDVLQSQDRKIVSAGTDVLILFLNQDPNLLRSYIVQQEGNSLLGLLVKGMVTDFGEAMHCQFLEILRILMDSFTMSGAHRDAVIEIFYEKHLDYLVDDDFLIRHVVKMNLFKPIIDAFVENGDRYNMLQSGVLELLEYIRKVHVQNYQEGLKQLIIYANESFWDQLMKFEHFGSIQAFRLKYQQIGPYWLYCYLTTNFLLSTSSLCLLSNEMVFLFGYCKYLESAETKLSANVPDIRKKAEERGLEKEEEDYFNEDSDEEDSVRRTKHAQKQDGGAKLTNGSEADDVSSRPKSGGLVDYADDDDEDFNPPPKEPDRPEEDDEPLTIAKLKRKLMNSKVDGKQSDGEFHKRQKIETRITSVKIGASTNLVSKRMDDLEKQEPRSPASSSSGSEANGVFGEHSVHSEEHQRSADNTEASRQAGGDCVNAMGNLSTEKSVNTTNTNDSEPYSVR

SEQ ID NO: 200758 - protein, 53 aa, Oryza sativa
  Clone ID: PAT_MRT4530_96197C.1.pep
LMVRMCPPLQLVNLNHSPQGLFPQRAWFCLQLAGTSRVGSGTNERPLLFALSS

SEQ ID NO: 200759 - protein, 79 aa, Oryza sativa
  Clone ID: PAT_MRT4530_96198C.1.pep
IPETEATTAWSLSGIGDAVLRGRSGGELSLDFSHPDIRDRCSSSATMPNISDCQSMVQGTILITMALNRSKATLTRIQA

SEQ ID NO: 200760 - protein, 252 aa, Oryza sativa
  unsure (1)..(252): unsure at all Xaa locations
  Clone ID: PAT_MRT4530_96199C.1.pep
AKGPKQNSNHSLKKQEKEQKRTRAKESMGGREKRKKRSKXXXXXXXXXXXXXXXXXKKKKIKKKERKXKRGTKKEKKKRMGSKLKKSKKRXRREKQKKRKHRKXKKNKGRKKKKEKNKXEKRKEKNKKITTREKEKTKKKEKKKKKKKTKHEKKKKDKKKKIKEKXNKKKIKKIKKVTLLKIIFKRRXKKKKKKKREKDKGNKNKKEXKKNKKKKKKKKYISKXKCMIKERKKKKRNKKNGTGATATKASRS

SEQ ID NO: 200761 - protein, 137 aa, Oryza sativa
  unsure (1)..(137): unsure at all Xaa locations
  Clone ID: PAT_MRT4530_9619C.1.pep
MERHQTPCYHTAAERPEEMEYAPLLKSSLLPKKSDCRATRHAAAPTRGTVSMDARADAYNQHLVETVRTIASPGREILAMHESNARXGTRLASIVLDNTEGNLQAYLTLYVXGPGLXQYISGAILLDDTLDEPTLDR

SEQ ID NO: 200762 - protein, 48 aa, Oryza sativa
  Clone ID: PAT_MRT4530_961C.1.pep
MDLPMIFRQLFTGAKLIALFQRSEKQPIAREDEDYNFVGDEVDYSANK

SEQ ID NO: 200763 - protein, 85 aa, Oryza sativa
  unsure (1)..(85): unsure at all Xaa locations
  Clone ID: PAT_MRT4530_96200C.1.pep
MRVPHGSDXGEGGPWWTGSTDRXRSGAPRGALVAPTRRTRGSHAGSRTDGPDPLGVDRTAEGAVRGRRARAAQAGPAAMAHGGVA

SEQ ID NO: 200764 - protein, 54 aa, Oryza sativa
  Clone ID: PAT_MRT4530_96201C.1.pep
VFCVMGGLYYFMQGSTGFDNLMHGKSPKQNQKQRSLEDFVVSLQRVSTQHEKSQ

SEQ ID NO: 200765 - protein, 1460 aa, Oryza sativa
  Clone ID: PAT_MRT4530_96202C.1.pep
MYPNSGNGPPPLPENPTLAQVMAHQTQMMAAMIQQMQQQHQQMHQRMMQHVEQQHQQFGPPPPQSKLPEFLRVRPPTFSSTTNPMEANDWLHAIEKKLNLLQCNDQEKVAFATHQLQGPASAWWDNHMATRPPGTEVTWAEFCRSLRKAQVPDGVVAQKKREFRALHQGNRTVTQYLHEFNRLARYAPEDVRTDAEKQEKFMAGLDDELTNQLISGDYADFERLVDKAIRQEDQRNKMDRKRKAAQFRAPQGSHQRPRFAPGQQGGPTTMIVRQHRPFNPSNFPQGASGSQNHHGGQSNRGAASRPPMAPAQSGQPAQAKKETGAKPGSCFNCGKLGHFADKCPKPRRAGPRFIQARVNHASAEEAQAAPEVVLGTFPVNSIPATVLFDSGATHSFISKKFVGMHGLIREELSTPMRVHTPGNSSTSVQFSPSITIEIQRSPFLANLILLESKDLDVILGMDWLTKFKGVIDCANRTVTLTNEKGETVVYKSLVSPKKGVSLNQIEAEIPVDTVEKNSRKLEDIPIVCEYPEVFPEDLTTMPPKREIEFRIDLAPGTAPIYKRPYRMAANELAEVKKQVDKQLQKGYIRPSTSPWGAPVIFVEKKDKTKRMCVDYRALNELRIREEDIPKTAFTTRYGLYECTVMSFGLTNAPAFFMNLMNKVFMEFLDKFVVVFIDDILIYSKSEEEHEQHLRLVLEKLREHQLYAKFSKCDFWLTEVKFLGHVITAQGVAVDPSNVESVTKWTPPKTVSQIRSFLGLAGYYRRFIENFSRIARPMTQLLKKDEKFKWTAECDKSFEELKKKLVSAPVLILPDPMKDFQVYCDASRHGLGCVLMQEDRVVAYASRQLRPHEGNYPTHDLELAAVVHALKIWRHYLIGNRCEVYTDHKSLKYIFTQPDLNLRQRRWLELIKDYDMSIHYHPGKANVVADALSRKSYCTALCIEGMCEELRQEFEHLNVGIVELGFVAALEARPTLVDQVRAAQANDSEIAELKKNMRVGKARDFHEDEHGTIWLGERLCVPDDKELKDLILTEAHQTQYSIHPGSTKMYQDLKEKFWWVSMRREIAEFVALCDVCQRVKAEHQRPAGLLQPLQIPEWKWEEIGMDFITGLPRTSSGHDLIWVVVDRLTKVAHFIPVHTTYTGKRLAELYLSRIMCLHGVPKKIVSDRGSQFTSKFWQKLQEELGTRLNFSTAYHPQTDGQTERVNQILEDMLRACALDFGGAWDKSLPYAEFSYNNSYQASLQMAPFEALYGRKCRTPLFWDQTGERQLFGTEVLAEAEEKVRIIRERLRIAQSRQKSYADNRRRELTFEAGDYVYLRVTPLRGVHRFQTKGKLAPRFVGPYKILERRGEVAYQLELPSNMIGIHDVFHVSQLKKCLRVPEEQADSKHIDIQEDLTYVEKPVRILDTSERRTRNKVTRFCRVQWSHHSEEEATWEREDELKAAHPHLFTSSSESRGRDSV

SEQ ID NO: 200766 - protein, 623 aa, Oryza sativa
  unsure (1)..(623): unsure at all Xaa locations
  Clone ID: PAT_MRT4530_96203C.1.pep
MSVHGNMSWGCVLWVQLYTSDQSKTIQIAMPTVMGGKNLGRSLKRDLSNQIADHPPNHRGEGMDDFVAELARMTLVVSYPNAPEYSTVPPLSGEFPHRVRLEVHGYVGTCLANMVVEASGGTADHACQEAAYLMMARLRERHNYIFCNTAYRFHPRQASGDDVNTFRPIAGENDTTFGHMCAASKALNDGKLVRIIALKDKIARLKKENAQLKGLPIPGGVRVSNTSRKSTTSPVRIQLAPRNPHPPAVPAAHAVPAVPAALAPAPAPAPVSAPASALSFAPASAVRGPTGGNGGWLPATPSGSRDHSSSSSSGTEPGSGETYLPDSRSRSEGPGLSLQMVNTRNGSRAAGKGSSGEERTDGGHPNSASSNGPPPLPENPTLAQVMAHKTQMMAAMMQQMXQQHQQMHQRMHQQAEQRQQRFGPPPPXSKLPEFLRVRPPIFSSTTNPMEANDWLHAIEKKLNLMQCNDQDKVAFATHQLQGPASALWDNHMATHPPGTEVTWAEFCRSFRKAQVPDGVVAEEKREFRAPHQGNRIVTEYPHEFNRLARYAPEDVRTDAEKQEKFLAGLDDELTNQLISGDYADFEKLVDKAICQEDQRNKMDRKRKVAQFRSNQGSHCHDRK

SEQ ID NO: 200767 - protein, 624 aa, Oryza sativa
  Clone ID: PAT_MRT4530_96204C.1.pep
MSTTTTTTVTEPDNAEASPSPSPSPSTPPKKVIMYELAARNIYYAKPAAAAVATTTVASLARLLRPCGAAQPPSPEYILRDVSLTARPGEILAVVGPSGAGKSTLLDILAARTAPTHGRLLLNAAPLRPSSFRRLSAHVPQMDVALPLLTVAETFAFAASLLYPAAAEASAAVAALLADLRLGHAAHTRVSATRLSGGERRRVSIGLALLRDPGVLLLDEPTSGLDSSSAHVVVGCLRAVAAARGTTVVLSIHQPSSRLLSAVDSLLLLSRGAVVHHGSVDSLDAALLSHGLAVPAQLNPLEFALEVLDQMPHPSASSPEPKTTEELAAVTSSKSSSSSTSPCSRIHEVVVLYKRAWKVVYRSKQLLLTNFLESVVVGTLLGSIYINAGDGEGGAHKRLGLFAFTLTFLLTSTTETLPTFVSERPIVLAETASGLYRLSSHAAAATLVFLPYLLAVALLYSACVYFLVGLCASAAAFAAFVMVVWAVVLTANSFVLFVSSFAPDYIAGMSLVSVSLAGFFLFSGYFLSRGSMPPYWVFMHYVSPYKYALDALLANEYTCAATRCFGVAGPAAGDCSETGADVLAEKGLTAKERWTGVQVLFGFFLLYRVLYWVVLSRRAARAKR

SEQ ID NO: 200768 - protein, 108 aa, Oryza sativa
  Clone ID: PAT_MRT4530_96205C.1.pep
MKKKALHRMFAAIFLLHILLAVTAAASPKTSTGLLRDGNNNAVAAVAARSSRRLLLQQQQPRAAAPTAAMATNTFRVNGVHQANGEPKVEFDASMKHNPGTNFNPRHN

SEQ ID NO: 200769 - protein, 1383 aa, Oryza sativa
  Clone ID: PAT_MRT4530_96206C.1.pep
MVYTRNGTRTTGEGSNGEERTDGVHPNSDSGNGPPPLPENPTLAQVMAHQTQMMTAMMQQMQQQHQQMYQRMQQQAEQHQQQFGPPPPQSKLPEFLRVRPPTFSSTTNPMKANDWLHAIEKKLNLLQCNDQEKVAFATHQLQGPASAWWDNHMTTRPPGTEVTWAEFCRNFRKAQVLDGVVAQKKREFRALHQGNRTVTEYLHEFDRLARYAPEDVRTDAKKQEKFLAGLDDELTNQLISGDYADFERLVDKAIRQEDQHNKMDRKRKAAQFRSNQASHQRPRFIPRQQGEPTTMIVRQHRPFNSSNFHQGASGSQNHRGGQPNRSATPRPPMAPAQSAPSVQAKKETGAKPGSCFNCGELGHFADKCPKPRRAGPRFVQARVNHASTEEAQAAPEVVLVTLINEKGETVVYKSLVSPKQGVSLNQIEVEIPVVTEEKNSRKLEEIPIVCEYPEVFPEDLTTMPPKREIEFRIDLAPGTAPIYKRPYRMAANELAEVKKQVDEQLQKGYIRPSTSPWGAPVIFVEKKDKTKRMCVDYRALNEVTIKNKYPLPRIDDLFDQLKGAKVFSKIDLRSGYHQLRIREEDIPKTAFTTQYGLYECTVMSFGLTNAPAFFMNLMNKVFMEFLDKFVVVFIDDILIYSKLEEEHEQHLRLVLEKLKEHQLYAKFSKCDFWLSEVKFLGHIITAQGVAVDSSNVESVTKWTPPKTVSQIRSFLGLAGYYRRFIENFSRIARPMTQLLKKDEKFKWTAECDKSFEELKKKLVSAPVLILPDQMKDFQVYCDASRHGLGCVLMQEGRVVAYASRQLRPHEGNYPTHDLELAVVVHALKIWRHYLIGNRCEVYTDHKSLKYIFTQPDLNLRQRRWLELIKDYDMSIHYHPGKANVVADALSRKSYCNALCTEDMCEELQQELERLNVGIVEHRFVAALEARPTLVDQFRAAQVNDPEIVELKKNMRVGKARDFLEDEHRTIWMGERLCVPDDKELKDLILTEAHQTQYSIHPGSTKMYQDLKEKFWWVSMRREIAEFVALCDVCQRVKAEHQRPVGLFQPLQIPKWKWEEIGMDFITGLPRTSSGSVKGKLPKPGLTDIIDDNVLPIDPEKFTPDQKQKFEAMMQQARDQYLSSFMQTRKGMLVQKYKLKLVADNPGTGSSKDGEVKQAPDGSAQPSNKGATSGSIGNQGDNPQEVHGAPGDSICRTHDSTNSASINALTCYIGHGCSSSRSSRRHQFSRLYSRSNNRSRSQLSKHHQFSRWYGRSNNRSCSQFSKHHQRSSISNQSSKHRQGNAFSRSNGLRYDSRSFSRFSTWGQPMHRLDLQHMGGNLRSTAARLAAAPCRRRRWVRVVEVHPVRPSSIEGISELVRPSPPSSHGSQSPFAVVLLRAGHSR

SEQ ID NO: 200770 - protein, 89 aa, Oryza sativa
  unsure (1)..(89): unsure at all Xaa locations
  Clone ID: PAT_MRT4530_96207C.1.pep
PILPPETSLTSNGPSAFMPXPIWVILDFVESLSRYLSNASSLLSXNSSRVNGNRQNKTVLLLKPNLGFGPCNRLGLSWKCLPPPPLIST

SEQ ID NO: 200771 - protein, 145 aa, Oryza sativa
  Clone ID: PAT_MRT4530_96208C.1.pep
QEGAWLMPELLPLLLSSRHDCSARLMVATSLMIPRHLASHCHSDGPPGLAGQPEPLPVFSMSGVWTRGRARRSVRCPARRCTNWRELLAGRPVRQVPVKRSVGDQPGHRGRVSLPDRRHTRMMTWASPAVPSLRSSSSASPVVGP

SEQ ID NO: 200772 - protein, 962 aa, Oryza sativa
  unsure (1)..(962): unsure at all Xaa locations
  Clone ID: PAT_MRT4530_96209C.1.pep
TASENDTTFSHMCAVMRGMDRMHSDLHKASKALNDGKLVRIIALKDEIARLKKENAXLKGLPAPGGVQIRTTPRKSTNAPVRIQLAPRNPPPPAAPPAPPAVPAAPAAPAPAPASALSFAPASAARGPASGNRGCSLQMVNTRNGSRVAGEGSNGKECTDGGYPNSASGNGPPPLPENLTLAQVMAHQTQMMAAMMQQMQQQHQQMHQRMXQQAEQQQQQFGPPPPQSKLPEFLRVRPPTFSSTTNPMEANDWLHDIEKKLNLLQCNDQEKVAFATHQLQGPASAWWDNHMATRPPGTEVTWAEFCRSFRKAQVPDGVVAQKKREFRALHQGNRTVTEYLHEFNRLAXYAPEDVRTDAEKQEKFLAGLDDELTNQLISGDYADFEKLHRPFNSSSFHQGASGSQNHPGGQPNRSASPRPPMATAQAAPSVQAKKETGAKPGSCFNCGEHGHFADKCPKPRRAEPRFAQARINHASVEEAQAAPEVVLGTFPVNSISAKVLLDSGATHSFISKKFVGVHGLIREELSTPMQVHTPGNSSTSVQFSPSVTIEIQRSPFLANLILLESKDLDVILGMDWLTKFKGVIDCANRTVTLTNEKGETVVYKSPVALKQGISLNQIEVENPVVTEEKSSRKLEDIPIVCEYLEVFLKDLTTMPPKREIEFRIDLAPGTAPIYKRPYRMAANELAEVKKQVDEQLQKGYIXPSTSPWGAPVIFVEKKDKTKRMCVDYRALNEVTIKNKYPLPQIDDLFDQLKGARVFSKIDLXSGYHQLMIREEDILKTAFTTRYGLYECTVMSFGLTNTPAFFMNLMNKVFMEFLDKFVVEHQLYAKFSKGDFWLSEVKFLGHVITAQGVAVDPSNVESVTKIARPMTQFLKKDEKFKWTAECDKSFEELKKKLVSAPVLILPDQTKDFQVYCDASRHGLGSVVHALKIWRHYLIGNRCEVYTDHKSLKYVFTQPDLNLR

SEQ ID NO: 200773 - protein, 163 aa, Oryza sativa
  Clone ID: PAT_MRT4530_9620C.1.pep
MDDDGDWITARYLLSSILGRNPLVVDYVDEESFPVEDPPPVAGGARGGRQAVVSQPPVVRATAGVAGTVCSVCTEEIAVADAVVRLPCAHWYHAGCISPWLGIRSTCPMCRAELPASDDAAEEGGGAGREKPPRAAPAGTSAGGGVRRDASYELLAGGGVLSG

SEQ ID NO: 200774 - protein, 84 aa, Oryza sativa
  Clone ID: PAT_MRT4530_96210C.1.pep
MVAASAGARQSGEAAHGGSSQQVAVTGTHRVTGGTTSEVCRLTGCGASAERRRRRVEGPVAACVRQGRHKVFDKMSIREVVAWS

SEQ ID NO: 200775 - protein, 1436 aa, Oryza sativa
  unsure (1)..(1436): unsure at all Xaa locations
  Clone ID: PAT_MRT4530_96211C.1.pep
MVYTRTGNRTTGEGSNGEERADGVHPNSDSGNGPPPLPENPTLAQVMAHQTQMMAAMMQQMQQQHQQMHQRMMQHAEQQHQQFGPPPPQSKLPEFLRVRPPTFSSTTNPMEANDWLHAIEKKLNLLQCNDQEKVAFATHQLQGPASAWWDNHMATRPPGTEVTWAEFCRSFRKAQVPDGVVAQKKREFRELHQGNRTVTEYLHEFNRLARYAPEDVRTDAEKQEKFMAGLDDELTNQLISGDYADFERLVDKAIRQEDQRNKMDRKRKAAQFRAHQGSHQRLRFTPGQQGGPTTMIVRQHRPFNPSNFHQGSSGSQNHHGSQPNRGTAPRPPMAPAQSGPPAQAKKETGAKPGSCFNCGELGHFADKCPKPRRAGPRFIQARVNHASAEEAQAAPEVVLVTLTNEKGETVVYKSLVSPKKGASLNQIETEIPVDIEEKNLRKLEDIPIVCEYPEVFPEDLTTMPPKREIEFRIDLAPGTAPIYKRPYRMAANELAEVKKQVDEQLQKGYIRPSTSPWGAPVIFVEKKDKTKRMCVDYRALNEVTIKNKYPLPRIDDLFDQLKGAKVFSKIDLRSGYHQLRTREEDIPKTAFTTRYGLYECTVMSFGLTNAPAFFMNLMNKVFMEFLDKFVVVFIDDILIYSKSEEEHEQHLRLVLEKLKEHQLYAKFSKCDFWLTEVKFLGHVITAQGVAVDPSNVESVTKWTPPKTVSQIRSFLGLAGYYRRFIENFSRIARPMTQLLKKDEKFKWTAECDKSFEELKRKLVSAPVLILPDQTKDFQVYCDASRHGLGCVLMQEGRVVAYASRQLRPHEGNYPTHDLELAAVVHALKIWRHYLIGNRCEVYTDHKSLKYIFTQPDLNLRQRRWLELIKDYDMSIHYHPGKANVVADALSRKSYCTALCIEGMCEELRQEFEHLNVGIVEHGFVAALEARPTLVDQVRAAQVNDPEIAELKKNMRVGKARDFLEDEHGTIWMGERLCVPDDKELKDLILTEAHQTQYSIHPGSTKMYQDLKEKFWWVSMRREIAEFVALCDVCQRVKAEHQRPAGLLQPLQIPEWKWEKIGMDFITGLPRTSSGHDSIWVVMNRLTKVAHFIPVHTTYTGKRLAELYLARIMCLHGVPKXSDRGSQFASKFWQKLQEELGTRLNFSTAYHPQTDGQTERVNQILEDMFRACALDFGGAWDKSLPYAEFSYNNSYQASLQMAPFEALYGRKCRTPLFWDQTGERQLFGTEVLTEAEEKVRTIRERLRIAQSRQKSYADNRRRELTFEAGDYVYLRVTPLRGVHRFQTKGKLAPRFVGPYKILERRGEVAYQLELPSNMIGIHDVFHVSQLKKCLRVPEEQADSEHIDIQEDLTYVEKPVHILDTSERRTRNKVTRFCRVQWSHHSEEEATSHVAGEIGRARAVPDLPAPRRHRRRVREAELHLVRPFPVEIRRRNPH

SEQ ID NO: 200776 - protein, 134 aa, Oryza sativa
  Clone ID: PAT_MRT4530_96212C.1.pep
MGEAANAAESRQGGDAVTQPHAVAVGSVTLRLAATARRDQDCHFQMLGSILYQIAVEPAQENMKDTRAVGKAMPPNLKNASATSEAAAAASRHPMAEWLHRFLHGRQWEVGFGSNEKKGTLQETSLIIYISLKQ

SEQ ID NO: 200777 - protein, 1300 aa, Oryza sativa
  unsure (1)..(1300): unsure at all Xaa locations
  Clone ID: PAT_MRT4530_96213C.1.pep
MAEHPPNHHGEGMDDFVAELARMTLVVGYPNAPEYTTIPPLSGELPHRVRLEVHGYMGTCLAKMVVEASGGTADHACQEAAYLMMARLRERHNYIFHDTAYRFHPRRASGSDVSSFRPTAGENDTTFGHMCAVMRGMDRMHSDLHKASKALNDGKLVRIIALKDEIARLKRENAQLKGLPAPGGVRIRTTPRKSTTAPVRVQLAPRNPPPSAAPAAPAVPAAPPVPPAAPAVPAAPAPAPAPVPMSAPASALSFAPASAVRGPASGNGGCFLQMVYTRNGTRTTSEGSNGEERADGVHPNSDSGNGPPPFPENLTLAQVMAHQTQMMAAMMQQMQQQHQQMHQRMLQHAEQQHQQFGPPPPQSKLPEFLRVRPPTFSSTTNPMEANDWLHAIEKKLNLLQCNDQEKVAFATHQLQGPASAWWDNHVATRPPGTEVTWAEFCRSFRKAQVPDGVVAQKKRGFRALHQGNRTVTEYLHEFNRLARYAPEDVCTDAEKQEKFLAGLDDELTNQLISGDYADFERLVDKAIRQEDQRNKMDRKRKAAQFRSNQGNHQRPRFTLGQQGGPTTMIVRQHRTFKSSNFHQGASGSQNHHGGQPNHGAAPHPPVAPAQSGPSAQAKETGAKPGSCFNCGELGHFADKCPKPRRAGSKFVQARVNHASAKEAQAAPEVVLGTFPVNSIPATVLFDSGATHSFISKKFVRMHGLIREELSTPMRVHTPGNSSTSVQFSPSITIEIQRSPFLANIILLDSKDLDVILGMDWLTKFKGVIDCANRTVTLTNEKGETIVYKSLVSPKQGVSLNQIEAETPVVTEGMNSRKLEEIPIVCEYPEVFPKDLTTMPPKREIEFRIDLAPGTAPIYKRPYRMAANELAEVKKQVDEQLQKGYIRPSTSPWGAPVIFVEKKDKTKRMCVDYRALNEVTIKNKYPLPRIDDLFDQLKGAKVFSKIDLRSGYHQLRIREEDIPKTAFTTRYGLHECTVMSFGLTNAPAFFMNLMNKVFMEFLDKFVVVFIDDILIYSKSEEEHEQHLRLVLEKLKEHQLYAKFSKCDFWLTEVKFLGHVIIAQGMAVDPSNVESVTKWTPPKTVSQIRSFLRLAGYYRQFIENFSRIARPMTQLLKKDEKFKWTAECDKSFEELKKKLVSAPVLILPDQMKDFQVYCDASRHGLGCVLMQEGRVVAYASRXSRPHEGNYPTHDLELAAVVHALKIWRHYLIGNRCEVYTDHKSLKYIFTQPDLNLRQRRWLELIKDYDMSIHYHPGKANVVADALSRKSYCTALCIEGMCEELQQEFKRLNVGIVEHGFIA

SEQ ID NO: 200778 - protein, 1726 aa, Oryza sativa
  Clone ID: PAT_MRT4530_96214C.1.pep
MAGHPPNHRGEGMIDFVAELARMTLVVGYPNAPEYTTVPPLSGELPHRVRLEVHGYVGTCLANMVVEASGGTVDHACQEAAYLMMARLRERHNYIFHDTAYRFHPCRASGDDVSTFRPTADENYTTFGHMCTVMRGLDRMHSDLHKASKALNDGKLMRIVALKDEIARLKRENAQLKGLPAPGGVRIRTTPRKTTTAPVRIQLAPRNPPPPAAPAAPPVPPAVPAAPAPAPAPVHMSAPASALSFAPASAARGPASGNGGCLFGMVYTRNGSRATGEGSNGEERTEGVHPNSNSGNVPPPLPENPTLAQVMAHQTQMMAAMMQQMQQQHQQMYQRMLQHAEQQHQQFGPPPPQSKLPEFLRVRPPTFSSTTNPMEANDWLHAIEKKLNLLQCNDQEKVAFTTHQLQGPASAWWDNHMATRPPGTEVTWAEFCRSFRKAQVPDGVVAQKKREFRALHQGNRTVTEYLHEFNRLARYAPEDVRTDAEKQERFMAGLDDELTNQLISGDYADFERLVDKAIRQEDQRNKMDRKRKAAQFRAPQGSHQRPRFAPGQQGGPTTMIVRQYRPFHPSNFPQGASGSQNHHGGQPNRGAAPRPPMAPAQSGPSAQARKETGAKPGSCFNCGELGHFADKCPKPRRAGPRFIQARVNHASAEEAQAAPEVVLGTFPVNSIPTTVLFDSGATHSFISKKFVGMHGLIREELSTPMRLTKFKGVIDCVNRTVTLTNEKGETVVYKSPNSPKQGVSLNQIEAEIPVVTMEKNLRKLEDIPIVYEYPEVFPEDLTTMPPKREIEFRINLAPGTAPIYKRPYRMAANELAEVKKQVDEQLQKGYIRPSTSPWGAPVIFVEKKDKTKRMCVDYRALNEVTIKNKYPLPRIDDLFDQLKGAKVFSKIDLRSAYHQLIIREEDIPKTAFTTRYGLYECTVMSFGLTNAPAFFMNLMNKVFMEFLDKLVVVFIDDILIYSKSEEEHEQHLRLFSKCDFWLTEVKFLGHVITAQGVAVDPSNVESVTKWTPPKTVSQIQSFLGLAGYYRRFIENFSRIARPMTQLLKKDEKFKWTAECDKSFEELKKKLVSAPVLILPDQMKDFQVYCDASRHGLGCVLMQEGRVVAYASRQLRPHEGNYPTHDLELAAVVHALKIWRHYLIGNRCEVYTDHKNLKYIFTQPDLNLRQRRWLELIKDYNMSIHYHPGKANVVADALSRKSHCTALCIEGMCEELRQDFEHLNMGIVEYGFVAALEARPTLVDKVRVAQVNDSEIAELKKNMRVGKARDFHEDEHGTIWLGERLCVPDDKELKDLILTEAHQTQYSIHPGSTKMYQDLKEKFWWVSMRREIAEFVALCDVCQRVKAEHQRPAGLLQPLQIPEWKWEEIGMDFIIGLPWTSSGHDSIWIVMDRLTKVAHFIPVHTTYTGKRLAELYLSRIMCLHRVPKKIVSNRGSQFTSKFWQKLQEELGTRLNFSTAYHPQTDGQTERVNQILEDILRACALDFGGAWDKSLPYAEFSYNNSYQASLQMAPFEALYGRKCRTPLFWDQTGERQLFGTEVLAEAEEKVRIIKERLRIAQSRQKSYADNRRRELTFEAGDYVYLRVTPLRGVHRFQTKGKLVPRFVGPYKILERRGEVAYQLELPSNMIGIHDVFHVSQLKKCLRVPEEQADSEHIDFQEDLTYVEKPVHILDTSERRTRNKVTRFCRVQWSHHSEEEATWEREDELKAAHPHLFASSSESRGQDSV

SEQ ID NO: 200779 - protein, 1292 aa, Oryza sativa
  unsure (1)..(1292): unsure at all Xaa locations
  Clone ID: PAT_MRT4530_96215C.1.pep
MVAFPSLEKFIDEAERQPITWEEFTEGFKKTHIPVGVVALKKREFRAQEKFLEGLKDELSVTLISHDYVDFQQLVDKAIRLEDKKNRMDNRKRKMIVFQEAQGSSQRQRITFNPSNFPQGASGSQNHHGGQSNRGAAPRPPMAPAQSGPPAQAKKETGAKPGSCFNCGELGHFADKCPKPRRAGPRFIQARVNHASAEEAQAAPEVVLGTFSINSIPATVLFDSGATHSFISKKFVGMHGLIREELSTPMRVHTPGNSSTSVQFSPSITIEIQRSPFLANLILLESKDLDVILGMDWLTKFKGVIDCANRTVTLTNEKGETVVYKSLVSPKQGVSLNQMKLEDIPIVCEYPEVFLEDLTTMPPKREIXFRIDLAPGTAPIYKRPYRMAANELAEVKKQVDEQLQKGYIRPSTSPWGAPVIFVEKKDKTKRMCVDYRALNEVTIKNKYPLPRIDDLFDQLKGAKVFSKIDLRSGYHQLRIREEDIPKTAFTTRYGLYECTVMSFGLTNAPAFFMNLMNKVLMEFLDKFVVVFIDDILIYSTSEEEHEQHLRLVLEKLKEHQLYAKFSKCDFWLTEVKFLGHVITAQGVAVDPSNVESVTKWTPPKTVSQIRSFLGLAGYFKWTTECDKSFEELKKKLVSAPVLILPDQMKDFQVYCDASRHGLGCVLMQEGIVVAYASRQLRPHEGNYPTHDLELAAVVHALKIWRHYLIGNRCEVYTDHKSLKYIFTQPDLNLRQRRWLELIKDYDMSIHYHPGKANVVADALSRKSYCTALCIEGMCEELWQEFEHLNVGIVEHGFVAALEARPTLVDQVRAAQVNDSEIAELKKNMRVGKARDFHEDEHGTIWLGERLCVPDDKELKDLILTEAHQTQYSIHPGSTKMYQDLKEKFWWVSMRREIAEFVALCDVCQRVKAEHQRPAGLLQPLQILEWKWEEIGMDFITGLPRTSSGHDSIWVVVDRLTKVAHFIPVHTTYTGKRLAELYLSRIMCLHGVPKKIVSDRGSQFTSKFWQKLQEELGTRLNFSTAYHPQTDGQTERVNQILEDMLRACALDFGGAWDKSLPYAEFSYNNSYQASLQMAPFEALYGRKCRTPLFWDQTGERQLFGTEVLAEAEEKVRIIRERLRIAQSRQKSYADNRRRELTFEAGDYVYLRVTPLRGVHRFQTKGKLAPRFVGPYKILERRGEVAYQLELPSNMIGIHDVFHVSQLKKCLRVPEEQADSKHIDIQEDLTYVEKPIRILDTSERRTRNKVNRFCRVQWSHHSEEEATWEREDELKAAHPHLFTSSSESRGRDSV

SEQ ID NO: 200780 - protein, 67 aa, Oryza sativa
  unsure (1)..(67): unsure at all Xaa locations
  Clone ID: PAT_MRT4530_96216C.1.pep
ASRDAPLKAPSAGPGVFGSGAYPGFAGELKVDQATGASXYNANGAPGRXYLLSALCNPSNGTCNTLV

SEQ ID NO: 200781 - protein, 1939 aa, Oryza sativa
  unsure (1)..(1939): unsure at all Xaa locations
  Clone ID: PAT_MRT4530_96217C.1.pep
MAGHPPNHRGEGMIDFVAELARMTLVVGYPNAPEYTTVPPLSGELPHRVRLEVHGYVGTCLANMVVEASGGTADHACQEAAYLMMARLRERHNYIFHDTAYRFHPRRASGDDVSTFRPTAGENDTTFGHMCAVMRGLDRMHSDLHKASKALNDGKLMRIVALKDEIARLKRDNAQLKGLPAPGGVRIRTTPHKTTTAPVRIQLAPKNPPPSAAPAAPPVPLAAPVVPAAPVPALAPVHVSAPASALSFAPASAARGPASGNGGWLSATPSGSCDLSSSRSSGSELGSGETYLPGSRSRSEGPGLFLQMVYTRNGSRATGEGSNGEERTEGVHPNSNSGNGPPPLPENPTLAQVMAHQTXMMAAMMQQMQQQHQQMHQRMLQHAEQQHQXFGPPPPQSKLLEFLRVRPPTFSSTTNPMEANDWLHAIEKKLNLLQCNDQEKVAFATHQLQGPASAWWDNHMATRPPGTEVTWEEFCRSFRKAQVADGVVAQKKREFRALHXGNRTVTEYLHEFNHLARYAPEDVRTDAEKQEKFLAGLDDELTNQLISGDYADFERLVDKAIRQDDQRNKMDRKRKAAQFRAPQGSHQRPRFAPGQQGGPTTMIVRQYRPFNPSNFPQGASGSQNHHGGQPNRGAAPRPPTAPAQSGPSAQAKRETGAKPGSCFNCGELGHFADKCPKPRRAGPRFIQARVNHASAEEAQAAPEVVLGTFPVNSIPATILFDSGATHSFISKKFVGMHGLRKEELSTPMRVHTSGNSSTSVSFSPSVLIEIQRSPFLANLILLESKDLDVILGMDWLTKFKGVIDCANRTVTLTNEKGETAVYKSPDSPKQGVSLNQIEAEIPVDTVKKNLRKLEDIPIVCEYPEVFPEDLTTMPPKREIEFRIDLAPGTAPIYKRPYRMAANELAEVKKQVDEQLQKGYIRPSTSPWGAPVIFVEKKDKTKRMCVDYRALNEVTIKNKYPLPRIDDLFDQLKGAKVFSKIDLRSGYHQLRIREEDIPKTAFTTRYGLYECTVMSFGLTNAPAFFMNLMNKVFMEFLDKFVVVFIDDILIYSKSEEEHEQHLRLVLEKLKEHQLYAKFSKCDFWLTEVKFLGHVITAQGVAVDPSNVESVTKWIPPKTVSQIRSFLGLAGYYRRFIENFSRIARPMTQLLKKDEKFKWTAECDKSFEELKKKLVSAPVLILPDQMKDFQVYCDASRHGLGCVLMQEGRVVAYASRQLRPHEGNYPTHDLELAAVVHALKIWRHYLIGNRCEVYTDHKSLKYIFTQPDLNLRQRRWLELIKDYDMSIHYHPGKANVVADALSRKSYCTALCIEGMCEELRQEFEHLNVGIVEHGFVAALEARPTLVDQVRAVQVNDSEIAELKKNMRVGKTRDFHEDEHGTIWLGERLCVPDDKELKDLILTEAHQTQYSIHPGSTKMYQDLKEKFWWVSMRREXAEFVALCDVCQRVKAEHQRPAGLLQPLQIPEWKWEEIGMDFIIALPRTSSGHDSIWVVVDRLTKVAHFIPVHTTYTGKRLAELYLSRIMCLHGVPKKIVSDRGSQFTSKFWQKLQEELGTRLNFSTAYHPQTDGQTERVNQILEDMLRACALDFGGAWDKNLPYAEFSYNNSYQASLQMAPFEALYGRKCRTPLFWDQTGKRQLFGTEVLAEAEEKVRIIRERLRIAQSXQKSYADNRRRELTFEAGDYVYLRVTPLRGVHRFQTKGKLAPRFVGPYKILERRGEVAYQLELPSNMIGIHDVFHVSQLKKCLRVPEEQADSEHIDIQEDLTYVEKPVRILDTSERRTRNKVTRPRPSQAAPTPSSPGVADRWGPPVGSSPNLPPLPARHRARNRRRAHVSASFGPRRPRPRLRRVSRAHSPLSPARARGTRKLVRRLPYPPVACRRRSPSSSSAPATLGEASLPSFPLPLLLVPRRRFKLRTVAFGRHRRLPCRRSPPSSAACRRR

SEQ ID NO: 200782 - protein, 295 aa, Oryza sativa
  Clone ID: PAT_MRT4530_96218C.1.pep
MSATQPVSEVLIRRVTADNLAVEMLTIRSHLPYFPYITIHADYPVDNAAARHGRRRRRRRGGGRGNKRESEADERCYRLAKSRVDELDVLQLGITLCDHHGRLPATAIACPGGAAVAVEMAWQVGFSDFDVSQSAVDALRAAGVDLEHLRARGVPAAVFGQALRVFDIVSAANLGRLTWVAFGGLYDFGFLLKMLDGGRPLPETAEGFASRLRGHLGVVYDAKYVAARLPMDGVELRGGLVRVARVLGAPAAAVEEPRQAGEKSLVASQVFIRMTGLFFAYHDVAVHAGKIDGLE

SEQ ID NO: 200783 - protein, 112 aa, Oryza sativa
  unsure (1)..(112): unsure at all Xaa locations
  Clone ID: PAT_MRT4530_96219C.1.pep
MSISASPSAVPLAEYAEHLSNLVAIPSLSHEHQYFLGPIGDSDPIEFIITETNRIPFRLXNPNLGHWKNTFKSWPSLEKRWPAWYKRVSASKQVHWDELGIGQALALTIANS

SEQ ID NO: 200784 - protein, 282 aa, Oryza sativa
  unsure (1)..(282): unsure at all Xaa locations
  Clone ID: PAT_MRT4530_9621C.1.pep
AEDRPPRFPLPSSLSGGAPARRWSPANIGARARPPPSAPARPPSGGPAAARWGGVSRPRPRVRLTRGTHGGDRAAAGSHRPAPWAPRVNCTRGHGRLTAGPHAATARCARRRPRRRGRRETAPAPRWSPPATTGAAEQRPREGREGGKEAAVHGLPRGDGDDGGGGRSGGRRWRGSGRRGRRRSGGRRAKRRGGRGRRGCGEAEGGGAEVGGGPGXRRRRRTGARRRRRRXESDGASSNPARRNGGERRKLTGEVRGGFIXGWKGERAAGGEXNRRGRSGRH

SEQ ID NO: 200785 - protein, 762 aa, Oryza sativa
  Clone ID: PAT_MRT4530_96220C.1.pep
MGDRWGQNLYPYKMFLVFGEEQDFGTNQAYVYYGLREDRYGLCEREFEFMKGSDLRLCERVIGELPQPRSMSLVDLQCWVIKLLRLHPEIQDLQIKGFFSEGLPLEFRPEWFYKGDWETHHMHNDDSWASYVKKVKRRYGMSMFVLCVDCSEIKHYRSLVKAGYGVYAQVGKVADHECMPTEVLPGQKSLSSKFPAQYLSYRLKDEHNMSMTAEEIVPFIADRYGDKISLPEAWRIKMKALEILFGTFYDSYNSVPRLLKDIGYKNYGNYVNIKDTEVVGCKSFRVLDRIFWSPAPCVLAFTYCRPVLCIKGTSLCGKYQPLLLTALALDANDNLIPVAFAIIEGESKESWLWFLRNVKQSVVKERSGICIIHDYKRELLDAIEDLQNNPQEQEPHTWRDIQSRWCIEHLTENLSAHFGGKKSAVLFNKLCQQSQPSKFTDIWKDLDDLTLRYTTENDSVASEEMEQESVEHDEAELESQSPSHQLDSADDEEEVNQGGDSKSKITRFTEWIRLKPLEKWSLLHDTDGARYGIMGINIADIYEGNHVLKGIKCLPLNAIVEVTHQRMAEYFKERSAAAKKAIGNPSMNFPECVQDAMNAKMQKAQIHSVTCMEIKENKYFPGEEVQKFKVQSNQKKVVVQLTSEYTRISRDHARELTKRAECSCNKSKLLHKPCSHVIAVCCQIGVTTADYMSPYYTLPYLDNTWSGNCDVPKFSPDYKIIMPFDKPTWIPDKKLECGLSVFRTSDRVQSVMDEEEQQSSST

SEQ ID NO: 200786 - protein, 115 aa, Oryza sativa
  Clone ID: PAT_MRT4530_96221C.1.pep
FIRAQGQIFSHQDPISHKSIHLQAQNPNSFQERFFSEAMSTAGGGGGCRRVTIRSICCRGVKALAPFQKPSLYATASVAGRREKTSGDPHGREKPDWDADVFHFDLPRRRRWYAA

SEQ ID NO: 200787 - protein, 163 aa, Oryza sativa
  Clone ID: PAT_MRT4530_96222C.1.pep
MESKHNQPANHKGDLPATSSPAPTPQLARRRLIMGEAQAPAAASFSLAQRRGGGLRLPRRVGRRTGDVVGRGGGCSSARTGSGGGGRGLCLRRLRLRWLRRAVWRLAELCVAALSGPLGAGAAAAAPDAPAPWGGGAAVAVDPYAFAAPFVPAVLLKRAGKGY

SEQ ID NO: 200788 - protein, 87 aa, Oryza sativa
  Clone ID: PAT_MRT4530_96223C.1.pep
ASVGLLPAVHRHNSSLYIWDLQMKYSRYAFFLPAAIRQNMFFFSFCLCGLLLLFVSQPFRTSGQHFMSQLSPNYSFDLELITASVHI

SEQ ID NO: 200789 - protein, 89 aa, Oryza sativa
  unsure (1)..(89): unsure at all Xaa locations
  Clone ID: PAT_MRT4530_96224C.1.pep
QHKFIRGSPHRRRSAQLLNKSKTPGFNSALIGPHPNHPYGGGFNGGLIRGGDSPAGRVRLLXDLTGRTCSRGRSSWGPTCSRRSPGGGG

SEQ ID NO: 200790 - protein, 539 aa, Oryza sativa
  unsure (1)..(539): unsure at all Xaa locations
  Clone ID: PAT_MRT4530_96225C.1.pep
ARPHTRLQSGIRVKRIYTDGIVKWGCFTSYDEPRTLNEAFTDKNWKEAMDAEYLALMKNKXMWHLVPPRQGRNIIDXCKWVYKVKRKADGSLDRYKARLVAKGFNQRYGIDYEDTFSLVVKAATIRTVLSIAVSRGWSLHQLDVQNAFLHGVLEEEVYMRQPPGYGDAISPDYVCKLEKALYDLKXAPRAWYSRLSGKLHELGFKSSKADTSLFLYNKGSVKIYLFIYVDDIIVPFVTLLTSIPRXIMQVSQIFECKVLSKILXQGKSSTRHTTDYNYIINIDKQINYDTPFIVKKQGSISHLLSLQGAKPTLPPQSKVTHLGQTSLWLSPPPPLFSTLVTEQRSNVMFIVQXHHVLLTVTILKYRHNIVMMGLXFDKHFFSNIIVQTVFKSSAWEGSRLARGRVVGTRAGEGARLRGAGGRGRGTXSTEAEYKPLANVTAKIMWIQTLLLELGVDAPKAARIWCDNIGAKYLSANTVFHTRTKHIXVDYHFVXERVSRKLLEIEYISSMDQVADGFTRPLAVKQFEDVRVNLNIRSLD

SEQ ID NO: 200791 - protein, 1182 aa, Oryza sativa
  Clone ID: PAT_MRT4530_96226C.1.pep
MAERAIGRRLLSQESSSAARVSPATSAALRDGGKVQGAGSGSLKGHIATKFLAGGVSRCFSEVSGEGPKELIHGGGRLGHLAHPYSRGFGPRLSRQLAHLDRHLKHLWGSNPRELGFRGGWRKEELREVKAAAEEWPRLGIGGGESRWTGTIKGDTRRFEKVVRGRIPAMAQQGGGWRGRFQPRPAFHGRRPLGVEHHGRQGQEGVRAVHPLPGRAEEKRDEQVSAVATKEGSLVQQIKPMQMQEKTEVGITVSNLKQDEAKAEVAASRPPPQANPRHGMNPNSHRIFCVRCKGVGHLVKDCHVAVFCVNCAKPTHKTKDCLYDKQPRPIAKLVRYGAPGLGCILIQNTRSEPAKEHINPLAMISIISGGGLTVAQLEQGFTQQFKWNWIWKAKEIPNGTFQMRFPNRMRFDELSNFDHFTVKGTNVQVNVKEWTQEPEAVGKMHTVWARVTGIPDEMKTYPAPFEVGSNLGLVMEVDMITFRAKGLIRIKVGMMDLEALPLKLILTTPKGLLFQAQYTLEEVVEQGWFREQVFEEDKEAVYTPTKFHRDRDLAMKLQDEEMEKQSARILVQEGNVILSKSKGAGKGSEMSEIPIVEETRAGDGALSSGGTGTLSCLEVMAETELGPRGEEGERVNLGDSEDFLDSQESEGNFAKQVGVVLTEEGIDSQEEDTRRSKRLRDKEDKKPQDMAMERKEAQNAFINKGQASIPSIIDEPNSSLMNIANLLGVSLGCALVDVDSNLHLIKDMENARVNLFMKNQEAILDKTQESKSGDFPELSGLGELYSLEDDVDSELDEIENLIKNIHTSSGKGKRMKGNLDTVKNRPLVVGEDFNILRKESEKNKPRGYNKWSFLFNAIIEQSNLREIEALGMTHKYREDRKELEQKLAYVIREEKWKWFQRSKQSGILFKVDLEKAYDKVNWVFVHRMLVSKGFPDQWCDWIMKVIKGGKVAVKVNDEIGPLFQTHKGLRQGDPLSPLLFNLAAEALTLLVQRAEEHSLLEGLGNNEENKISILQYADDTIFLLPDNLEYARNLKFILCLFEQLSDLKINFHKSEVFCIGEARDRKVLFSQLFTCNIGDLPMRLPTGVKERMDFFRRRLLWQEDQGIRKYHLVQWPVICTPRDQEGLGVLDLDLMNKALLGKWIWKLENEDGWWQEVLRDKYLKKKTMSIQKPKPGDSHFWQ

SEQ ID NO: 200792 - protein, 69 aa, Oryza sativa
  Clone ID: PAT_MRT4530_96227C.1.pep
LNYSSESSSVSLFFCSKGIRSNKLYILLKWERKGFNSESNLFMFKFWPPVYFLKKNEYIKDVVLLKCVV

SEQ ID NO: 200793 - protein, 1507 aa, Oryza sativa
  Clone ID: PAT_MRT4530_96228C.1.pep
MAERAIGRRLLSQESSSAARVSPATSAALRDGGKVQGAGSGSLKGHIATKFLAGGVSRCFSEVSGEGPKELIHGGGRLGHLAHPYSRGFGPRLSRQLAHLDRHLKHLWGSNPRELGFRGGWRKEELREVKAAAEEWPRLGIGGGESRWTGTIKGDTRRFEKVVRGRIPAMAQQGGGWRGRFQPRPAFHGRRPLGVEHHGRQGQEGVRAVHPLPGRAEEKRDEQVSAVATKEGSLVQQIKPMQMQEKTEVGITVSNLKQDEAKAEVAASRPPPQANPRHGMNPNSHRIFCVRCKGVGHLVKDCHVAVFCVNCAKPTHKTKDCLYDKQPRPIAKLVRYGAPGLGCILIQNTRSEPAKEHINPLAMISIISGGGLTVAQLEQGFTQQFKWNWIWKAKEIPNGTFQMRFPNRMRFDELSNFDHFTVKGTNVQVNVKEWTQEPEAVGKMHTVWARVTGIPDEMKTYPAPFEVGSNLGLVMEVDMITFRAKGLIRIKVGMMDLEALPLKLILTTPKGLLFQAQYTLEEVVEQGWFREQVFEEDKEAVYTPTKFHRDRDLAMKLQDEEMEKQSARILVQEGNVILSKSKGAGKGSEMSEIPIVEETRAGDGALSSGGTGTLSCLEVMAETELGPRGEEGERVNLGDSEDFLDSQESEGNFAKQVGVVLTEEGIDSQEEDTRRSKRLRDKEDKKPQDMAMERKEAQNAFINKGQASIPSIIDEPNSSLMNIANLLGVSLGCALVDVDSNLHLIKDMENARVNLFMKNQEAILDKTQESKSGDFPELSGLGELYSLEDDVDSELDEIENLIKNIHTSSGKGKRMKGNLDTVKVTPILVENSISIEMEGICQVTEEDKRRLTEPFSMEEIKRVVFELKQHKAPGPDGIPGEFYKKFWDLIKNDLFELLSDFQKGLLNVERLNYGIITLVPKTKDAAQIQKFRPICLLNVSFKIITKVLMNRIYHVMCYIISKNQSAFLKNRYILEGVVILHEILNSLHHKKQSGILFKVDLEKAYDKVNWVFVHRMLVSKGFPDQWCDWIMKVIKGGKVAVKVNDEIGPLFQTHKGLRQGDPLSPLLFNLAAEALTLLVQRAEEHSLLEGLGNNEENKISILQYADDTIFLLPDNLEYARNLKFILCLFEQLSDLKINFHKSEVFCIGEARDRKVLFSQLFTCNIGDLPMRLPTGVKERMDFFRRRLLWQEDQGIRKYHLVQWPVICTPRDQEGLGVLDLDLMNKALLGKWIWKLENEDGWWQEVLRDKYLKKKTMSIQKPKPGDSHFWQGLMEVKERFYNFCTKKVGDGRSIMFWEDSWLGGRPLAHLFPTLYNITLSKHVSLVEIKNKGWEVIKFRRSLYGSKLRDWNKIKLSVEGIQVEEGVRDKLVWNLTKTGVFSVKSFYNALSVQQIDIPLKKIWSFKIPLKIKIFIWILLRGKNLTKDNLFRRGWRKGDTKCQFCDKQESIQHLFFDCSLVRLIWNIIQCAFDLKTAKDCQHLFGAWLSAFSNKTKNLIVTGIAAVIWAV

SEQ ID NO: 200794 - protein, 350 aa, Oryza sativa
  unsure (1)..(350): unsure at all Xaa locations
  Clone ID: PAT_MRT4530_96229C.1.pep
GRGGRGPPRPRVVGGXSMVSRVAVLAFCVAGIWSAYITQGVLQETLSTKRFGPEARRFDHLAFLNFAQNVVCFVWSFIMIKLWSSGGSSSAGRAPLRKYWGVSITNTVGPAMGIEALKFISYPAQVLAKSSKMIPVMLMGTILYGVKYTFPEYICTFLVAGGVSSFALLKTSSKTIKKLANPNAPLGYTLCFLNLAFDGYTNSTQDLIKSRYPKTNPWDIMLGMNLWGTIYNAVIMFVAPLLFSNWPYANGFEAVRFCQENPEVAWDILLFCLCGAVGQNFIFLTISRFGSLTNTTITTTRKFMSIVISSVISGNPLSLKQWGSVVMVFSGLSLQIFLKWKRKKVRDHKE

SEQ ID NO: 200795 - protein, 3373 aa, Oryza sativa
  unsure (1)..(3373): unsure at all Xaa locations
  Clone ID: PAT_MRT4530_9622C.1.pep
MCSRDDCSEWLGLSNRMPRYKPEYLFGVERFVQELRTMSFAIGFGTAPLYAQIPHDRDEEKCRVKVTLNSNSEDIPSVMFEVGGGNYIHACQEVARIAIGELRDRYSDQLADTEYRYHPRQPQGGDRGSYLETEGIENDATTRHLVEILWAMDETRAEVVLAAQDREDRNRDKICKLEDNVDSIRCKWARPGGGGTLHGSFGPGLGEAGRYMDRLEKELAALKGEAPPQKARVRLTARKRALFVPRYQLAPKVRVVEKEATPTLADPPVVNVSDDEGEESKRTHSKVEWGATQDDGDEPNEPSINSDAGSGDWLHAIEKKLDLLQCTDQEKVSFASHQLHGPASEWWDHFCLNRTTAEPITWLEFTAAFRKTHIPSGVVSLKKKEFKSLTQGSRTVTEYLHEFNRLARYAPEDVRTDEERQERFLEGLNDELSYPLMTGDYHDFQKLVDKAICQEDKYNRMKQKKRRIAHFKAQQGNSQKPRLPLGPQSMPQGGSLSVVRPQRQFFNNNAGNNIRNQAPLPVAAPTQQQPAKKEQGSKPGVCFNCGEPGHYSDKCPKPRRVKVVPAQSNSTAPASKARVNHVAAAKAQGAPDVILGTFLVNSVPATVLFDFGATHSFLSMSFAGNHGMEVEDLRCPLMVSTPSNQALSLQRSPSVRIEIQGVPFLANLILLESKDLDVILGMDWLARYKGVIDCANRKVTLTSNDGRVVTVHALSSEFLRSSLNQIALEEIPIVQEYPDVFPDDLPANELAEVKRQVDDLLQKGYIRPSSSPWGAPVIFVEKKDHTQRMCVDYRALNDVTIKNKYPLPRIDDLFDQLKGATVFSKIDLRSGYHQLRIKEEDIHKTAFTTRYGLFECTVMSFGLTNAPAFFMNLMNKVFMEYLDKFVVVFIDDILIYSRTKEEHEEHLRLALEKLREHQLYAKFSKCEFWLSEVKFLGHVILAGGVAVDPSNVESVTNWKQPKTVSEIRSFLGLAGYYRRFIENFSKIAKPMTRLLQKDVKYKWSEECEQSFQELKSRLISAPILILPDPKKGFQVYCDASKLGLGCVLMQDGKVVAYTSRQLRPHEKNYPTHDLELAAVVHALKIWRHYLFGTRTEVYTDHKSLKYIFTQPDLNMRQRRWLELIKDYDMGIHYHPGKANVVADALSRKGYCNATEGRQLPLELCKEFEILNLGIVSRGFVAALEAKPTLIDQVREAQINDPDIQEIKKNMRRGKAIGYLEDEQGTVWLGERICVPDNKDLKDAILKEAHDTLYSIHPGSTKMYQDLKERFWWASMKREIAEYVAVCDVCQRVKAEHQKPAGLLQPLKIPEWKWEEIGMDFITGLPSTSSGHDSIWVIVDRLTKVAHFIPVKTTYSGSRLAELYMARIVYLHGVPKKIVSDRDEQTERVNQILEDMLRACALDFGGSWDKNLSYAEFSYNNSYQASLQMAPYEALYGRKCRTLLLWDQTGERQVFGTDILREAEEKVKIIQERLRVAQSRHKSYADNRRRDLSFEEGDHVYLRVTPLRGVHRFHTKGKLAPCFVGPYKIINRRGEVAYQLELPQSLAGVHNVFHVSQLKKCLRVPTEEANLEQIEVQEDLTYVEKPIRILETNERRTRNRVIRFCKVQWSNHSEGESTWEREDELKSAHPHLFASSSESISTFPESPFSQEKNLKSSKSSKATPGLEWLIPGLEIELCSRGXGCSEXLGLCNRMPRYKPEYLFGTEGFVQELRTMSFAIGFGTAPLYAQIPHDHDEEKCRVKVTLNSNREDIPSVMFEAGGGNYIHACQEVARIAIGELRDRYSDQLANTEYRYHPLQPQGSDRGSYLEPEGIENDATTRHLVEMLWAMDETRAEIVLAAQDREDRNRGKICKLEDKVDRLEKELAALKGEAPPQKARVRLTAMKRALFVPRYQLAPKMVLTRSNGKGPNINNNNNNNGENPTLAQVLAQQAQLMNMMMQQLQNQQNQGNNHAPPQNKLAEFLRVRPPTFSSTTNPVEAGDWLHAIEKKLDLLQCTDQEKVSFASHQLHGPASEWWDHFRLNRTTAEPISWLEFTAAFRKTHIPSGVVSLKKKEFRSLTQGSRTVTEYLHEFNRLARYAPEDVHTDEERQEKFLEGLNDELSYPLMTGDYHDFQKLVDKAIRQEDKYNRMEQKKRRIAHFKAQQGNSQRPRLTLGPQSMPQGGSSSVVRPQRQFFNNNAGNNIRNQAPRPIAALTQQQPAKKEQGSKPGVCFNCGEPGHYSDKCPKPRCVKVVPVQSNSTAPASKARVNHVAAAEAQGAPDVILGTFPVNSFPAIVLFDSGATHSFLSMSFAGNHGMEVEDLRRPLMVSTPSNQALSLQRSPSVRIEIQGVPFLANLILLESKDLDVILGMDWLARYKGVIDCANRKVTLTSNDGRVVTVHALSSEPLRSSLNQIALEEIPIVQEYPDVFPDDLPGMPPKRDIEFRIDLVPGTTLIHKRPYRMAANELAEVKRQVDDLLQKGYIRPSSSPWGAPVIFVEKKDHTQRMCVDYRALNDVTIKNKYLLPRIDDLFDQLKGATIFSKIDLRSGYHQLRIKEEDIPKTAFTTRYGLFECTVMSFGLTNAAAFFMNLMNKVFMEYLDKFVVVFIDDILIYSRTKEEHEEHLRLALEKLREHQLXAKFSKCEFXLSAVKFLGHVISAGGVAVDPSNVESITNWKQPKTVSEIRSFLGLAGYYRRFIENFSKIAKPMTXLLQKDVKYKWSEECEQSFQELKSRLISAPILILPDPKKGFQVYCDASKLGLGCVLMQDGKVVAYASRQLRPHEKNYPTHDLELAAVVHALKIWRHYLFGTRTEVYTNHKSLKYIFTQPDLNMRQRRWLEFIKDYDMGIHYHPGKTNVVADALSRKGYCNATEGRQLPLELCKEFKRLNLGIVSRGLVAALEAKPTLIDQVREAQINDPDIQEIKKNMRRGKAIGYLEDEQGTVWLGERICVPNNKDLKDAILKEAHDTLYSIHPGSTKMYQDLKERFLWASMKREIAEYLAVCDVCQRVKVEHQKSAGLLQPLKIPEWKWEEIGMDFITGLPRTSSGHDSIWVIVDRLTKVAHFIPVKTTYSGSRLAELYMARIVCLHGVPKKIVSDRGSQFTSKFWKKLQEEMGSKLNFSTAYHPQTDGQTERVNXILEDMLRACALDFGGSWNKNLPYAEFSYNNSYQASLQMAPYEALYGRKCRTPLLWDQTGERRVFGTDILREAEEKVKIIQERLRVAQSRQKSYADNRRRDLSFEEGDHVYLRVTPLXGVHRFRTKGKLAPRFVGPYKVVSRRGEVAYQLELPQSLAGVHNVFHVSQLKKCLRVPTEEANLEQIEIQEDLAYVEKPIRILEWXTDERRTRNRVIRFCKVQWSNHSEEESTWEREDELKSAHPHLFASSSESRGRDSV

SEQ ID NO: 200796 - protein, 54 aa, Oryza sativa
  Clone ID: PAT_MRT4530_96230C.1.pep
VVWPVESSGHVVVKVLGRVRPTVSVVWSVTYREAGSRSNHCALSSSVSPSSVGQ

SEQ ID NO: 200797 - protein, 1756 aa, Oryza sativa
  unsure (1)..(1756): unsure at all Xaa locations
  Clone ID: PAT_MRT4530_96231C.1.pep
MAGHPPNHRREGMIDFVAELARMTLVVGYPNAPEYTTIPPLSGELPHRVRLEVHGYVGTCLANMAVEASGGTADHACQEAAYLMMARLRERHNYIFHDTAYRYHPRRANGDGVSSFRPTAGENDTTFGHMCAVMRGLDRMHSDLHKATKALNDGKLMRIVALKDEIARLKRENAHLKGLPAPGGVRIRTTPRKTTTTPVRIQLAPRNPPPAAAPAAPPVPPVVPAAPAPAPASALSFAPASAARGPASGTGGXHICQAPGVAQRDLMVYTRTGNRTTGEGSNGEERADGVHPNSDSGNGPPPLPENPTLAQVMAHQTQMMAAMMQQMQQQHQQMHQRMMQHVEQQHQHFGPPPPQSKLPEFLHVRPPTFSSTTNPMKANDWLHAIEKKLNLLQCNDQEKVAFATHQLQGPASAWWDNHMATRPPGTEVTWAEFCRSFRKAQVLDGVVAQKKREFRALHQGNRTVTEYLHEFNRLARYAPEDVRTDAEKREKFMAGLDDELTNQLISGDYADFERLVDKAIRQEDQRNKMDRKRKAAQFRAHQGSHQRPRFTPGQQGGPTTMIVRQHRPFNPSNFPQGANGSQNHHGGQPNRGAAPRPPMAPAQSGPSVQAKKETGAKPGSCFNCGELGHFADKCPKPRRAGPRFVQARVNHASAEEAQAAPEVVLGTFPVNSIPATVLFDSGATHSFISKKFVGMHGLRKEELSTPMRVHTPGNSSTLVSFSPSVLIEIQRSPFLANLILLESKDLDVILGMDWLTKFKGVIDCANRTVTLTNEKGEAVVYKSLVSPKQGVSLNQIEAEIPVDTVEKNLRKLEDIPIVCEYPEVFPEDLTTMPPKREIEFRIDLAPGTAPIYKRPYRMAANELAEVKKQVDEQLQKGYIRPSTSPWGAPVIFVEKKDKTKRMCVDYRALNEVTIKNKYPLPRIDDLFDQLKGAKVFSKIDLRSGYHQLRIREEDIPKTAFTTRYGLYECTVMSFGLTNAPAFFMNLMNKVFMEFLDKFVVVFIDDILIYSKSEEEHEQHLRLVLEKLKEHQLYAKFSKCDFWLTEVKFLGHVITAQGYYRRFIENFSRIARPMTQLLKKDEKFKWTAECGKSFEELKKKLVSAPVLILPDQMKDFQVYCDASRHGLGCVLMQEGRVVAYASRQLRPHEGNYPTHDLELAAVVHALKIWRHYLIGNRCEVYTDHKSLKYIFTQPDLNLRQRRWLELIKDYDMSIHYHPGEANVVADALSRKSYCTALCIEGMCEELRQEFEHLNVGIVEHRFVAALEARPTLVDQVRAAQVNDAEIAELKKNMRVGKARNFLEDEHGTIWLGERLCVPDDKELKDLILTEAHQTQYSIHPGSTKMYQDLKEKFWLVSMRREIAEFVALYDVCQRVKAGHQRPAGLLQPLQIPEWKWEEIGMDFITGLPRTSSGHDSIWVVVDRLTKVAHFIPVHTTYTGKRLVELYLSRIMCLHGVPKKIVSDRGSQFTSKFWQKLQEELGTHLNFSTAYHPQTDGQTERVNQILEDMLRACALDFGGAWDKNLPYAEFSYNNSYQASLQMAPFEALYGRKCRTPLFWDQTGERQLFGTEVLTEAEEKVRIIRERLRIAQSRQKSYADNRRRELTFEAGDYVYLRVTPLRGVHRFQTKGKLAPCFVGPYKILERRGEVAYQLELPSNMIGIHDVFHVSQLKKCLRVLEEQADSEHIDIQEDLTYVEKPVRILDTSERRTRNKVTRFCRVQWSHHSEEEATWEREDELKAAHPHLFASSSESRGRDSV

SEQ ID NO: 200798 - protein, 1534 aa, Oryza sativa
  Clone ID: PAT_MRT4530_96232C.1.pep
TTTAPVRIQLAPRNPPPSAAPAAPPVLPAVPAAPAPAPVHMSAPASALSFAPASAARGPASGNGGWLSATPSGSHDLSSSSSSGSESGSSETYLPGSRSRSEGPGFSLQMVYTRNGSRATGEGSNGEERTDGVHPNGDSGNGPPPLPENPTLAQVMAHQTQMMAAMMQQMQQQHHQMHQRMLQHAEQQHQQFGPPPPQSKLPEFLRVRPPTFSSTTNPMEANDWLHAIEKKLNLLQCNDQEKVAFTTHQLQGPASAWWDNHMATRPPGTEVTWAEFCRSFKKAQVPDGVVAQKKREFRALHQGNRTVTEYLHEFNRLARYAPEDVRTDAEKQEKFLAGLDDELTNQLISGDYADFERLVDKAIRQEDQRNKMDRKSNFPQGASGSQNHHGGQPNRGAAPRPPMAPAQSGPSAQAKKETGAKPGSCFNCGELGHFADKCPKPRRAGPRFIQARVNHASAEEAQAAPEVVLGTFPVNSIPATILFDSGATHSFISKKFVGMHGLRKEELSTPMRVHTPGNSSTSVSFSPSVLIEIQRSPFLANLILLESKDLDVILGMDWLTKFKGVIDCANRTVTLTNEKGETVVYKSPDSPKQGVSLNQIEAEIPVDTVEKNLRKLEDIPIVCEYPEVFPEDLTTMPPKREIEFRIDLAPGTAPIYKRPYRMAANELAEVKKQVDEQLQKGYIRLSTSPWGAPVIFVEKKDKTKRMCVDYRALNEVTIKNKYPLPRIDDLFDQLKGAKVFSKIDLRSGYHQLRIREEDIPKTAFTTRYGLYECTVMSFGLTNAPAFFMNLMNKVFMEFLDKFVVVFIDDILIYSKSEEEHEQHLRLVLEKLKEHQLYAKFSKCDFWLTEVKFLGHVITAQGVAVDPSNVESVTKWTPPKTVSQIRSFLGLAGYYRRFIENFSRIARPMTQLLKKDEKFKWTAECDKSFEELKKKLVSAPVLILPDQMKDFQVYCDASRHGLGCVLMQEGRVVAYASRQLRPHEGNYPTHDLELAAVVHALKIWRHYLIGNRCEVYTDHKSLKYIFTQPDLNLRQRRWLELIKDYDMSIHYHPGKANVVADALSRKSYCTALCIEGMCEELRQELEHLNVGIVEHGFVAALEARPTLVDQVRAAQVNDSEIAELKKNMRVGKARDFHEDEHGTIWLGERLCVPDDKELKDLILTEAHQTQYSIHPGSTKMYQDLKEKFWWVSMRREIAEFVVLCDVCQRVKAEHQRPAGLLQPLQIQEWKWEEIGMDFITGLPRTSSGHDSIWVVVDRLTKVAHFIPVHTTYTGKRLAELYLSRIMCLHGVPKKIVSDRGSQFTSKFWQKLQEELGTRLNFSTAYHSQIDEFSYNNSYQASLQMAPFEALYGRKCRTPLFWDQTDERQLFGTEVLAEAEEKVRIIRERLRIAQSRQKSYADNRRRELTFEAGDYVYLRVTPLRGEVAYQLELPSNMIGIHDVFHVSQLKKCLRVPEEQADSEHIDIQEDLTYVEKPVRILDTSERRTRNKVTRFCRVQWSHHSEEEATWEREDELKAAHPHLFASSSESRGRDSV

SEQ ID NO: 200799 - protein, 1806 aa, Oryza sativa
  Clone ID: PAT_MRT4530_96233C.1.pep
MDINMVCMLPMEFCAMDEAEVAQFSLDPKDAVFEKPDESNRHMKPLYLKGHVDGKPVSRMLVDGGAAVNLMPYSLFKKLGREDDELKKTNMILNGFNGEPTEAKGIFSAELTVGNKTVTMGWKLCHVFRPYTVVMAGHPPNHRGEGMIDFVAELARMTLVVGYPNAPEYTTIPPLSGELPHRVRLEVHGYVGTCLANMAVEASGGTADHACQEAAYLMMARLRERHNYIFHDTAYRFHPRRAHGDDVSSFRPTAGENDTTFGHMCTVMRGLDRMHSDLHKATKALNDGKLMRIVALKDEIARLKKENAQLKGLPAPGGVRIRTTPRKRTTAPVRIQLAPRNPVPTAAPAAPPVPPAAPAVPAAPAPAPAFDLSFALASAARGPASGTGGCLFGMVYTRTGNRTTGEGSNGEERVDGVHPNSDSGNGPPPLPENPTLAQVMAHQTQMMAAMMQQMQQQHQQMHQRMMQHAEQQHQQFGPPPPQSKLPEFLREKVAFATHQLQGPASAWWDNHMATRPPGTEVTWAEFCRSFRKAQVPDGVVAQKKREFRALHQGNRTVTEYLHEFNRLARYAPEDVRTDAEKQEKFMAGLDDELTNQLISGDYADFERLVDKAIRQEDQRNKMDRKRKAAQFRAPQGSHQRPRFTPGQQGGPTTMIVRQHRPFNSSNFHQGSSGSQNHHGGQPNRGAAPRPPMAPAQSGPPAQAKKETGAKPGSCFNCGELGHFADKCPKPRRAGPRFIQARVNHASAEEAQTAPEVVLVLFDSGATHSFISKKFVGRYGLRKEELSTPMRVHTPRNSSTSVSFSPSVLIEIQRSPFLANLILLESKDLDVILGMDWLTKFKGVIDCANRTVTLTNEKGETVVYKSPDSPKQGVSLNQIEAEIPVDTVEKNLRKLEDIPIVCEYPEVFPEDLTTMPPKREIEFRIDLAPGTAPIYKRPYRMAANELAEVKKQVDEQLQKGYIRPSTSPWGAPVIFVEKKDKTKRMCVDYRALNEVTIKNKYPLPRIDDLFDQLKGARVFSKIDLRSGYHQLRIREEDIPKTAFTTRYGLYECTVMSFGLTNAPAFFMNLMNKVFMEFLDKFIVVFIDDILIYSKSEEEHEQHLRLVLEKLKEHQLYAKFSKCDFWLTEVKFLGHVITAQGVAVDPSNVESVTKWTPPKTVSQIRSFLGLAGYYRRFIENFSRIARPMTQLLKKDEKFKWTAECDKSFEELKKKLVSAPVLILPDPTKDFQVYCDASRHGLGCVLMQEGRVVAYASRQLRPHEGNYPTHDLELAAVVHALKIWRHYLIGNRCEVYTDHKNYDMSIHYHPGKANVVADALSRKSYCTALCTEGMCEELRQEFEHLNVGIVEHGFVAALEARPTLVDQVRAAQVNDSEIVELKKNMRVGKARDFHEDEHGTIRMGERLCVPDDKELKDLILTEAHQTQYSIHPGSTKMYQDLKEKFWWVSMRREIAEFVALCDVCQRVKAEHQRPAGLLQPLQIPEWKWEEIGMDFITGLPRTSSGHDSIWVVVDRLTKVAHFIPVHTTYTGKRLAELYLARIMCLHGVPKKIVSNRGSQFTSKFWQILQEELGTRLNFSTAYHPQTDGQTERVNQILEDMLRACALDFGGAWDKSLPYAEFSYNNSYQASLQMAPFEALYGRKCRTPLFWDQTGERQLFGIEVLAEAEQKVRIIRERLRIAQSRQKSYADNRRRELTFEAGDYVYLRVTPLRGVHRFQTKGKLAPRFVGPYKILERRGEVAYQLELPSNMIGIHDVFHVSQLKKCLRVPEEQADSEHIDIQEDLTYVEKPVRILDTSERRTRNKVTRFC

SEQ ID NO: 200800 - protein, 208 aa, Oryza sativa
  Clone ID: PAT_MRT4530_96234C.1.pep
MTAETREAAADATAAHGGCGWLAGIAAGMASSAMAQPATSMMSAWSVAGGAGVARQSAQQEVKLVEMETGQVLSEQLRCHTPEVGNAYRIHQAVDSLPQGVLAETLVLGGRGSAVVGLPRRHPCRHVEGRDVDPFGHSLTGDHLRQKWWWWGQHWSCRLGIGFSSFLLGVHPRVGVGKEDRTEMTETETETELTETEKFESALSTNRI

SEQ ID NO: 200801 - protein, 68 aa, Oryza sativa
  Clone ID: PAT_MRT4530_96235C.1.pep
MEEYIDLVAVATINNVQAWRFVLVRKHKNDSGRFGVYCASWGHRERVVAFWVSLDDATRIQVLVPYAG

SEQ ID NO: 200802 - protein, 1483 aa, Oryza sativa
  unsure (1)..(1483): unsure at all Xaa locations
  Clone ID: PAT_MRT4530_96236C.1.pep
NPRPGPAGDATVRAYRTAPAAPPVPPAVPAAPVPAPAFTLSFAPASAARGPASGTGXVYTRTGSRATGEGSNGEERADGVHPNSDSGNGPPPLPENPTLAQVMAHQTQMMAAMMQQMQQQHQQMHQRMMQHAEQQHQQFGPPPPQSKLPEFLRVRPPTFSSTTNPMEANDWLHAIEKKLNLLQCNDQEKVAFATHQLQGPASAWTVTEYLHEFNRLARYAPEDVRTDAEKQEKFMAGLDDELTNQLISGDYADFERLVDKAIRQEDQRNKMDRKRKAAQFRAHQGSHQRPRFTPGQQGGPTTMIVRQHRPFNPSNFHQGTSGSQNHHGGQPNRGAAPRPSVAPAQSGQPAQAKKETGAKPGSCFNCDELGHFADKCPKPRRAGPRFIQARVNHASAEEAQAAPEVVLGTFPVNSIPATVLFDSSATHSFISKKFVGMHGLIREELSTPMRVHTPGNSSTSVQFSPSITIEIQRSPFLANLILLESKDLNVILGMDWLTKFKGVIDCASRTVTLTNEKGETVIETEIPVDTVEKNLRKLEDIPIVCEYPEVFPEDLTTMPPKREIEFRIDLAPGTAPIYKRPYRMAANELAEVKKQVDEQLQKGYIRPSTSPWGAPVIFVEKKDKTKRMCVDYRALNEVTIKNKYPLPRIDDLFDQLNGAKVFSKIDLRSGYHQLRIREEDIPKTAFTTRYGLYECTVMSFGLTNAPAFFMNLMNKVFMEFLDKFVVVFIDDILIYSKSEEEHEQHLRLVLEKLKEHQLYAKFSKCDFWLTEVKFLGHVITAQGVAVDPSNVESVTKWTPPKTVSQIRSFLGLAGYYRRFIENFSRIARPMTQLLKKDEKFKWTAECDKSFEELKKKLVSAPVLILPDQMKDFQVYCDASRHGLGCVLMQEGRVVAYASRQLRPHEGNYPTHDLELAAVVHALKIWRHYLIGNRCEVYTDHKSLKYIFTQPDLNLRQRRWLELIKDYDMSIHYHPGKANVVADALSRKSYCTALCIEGMCEELRQEFEHLNMGIVEHGFVAALEARPTLVDQVRAAQVNDSEIAELKKNMRVGKARDFHEDEHGTIWIGERLCVPDDKELKDLILTEAHQTQYSIHPGSTKMYQDLKEKFWWVSMRREIAEFVALCDVCQRVKAEHQRPAGLLQPLQIPEWKWEEIGMDFITGLPRTSSGHDSIWVVVDRLTKEELGTRLNFSTAYHPQTDGQTERVNQILEDMLRACALDFGGAWDKSLPYAEFSYNNSYQASLQMAPFEALYGRKCRTPLFWDQTGERQLFGTEVLAEAEEKVRIIRERLRIAQSRQKSYADNRRRELTFEAGDYVYLRVTPLRGVHRFQTKGKLAPRFVGPYKILERRGEVAYQLELPSNMIGIHDVFHVSQLKKCLRVPEEQADSEHIDIQEDLTYVEKPAEAQPAARLPPSRGRRQVGPTCRTRLPPPASPARAAAPVTAVTPTPPLFPGNVGNVRACPALSSIPLFFPLAPAPEMAII

SEQ ID NO: 200803 - protein, 1777 aa, Oryza sativa
  Clone ID: PAT_MRT4530_96237C.1.pep
MAGHPPNHRGEGMIDFVAELARMTLVVGYPNAPEYTTIPPLSGELPHRVSLEVHGYVGTCLANMAVEASGGTADHACQEAAYLMMARLRERHNYIFHDTAYRFHPRRANGDDVSSFRPTAGENDTTFGHMCAVMRGLDRMHSDLHKATKALNDGKLMRIVALKDEIARLKRENAQLKGLPAPGGVRIRTTPRKTMTAPVRIQLAPRNPPPAAAPAAPPVPPAVPAAPAPAPASALSFAPASAARGPASGTGGCLFGMVYTRTGTRTIGEGSNGEERADGVHPSSDSGNGLPPLPENPTLAQVMAHQTQMMAAMMQQMQQQHQQMHQRMMQHAEQQHQQFGPPPPQSKLPEFLRVRPPTFSSTTNPMEANDWLHAIEKKLNLLQCNDQEKVAFATHQLQGPASAWWDNHMATRPPGTEVTWAEFCRSFRKAQVPDGVVAQKKREFRALHQGNRTVTEYLHEFNRLARYAPEDVRTDAEKQEKFMAGLDDELTNQLISGDYADFERLVDKAIRQEDQRNKMDRKRKAAQFRAPQGSRQRPRFTPGQQGGPTTMIVRQYRPFNPSNFPQGASGSQNHHGGQSNRGAAPRPPMAPAQSGPPAQAKKETGAKTGSCFNCGELGHFADKCPKPRRAGPRFIQARVNHASAEEAQAAPEVVLGTFPVNSIPATVLFDSGATHSFISKKFVGRYGLRKEELSTPMRVHTPGNSSTSVSFSPSVLIEIQRSPFLANLILLESKDLDVILGMDWLTKFKGVIDCANRTVTLTNEKGETVAYKSLVSPKQGVSLNQIEAEIPVDTVEKNLRKMEYIPIVCEYPEVFPEDLTTMPPKREIEFRIDLAPGTAPIYKRPYRMAANELAEVKKQVDEQLQKGYIRPSTSPWGAPVIFVEKKDKTKRMCVDYRALNEVTIKNKYPLPRIDDLFDQLKGAKVFSKIDLRSGYHQLRIREEDIPKTAFTTRYGLYECTVMSFGPTNAPAFFMNLMNKVFMEFLDKFVVVFIDDILIYSKSEEEHEQHLRLVLEKLKEHQLYAKFSKCDFWLTEVKFLGHVITAQGVAVDPSNVESVTKWIPPKTVSQIRSFLGLAGYYRRFIENFSRIARPMTQLLKKDEKFKWTAECDKSFEELKKKLVSAPVLILPDQMKDFQVYCDASRHGLGCVLMQEGRVVAYASRQLRPHEGNYPTHDLELAAVVHALKIWRHYLIGNRCEVYTDHKSLKYIFTQPDLNLRQRRWLELIKDYDMSIHYHPGKANVVADALSRKSYCTALCIEGMCEELRQEFEHLNVGIVEHGFVAALEARPTLVDQVRVAQVNDSEIAELKKNMRVGKARDFHEDEHGTIWLGERLCVPDDKELKDLILTEAHQTQYSIHPGSTKMYQDLKEKFWWVSMRREIAEFVALCDVCQRVKAEHQRPAGLLQPLQIPEWKWEEIGIYFITGLPRTSSGHDSIWVVVDRLTKVAHFIPVHTTYTGKRLAELYLSRIMCLHGVPKKIVSDRGSQFTSKFWQKLQEEMGTRLNFSTAYHPQTDGQTERVNQILEDMLRACALDFGGAWDKSLPYAEFSYNNNYQASLQMAPFEALYGRKCRTPLFWDQTGERQLFGTEVLAEAEEKVRIIRERLRIAQSRQKSYADNRRRELTFEVGDYVYLRVTPLRGVHRFQTKGKLAPRFVGPYKILERRGEVAYQLELPSNMIGIHDVFHVSQLKKCLRVPEEQADSEHIDIQEDLTYVEKPVRILDTSERRTRNKVTRFCRVQWSHHSEEEATWEREDELKAAHPHLFTSSSESRGRDSV

SEQ ID NO: 200804 - protein, 168 aa, Oryza sativa
  Clone ID: PAT_MRT4530_96238C.1.pep
TPPSASRPPTPMLRNHARLPPQTSPLRLPPVAHCCRSPSASSRTPRPPPLCSAQAQSRRLPAACHRHSHARPLTPPSACCSRAPSPAASRTLRPRVSAAFHRLQPPTPPLRLLRPHAAARPLRSPTPPLSPPRPGRQPPSLCPLAVRSASLNGRMMRVEILQKDPLHC

SEQ ID NO: 200805 - protein, 1422 aa, Oryza sativa
  unsure (1)..(1422): unsure at all Xaa locations
  Clone ID: PAT_MRT4530_96239C.1.pep
MVYTRNGTRTTGEGSNGEERTDGVHPNSDSDNSPPPLPENPTLAQVMAHQTQMMAAMMQQMQQQHQQMHQRMQQHAEQHHQQFGPPPPQSKLPEFLRVRPPTFSSTTNPMEANDWVHAIEKKLNLLQCNDQEKVAFATHQLQGPASARWDNHMATRPPGTEVTWAKFCRSFRKAQKQEKFLAGLDDELTNQLISGDYADFERLVDKAIRQEDQRNKMDRKRKAAQFRSSQGNHQRPRFTPGQQGGPTTMIVRQHRPFNSSNFHQGASGSQNHHGGQPHRGVAPRPLVAPAQSAPPAQAKKETRTKPGSCFNCGELGHFADKCPKPRRAGPRFVQARVNHASAEEAQAAPEVVLGTFPVNSIPATVLFDSGATHSFISKKFVGMYGLRKEELSTPMRVHTPGNSSTSVSFSPSVLIEIQRLPFLANLILLESKYLDVILGMDWLTKFKGVIDCANRTVTLTNEKGETVVYKSLAPPKQGVSLNQIEMEVPVVTEEKNLKKLEDIPIVSEYPEVFPEDLTTIPPKREIEFRIDLAPGTAPIYKRPYRMAANELAEVKKQVDEQLQKGYIRPSTSPWGAPVIFVEKKDKTKRMCVDYRALNEVTIKNKYPLPRIDDLFDQLKGAKLRIREEDIPKTAFTTRYGLYECTVMSFGLTNAPAFFMNLMNKVFMEFLDKFVVVFIDDILIYSKSEEEHEQHLRLVLEKLKEHQLYAKFNKCDFWLTEVKFLGHVITAQGVAVDPSNVESVTKWTPPKTVSQIRSFLGLAGYYRRFIENFSRIARPMTQLLKKDEKFKWTAECDKSFEELKKKLVSAPVLILPDPTKDFQVYCDASRHGLGCVLMQEGRVVAYASRQLRPHEGNYPTHDLELAAVVHALKIWRHYLIGNRCEIYTDHKSLKYIFTQPDLNLRQRRWLELIKDYDMSIHYHPGKANVVADALSRKSYCTALCIEGMCEELRQEFGHLNVGIVEHRFVAALEARPTLVDQVRAAQVNDPEIAELKKNMRVGKARDFLEDEHGTIWMVERLCVPDDKELKDLILTEAHQTQYSIHPGSTKMYQDLKEKFWWVSMRREIAEFVALCDVCQRVKAEHQRPAGXHFIPVHTTYXGKRLAELYLARIMCLHGVPKKIVSDRGSQFTSKFWQKLQEELGTRLNFSTAYHPQTDGQTERVNLILEDMLRACALDFGGAWDKSLPYAEFSYNNSYQASLQMAPFEALYGRKLYTAICALFWDQTGERQLFGTEVLAEVEEKVRIIRERLRIAQSRQKSYADNRRRELTFEEGDYVYLRVTPLRGVHHFQTKGKLAPRFVGPYKILERRGEVAYQLELPSNMIGIHDVFHVSQLKKCLRVPEEQVDSEHIDIQEDLTYVEKPVRILDTSERRTRNKVTRFCRVQWNHHSEEEATWEREDELKAAHPHLFTSSSESRGRDSV

SEQ ID NO: 200806 - protein, 384 aa, Oryza sativa
  unsure (1)..(384): unsure at all Xaa locations
  Clone ID: PAT_MRT4530_9623C.1.pep
MNRVPTSWGFVYSRVNKPGERSARTGSTGVGPTRQPLGPRWTGCTRLTPAGAVGPTRQPHPRARAADGRAPHGSRGAHPKAATPAXPTGGGAPAPRWSPPVTTGAAERRPREGREGGSETAVHGSPRVDGGDGNDDRSGGRRRRGSGRRGRRRSGGRRAKRRGGRGRRGCGEPEEGDAETGGGPGRRRRWTGARRRRRRERATSRAQIRRRGRAARGGTGRKRHGERLYSVGRGRERPEGKKTGAAISGSINGASEVCGSGFQPNPRERGREKWGERERESRGVISPSLLRAGTAGGGGIRGGGGARARARRRERREDRDDRWAPPVSEGGGRARPSAARARGEAEWAAGRRREREGDGPSRPKRGKGGGEKRLFRAFLFIKPF

SEQ ID NO: 200807 - protein, 72 aa, Oryza sativa
  Clone ID: PAT_MRT4530_96240C.1.pep
AVCRAILMCTHAKLGGKYPITSPSHTRCYEGACANDGLRYGGNLGAVVARDVANRVCHTEHDYRLRPMLHQL

SEQ ID NO: 200808 - protein, 1435 aa, Oryza sativa
  unsure (1)..(1435): unsure at all Xaa locations
  Clone ID: PAT_MRT4530_96241C.1.pep
IAGHPPNHHGEGMIDFVAELARMTLVVGYPNAPEYTTVPPLSGELPHRVRLEVHGYVGTCLANMVVEASGDTADHACQEAAYLMMAKLRERHNYIFHDTAYRFHPRRASGDDVSTFRPTAGDNDTTFGHMCAVMRGLDRMHSDLHKASKALNDGKLMRIVTLKDKIARLKRENAQLKGLPAPGGVRIRTTPRKSTTTPVCIQLAPRNPPPSAAPAAPPVPPTAPAVPAAPAPAPALVPVSAPASALSFAPALAVRVPASGNGGWLPATPSGSRDLSSSSSSGSEPGSGETYLPGSRSRSEGPGLFLQMVYTRNGSRTTGEGSNGEERADGVHPNSDSGNGPPPLPENPTLAQVMAHQTQMMAAMMQQMQHQHQQMHQRMLQHAEQQHQQFGPPPSQSKLPEFLRVRPPTFSSTTNPMEANDWLHAIEKKLNLLQCNDQEKVAFATHQLQGPASAWWDNHMATRPPGTEVTWAEFCRSFRKAXVPDGVVAQKKREFQALHQGNRTVTEYLHEFHRLARYAPEDVRTDAEKQEKFMAGLDDELTNQLISGDYADFERLVDKAIRQEDQQNKMDGKRKAAQFRSNQGNHQRLRFAPGQQGGPTTMIICQYRPFNSSNFHQGASGSQNHHGGQPNRGAAPRPPVAPAQSGPSAQAKKETGTKPGSCFNCGELGHFADKCPKPRRAGPRIVQARVNHASAEEAQAAPEVVLGTFLVSSIPATVLFDSGATHSFISKKFVGMHGLRKEELNTPMRVHTLGNSSTSVSFSPSVLIEIQRSPFLANLILLESKDLDVILGMDWLTKFKGVIDCANRTVTLTNKKGETVVYKSLVSPKQRVSLNQIEAEIPVVTEEKNPRKLEEIPIVCEYPEVFPEDLTTMPPKREIEFRIDLAPGTAPIYKRPYRMAANELAEVKKQVDEQLQKGYIRPSTLPXGAPVIFVEKKDKTKRXVDYRALNEVTIKNKYPLPRIDDLFDQLKGAKVFSKIDLRSGYHQLRIREEDIPKTAFTTRYGLYECTVMSFGLTNAPAFFMNLINKVFMEFLDKFVVVFIDDILIYSKSEEEHEQHLRLVLEELKEHQLYAKFSKCDFWLSEVKFLGHVITAQGVAVDPSNVESVTKWTPPKTXSQIRSFLELAGYXRRFIENFSRIARPMTQLLKKDEKFKWTAECDKSFEELKKKLVSAPVLILPDQMKDFQVYCDASRHGLGCVLMQEGRVVAYASRQLCPHEGNYPTHDLELAAVVHALKIWRHYLIGNRCEVYTDHKSLKYIFTQPDLNLRQQKWLELIKDYDMSIHYHQGKANVVADALSRKSYYTALCIEGMCEELRQEFEHLNVAIVEHGFVAVLEARPTLVDQVRAAQVNDPEIAELKKNMRVGKARDFHEDEHGTIWLGERLCVPEEQANSEHIDIQEDLTYVERPVRILETSERRTRNKVTRFCRVQWSHH

SEQ ID NO: 200809 - protein, 89 aa, Oryza sativa
  Clone ID: PAT_MRT4530_96242C.1.pep
ILLPFKIMPYIFLKAKNRANKNESIYRGDLCRCCCCFLQFSIPAEAGQMHLEDNLKLIRSCQYEYPCNVSKRINNISADYFLCVACYGV

SEQ ID NO: 200810 - protein, 1112 aa, Oryza sativa
  unsure (1)..(1112): unsure at all Xaa locations
  Clone ID: PAT_MRT4530_96243C.1.pep
MIVRQHRPFNSSSFHQGASGSQNHQGGQPNCSAAPRPPTAPAQSAPSAEAKKETGTKPGSCFNCGEHGHFADKCPKPRRAGPRFVQAHVNHASAEEAQPAPEVVLGTFPINSVPATVLFDSGATHSFISKKFVGIHGLRKEELSTPMRVHTPGNSSTLVSYSPSVLIEIHRSRFLANLILLESKDLDVILGMDWMTKFKGVIDCANRTVTLTNEKGETVVYKSPVSRKQGISLNQIEVENPVAIEEKSSRKLEDISIVCEYPEVFPEDLTTMPPKREIEFRIDLAPGTAPIYKRPYRMVANELAEVKKQVDEQLQKGYIRPSTSPWGAPVIFVQKKDKTKRMCVDYRALNEVTIKNKYPLPRIDDLFEQLKGAKVFSKIDLRSGYHQLRIREEDISKTAFTTRFGLYECTVMSFGLTNAPAFFMNLMNKVFMEFLDKFVVVFIDDILIYSKSEEEHEQHLRLVLEELKEQQLYAKFSKCDFWLSEDKFLGHVITAQGIAVDPANVESVTKWTPPKTVSQIRSFLGLAGYYRRFIEIFSRIARPMTQLLKKDEKFKWTAECDKSFEELKKKLVSAPVLILPDQTKDFQVYCDASRHGLGCVLMQEGRVVAFASRNRCEVYTDHKSLKYIFTQPDLNLRQRRWLELIKDYDMSIHYHPGKANVVADALSRKSYCNALCTEGMCKELQQELERLNMGIVEHGFVAALEARPTLVDQVRAAQVNDPEIAELKKNMRVRKARDILEDEHGMIWMGERLCVPDDKELNDLILTEAHQTQYSIHPGSTKMYQDLKEKFWWASMKREIAEFVALCDVCQRVKAEHQRPAGLLQPLQIPEWKWEEIGMDFITGLPRTSSGHDSIWVVVDRLTKVAHFIPVHTTYTGKXFSYNNSYQASLHMAPFKALYGWKCXRSIVRPLFWDQTGERQLFGTEVLTEAEEKVRTVRERLRIAQSRQKSYADNLRRELTFEAGDYVYLRVTPLRGVHRFQTKGKLAPRFVGPYRILERRGEVAYQLELPSNMIGIHDVFHVSQLKKCLRVPEEQADSEHINIQEDLTYVEKPVRILETSERRTRNKVTRFCRVQWSHHSDEEATLEREDELKAAHPHLFTSSSESRGRDSV

SEQ ID NO: 200811 - protein, 56 aa, Oryza sativa
  Clone ID: PAT_MRT4530_96244C.1.pep
MEVGQGQEQINCKHAKDNTSAFKVHGNKKTTKEQCTKTATPIPRSLVYERDAQGTK

SEQ ID NO: 200812 - protein, 83 aa, Oryza sativa
  unsure (1)..(83): unsure at all Xaa locations
  Clone ID: PAT_MRT4530_96245C.1.pep
GLSHLILALLHVQLRIETKGNPKHDFPSKENSKPDETDSGSDXLPVRPATHRRSDRPTGGGLTDQRTAVRPAISEENRQTSKL

SEQ ID NO: 200813 - protein, 1668 aa, Oryza sativa
  Clone ID: PAT_MRT4530_96246C.1.pep
MDEVGRRWTFSRANEGYTGCGPAIFPVATDLHKATKALNDGKLMRIVALKDEVARLKKENAQLKGLPAPGGVRIRTTPRKRTTAPVRIQLAPRNPPPPAAPAAAPVPPAVPAAPAPAPAFTLSFAPASAARGSASGTGGCLFGGQSAMVYTRTGSRATGEGSNGEERADGVHPNGDSGNGPPPLPENPTLAQVMAHQTQMMAAMMQQMQQQHQQMHQRMMQHAEQQHQQFGPPPPQSKLPEFLRVRPPTFSSTTNPMEVNDWLHAIEKKLNLLQCNDQEKVAFATHQLQGPASAWWDNHMATRPPGTEVTWAEFCRSFRKAQVPDGVVAQKKREFRALHQGNRTVTEYLHEFNRLARYAPEDVRTDAEKQEKFMAGLDDELTNQLISGDYADFERLVDKAIRQEDQRNKMDRKRKAAQFRSNQGSQHRPRFTPGQQGGPTTMIVRQHRPFNSSNFHQGTSGSQNHQGGQPNRGAAPRPPMAPAQSAQPAQAKKETGAKPGSCFNCGELGHFADKCPKPRRAGPRFIQARVNHASAEEAQAAPEVVLGTFPVNSIPATVLFDSGATHSFISKKFVGMYGLRKEELSTPMRVRTPGNSSTSVSFSPSVLIEIQRSPFLANLILLESKDLDVILGMDWLTKFKGVIDCASRTVTLTNEKGETVVYKSPGSPKQGVSLNQIETEIPVDTVGKNLRKLEDIPIVCEYPEVFPEDLTTMPPKREIEFRIDLAPGTAPIYKRPYRMAANELAEVKKQVDEQLQKGYIRPSTSPWGAPVIFVEKKDKTKRMCVDYRALNEVTIKNKYPLPRIDDLFDQLKGAKVFSKIDLRSGYHQLRIREEDIPKTAFTTRYGLYECTVMSFGLTNAPAFFMNLMNKVFMEFLDKFVVVFIDDILIYSKSEEEHEQHLRLVLEKLKEHQLYAKFSKCDFWLTEVKFLGHVITAQGVAVDPSNVESVTKWTPPKTVSQIRSFLGLAGYYRRFIENFSRIARPMTQLLKKDEKFKWTAECDKSFEELKKKLVSAPVLILPDPTKDFQVYCDASRHGLGCVLMQEGRVVAYASRQLRPHEGNYPTHDLELAAVVHALKIWRHYLIGNRCEVYTDHKSLKYIFTQPDLNLRQRRWLELIKDYDLSVHYHPGKANVVADALSRKSYCTALCIEGMCEELRQEFEHLNMGIVEHGFVAALEARPTLVDQVRAAQVNDPEIAELKKNMRVGKARDFHEDEHGTIWMGERLCVPDDKELKDLILTEAHQTQYSIHPGSTKMYQDLKEKFWWVSMRREIAEFVALCDVCQRVKAEHQRPAGLLQPLQIPEWKWEEIGMDFITGLPRTSSGHDSIWVVVDRLTKVAHFIPVHTTYTGKRLAELYLARIMCLHGVPKKIVSDRGSQFTSKFWQKLQEEMGTRLNFSTAYHPQTDGQTERVNQILEDMLRACALDFGGAWDKSLPYAEFSYNNSYQASLQMAPFEALYGRKCRTPLFWDQTGERQLFGTEVLAEAEEKVRIIRERLRIAQSRQKSYADNRRRELTFEAGDYVYLRVTPLRGVHRFQTKGKLAPRFVGPYKILERRGEVAYQLELPSTMIGIHDVFHVSQLKKCLRVPEEQANSEHIDIQEDLTYVEKPVRILDTSERRTRNKVTRFCRVQWSHHSEEEATWEREDELKAAHPYLFTSSTESRGRDSV

SEQ ID NO: 200814 - protein, 96 aa, Oryza sativa
  Clone ID: PAT_MRT4530_96247C.1.pep
MAVQETTSRPAGGESVEERPRGGELDAREVELDEPIADGEAVVEAELGRVCVHGRRGLAVVGDQALDKGPEAKRRQWRSGELLAGALLRAAVAVLD

SEQ ID NO: 200815 - protein, 1777 aa, Oryza sativa
  Clone ID: PAT_MRT4530_96248C.1.pep
MAGHPPNHRGEGMIDFVAELARMTLVVGYPNAPEYTTIPPLSGELPHRVRLEVHGYVGTCLANMAVEASGGTADHACQEAAYLMMARIRERHDYIFHDTAYRYHPRRAHGDGVSSFRPTAGENDTTFGHMCAVMRGLDRMHSDLHKATKALNDGKLMRIVALKDEIARLKKENAQLKGLPAPGGVRIRTTPRKTTTAPVRIQLAPRNPPPPAAPAAPSVPPAVPAAPAPAPAFTLSFAPASAARGSASGTGGCLFGMVYTRNGSRATGEGSNGEERADGVHPNSDSGNGPPPLPENPTLAQVMAHQTQMMAAMMQQMQQQHQQMHQRMMQHAEQQHQQFGPPPPQSKLPEFLRVRPPTFSSTTNPMEANDWLHAIEKKLNLLQCNDQEKVAFATHQLQGPASAWWDNHMATRPPGTEVTWAEFCRSFRKAQVPDGVVAQKKREFRALHQGNRTVTEYLHEFNRLARYAPEDVRTDAEKQEKFMAGLDDELTNQLISGDYADFERLVDKAIRQEDQRNKMDRKRKAAQFRAHQGSHQRPRFTPGQQGGPTTMIVRQHRPFNPSNFHQGTSGSQNHHGSQPNRGAAPRPSVAPAQSGQPAQAKKETGAKPGSCFNCGELGHFADKCPKPRRAGPRFIQARVNHASAEEAQAAPEVVLGTFPVNSIPATVLFDSGATHSFISKKFVGMHGLIREELSTPMRVHTPGNSSTSVQFSPSITIEIQRSPFLANLILLESKDLDVILGMDWLTKFKGVIDCASRTVTLTNEKGETVVYKSLVSPKKGVSLNQIETEIPVDTVEKNLRKLEDIPIVCEYPEVFPEDLTTMPPKREIEFRIDLAPGTAPIYKRPYRMAANELAEVKKQVDEQLQKGYIRPSTSPWGAPVIFVEKKDKTKRMCVDYRALNEVTIKNKYPLPRIDDLFDQLKGAKVFSKIDLRSGYHQLRIREEDIPKTAFTTRYGLYECTVMSFGLTNAPAFFMNLMNKVFMEFLDKFVVVFIDDILIYSKSKEEHEQHLRLVLEKLKEHQLYAKFSKCDFWLTEVKFLGHVITAQGVAVDPSNVESVTKWTPPKTVSQIRSFLGLAGYYRRFIENFSRIARPMTQLLKKDEKFKWTAECDKSFEELKKKLVSAPVLILPDPTKDFQVYCDASRHGLGCVLMQEGRVVAYASRQLRPHEGNYPTHDLELAAVVHALKIWRHYLIGNRCEVYTDHKSLKYIFTQPDLNLRQRRWLELIKDYDMSIHYHPGKANVVADALSRKSYCTALCIEGMCEELRQEFEHLNMGIVEHGFVAALEARPTLVDQVRAAQVNDSEIAELKKNMRVGKARDFHEDEHGTIWMGERLCVPDDKELKDLILTEAHQTQYSIHPGSTKMYQDLKEKFWWVSMRREIAEFVALCDVCQRVKAEHQRPAGLLQPLQIPEWKWEEIGMDFITGLPRTSSGHDSIWVVVDRLTKVAHFIPVHTTYTGKRLAELYLSRIMCLHGVPKKIVSDRGSQFTSKFWQKLQEEMGTRLNFSTAYHPQTDGQTERVNQILEDMLRACALDFGGAWDKSLPYAEFSYNNSYQASLQMAPFEALYGRKCRTPLFWDQTGERQLFGTKVLAEAEEKVRIIRERLRIAQSRQKSYADNRRRELTFEAGDYVYLRVTPLRGVHRFQTKGKLAPRFVGPYKILERRGEVAYQLELPSNMIGIHDVFHVSQLKKCLRVPEEQADSEHIDIQEDLTYVEKPVRILDTSERRTRNKVTRFCRVQWSHHSEEEATWEREDELKAAHPHLFTSSSESRGRDSV

SEQ ID NO: 200816 - protein, 107 aa, Oryza sativa
  Clone ID: PAT_MRT4530_96249C.1.pep
MDLLHHKPNRRYNFRSWAYTTQKTSLMGEDRQPFKSCSPIINYRCGTKPNNLPRHTSGPTISPVTSTHVTPKTCYLGLGPNNLPRYVNPYDPWKLFRVPNLGSDTTC

SEQ ID NO: 200817 - protein, 241 aa, Oryza sativa
  Clone ID: PAT_MRT4530_9624C.1.pep
MVLYADPPPPIKPPEIKIKELPAAATRHAAMMEQKTRLHAIERHRSCEVSQAILSEVENRHQHQTLEPIKSPISGCSPSVESTTDTNTVHRHTVADAAWEALKKSIVHFRGQPIGTVAAIDKSQGALNYDQVFMRDFVPSALAFLMKGEPTIVKNFLLETARLQLREKMVDLFKLGQGVMPASFKVHHCNSKHKTESLLADFGETAIGRVAPVDSGLWWIILLHAYTIWTRDNSLAESPEC

SEQ ID NO: 200818 - protein, 129 aa, Oryza sativa
  Clone ID: PAT_MRT4530_96250C.1.pep
MEKYHSNSRFAPFRDAPFALRGALGSSGSSFSSIDSLRRSSTLEQARGYTSRPLGAVRPKMLPSGCRPLHTSHPLSAPVANRPLSPHLPLKKPQLSATFSISHRIFGAALGAAIISIPLATKFSLMFDV

SEQ ID NO: 200819 - protein, 110 aa, Oryza sativa
  Clone ID: PAT_MRT4530_96251C.1.pep
MASCLVASAAACRAARAAVARHDAAAASRAARLAEAAACRAARLAAAADVSDRLSIRYSSEPPDEAVSYKLKRDHAEMARRFETFKSKHADFGDHRKKKRLQWSGFHLPG

SEQ ID NO: 200820 - protein, 128 aa, Oryza sativa
  Clone ID: PAT_MRT4530_96252C.1.pep
MEKYHSNSRFAPFRDAPFALRALGSSGSSFSSIDSLRRSSTLEQARGYTSRPLGAVRPKMLPSGCRPLHTSHPLSAPVANRPLSPHLPLKKPQLSATFSISHRIFGAALGAAIISIPLATKFSLMFDV

SEQ ID NO: 200821 - protein, 441 aa, Oryza sativa
  Clone ID: PAT_MRT4530_96253C.1.pep
MAHDGAAAAATLLASSGDNDDKPRRRRNMYAFGCATLASMTTILMGYNLALMSGGQLFVREDMALRDAEIEVLTGSMNVFMLVSILAAGWAADVLGRRGTLVLANAFLMAGALAMSLGATYAALMAARFVTSVGVGFSLVVAPVYNAEISPASARGVVSTLFEMFVNVGILLGYSPRWLAMRGRHADARAVLVRTSDSVEEAELRLEEIKHAAEAPPQEDGGGVWRELLLRPTAMVRRILTCVVGLQFFQQASGVNVVVLYSPVVFKKAGMASNTSVLGATVAVGVAKTCSILVATLFSDRLGCRPLLLASTGGMAVTLTSLALTLRVAPPSAASAAACVASVVAFVAAFSAGLGPMTAAYTAEVLPLRLRAQGASLGIVVNRLTCGVMSMTFISVAGGITMVGFFFLYAGVAAAACVFVHARLPETRGRSLEDMDALFHK

SEQ ID NO: 200822 - protein, 105 aa, Oryza sativa
  unsure (1)..(105): unsure at all Xaa locations
  Clone ID: PAT_MRT4530_96254C.1.pep
MGDSIKGKGTIRGVSAVNAFYELLSQDSLSVMHPEANRSVAPVEMCPILKALYKILIKRELPXDSILQAIRDETMYDPRERIEMAQGHSLYRPSLLGQPKGDAKA

SEQ ID NO: 200823 - protein, 75 aa, Oryza sativa
  unsure (1)..(75): unsure at all Xaa locations
  Clone ID: PAT_MRT4530_96255C.1.pep
MAFDVVDAEGLPETSPGEGAERFERHESFAEWRRRMEDGXCQPLPPVPPHRDGSLLPAAAAVPLVLPLPRAAAAL

SEQ ID NO: 200824 - protein, 86 aa, Oryza sativa
  Clone ID: PAT_MRT4530_96256C.1.pep
GPHDVSGNVTSGGGWGVHRFGRACSPANDGATTRTEGTRTDGKGADKDGGDLATTMATSPSDDDDRNDGEARLERRRQLRLEVTRR

SEQ ID NO: 200825 - protein, 62 aa, Oryza sativa
  Clone ID: PAT_MRT4530_96257C.1.pep
MSEQSMEYSTELGKRGCHDGPRYILERTDRKHVWLILAEYESRSKGGAAATNITMSEKGIPT

SEQ ID NO: 200826 - protein, 52 aa, Oryza sativa
  Clone ID: PAT_MRT4530_96258C.1.pep
MAAKAGNTATAKPHVFISRQTAGIHGGALNGRRIPGVVCLGQDSLRNKRPGM

SEQ ID NO: 200827 - protein, 65 aa, Oryza sativa
  Clone ID: PAT_MRT4530_96259C.1.pep
KFDNGNSIALPSGQVSAMPGLIGKGAKWREGDWMCSNCNNHNYASRAFCNRCKTQKEASVHPGVL

SEQ ID NO: 200828 - protein, 220 aa, Oryza sativa
  Clone ID: PAT_MRT4530_9625C.1.pep
TVSFVSVRKSSQASSFVQQRARRGMVCIIGGDATILVRVSGSVQDNKLPAESEHLALVSQDWKMDMPDIDIATAESDATDATTVSPTTCTSLYASWDQDQSESQFVSKSKHLKPQTVRHQVFSRPAQLSHHQSQRQQMLPTVVMVFKSGFCKVSNYPWKMYDRAPLRGLFHIEGSTSAAIRVALEEASCKVSEELSRSPGNRLNSKVTKIANLNSSVQDK

SEQ ID NO: 200829 - protein, 62 aa, Oryza sativa
  Clone ID: PAT_MRT4530_96260C.1.pep
EGNWKPGGGRGGKFKERIVFFDKIMLVYVLKLNELIFNFRTVSLLKLYEKMPARVVMVMGAP

SEQ ID NO: 200830 - protein, 287 aa, Oryza sativa
  unsure (1)..(287): unsure at all Xaa locations
  Clone ID: PAT_MRT4530_96261C.1.pep
MTSPTAAAARRSGRLGRRTLTGERRRYGTNGGHQREADGTANTPTTKTTAEKQRTATATRRKRRLPSGCRRRRSSGGFRRLRRGGRGRRRLGDDDGGLPERRRQLERRRSTAEAAAATAKLGHTALELFRRREAKARAATGRGDTGDPFKGARRRRRRPTATATAKETFGLERGKTDPNRTRLRRFPKRFNQRFQRRKGRGDPGDHFPSIDSAGEGKEWPDWKGNGGGGSAAXTRVSARGGRRLXTGGTHLSATARARARXLTGPAGPRREKRGFGPTFGPKPKEDF

SEQ ID NO: 200831 - protein, 106 aa, Oryza sativa
  unsure (1)..(106): unsure at all Xaa locations
  Clone ID: PAT_MRT4530_96262C.1.pep
PCVRSLFIGRGMLLSLAHYSGTCKCLPMGAIHTNTRTTNAGAPVGRDNLGGTEEIYXGGGGEKKIXXIMNYXXXDLVSTXFXGNXRXSIXKARVGLAXTKNLLRLG

SEQ ID NO: 200832 - protein, 286 aa, Oryza sativa
  unsure (1)..(286): unsure at all Xaa locations
  Clone ID: PAT_MRT4530_96263C.1.pep
MTSPTTAAARRRRRLGRRTLAGERRHHGTNGGHQHVEDNAANTPVTKTAAEKERTATATRRKRRLPSGXRRRRCSGGFRRLRRGGRGRRRLGDDDGGLPERRRQLERRRSTAEAAAATAKLGHTALELLRRREAKARAATGRGDTGGPFKGARRRRRRPTATATAKETFGLERGNXDPNRTRFQSFPKRFSRXSKEKKGRGDPGDCFPSTNSTGEGKKRPDLESGGDGSSAAXTRVSARGRRRLTGGPHLSATARSRGRLRTGPDWAEERENGFRPTFGPKPKEDF

SEQ ID NO: 200833 - protein, 92 aa, Oryza sativa
  Clone ID: PAT_MRT4530_96264C.1.pep
MLEREREWEWERGVREAPSRPATDEEAASGARGAASVGRHLCGGGRSSATLRRWLTELGNRRSRRPRGNGCVAIKDEALARRQIHRSKDGIA

SEQ ID NO: 200834 - protein, 148 aa, Oryza sativa
  unsure (1)..(148): unsure at all Xaa locations
  Clone ID: PAT_MRT4530_96265C.1.pep
ARREDSGGPFKGXRRRRRRPTATATAKETRGLERXKADPIRTRIKLIPNRLSQRFQRRKGRGDPGDCFPSNKSAGEGKERPDWKETAAAARRRRARVSARGRRRXPTGGTHLSATARARARXLTGPAGPRREKRGFGPTFGPKPKEDF

SEQ ID NO: 200835 - protein, 286 aa, Oryza sativa
  unsure (1)..(286): unsure at all Xaa locations
  Clone ID: PAT_MRT4530_96266C.1.pep
MTSPTTAAARRRKRLGRRTLAGERRHHGTNGGHQHVEDNAANTPVTKTAAEKERTTTATRRKRRLPSGXRRRRCSGGLRRQRRGGRGRRRLGKHDGGLPERRRRLKRRRRTAGAAAATAKLGHTALELFRRREAKARAATGRGDTGGPFKGARRRRRRPTATATAKETFGLERGKTDPKRTRLRRFPKRFNQRFQRRKGRGDPGDCFPSNKSAGEGKERPDLESGGDGSSAAXTRVSARGRRRLTGGPHLSATARSRGRLRTGPDWAEEREGXFGPTFGPKPKETF

SEQ ID NO: 200836 - protein, 253 aa, Oryza sativa
  unsure (1)..(253): unsure at all Xaa locations
  Clone ID: PAT_MRT4530_96267C.1.pep
MTSPTTAAARRRRRLGRRTLVGERRHHGTNGGHQHVEDNAANTPVTKTTVEKQRTATATRRKRRLPSGCRRRRSSGGFRRLRRGGRGRRRLGDDDGGLPEXRRQLERRRSTAEAAAATAKLGHTALGLFRRREAKAKVATGRGDTGGPFKGXRRRRRRPTATATAKETFGLERGKTDPNRTRFQSFPKRFNQRFQRRKGRGDPGDRFPSINFTRNGKERPDLEGDGGACARRRPSTLKDNEKQRKTKATTTGA

SEQ ID NO: 200837 - protein, 199 aa, Oryza sativa
  Clone ID: PAT_MRT4530_96268C.1.pep
AGARSGQRWMKAAGMAASAGAKAAAVDSATESVSAASESRVRRGEEVVGGGDGGGRWRVLSWSSREATVDAGAVVPHVGRGGVPARPRSVRQLWRSSVISPPEGIVVPSLPSRTKVLTVSSKVVNDGQKAKRTVIVELRVSVEGIGGREVVSISFRDWDERNRWTVAALGIGMRGRCCIAVSDGGISEILGEMQMRGGT

SEQ ID NO: 200838 - protein, 292 aa, Oryza sativa
  unsure (1)..(292): unsure at all Xaa locations
  Clone ID: PAT_MRT4530_96269C.1.pep
MTSPTAAAARQRRRLGRRTLAGERRHXDANGGHQRVADGTANSPATKATAEDQRTATATRLKRRRSSAXRRRRCFGGLRRQRRGGRGRRRLGDDDGGLPEWRRRLERRRRTAEAAAATAKLGHTVLGLLRRREAKARVAAEREEHGDPFKGARRRRRRPTATATAKETCGLERKKTKPNRTRXQSFPKRFNRRFQRRKGRGDPGDCFPSTNSTGEGKRRPDXWKGNGGGGAXGLRATAAEGGRRXLTGGTHLSAXNARARGRLRTGPDWAEGKRERRXGFGPTFGPKPKEDF

SEQ ID NO: 200839 - protein, 145 aa, Oryza sativa
  unsure (1)..(145): unsure at all Xaa locations
  Clone ID: PAT_MRT4530_9626C.1.pep
GSPPSPAGNGQPPFRAAVNPEADQPDTPADPTPSRPPSPGKGPAPTGGPHSSAAQGASTRWTXPSRPRRHRGPGPRKWSTGPTPWIGPKXSNGHGWRGWGKARLKAGWTNDGARRRGHPRRRPVTAHAGESGAREKSTGAARQGG

SEQ ID NO: 200840 - protein, 290 aa, Oryza sativa
  unsure (1)..(290): unsure at all Xaa locations
  Clone ID: PAT_MRT4530_96270C.1.pep
MTSPTAAAARQLGRLGRRTLAGERRREDANKGHQRVADGTANSPTTKTTAEKQRTATATRKERRLPSGXRRRRCSGGLRRQRRGGRGRRRLGEHDGGLPERRRQLERRRSTAEAAAAKAKLGHTALGLLRRREAKARVAARREEHGDPFKGARRRRRRPTATATAKETRGLERGNPIRIELXFHRFPKRFSRXFQREKGRGDPGDCFPSTNLAGEGKRRPDWKETAAAARRRRARVSARGRRRXLTGGTHLSAAARARARAGGCGLGRLGREEREGGFGPTFGPKPKEDF

SEQ ID NO: 200841 - protein, 41 aa, Oryza sativa
  Clone ID: PAT_MRT4530_96271C.1.pep
MPQLKKLKRENWGNDGCMWMRKKASMPGLIPTELHLYSLLE

SEQ ID NO: 200842 - protein, 290 aa, Oryza sativa
  unsure (1)..(290): unsure at all Xaa locations
  Clone ID: PAT_MRT4530_96272C.1.pep
RHRRRRRSDGGRGRLGRRMLAGERRHEDASEGHRDEAGGTANSPMTKTTAERQRTAPATRRKRRGSSGXRRRRCSGGLRRRRRGGRGRRRDGEHDGGLPERRRRLERRRSLAGAAAATTKLGRTALGRFRRREAKARVAAGREGHGDPFKGARRRRRRPTATATAKETRGLERENPIRIELDSKLSKAIWPKIPKRKKVEEIPESISPQPIRPEKERSGRIERKQRRRLGGGALGFRPEEDDGPDRWDPPVSGCEGARARGRLRTGPTWAGGREREGFWADFRPKAKRRL

SEQ ID NO: 200843 - protein, 46 aa, Oryza sativa
  Clone ID: PAT_MRT4530_96273C.1.pep
GHLIIISASCATYLLCLSESLSTLAYLLVENAYSQVLELQGTGTFF

SEQ ID NO: 200844 - protein, 1565 aa, Oryza sativa
  Clone ID: PAT_MRT4530_96274C.1.pep
MAEHPPNHRGEGMDDFVAELARMTLVVGYPNAPEYTTVPPLSGELPHRVRLEVHGYVGTCLANMVVEASGATADHACQEAAYLMMARLRERHNYIFHNTVYRFHPRRANDSDVSSFRPTAGENDTTFSHASKALNDGKLMRIVALKDEIARLKRENAQLKGLPAPGGVQIRTTPRKSTTAPVRIQLAPRNPPPSAAPAAPPVPPAAPAVPTAPAPAPAPVPVSAPASALSFAPASAVRGPASGNGGWLPATPSGSRDRSSSSSSGIEPGSGETYLPGSRSRSEDLMVYTRTGTRTTGEGSNGEERADGVHPNSDSGNGPPPLPENPTLAQVMAHQTQMMAAMMQQMQQQHQQMHQRMLQHAEQQHRQFGPPPPQSKLPEFLRVRPPTFSSTTNPMEANDWLHAIEKKLNLLQCNDQEKVAFATHQLQGPASAWWDNHMATRPPGTEVTWAEFCRSFRKAQVPDGVVAQKKREFRALHQGNRTVTEYLHEFNRLARYAPEDVRTDAEKQEKFMAGLDDELTNQLISGDYADFERLVDKAIRQEDQRNKMDRKRKAAQFRSNQGNHQRPRFTPGQQGGPTTMIVRQHRPFNSSNFHQGASGSQNHHGGQPNRGAAPRPPVAPAQSGPSAQAKETEAKPGSCFNCGELGHFADKCPKPRRAGPRKEELSTPMRVHTPGNSSTSVNFSPSVLIEIQRSPFLANLILLESKDLDVILGMDWLTKFKGVIDCANRTVTLTNEKGETVVYKSLVSPKQGVSLNQIEMEIPVVTEEKNSRKLEEIPIVCEYPEVFPEDLTTMPPKRKIEFRIDLAPGTAPIYKRPYRMAANELAEVKKQVDEQLQKGYIRPSTSPWGAPVIFVEKKDKTKRMCVDYRALNEVTIKNKYHLPRIDDLFDQLKGAKLRIREEDIPKTAFTTRYGLYECTVMSFGLTNAPAFFMNLMNKVFMEFLDKFVVVFIDDILIYSKSEEEHEQHLRLVLEKLKEHQLYAKFSKCDFWLTEVKFLGHVITAQGVAVDPSNVESVTKWTPPKTVSQIRSFLGLAGYYRRFIENFSRIARPMTQLLKKDEKFKWTAECDKSFEELKKKLVSAPEGRVVAYASRQLRPHEGNYPTHDLELAAVVHALKIWGHYLIGNRCEVYTDHKSLKYIFTQPDLNLRQRRWLELIKDYDMSIHYHPGKANVVADALSRKSYCTALCIEGMCEELRQEFEHLNVGIVEHGFVAALEARPTLVDQVRAAQINDPEIAELKKNMRVGKARDFLEDEHGTIWMGERLCVPDDKELKDLILTEAHQTQYSIHPGSTKMYQDLKEKFWWVSMRREIAEFVALCDVCQRVKAEHQRPAGLLQPLQIPEWKLHTTYTGKRLAELYLARIMCLHGVPKKIVSDRGSQFTSKFWQKLQKELGTRLNFSTAYHPQTDGQTERVNQILEDMLRACALDFGGAWDNSLPYAEFSYNNSYQASLQMAPFEALYGRKCRTPLFWDQTGERQLFGTEVLTEAEEKVRTIRERLRIAQSRQKSYADNRRRKLTFEAGDYVYLRVTPLRGVHRFQTKGKLAPRFVGPYKILERRGKLLIS

SEQ ID NO: 200845 - protein, 141 aa, Oryza sativa
  unsure (1)..(141): unsure at all Xaa locations
  Clone ID: PAT_MRT4530_96275C.1.pep
QYPLHNTIHCSAPSGDQSDGGRPTDGDGDEVETAAVFGLTTATMLRRSPTVAKRRTRTAATWRPRXRPSRATATTGTAAAHGWSDGGDGGARAHGARARRPSVPLSGLASWPEGVNGADEAHPPGPASSHSPSPLTSLLKP

SEQ ID NO: 200846 - protein, 730 aa, Oryza sativa
  Clone ID: PAT_MRT4530_96276C.1.pep
MVFQKRSSLEMESGGGSHVAEMPRVPKSARGKRSIRKKESQGQVMCAFDLLATVAGKLLDEGEGSLGNASSGTPAVDASPKDVRVKQEQCDEEAKHFKNEVMDQDSCNESALVSHIAFQRPVNHHGRKGEDPEGSHAVIEDPKAKSEALDKESSMISCTKAELGCNFAAIADRWSPESVESGAFTGDAAAIAMPATTSGFHKNAPDMYNLLDPMDVDVKPPPLVSSDSTGEMPLYGNKIRRSTSFPRVPKGGAGFTVDRDEDDDDKSSGCTHPSTATNRGFRPNCTAGHSRVKKLLACKHRKVAPARMHKGDLSYSGEHCEIPFTFSFFEEHCIDGTHIQTCLLYSYLSSLILLDVDRKPSFRNKKMYYTRQRTQRSTFKRRKMFDRHSAQVSEEYAKANTKFAARDSHAVSLEANKGTNSTAFQKSQESSDCHVKLRIKSFKVPELLIEIPETATVGSLKKTVLEAVNAILGGGLRVGVLHHGKKVRDDNKTLMQAGISHDEVLDNLGFSLEPNCAPHPSQLSPPEDNEFMETVDTTEPLARIAPADSSSKHGEVDASQELALAPLSANYQGSDHDFVHSPGGMSSPDKASTNSRAIVPVTPADSNAGAIVPANKAKRSPEQGQRRIRRPFSVAEVEALVLAVEKLGTGRWRDVKLRAFDNAKHRTYVDLKDKWKTLVHTASISPQQRRGEPVPQELLDRVLAAQAYWSQQQAKLQPKTPPLAEALLLT

SEQ ID NO: 200847 - protein, 1777 aa, Oryza sativa
  Clone ID: PAT_MRT4530_96277C.1.pep
MAGHPPNHRGEGMIDFVAELARMTLVVGYPNAPEYTTIPPLSGELPHRVRLEVHGYVGTCLANMAVEASGGTADHACQEAAYLMMARLRERHDYIFHDTAYRYHPRRAHGDGVSSFRPTAGENDTTFGHMCAVMRGLDRMHSDLHKATKALNDGKLMRIVALKDEIARLKKENAQLKGLPAPGGVRIRTTPRKTTTAPVRIQLAPRNPPPAAAPAAPSVPPAVPAAPVPAPAFTLSFAPASAARGSASGTGGCLFGMVYTRTGNRTTGEGSNGEERVDGVHPNSDSGNGPPPLPENPTLAQVMAHQTQMMAAMMQQMQQQHQQMHQRMMQHAEQQHQQFGPPPPQSKLPEFLRVRPPTFSSTTNPMEANDWLHAIEKKLNLLQCNDQEKVAFATHQLQGPASAWWDNHMATRPPGTEVTWAEFCRSFRKAQVPDGVVAQKKREFRALHQGNRTVTEYLHEFNRLARYAPEDVRTDAEKQEKFMAGLDDELTNQLISGDYADFERLVDKAIRQEDQRNKIDRKRKAAQFRAPQGSHQRPRFTPGQQGGPTTMIVRQHRPFNPSNFHQGTSGSQNHHGGQPNRGAAPRPSVAPAQSGQPAQAKKETGAKPGSCFNCGELGHFADKCPKPRRAGPRFIQARVNHASAEEAQTAPEVVLGTFPVNSIPATVLFDSGATHSFISKKFVGRYGLRKEELSTPMRVHTPGNSSTSVSFSPSVLIEIQRSPFLANLILLESKDLDVILGMDWLTKFKGVIDCANRTVTLTNEKGETVVYKSLVSPKKGVSLNQIETEIPVDTVEKNLRKLEDIPIVCEYPEVFPEDLTTMPPKREIEFRIDLAPGTAPIYKRPYRMAANELAEVKKQVDEQLQKGYIRPSTSPWGAPVIFVEKKDKTKRMCVDYRALNEVTIKNKYPLPRIDDLFDQLKGAKVFSKIDLRSGYHQLRIREEDIPKTAFTTRYGLYECTVMSFGLTNAPAFFMNLMNKVFMEFLDKFVVVFIDDILIYSKSEEEHEQHLRLVLEKLKEHQLYAKFSKCDFWLTEVKFLGHVITAQGVAVDPSNVESVTKWTPPKTVSQIRSFLGLAGYYRRFIENFSRIARPMTQLLKKDEKFKWTAECDKSFEELKKKLVSAPVLILPDQMKDFQVYCDASRHGLGCVLMQEGRVVAYASRQLRPHEGNYPTHDLELAAVVHALKIWRHYLIGNRCEVYTDHKSLKYIFTQPDLNLRQRRWLELIKDYDMSIHYHPGKANVVADALSRKSYCTALCIEGMCEELRQEFEHLNMGIVEHGFVAALEARPTLVDQVRAAQVNDSEIAELKKNMRVGKARDFHEDEHGTIWMGERLCVPDDKELKDLILTEAHQTQYSIHPGSTKMYQDLKEKFWWVSMRREIAEFVALCDVCQRVKAEHQRPAGLLQPLQIPEWKWEEIGMDFITGLPRTSSGHDSIWVVVDRLTKVAHFIPVHTTYTGKRLAELYLSRIMCLHGVPRKIVSDRGSQFTSKFWQKLQEELGTRLNFSTAYHPQTDGQTERVNQILEDMLRACALDFGGAWDKSLPYAEFSYNNSYQASLQMAPFEALYGRKCRTPLFWDQTGERQLFGTEVLAEAEEKVRIIRERLRIAQSRQKSYVDNRRRELTFEAGDYVYLRVTPLRGVHRFQTKGKLAPRFVGPYKILERRGEVAYQLELPSNMIGIHDVFHVSQLKKCLRVPEEQADSEHIDIQEDLTYVEKPVRILDTSERRTRNKVTRFCRVQWSHHSEEEATWEREDELKAAHPHLFTSSSESRGRDSV

SEQ ID NO: 200848 - protein, 77 aa, Oryza sativa
  Clone ID: PAT_MRT4530_96278C.1.pep
MRYQPSEHFMDAKVVSHMSHDLRASSYYVSKAKSDVADRAALQSNMMQGIGPFNGIAAVGGNYNKVSTVQYGVSRMY

SEQ ID NO: 200849 - protein, 240 aa, Oryza sativa
  Clone ID: PAT_MRT4530_96279C.1.pep
MTSPTTAAARRRRRLGRRTLAGERRHHGTNGGHQHVEDNAANTPVTKTAAEKERTTTATRRKRRLPSGCRRRRRSGGFRRLRRGGRGRRRPDDDDGGLPERRRRLERRRSTAEAAAATAKLGRTALKLFRRREAKARAATGRGDTGGPFKGARRRRRRPTATATAKETFGLERGKTDPNRTRFQSFPKRFNQRFQRRKGRGDPEDHFPSIDSAGEGKERPDLERKRRRRETRVSGGGGRR

SEQ ID NO: 200850 - protein, 300 aa, Oryza sativa
  Clone ID: PAT_MRT4530_9627C.1.pep
MAGVACVLVVGVLWLSAGQSAACDGHPCPTPAGKCPINTVKLGVCADVLDGLIHASTPPKEPCCPLIAGLADLDAAVCVCLAINANLLGLNLDVPVDLSLLLNYCGCKLPAGFNTRGGCWRGGGGQRAAAAPSPPPDPAGGEARQAVAQEGRRRAKGCGSGWRISLPQLVAAWRRQRRRRPRPPLRQIRWEGRRRAPAAGALPKAAAAAAVPSPPPDLAGGETASSRGGQLPGTAAAAAAPSPPLDPAEGEAVGRRRAPAAGGCLEEAAAAHHSGGGRAIAADLKGKKAGGNPREKDEGS

SEQ ID NO: 200851 - protein, 1522 aa, Oryza sativa
  unsure (1)..(1522): unsure at all Xaa locations
  Clone ID: PAT_MRT4530_96280C.1.pep
MVYTRTGTRTTGEGSNGEERADGVHPSSDSGNGPPPLPENPTLAQVMAHQTQMMAAMMQQMQQQHQQMHQRMMQHAEQQHQQFGPPPPQSKLPEFLRVRPPTFSSTTNPMEANDWLHAIEKKLNLLQCNDQEKVAFATHQLQGPASAWWDNHMATRPPGTEVTWAEFCRSFRKAQVPDGVVAQKKREFRALHQGNRTVTEYLHEFNRLARYAPEDVRTDAEKQEKFMAGLDDELTNQLISGDYADFERLVDKAIRQEDQRNKMDRKRKAAQFRAPQGSHQRPRFTPGQQGGPTTMIVRQHRPFNPSNFPQGASGSQNHHGGQSNRGAAPRPPMAPAQSSPPAQAKKETGAKPGSCFNCGELGHFADKCPKPRRAGPRFIQARVNHASAEEAQAAPEVVLGTFPVNSIPATVLFDSGATHSFISKKFVGMYGLRKEELSTPMRVHTPGNSSTSVSFSPSVLIEIQRSPFLANLILLESKDLDVILGMDWLTKFKGGIIDCANRTVTLTNKKGETVVYKSPDSPKQGVSLNQIEAEIPVDTVEKNLRELEDIPIVCEYPEVFPEDLTTMPPKREIEFRIDLAPGTAPIYKRPYRMAANELAEVKKQVDEQLQKGYIRPSTSPWGAPVIFVEKKDKTKRMCVDYRALNEVTIKNKYPLPRIDDLFDQLKGAKVFSKIDLRSGYHQLRIREEDIPKTAFTTRYGLYECTVMSFGLTNAPAFFMNLMNKVFMEFLDKFVVVFIDDILIYSKSKEEHEQHLRLVLEKLKEHQLYAKFSKCDFWLTEVKFLGHVITAQGVAVDPSNVESVTKWTPPKTVSQIRSFLGLAGYYRRFIENFSRIARPMTQLLKKDEKFKWTVECDKSFEELKKKLVSAPVLILPDQMKDFQVYCDASRHGLGCVLMQEGRVVAYASRLLRPHEGNYPTHDLELAAVVHALKIWRHYLIGNRCKVYTDHKSLKYIFTQPDLNLRQRRWLELIKDYDMSIHYHPGKANVVADALSRKSYCTALCIEGMCEELRQEFEHLNVGIVEHGFVAALEAWPTLVDQVRAAQVNDSEIAELKKNMRVGKARDFHEDEHGTIWLGERLCVPDDKELKDLILTEAHQTQYSIHPGSTKMYQDLKEKFWWVSMRREIAEFVALCDVCQRVKAEHQRPAGLLQPLQIPEWKWEEIGMDFITGLPRTSSGHDSIWVVVDRLTKVAHFIPVHTTYTGKRLAELYLSRIMCLHGVPKKIVSDRGSQFTSKFWQKLQEELGTRLNFSTAYHPQTDGQTERVNQILEDMLRACALDFGGAWDKNLPYAEFSYNNSYQASLQMAPFEALYGRKCRTPLFWDQTGERQLFGTEVLAEAEEKVRIIREGLRIAQSRQKSYADNRRRELTFEAXDYVYLRVTPLRGVHRFQTKGKLAPRFVGPYKILEQRGEVAYQLELPSNMIGIHDVFHVSQLKKCLRVHEEQADSEHIDIQEDLTYVEKPVHILDTSERRTRNKVTRFCRVQWSHHSEEEATWEREDELKAAHPHLFASSSESRGRDSV

SEQ ID NO: 200852 - protein, 48 aa, Oryza sativa
  Clone ID: PAT_MRT4530_96282C.1.pep
PSYWVFGFLTFPTTIVQSPFNNTSAASSSHLHQLQYPYYTTAVSRNLL

SEQ ID NO: 200853 - protein, 1827 aa, Oryza sativa
  Clone ID: PAT_MRT4530_96283C.1.pep
MERPKSPLNPFHCICSLQLDFVPGKWGSVLMVQGKNLGRSFKMAGHPPNHRGEGMIDFVAELARMTLVVGYPDAPEYTTIPPLSGELPHRVRLEVHGYVGTCLANMAVEASGGTADHACQEAAYLMMARLRERHDYIFHDTAYRYHPRRAHGDGVSSFRPTAGENDTTFGHMCAVMRGLDRMHSDLHKATKALNDGKLMRIVALKDEIARLKKENAQLKGLPAPGGVRIRTTPRKRTTAPVRIQLAPRNPPPPAAPAAPPVPPAAPAVPAVPPAPAPAPAPAFTLSFAPASAARGPASGTGGCLFGMVYTRTGNRTTGEGSNGEERVDGVHPNSDSGNGPPPLPENPTLAQVMAHQTQMMAAMMQQMQQQHQQMHQRMMQHAEQQHQQFGPPPPQSKLPEFLRVRPPTFSSTTNPMEANDWIHAIEKKLNLLQCNEQEKVAFATHQLQGPASAWWDNHMATRPPGTEVTWAEFCRSFRKAQVPDGVVAQKKREFRALHQGNRTVTEYLHEFNRLARYAPEDVRTDAEKQEKFMAGLDDELTNQLISGDYADFERLVDKAIRQEDQRNKMDRKRKAAQFRSNQGSQHRPRLTPGQQGGPTTMIVRQHRPFNPSNFHQGTSGSQNHHGSQPNRGTAPRPPMAPAQSGQPAQAKKETGAKPGSCFNCGELGHFADKCPKPRRAGPRFIQARVNHASAEEAQAAPEVVLGTFPVNSIPATVLFDSGATHSFISKKFVGMHGLIREELSTPMRVHTPGNSSTSVQFSPSITIEIQRSPFLANLILLESKDLDVILGMDWLTKFKGVIDCANRTVTLTNEKGETVVYKSLVSPKKGASLNQIETEIPMDAEEKNLRKLEDIPIVCEYPEVFPEDLTTMPPKREIEFRIDLAPGTAPIYKRPYRMAANELAEVKKQVDEQLQKGYIRPSTSPWGAPVIFVEKKDKTKRMCVDYRALNEVTIKNKYPLPRIDDLFDQLKGAKVFSKIDLRSGYHQLRIREEDIPKTAFTTRYGLYECTVMSFGLTNAPAFFMNLMNKVFMEFLDKFVVVFIDDILIYSKSEEEHEQHLRLVLEKLKEHQLYAKFSKCDFWLTEVKFLGHVITAQGVAVDPSNVESVTKWTPPKTVSQIRSFLGLAGYYRRFIENFSRIARPMTQLLKKDEKFKWTAECDKSFEELKRKLVSAPVLILPDQTKDFQVYCDASRHGLGCVLMQEGRVVAYASRQLRPHEGNYPTHDLELAAVVHALKIWRHYLIGNRCEVYTDHKSLKYIFTQPDLNLRQRRWLELIKDYDMSIHYHPGKANVVADALSRKSYCTALCIEGMCEELRQELEHLNMGIVEHGFVAALEARPTLVDQVRAAQVNDPEIAELKKNMRVGKARDFLEDEHGTIWMGERLCVPDDKELKDLILTEAHQTQYSIHPGSTKMYQDLKEKFWWVSMRREIAEFVALCDVCQRVKAEHQRPAGLLQPLQIPEWKWEEIGMDFITGLPRTSSGHDSIWVVVDRLTKVAHFIPVHTTYTGKRLAELYLARIMCLHGVPKKIVSDRGSQFTSKFWQKLQEELGTRLNFSTAYHPQTDGQTERVNQILEDMLRACALDFGGAWDKSLPYAEFSYNNSYQASLQMAPFEALYGRKCRTPLFWDQTGERQLFGTEVLAEAEEKVRIIRERLRVAQSRQKSYADNRRRELTFEVGDYVYLRVTPLRGVHRFQTKGKLAPRFVGPYKILERRGEVAYQLELPSNMIGIHDVFHVSQLKKCLRVPEEQADSEHIDIQEDLTYVEKPVRILDTSERRTRNKVTRFCRVQWSHHSEEEATWEREEELKAAHPYLFTSSSESRGRDSV

SEQ ID NO: 200854 - protein, 71 aa, Oryza sativa
  Clone ID: PAT_MRT4530_96284C.1.pep
TLCYKGKNPTIHPHIHKHNQQGGYDGSSGDMIKKTLRSQQVKQLKPNRKIELLETNRRRRKATSSFCSPKS

SEQ ID NO: 200855 - protein, 92 aa, Oryza sativa
  Clone ID: PAT_MRT4530_96285C.1.pep
MSSLPRWRGSSRWLGPWGRLLPRQPRGRRRPLRGPPPPCPPRSRPPPPPPPTTPEVPCSSAPRRKRDGEEGGRAASPLRPPSAPAPLPRRTR

SEQ ID NO: 200856 - protein, 504 aa, Oryza sativa
  Clone ID: PAT_MRT4530_96286C.1.pep
MEREFHHYFKDASLMEQRPIDYSSVTCDTISVTPIAKTGIVSHPLPISPTDLDKEKVVIRPSQAESTKGKSVIIGDPRPKTRINNAKAKDHKVANNESSSFQKTKKPKLTFEMLMAKYKKGLACQRDNRTSDSKRPRSSRRKRFGQTPKQSEPSTMPTPYKPPVAMPWYPYPMSLYGYPFMYYMPWMPQSPMPFHQEWKESPRTVPSHSSNSRQDCFPQKNQSGGSKVKNVKKVGVRKEAKAPEVVTIKEESQDVQVPTRDAMKIIQAQKTGASTVTANNGGLTGTSGWSDWRLTIGYRFVLVAMDYFTKWAEAMPLKNITYTEVNGQAESSNKTLLKLVKKNIEEHQKKWHEVLSEVLWAHRISKHGATKVTPFELVYGQKVVLPIERTINGKYLKKYFLSVWQDAYGVPWPVHNVHQKGRGHVFTPKFGTYGRNREKLPKFGKCPVSFTGPVRPQGSYDDCEKGKCPNCPAIVIGRASGASTPNPRINDVGGIESAFNNRQQ

SEQ ID NO: 200857 - protein, 71 aa, Oryza sativa
  Clone ID: PAT_MRT4530_96287C.1.pep
LYKKKRTIKPTRSSIKTHKGSQSTQKSSDSLLGIVPGLRWLPTLGLPRARDLSGMLPGDRRRFFPGFFLSC

SEQ ID NO: 200858 - protein, 114 aa, Oryza sativa
  unsure (1)..(114): unsure at all Xaa locations
  Clone ID: PAT_MRT4530_96288C.1.pep
FGNLDVWCCGSRICCSIRLVYMLWTEHMAIYAMAVKGGANINDETPCKIYFLCNHVHWPLGVRQLLMRIVXESLSVRGDGCDGLVFEVFIVVPCFFVGRFPYCPLACCFFGGVI

SEQ ID NO: 200859 - protein, 974 aa, Oryza sativa
  Clone ID: PAT_MRT4530_96289C.1.pep
MDKSSALEYINQMFPTEASLSGVEPLMQKIQSEIRRVDASILAAVRQQSNSGTKAKEELAAATNAVQELMHKIHEIKTKAEQSESMVQEICRDIKKLDCAKRHITTTITALHRLTMLVSAVEQLQVMASKRQYKEAAAQLEAVNQLCSHFEAYRDVPKITELREKFKNIKKILKSHVFSDFTSLGTGKETEDATLLQQLSDACLVVDALEPSVREELVKNFCSKELTSYKQIFEGAELAKLDKTERRYAWIKRRLRSNEDTWKIFPPSWHVDYLLCIQFCKITRAQLIDILNNLKEKPDVATLLLALQRTLEFEEELAEKFSGGVTTTRNKESASDDENEDTGRNKIVSDIRKKYEKKLAVPNDEIGHFNFHGIISSCFEPYMSVYIELEEKSLVDQLDKLIQEEKWETEEGSQTYILSSSMQVFLIIRRSLNRCSALTKNETLFNLFQVFQRVLKAYASKLYARLPKGGTGIVAAATGTDGQIRTSDRDEKMICYIVNTAEYCHQTNAILLSDSNMNEFNNAKLLMHMSGELAENVAKMINPHFADKVDISEVQIPKQQQNEKYQVPQFDQSTIKNIESAKGLDVWDSWPLQNADGTVAEYNGYHVVFALAGSPKDADDTSIYMFYQKVGDNSIDSWKNAGRVFKDSDKFDANDPILKDQTQEWSGSATFTSDGKIRLFYTDYSGKHYGKQSLTTAQVNVSKSDDTLKINGVEDHKTIFDGDGKTYQNVQQFIDEGNYTSGDNHTLRDPHYVEDKGHKYLVFEANTGTENGYQGEESLFNKAYYGGGTNFFRKESQKLQQSAKKRDAELANGALGIIELNNDYTLKKVMKPLITSNTVTDEIERANVFKMNGKWYLFTDSRGSKMTIDGINSNDIYMLGYVSNSLTGPYKPLNKTGLVLQMGLDPNDVTFTYSHFAVPQAKGNNVVITSYMTNRGFFEDKKATFAPSFLMNIKGNKTSVVKNSILEQGQLTVN

SEQ ID NO: 200860 - protein, 238 aa, Oryza sativa
  Clone ID: PAT_MRT4530_9628C.1.pep
MRQPLGAPEGGHAGAAAGGGSGHRHGGAAAEREEGKGETKRRSTAHPGSTATTETATGTEEGGGAARVDGVDGAPAVGDRNGEVDEVGEDAAKPKEAAPRWEVVWGNDGGGPELSGDGGERERRRELDSGGERGRRGWKGERAAGGEGIGAGDPATINGAGEAAGFAAAAALGRGRGGGSSGRKGMTGGPHPSARVAGGPARQRRARGERPDGPRGEEREGEGDGPSRPKREREGKGT

SEQ ID NO: 200861 - protein, 212 aa, Oryza sativa
  Clone ID: PAT_MRT4530_96290C.1.pep
MGHCISMLRKMTRRRQPEPTRGTPKPPLFVVRGDRRPPLRSKPEALPFQAQSFGQLQFAQKPAAGRADSSRSGHETKFRHEVDPGVLDRRRCAPKLVRLPCRSTCSTSAVEPVTAEERPLAPSATKAPPQEGSRTPMVAPPMTPMRPVWQRRILMGMRCELPRFSGLILYDEHGRPIRGTTPGRSYPQIYHRFRAQWKKRNAKAATTLRDLL

SEQ ID NO: 200862 - protein, 663 aa, Oryza sativa
  Clone ID: PAT_MRT4530_96291C.1.pep
MPIELPRGLPFAVDTWTAASAVKRHRFLTHAHRDHIAGITATNVAAVYASRLTILIACHIFPQLDRADAFVEVELGAPVLVPDPDGDFTVTAFDANHCPGAVMFLFEGASFGRVLHTGDCRLTPDFRFLAADYVFLDCTFAACSLHFPSKDDSIRQVINCIWKHPNAPVVYLVSDMLGQEEILMEVSKVFGSKIYVDRDKNSECYHTLSLVAPEILTDDSSSRFQVIGFPRLSERATEMLALARAKHQPEPLIIRASSQWYAYYEPPEGSTKRKPALTEPMRDEFGVWHVCFSMHSSREELEQALRFIQPKWVISTTPPCMAIELSYVKKHCFASRLRNDDPLWKLLRLSDGNSAVSGSPLAVPTVEMIKKCEEEEVTCSVKDSFSSDGIRMRDQEPTLEDFEINVEPPVTLFGIARFGLTEEPELWKDEHESVEIDELKVQMENSATECEQWKDGISVLGSEVIDSVEIVAKEQDSAIESEQLKDCEPKDGTKATDVTEVEVNEHTSCTESVLWKMDRSDECVTTKRGEFEAEEQKFTGRYQFWKICKPKEMEGAKLTVQGKNTVEALDQVLAIDRLAYLHDNNQEVTKEGIAPSETDQENSKVPDKGSSDSSNAIGSSKGLNANLRKLYRSMNVPVPRPLPSLVELMAASKRPRVSPAVQL

SEQ ID NO: 200863 - protein, 245 aa, Oryza sativa
  Clone ID: PAT_MRT4530_96292C.1.pep
CRRSAFSRSSSSPPPPQHSTPPTPTPWPEQFHAVVFTNLTGSGGRLRLIDLYYDWPRGRNLNLIRGQLSGDPTYDVEWTNGTSYFFNATSCRTKLFPVGLLPPDWLAAGAVYLGRETVAGFDCHLWTKVDILWYYEDVVTHRPVRWNFFNGMQQHVMSFEVGGVLEDSKWQAPARCFSDQHTVIADPGAATVTDDRVEGEDGKLDVMNAFFSNMKMLCANMTENVKFGSSSDCKANPETFDLQRM

SEQ ID NO: 200864 - protein, 319 aa, Oryza sativa
  Clone ID: PAT_MRT4530_96293C.1.pep
MATECLGFQERATPVGESSSVLPRRRSPEKGLPRGYTHADILTVAARGPVSSGAKISGEFAHEFRPERPSNGGGSPMATVQPRVARGPASSTMMNCGKKVGEINLEDIFPKFRPTEPQKWIWIKRGEVRPLLGFPARDDEIRRFGDGARRIWKVPEKRCDHRTFAQVVMERRPPNRLDWQANKRRATEQGGGDWGARGGGDWGACGAREEEELHRQLLAQNPRANQGAQWKPQGLPGTDGERGARAPKIKCFKCGREGHHQAARPNPSLCYSCHSSGHISSQCPLMMRKGVKLCGFGIPGQGFYSLNVELSDMRLLKPL

SEQ ID NO: 200865 - protein, 79 aa, Oryza sativa
  Clone ID: PAT_MRT4530_96294C.1.pep
GAVAQTLGPLQPKHPGGPTALQPADTEDDFDDLQERQQTGTRQHYWRGLHGSGSLTHVTIITRTAPFAKINEMQKRSTR

SEQ ID NO: 200866 - protein, 60 aa, Oryza sativa
  Clone ID: PAT_MRT4530_96295C.1.pep
MRSPTTCQRPVCPPPSSAHRPVASPSTADLPSCPPRHPSPPGAQPSFRGHQGCHLCLLPS

SEQ ID NO: 200867 - protein, 29 aa, Oryza sativa
  Clone ID: PAT_MRT4530_96296C.1.pep
PRCFHEDLYSPLILNIKISPFKLPLYPCI

SEQ ID NO: 200868 - protein, 287 aa, Oryza sativa
  unsure (1)..(287): unsure at all Xaa locations
  Clone ID: PAT_MRT4530_96297C.1.pep
MTSPTAAAARQRRRLGRRTLAGERRHXDANGGHQRVADGTANSPTTKATADDQRTATATRRKRRLPSAXRRRRCSGGLRRQRRGGRGRRRLGDDDGGLPEXRRRLERRRRTAGAAAATAKLGRTALGRLRRREAKARVAARREEHGDPFKGARRRWRRPTATATAKEXSGRTNPRRTRIQLIPNRLSQRFQRRKGRGDPGDHFPSIDSAGEGKERPDWKGNSGGGSAXAKLGFRPEEDDGPDRWDPPVSGCEGARARGRLRTGPDWAEKREXGGFGPTFGPKPKEDF

SEQ ID NO: 200869 - protein, 279 aa, Oryza sativa
  Clone ID: PAT_MRT4530_96298C.1.pep
MARRVLEVTLVSAKNLKKVTMFSKMRVYAVASISGGDPRVPTHRTHADREGGRSPMWHAPLRFPIPDAGADMRAIALHVLLRAERVFGDSDVGEVFVPVKDLVAAAPEGGEHRHLSYHVRRPVSGRKCGVLHISYQITDEAAEPASAAGARGASSTRHVSGKGLQLSAITAYPSAGRHSGGRRGAAQSPTLAYHHGSPYGGGGGGAHAQHHHHHHHHYGYGYGPAPYGHGAASHGGGGGMGMGAGLGMGVVGGAVAGMVLADMLADGEMDTPLDAGMSC

SEQ ID NO: 200870 - protein, 291 aa, Oryza sativa
  unsure (1)..(291): unsure at all Xaa locations
  Clone ID: PAT_MRT4530_96299C.1.pep
MTSPTAAAARRGRRLERRTLTGERRRYGTNGGHQRVADGTANSPTTKATADDQRTATATRLKRRRSSAXRRRRCSGGLRRQRKSGRGRRRLGDDDGDLPERRRRLERRRRTAGAAAAKAKLGHTALGLLRRREAKARVAARREEHGDPFKGARGRRRRPTATATAKETRGLERXKADPIRTRIHRFPNRFSRSFQRRKGRGDPGDHFPSINSAGNGKERPDWKAAATAARRRETRVSARGGRRXLTGGTHLSAAARAXRARGRLRTGPDWAEKREXGGFGPTFGPKPKETF

SEQ ID NO: 200871 - protein, 66 aa, Oryza sativa
  Clone ID: PAT_MRT4530_9629C.1.pep
SKANSTLYFLWELLSGFAQLNSTLYYLTVYSFCSTRAGRLIIFFLTQKANNIALPLFQNIGRILFC

SEQ ID NO: 200872 - protein, 42 aa, Oryza sativa
  Clone ID: PAT_MRT4530_962C.1.pep
MACVHENARCGLLQGLGLRETRLGPSAVLMAVLADVVPTWLT

SEQ ID NO: 200873 - protein, 274 aa, Oryza sativa
  unsure (1)..(274): unsure at all Xaa locations
  Clone ID: PAT_MRT4530_96300C.1.pep
RRRGWRWWRGWNRPRARRWWWWSRVGLWWRRHGARRRRRCPPDPRLSAGSGXGGRWQLAAAVRRRRRRCGDGSSGSWRRRQDGGGGRGSWRLRATAQRQFADAGAGVGGSGDGGRXYGGGGDVSGGEGDGDGEVAGRXVAAAAVMVTVSAVTGGMAASNGXLSAWETTTSGRRGIVWWRGRRPAWRREVQPMTAEAGSAREARAAEMEVGLAREAQLMEGDRIGARXASGGGGWLGAEWRGRWXRRRPRCEELLPVGVARSSAHEDWPAGDAGV

SEQ ID NO: 200874 - protein, 109 aa, Oryza sativa
  unsure (1)..(109): unsure at all Xaa locations
  Clone ID: PAT_MRT4530_96301C.1.pep
MTPAVTSPTAAAARRGXTTRAAHAHRRTAALRHERRTPTGSGRHGELTDDQSDGGRPTDGDGDEVETAAXKERTRTATTWRRRRRPSRATATAGTTAAHGWSGGGEGKA

SEQ ID NO: 200875 - protein, 247 aa, Oryza sativa
  unsure (1)..(247): unsure at all Xaa locations
  Clone ID: PAT_MRT4530_96302C.1.pep
RGRNRPRARRWWWWSRVSLWWQRRGAPRRRRRQCPPDPRLSAGSGGWPAATGGGCAATTAAVRRRQRRRGAHGMGRQPAACWXRVTAQRQVADAGAGVGGSGDGGXCGGGGDISGXGEDGDGEEAGRXAAAAAVVVTVSAVTGGMAASNGXLRAWEATTSGRRGIVWWRGRRPAWRREAQPMTAEAGSAREARATEMEAGLAREARPMEGDRIGARXSGGGGRLGAEWRGRRWRRRPRGEGELPVGV

SEQ ID NO: 200876 - protein, 94 aa, Oryza sativa
  unsure (1)..(94): unsure at all Xaa locations
  Clone ID: PAT_MRT4530_96303C.1.pep
MTVMAIGKVSNTLQLPLGVNLHRSLKTXIHRFHGRFGXTWGRPNQPTFWLVAPSTASLRRLVNFGLIHRVKSAFLAHSYTSLVLDIVRLIYRLS

SEQ ID NO: 200877 - protein, 92 aa, Oryza sativa
  Clone ID: PAT_MRT4530_96304C.1.pep
GDLPDDSELARLLKALCSWDLEDARGERARSAEAPVDGNGEVANGGALDIESGVELGTRCSTLHPSPKRPPTWQSTRTILRLSCHPCSIVFA

SEQ ID NO: 200878 - protein, 584 aa, Oryza sativa
  Clone ID: PAT_MRT4530_96305C.1.pep
MPPKLRKRSTGAAARSPATNGEEGHTGSKSSETSPAASGRWTRARARDLGFDTTDHPRVSDSAGGGGRTDRKAPAGAAPKKRKGVSASTSAGPVPRKTTAAGRKRRNPPCPSLPPGQCTKLDQRGLIPHLLAQPFFFPSSFSFSVRTPKMLIHAYRPSFSLPHRKDIPTLRDEPRDPLTADAVCTGIVFGWDGANKCAKILTSSSVVCDFKGELHDPTLKLSVHLPDNTITEGRLLSFNVHYDVALLEVMGDFQLQVPSFGSSTTYGQDVFALARDENMCLMVRHGKISWLECPMLLNNHYMFLSCDIPEGGSGGPVIDHDGNIIGIVFDNNPGPVVTSITTIRTCVEMWHQFSRVARPILGMQLKAVELLDVSKLEELCLDNNITSGFIVNLVKVDSIAERLGIRRGDVIVFQDSCCSTLPQLEDYLLSLGWGYLQGKSLTVDLKNYITLPLYNTSAKRENINGLRHHMISPIEVRIWQSSIRGNLPVRARWPLSRLEMAWVDRGTGHGVANRGQGRDGRKDVVLQSNHYAGHHAVINSAPSQPGVDAPPLPSPSVEVHNLVDSFRENITFPVQFSDASKWVD

SEQ ID NO: 200879 - protein, 84 aa, Oryza sativa
  Clone ID: PAT_MRT4530_96306C.1.pep
MAAPGRALLLLLVVVVVQFLMTIYPRNIFATKRKTRQIVCSLIHSEQMDFLINSETLQSSEQAVEFPQRAPLENKGFLKEFGGH

SEQ ID NO: 200880 - protein, 138 aa, Oryza sativa
  Clone ID: PAT_MRT4530_96307C.1.pep
MASEERRGASRRRSTRSSGHMKVAIGEAARLDPAFPRLDGASWPRFAIWSEWNRHRGGRVELAGAYGAEVASQVVGERPARRLVGARRCRWRVSCSDKTPWASGTTPSDCLRNGACTIARYHDPTTRVRQLADISPAI

SEQ ID NO: 200881 - protein, 508 aa, Oryza sativa
  Clone ID: PAT_MRT4530_96308C.1.pep
MNTFGRRSNTWSARTNRVLDLHRPVLYARYFARDFAGVPLPDCRTLGSTVARHCSVAPDILSLRTLVGGPNRITCIQRGLGEKAAKHSSDIYSSPDTQGTDKIASGGASSTRSSTPPDSPGFLSISAEFRSAPAMGELGALQSIVYHRGSLRLLDQRKLPLEVDYIDVKCSGDGWNAIRDMVVRGAPAIAIAAALALAVEVSGLEDFTGTPAEAAVFVSEKLEYLVSSRPTAVNLSDAATKLRSLVSRTAETEKDAKAIFQAYIDAAETMLVDDVSDNKAIGSHGAEFLKQKLEVSKDISVLTHCNTGSLATAGYGTALGVIRALHSGGILEKAFCTETRPFNQGSRLTAFELVHDKVPATLIADSAAAALMKSGCIQAVIVGADRIAANGDTANKIGTYNLAISAKHHGVQFYVAAPITSIDLSLPSGEQIVIEERSPNELLNSEGGLGKQVAASGISVWNPAFDVTPANLITAIITEKGVITKSDADETFNIKDFIQSAKLYSTMQ

SEQ ID NO: 200882 - protein, 47 aa, Oryza sativa
  Clone ID: PAT_MRT4530_96309C.1.pep
VCPSISVSSTSFLSLTIFSLGSICSVTFGHSRTTATSVYHLWASVRA

SEQ ID NO: 200883 - protein, 393 aa, Oryza sativa
  unsure (1)..(393): unsure at all Xaa locations
  Clone ID: PAT_MRT4530_9630C.1.pep
MASGGGMRCRRRWQPAAREAAADGGGSALGGRGRWKEGGGAPHRGSAGAGGGDDERRRRGGGRADRVHGKWGPRVSRSVHGGPGARGWRRSAPWVPRVSRTRGRGRLTAGPTWQPRGRAEXRPRRHGRREXRTRTRAPMVAAGDQRRGGAAPEREEGRGKRTERSTAHPKTAKAVETADGAEEDGGAARDDDDDGAPAVGGRSGAADGVGGNTAKRTEVSPSKEEVRSGGGGGTELGGDGGEGGARREHDFDGESERRAAETKERSSGNVFIASEGREGGRGGRKPAAEISAAIDCAGDDYGLDSNESEGEREGKEGETGEGNAGGXGRGGGRGAGLGMTGGPHPSARAAGGPACQRRAHGGGRWAAGEEREREGEGXMGRAGPRGKKGGETD

SEQ ID NO: 200884 - protein, 44 aa, Oryza sativa
  Clone ID: PAT_MRT4530_96310C.1.pep
TSCHITIHETFPNCIHVPDYLNPDIGVILLLIQLRNRSVGYMTA

SEQ ID NO: 200885 - protein, 205 aa, Oryza sativa
  unsure (1)..(205): unsure at all Xaa locations
  Clone ID: PAT_MRT4530_96311C.1.pep
GAPSRSAARHCTPPWSPPAACDPVCRRAQSHQRRRRRCRPSCRRSTTAPASPPALVFLPARLGAACCCCSPAPPTTPPPPRGAPGSSPTPGSRRRGSRSCPRTRTAAPARPAAATSSSPPPPPGRRSTAAAPPRPPPAPGCAAPGTRPPPPTTTTTRSPAAPPPPPPPHEEPRARRTPRAPPTSQARRGRXRRGHPLPPRRRRRH

SEQ ID NO: 200886 - protein, 148 aa, Oryza sativa
  unsure (1)..(148): unsure at all Xaa locations
  Clone ID: PAT_MRT4530_96312C.1.pep
MAHMSTILTLSLGLLLLXSQVSMGQVLFVGSPLHIPRGLMGDQHSQNQCRFXEHHTDLEATHHFRSETGLTEYYHIEARNEFPWACKSVGRLVVESNGLSLPMYANAHKVVXYIPQSGRAFRMALSGCAETVQAIRPPFEPEEATAGE

SEQ ID NO: 200887 - protein, 638 aa, Oryza sativa
  Clone ID: PAT_MRT4530_96313C.1.pep
MVENGVQLTLTSTVKTNGKIRINGEVLNGSHLKEKHEAGSNGALHPSNGQAKQPPSPPQKQKQKLLCTTCGKGHTCQAVIARTRQMRAMIDARRPHQAHSAFRHLVDDGHRPSLVTYTTLLAALTSQRAFDTIPWLLAEVEDAGLRPDSIFFNALINALVEARRMGEATNTFLRMGHSGCRPTASTFNTLIKGYGIAGRPEESQRVFDMMASGGAGGEAAVRPNLTTYNILVKAWCDAGRLEEAWRVVARMRASGADPDVVTYNTLASAYAKNDETWRAEELVVEMAQQAGLRTSERTWGIIVGGYCREGRLGEALRCVRQMKDSGVLPNVIVFNTLLKGFLDANDMAAVDDVLGLMEQFGIKPDIVTYSHQLNALSSMGHMAKCMKVFDKMIEAGIEPDPQVYSILAKGYVRAQQPEKAEELLRQMGRLGVRPNVVTFTTVISGWCSVADMGNAVRVYAAMRDAGVRPNLRTFETLIWGYSELKQPWKAEEVLQMMQDAGVRPKQTTYCLVADAWKAVGLVENANRALGSSSSSGDLLDADDDEEPYFPDNHGDDKLQSFERTNGHAKSDASRSMQVTRASMSLKTARSSSPSPSLSLLRRSCRLPVRSTWLCRKQLQMQCGVYGQSISSLKMVFLS

SEQ ID NO: 200888 - protein, 366 aa, Oryza sativa
  Clone ID: PAT_MRT4530_96314C.1.pep
MPPQAQLSFKPSLHHPLGGGDHYSTARQRRGYWWLVKDVVAVQTCHSEMNGFAFLDLYSSNLMAHLILHGTTSRRLPVLGPPGNLQFWGGGNGAGGDNGGSTTGGSGAGVAPGGGDVSGGAAGLIYPDSTRHRGTYCDTMHLPAMDDGSMLQKRNSILAAHVKDPVHKLGLRVAWTRPQLGPEKSQKARIISAWKKYTQGPSVVLTLILAYVTVESAWNPRGLHMSACHVNSLFYCSSNSKQQLISPEEKPKPEATRESLCFGDSSVGIAAAAASDSGRGGALDRKLQAATTAVYGASLHFGKELLIRVTWTQNAAGATGLAVVEVRPPCAAQEAREQIPHHRRRHGRGHPLGHRRGHVRVGFVVP

SEQ ID NO: 200889 - protein, 66 aa, Oryza sativa
  Clone ID: PAT_MRT4530_96315C.1.pep
CKIYREFTGTMTSTVHRTQILLPSHYLAFLVLVVSPHTNVHFNTKQYKKKERKNHHPIRFQLTPAN

SEQ ID NO: 200890 - protein, 111 aa, Oryza sativa
  Clone ID: PAT_MRT4530_96316C.1.pep
MALPLLKSSPHFSALHSANRAQLHGRCRATLGGFHDPRSNSSRCKDPFYDSEAYRGQGGDGTVHWYYDRQEDLEASAREELLREELLEEIEQRVGGLRELEEAAKEEQLTN

SEQ ID NO: 200891 - protein, 66 aa, Oryza sativa
  Clone ID: PAT_MRT4530_96317C.1.pep
VALLCVKVEPKNRPLMSSVVMMLASENATLPQPNEPGVNIGKITLDTESSHGLTSNGVTTTTIEAR

SEQ ID NO: 200892 - protein, 41 aa, Oryza sativa
  Clone ID: PAT_MRT4530_96318C.1.pep
RKNKHSLSTISVQLTSASRNCTFIYQNDNLYFTRKIGENWF

SEQ ID NO: 200893 - protein, 42 aa, Oryza sativa
  Clone ID: PAT_MRT4530_96319C.1.pep
LNGLEFMKTVHLEPVPFDMGRRLITPAYNKNAPSIAPLVPGI

SEQ ID NO: 200894 - protein, 633 aa, Oryza sativa
  Clone ID: PAT_MRT4530_9631C.1.pep
MVLQKRLDYGSHGHRAPIKPRVATLAPVKRSTRIRKKQMYALDLLATAAEKLLADQDNLSSGPNINETPEGYVTSMKPVKAEQFDEAFPLRSVAVKKDDCKGCTVGCAGICGFLRQANMCLAENSSTQNLADSVLESLTAKPDVLAKDSFVSSKKSCRLGFGLGTIPEYGSVGVCQPWSTRSAEVKQVHRARPTAIRSQEDSDAAALCALVETMDLDTKPLAEASSGSNSGVHICGPDRGHNSHPSCLAKVQHAADRDDDENSSGCVHPSTSGNNRGYIPHYIGDRRIRRLFASRLRKAARNRICGEMSCKGNKLSLCEKKMPTTRRRVQQTTLKRKRLAQLYSEKSSDEVKLTIKSFNIPELLIEIPENATVGSLKKTVSDAVTTIIERGLRVGILLQGKNIQNDNKTLRQAGIYRGKKLNDIGFTLECEAGQDSHPGVIVPEEMDFVGASVVDKSATVKCEEPAENQQLMQDFPGCSLSDPGSVDYPVEWSTQETSASSQAIVPFADPNSLALANVPLSRSKRPDFGQRRIRRPFTVAEVELLVEAVEHLGTGRWRDVKFRAFENVHHRTYVDLKDKWKTLVHTASIAPQQRRGAPVPQELLDRVLAAQAYWSEQQAKLHGDPPVPEICPT

SEQ ID NO: 200895 - protein, 1642 aa, Oryza sativa
  Clone ID: PAT_MRT4530_96320C.1.pep
MTVRQLVFSVKPTFEELMSRIKHELDWSDESVGMQGRYDVGGGVMSHKFMLDLNGEIEWQTYIDIVLGSHFKSLEVFAWKKDGRIGKKELIDLNESLLIESPINCHELSERCSRKEKLIEEDVEGGEGVNDMADVEVREENDPVREEVHAEENVPLREEVHAEDNVPLREKVNVEENVLVREEGDVEDGREVGDDVELPEEEANAKNVSMGLRELARLKFYTREECEEAMIRSGLNPGWLEYDTEDELDESASDSDDDRLVRKMSEHERTVFAKLVGRNPEITQFENLTRSGLAIADGDPQYDGAFEPMCDEPRKGLEFRSMDDLKIWLQSYSIRVHRPYHVKESNASVKYTVACLDRHCKWQINARKSGGDRWRVTRVIWGDWDEAYVRLPTLMRAIKAKNPTMHFRVEAHPEKSRMVDGVQRRVFGRAYWIFGQSIEAFKHLRPVLAIDGTFLTGKYQGTLLTAIGVDAGLHLVPLAFALVEKENTSNWEWFINMLRNKLIGPNREVCIISDRHPGILNSIIHIMPHHLTIHHRWCMRHFCANFYTAGATTDQMKDLERICQINEKAFFLDEIKRLMGVVGERPKKWLEDHMPLKVKWARAFDTNGRRHSIMTSNMAESFNNVLRGIRKLPVTAIVAYTFSKCNSWFVDRHKEATVDILSGKKWPTKVKDMLEEQQRRTLGQRAACFDFPSMKYEVSEQGGVTAAGVQWGGRHYVVVARDNTCSCQFPQLHHLPCPHMITVCKLRGLDVEVAPRMCYEASNKAVQDSYSPRFEPYLDPSQWPSYDGEFFVPDLSLKNNTRGRRRTRRFKNDMDKAYKGSANRRMEHFPGLEDFYEEKHRAPQIASGERLKTLRVRGHTAHILFDDWYVPYLQRAKLLAFVTMAQRPVPLYNAAALTALVDRWRPETHTFHLPCGELTVTLEDVAMILGLPIRGQAVTGDTASGNWRERVEEYLGLEPPVAPDGQRQTKTSGVPLSWLRANFGQCPAEADEATVQRYCRAYVLYIFGSILFPDSGGDMASWMWLPLLADWDEAVVGRRNLAYYHYTKEMDYLQPEHVVWMPYQAQEALELELNPMCHIEDALKTLRCPLICFYAVEFQMCHRVMQQFGRLQTIPHRFSTSIDLHKVDRRKNKKVTDWAYYHQDHITQWEKFEENGVPDQGQHNGTEFDLYLAWLHRPYRLVLRPAWTLADIADDPEDVEEQNEYDTRTRLGTTVETGPVRDRVARELLRTVNDAGVALGTAPGSEGEGGTLRNALQRLRQRCRKLAARLGCRSTDVVEHAHAHQEGDEEGEVGDEEGEQDKEAEEGDQEEEGDEEEEEEGDEEEEADELGPSQLEDAPESSQPDLSQPGPSQPRRRWAPSQDWRYTPDVPRPRTRGRRRGPTDLPVQNTAGWEARGATSRSSSKHLELKISPRNVNRVLGIPFEGMEVCPMPHNTKKEKDSFVQYYISAPGFESNALKGAEEVIKRIFPSAMNNWAQDHFRTTFVVWIVGMFLAPKMSHKSGSNDFWGALLNVEEIKNYNWAKYVIDHLIDVAPKAQHDIKHKDKVANKAGCSLLLQILYLDNAAFEGELSIPQNVEPKLAMFDQKLRWMLTRLRGGRSMGRHPSTVSAGFVRNVHQHWKKMGATCLIDLCGSFLFINYIG

SEQ ID NO: 200896 - protein, 82 aa, Oryza sativa
  Clone ID: PAT_MRT4530_96321C.1.pep
IPQGIIKQKLSGKTTEQKFRGKISHALLLLSFGLSFQVVPRIPDFLGRRTLFTIALSSFATLKFAGPLGLLNTLIHQFSSLC

SEQ ID NO: 200897 - protein, 1837 aa, Oryza sativa
  Clone ID: PAT_MRT4530_96322C.1.pep
MGFDFAVKAVYTGIWIAAISLFMELLGFNTQKWITAGGFGTVLLTLAGREIFTNFLSSVMINATRPFVVNEWINTKIDGVEVSGIVEHVGWWSPTIIRGDDREAIYIPNHKFTVSILRNNTQRTHWRIKTYLALSHMDAAKIGIIVADMRKVLAKNPHIEQQRLHRRVFFEKIDPKTQALMIYISCFVKTSHFEEYLNVQEAVMLDLLRIVGHHRARLATQIRTVQKSYGNADIDNIPFGEEMYSRVRGRPLLIDTSARISDDKSKPRPASREDHKVKTVTSAEAKSASADNASISNSEKQEQKKSVPEDGRMKNSKNDHATTTSPSSPWSENMDPIASTSKTGKGKTQGAEATEREGDGAVSVANSKKESRPVFEDNIVLGLALEGSKRTLPIDDGMNPHLSLSETEQDTVEAASSPKDKKGQEKVVVAMKPSHLSRPDWPASCIIDVILCQLSVTRPESRYWCLVGVEHGRPADMAAGIDRFGSFGIAMMDRLVRLHYGGCVVDESTGGSKFEGMIVRQLVFHAKPTFEELMSRIKHELDWSDESVGMQGRYDVGGGVMSHKFMLDLNGKIEWQTYIDIVLGSHFKALEVFAWKKEGRKGKKELVDLNESPLIESPISSHELSERCSRKEELIEEDVEVGEGVNDMADVEVREEVHGEENVPVREEVHAEENVPLREEVNVEENVPVREEGDIEDGREVGDDVELTEEEANAKNVSMGLRELVRLEFYTREECEEAMIRSGLNSGWLEYDTDDELDESASDSDDDRPVRKMSEHERTVFEKLDLTRSGLAIADGDPQYDGAFEPMCDEPRKGLEFRSMDDLKIWLQSYSIRVHRPYHVKESNASVKYTVACLDRHCKWQINARKSGGDRWRVTRVGEDHTCCSAEVTGKHLQLTSRFIGNRLQAFVRAEPTLSPAAIVEAVEQIWYYRPTYGKAWRAKQVAMKVIWGDWDEAYVRLPTLMHAIKEKNPTMHFRVEAHPEKSRMVEGVQRWCMRHFCANFYTAGATTDQMKDLERICQINEKALFLDEIKRLLGVVGERPKKWLEDHMALKVKWARAFDTNGRRHSIMTSNMAESFNNVLRGIWKLPVTAIVAYTFSKCNSWFVDRHKEATVDILSGKKWPTKVKDIFEEEQRRTLGQRTACFDFPSMKYEVSEQGGVTAAGVQWGGRHYVVVVRDNTCSCQFPQLHHLPCSHMITVCKLRGLDVEVAPRMCYDASNRAVQDTYSPRFEPYLDPSQWPSYDGEFFVSDLSLKNNTRGRRRTRRFKNDMDKAYKGSGNRWSQKPNNTNSEPVMQNRCSLCHELGHKKTRMEHFPGLEDFYEEKHWAPQIVSGERLKTLRVRGHTTHILFDDRYVPYLWWAKLLAFMTMAQRPVPLYNTAALTALVDRWRPETHTAALTVTLKYVAMILGLPIRGQAVTVAPDGQRQMKTSGVPLSWLRANFGQCPTEADEATVQRYCRAYILYIFGNILFPDSSGDMASWMWLPLLADWDEAGTFSWGSAALAWLYRQLCDACRRQGGEANLAGCVWLIQVWMWTRLPVGRPMWRTHQVWPHQDADRHPTVAHMWELVPSPVLGRRNLAYYHYTNEMDYLQPELVVWMPYEAQEVLELELNPMCHIEDALKTLWCPLICFYAVEFQMCNRVMRQFGRLQTIPHRFSTSIDLHKLSYFHVNISDIFEIDILHMCGVDRRKNKKKFEENAVPDQGQHNRAEFDAYLAWLHRTYRLVLRLAWMLADIANDPEDVEEQNEYDTHTREGSTVETGPVRDRVRLRQQCRKLAARLGCRSTDVVEYAHAHQEGDEEEEADDEEGEQDKEAEEEGDEEEEEEADELGPSQLQDAP

SEQ ID NO: 200898 - protein, 230 aa, Oryza sativa
  unsure (1)..(230): unsure at all Xaa locations
  Clone ID: PAT_MRT4530_96323C.1.pep
HCRLTWSRVYAPLKYGGXDIHNMELTMIALRARWLWAQRASQSRPWXSFKSHVLGNXREFVAASMTCVLGDSKYILFXEERWLQGSSLRSWAPKLYSRNPTRVHRKLSVADALVNNQWIRDLRGSLGIHSILXYLQIWSILRSTILSEGQPDSFIXRWEWDSLGSYSTRSAYLALFLRSISFQHLPIWRSFTPPRLLYFLWLVTYWRYWTVDRLEKRGLPHPTCFVFCDQ

SEQ ID NO: 200899 - protein, 1527 aa, Oryza sativa
  unsure (1)..(1527): unsure at all Xaa locations
  Clone ID: PAT_MRT4530_96324C.1.pep
MPSNTGKCVYGVLDKLTTASRSCSFPSETTKAKWPSCRRLSAKRIGAEMDRLVRLHYGGCVVDESTGGSQFEGMIVRQLVFHAKPTFEELMSRIKHELDWSDESVGMQGRYDVGAGVMLHKFMLDLNGEIEWQTYIDIVLGSHFKALESERCSRKEELIEVEVGEGVNDTADVEVREEVHGEENVPVREEVHVEENVPLREEANAEDNVLLREGVNVEENVPVREERDVDDGREVGDDVELPEEEANAKDSYSIRVHRPYHVKESNASVKYTVACLDRRCKWQINARKSGGDRWRVTRVGEDHTCCSAEVTGKHLQLTSRFIGNRLQAFVRAEPTLSPVAIVEAVEQIWHYRPTYGKAWRAKQVAMKVIWGDWDEAYVRLPTLMRAIKARNPTMSFRVEAHPEKSRMVEGVQRRVFGRAYWIFGQSIEAFKHLRPVLAIDGTFLTGKYQGTLLMAIGVDAWLHLVPLAFALVEKENTSNWEWFINMLRHKLIGPNREVCIISDRHPGILNSINHNMPHHLTIHHRWCMRHFCANFYTAGATTDQMKDLERICQINEKALFLDEIKRLLGVVGERPKKWLEDHMALKVKWARAFDTNGRRHSIMTSNMAESFNNVLRGIRKLPVTAIVAYTFSKCNSWFVDRHKEATVDILSGKKWPTKVKDMLEEQQRRTLGQRTACFDFPSMKYEVSEQGGVTAAGVQWGGRHYVVVARDNTCSCQFPQLHHLPCSHMITVCKLRGLDVEVAPRMCYEASNRAVQDTYSPRFEPYLDPSQWPSYDGEFFVSDLSLKNNTRGRRRTRRFKNDMDKVYKGSANRRSQKPNNTNSEPVMQNRCSLCHELGHKKTRMEHFPGLEDFYEEKHRAPQIVSGEYLGTCLPXMRAKLLAFVTMAQRPMPLYNAAALTALVDRWRPETHTFHLPCGELTVTLEDVAMILGLPIRGQAVTSDTASGNWRERVEEYLGVEPPVAPDGQRQTKTSGVPLSWLRANFGQCPAEADKATVQRYCRAYVLYIFGSILFPDSGGDMASWMWLPLLADWDEAGTFSWGSAALACWKLTYVTQVWMWMRLPVGWPMWRTHQVWPHQDADRRPTVAHLWESVPSPVVGRRNLAYYHYTNEMDYLQPEHVVWMPYEAQEVLELELNPMCHIEDALKTLRCPLICFYAVEFQMCHRVMWQFGRLQTIPHRFSTSVDLHKVDRRKNKKVTDWAYYHQDHITQWEKFEENGVPDQGQHNRTEFDVYLAWLHRTYRLVLRPAWTLADIADDPEDVEKQSEYDTRTRQGTTVETGPVRDRVARELLRTVNDAGVALGTAPGSEGEGGTLRNALQRLRQRCQKLATRLGCRSTDVVEHAHAHQERDEEGEVGDEEGEQDKEAEEEGDEEEEGDEEEEWDEEEEEEADELGPSQLEDAPESSQLDLSQLGPSRPRRRQAPSQDWRYTPDVPHPRTRVPSLGPAPLWLALSSQPASHPEGLPGWAMADSAKSHLSAGWAGAEVPRSSAIMPGAEFQARKPSRRLAGLGHGRFGQVPPQRQPTWR

SEQ ID NO: 200900 - protein, 114 aa, Oryza sativa
  unsure (1)..(114): unsure at all Xaa locations
  Clone ID: PAT_MRT4530_96325C.1.pep
MQRPVGERNSASICCLARHGPAQARPTSHRAGMMPIGPCWPMGCASRPGTAHQPSGRVSPAVPGQPNVPVERPRHGPMVGLGWHGPDPXRAVPCLDRAKTSCRGPGRRASGLLA

SEQ ID NO: 200901 - protein, 696 aa, Oryza sativa
  unsure (1)..(696): unsure at all Xaa locations
  Clone ID: PAT_MRT4530_96326C.1.pep
MDKVYKGSANRRSQKPNNTNSEPVMQNRCSLCHELGHKKTRMEHFPGLEDFYEEKHRAPQIVSGEYLGTCLPXMRAKLLAFVTMAQRPMPLYNAAALTALVDRWRPETHTFHLPCGELTVTLEDVAMILGLPIRGQAVTSDTASGNWRERVEEYLGVEPPVAPDGQRQMKTSGVPLSWLRANFGQCPTEADEATVQRYCRAYILYIFGNILFPDSSGDMASWMWLPLLADWDEAGTFSWGSAALAWLYRQLCDACRRQGGEANLAGCVWLIQVWMWMRLPVGWPMWRTHQVWPHQDADRRPTVAHLWESVPSPVVGRRNLAYYHYTNEMDYLQPEHVVWMPYEAQEVLELELNPMCHIEDALKTLRCPLICFYAVEFQMCHRVMWQFGRLQTIPHRFSTSVDLHKVDRRKNKKVTDWAYYHQDHITQWEKFEENGVPDQGQHNRTEFDVYLAWLHRTYRLVLRPAWTLADIADDPEDVEKQSEYDTRTRQGTTVETGPVRDRVARELLRTVNDAGVALGTAPGSEGEGGTLRNALQRLRQRCQKLATRLGCRSTDVVEHAHAHQERDEEGEVGDEEGEQDKEAEEEGDEEEEGDEEEEWDEEEEEEADELGPSQLEDAPESSQLDLSQLGPSRPRRRQAPSQDWRYTPDVPHPRTRGKMALRFSPSVPGALALRSQPSHPEGLLGRAMADSAKSHP

SEQ ID NO: 200902 - protein, 114 aa, Oryza sativa
  unsure (1)..(114): unsure at all Xaa locations
  Clone ID: PAT_MRT4530_96327C.1.pep
TIFRSKGFKGKTITGEYHTLTKSFHSATKTSSNGLKKTTGGIXNERPGXQXTTGFKNSXFPAREFXGRDHPPALNRTSSXLWGPATGWPPAGRVLVHASGRRPCPGRRPGTXSR

SEQ ID NO: 200903 - protein, 405 aa, Oryza sativa
  unsure (1)..(405): unsure at all Xaa locations
  Clone ID: PAT_MRT4530_96328C.1.pep
TQKWITAGGXGTVLLTLAGREIFTNFLSSVMINATRPFVVNEWINTKIDGVEVSGIVEHVGWWSPTIIRGDDREAIYIPNHKFTVSILRNNTQRTHWRIKTYLALSHMDAAKIGIIVADMRKVLAKNPHIEQQRLHRRVFFEKIDPKTQALMIYISCFVKTSHFEEYLNVQEAVMLDLLRIVGHHRARLATQIRTVQKSYGNADIDNIPFGEEMYSRVRGRPLLIDTSARISDDKSKPRPASREDHKVKTVTSAEAKSASADNASISNSEKQEQKKSVPEDGRMKNSKNDHATTTSPSSPWSENMDPIASTSKTGKGKTQGAEATEREGDGAVSVANSKKESRPVFEDNIVLGLALEGSKRTLPIDDGMNPHLSLSETEQDTVEAASSPKDKKGQEKGDQRNLDR

SEQ ID NO: 200904 - protein, 155 aa, Oryza sativa
  Clone ID: PAT_MRT4530_96329C.1.pep
NCIMGSRHWTRSRVRFNVRGSCHRRGPTDLPVQNTAGWEARGATSRSSSKHLELKISPRNVNRVLGIPFEGMEVCPMPHNTKKEKDSFVQYYISAPGFESNALKGAEEVIKRIFPSAMNNWAQDHFRTTFVVWIVGMFLAPKMSHKSGSNDFWGA

SEQ ID NO: 200905 - protein, 264 aa, Oryza sativa
  Clone ID: PAT_MRT4530_9632C.1.pep
HQKEVSSAVSPNTPDISSDMTEAERAVADIETIDDWRIPLIKFISSEELPEDDTEAEKITRKAKIYWMVGNDLYKKAPNGGDYRFLFVAIDKFTKWIEAVPTGEIKADNAIKFIKGIFCRYGLPHRIITDNGSQFISADFQDYYIGLGVKVCFASVSHPQSNGQIERANGIVLQGMKTSIYDILMSHNKRWVEELPSVLWAVRTTPTTSNKETPFFLVYGSEAMLPGELQHQSTRVQKYSDENQEEQRDIDVNLLEEHRERVAV

SEQ ID NO: 200906 - protein, 403 aa, Oryza sativa
  Clone ID: PAT_MRT4530_96330C.1.pep
MIQEPFFSIPVDVTPTTQNVVVTTPDVSSPVTTTNEQEEPEIQDPTELVVTQEEEQHQPQIEDVPQLRKSQRERKTDILSDYQVYASEEVQTQGDPTSFEETMRSAHSSKWLEAMEDEIRSMSTNKVWDLEEIPKGAKTVGCKWVYKTKCKDSFGIVMALVAYYDLELHQMDVKTSFLNGDLYENVYMAQPKDNILLASSDVDLLLETKKFLSSNFDMKDLGEALSVLGIEIHRDRRKWVLGLSQKAYLEKVLKKYSIHASKPTPAPIVKDDRFGKFQCPRNQFEIDQMKVVPHASAIGSLQYAEVCTRPDLAFVTGILGRYQGNPGIDHWRMVKKALRYVQGTKGLILTYRRSDSLEIEGYSDTDFARDVDDRKSTSGYIFTLAKGAISWKSSKQTVIAYHR

SEQ ID NO: 200907 - protein, 855 aa, Oryza sativa
  unsure (1)..(855): unsure at all Xaa locations
  Clone ID: PAT_MRT4530_96331C.1.pep
YLRYCIASVITLNGNNXAHAREKIDIALAMSDIVLALTKSCPMSYCSXVRAEGESEDAFNKRTLDNAPIVQKYNTDRAKXESSKCKCLMVIKSSIVEAIRGAIPLXEYLQWVENQFTGSLKACAKSLXKRLVTMXYTSEGVREHILKMSGIASKLKKMDFXLPDEFLVHLNFSSLPSVFEAFVVNYNSLPENWDFEKLIAKXCKKGHYQKDCPEFLKHLIKKGIPNVNVVCNEVNVACNSVSSSSTNVRSKRKRCNEETTAKLWHCRLGHILKGRIERFIKEEILYPLDITDSEYCIDCIKGKTXHYDLKIKAIRSNREEEYYYARHTPYGQIPGPFARFLQENGIWHXVAQYSAPDEPQXIGVAERLWMEVLKPPAHILNRVPSKSVPKTPYELLTGRKFMLNYVRVWGYQVEAKLFNPNIGKLDHKTVSCHFIGYPEKSKGFRFYCPDRHTKFVETRHAVFLEHDIVRGSMVPREISLEEKRVCVPTPMIQEPFFXSIPAAAAPTVQNAAVTTPDVSSPVITINEHEXPEIQDPPEQVVTQEEEQHQPQIEEVPQLRRSQRERRTAIPSDYQVYSSEEVQTEGDPTSFEEAMRSAHSSKWLEAMEDEMRSMSTNKVWDLVEIPKGAKTVGCKWVYKTKCDSKGNVERYKAXLVAKGFTQREGIDYNETFSPVSCKDSFRIVMALVSHYDLELHQMDVKTAFLNGDLYENVYMAQLKGFVVERKEQIXCHLKKSIYGLKXASRHSRQRYLKFDEVIRRFGFNENEEDNCVYAKFTKKFLSSNFDMKDLGEASFVLGIEIHRDRRKGVLGLSQKAYLEKVLKKYNMDASKPTPAPIVKGDRFGKIQSPKNQYEID

SEQ ID NO: 200908 - protein, 80 aa, Oryza sativa
  Clone ID: PAT_MRT4530_96332C.1.pep
KSRGFKGKFFYHLIKNESAFFLKQERGLIKHQPKVLNLLGRLLKPSKGPFSQDFLQKAFKLLPLGGFVGRFPCTKIDQTF

SEQ ID NO: 200909 - protein, 156 aa, Oryza sativa
  unsure (1)..(156): unsure at all Xaa locations
  Clone ID: PAT_MRT4530_96333C.1.pep
PQQKGRRNLRLWGRSSASLELKGRGQDTITKSLRXGGAWDTRRTCPVPLDLAKQAEKLPWHYFEQIRPRQAHHTPCGEHTGRNPTVSDGAREPGVIXIARLEGFLKGCVREPVGNDKTADETRLRVDCLKRHSLYLADLEKTTNTNTGLGAVSRLL

SEQ ID NO: 200910 - protein, 66 aa, Oryza sativa
  unsure (1)..(66): unsure at all Xaa locations
  Clone ID: PAT_MRT4530_96334C.1.pep
PDQGGFLKGKKIKNGGLAMFSKLGFFIQAXVPGEGPFKNLSKPLRDPLGKNLFPFISGPPKRTPTL

SEQ ID NO: 200911 - protein, 68 aa, Oryza sativa
  Clone ID: PAT_MRT4530_96335C.1.pep
MDDVVAPRKTCIRPSLGGRRVGSEQTDDTDGRWKEAAGDEWEVGARGTGREARGGMRQCGPAAIEGLL

SEQ ID NO: 200912 - protein, 111 aa, Oryza sativa
  unsure (1)..(111): unsure at all Xaa locations
  Clone ID: PAT_MRT4530_96336C.1.pep
PFXKPIQGSGXSXSERPSFEXGRSLVKKHXSQDXKAWVGXXGDGKHXGSAEDPRIGIIRVKMHSAVYSVVNKNLLSRAADVAQGAITGKAPPIQKLREISEEEVLTWRKAN

SEQ ID NO: 200913 - protein, 370 aa, Oryza sativa
  Clone ID: PAT_MRT4530_96337C.1.pep
MWTSDNQKRGYMAITTHFIDESWALRNIIMRFIYVPSPHTAEVISDELYESLVQWNLDEKVSTSTLDNCTTNDATIPILVRKIGKTKLINDGKVLHMRCCAYILNLIVKDGLEHLKDAIENIRDSVAYWTATPKRIEKFEDIAKFLNVTITNKLALDCKTRWNSTFNMLSVALPYKTVFTRASRVDKQYECEPTEEEWLFAEEKKIRLWSTCGNSLVEAMSVDMVEKFDKYWSDIQGLMGIATLFDPRFKSEMLYMCFEWLLGKTSALCDVEVSKVTTLLATLMDEYNVPEEEDNIEPSTLSLGSMEVISSFSERVARKRPASVRFQSELDRYLDDELIPISTKDFKFNTMEILLAFGLVCKIFKKACRY

SEQ ID NO: 200914 - protein, 64 aa, Oryza sativa
  Clone ID: PAT_MRT4530_96338C.1.pep
MAGFSEGMSGGDVRGYCVSHRGGGDDDGYGDGTIGHTCAWMAAEAVTETTIKALTGRPSLERQR

SEQ ID NO: 200915 - protein, 258 aa, Oryza sativa
  Clone ID: PAT_MRT4530_96339C.1.pep
MAVSSTLRRARSHPSWAAAARGLLATWGAGSGGRVRHPRHGAASASLFSSLSSSQTSAADAQLLRVINMEISYAQKDCKNRNWSKELGEGFPFEIQDKDGTNMMTLKRSDHKEQIEVEVFLPSAVNEAEENGEPEDQCEDGKHRTHIGNGVPAQYCIPLIVRVRKEAASYLKISCSSYPNELIIESLSFEPNDESGDSASLEAKLSNLPEEFQKAVYSYLKSRCISTDITDFLHAYMINKECHEYLSWLRKVKGLIKS

SEQ ID NO: 200916 - protein, 658 aa, Oryza sativa
  Clone ID: PAT_MRT4530_9633C.1.pep
MVLQKRLDYGSHGHRAPIKPRVATLAPVKRSTRIRKKQMYALDLLATAAEKLLADQDNLSSGPNINETPEGYVTSMKPVKAEQFDEAFPLRSVAVKKDDCKGCTVGCAGICGFLRQANMCLAENSSTQNLADSVLESLTAKPDVLAKDSFVSSKKSCRLGFGLGTIPEYGSVGVCQPWSTRSAEVKQVHRARPTAIRSQEDSDAAALCALVETMDLDTKPLAEASSGSNSGVHICGPDRGHNSHPSCLAKVQHAADRDDDENSSGCVHPSTSGNNRGYIPHYIGDRRIRRLFASRLRKAARNRICGEMSCKGNKLSLCEKKMPTTRRRVQQTTLKRKRLAQLYSEKSSDEVKLTIKSFNIPELLIEIPENATVGSLKKTVSDAVTTIIERGLRVGILLQGKNIQNDNKTLRQAGICRGKKLNDIGFTLECEAGQDSHPGVIVPEEMDFVGASVVDKSATSFGNYTTIDFCCMWSSKGFNIPFPGVKCEEPAENQQLMQDFPGCSLSDPGSVDYPVEWSTQETSASSQAIVPFADPNSLALANVPLSRSKRPDFGQRRIRRPFTVAEVELLVEAVEHLGTGRWRDVKFRAFENVHHRTYVDLKDKWKTLVHTASIAPQQRRGAPVPQELLDRVLAAQAYWSEQQAKLHGDPPVPEICPT

SEQ ID NO: 200917 - protein, 382 aa, Oryza sativa
  Clone ID: PAT_MRT4530_96340C.1.pep
MWTSDNQKRGYMAITTHFIDESWALRNIIMRFIYVPSPHTAEVISDELYESLVQWNLDEKVSTSTLDNCTTNDATIPILVRKIGKTKLINDGKVLHMRCCAYILNLIVKDGLEHLKDAIENIRDSVAYWTATPKRIEKFEDIAKFLNVTITNKLALDCKTRWNSTFNMLSVALPYKTVFTRASRVDKQYECEPTEEEWLFAEEKKIRLWSTCGNSLVEAMSVDMVEKFDKYWSDIQGLMGIATLFDPRFKSEMLYMCFEWLLGKTSALCDVEVSKVTTLLATLMDEYNVPEEEDNIEPSTLSLGSMEVISSFSERVARKRPASVRFQSELDRYLDDELIPISTKDFKVLDWIGLETSTKFNTMEILLAFGLVCKIFKKACRY

SEQ ID NO: 200918 - protein, 185 aa, Oryza sativa
  unsure (1)..(185): unsure at all Xaa locations
  Clone ID: PAT_MRT4530_96341C.1.pep
MSIAMAVLLLVALFYRIKKQAAAMAAKRKQQPKLPPGLATMPVVSNMHQMLMNKPVFRWIHRLLDEMDTEILCLRFGRVHVIAVASPEMAREVLRKKDAMLASRPSSFASRTFSFGYKNTIMSPAGDQWRKMRQVLTSEILSPAMERRMLGSRVEEADHXVNYVYSHCNDGHXERPHVTRHFCGN

SEQ ID NO: 200919 - protein, 1034 aa, Oryza sativa
  Clone ID: PAT_MRT4530_96342C.1.pep
MEDRVKFILFLLGEEADSFAKRAEMYYKRRPEVISSVEEAYRAYRALAERYDHISGELHKANHTIATAFPDQVQYSMLEEDDDNLPKAFTAVDPRKIHKSTVEGLMKKKKGEKSGLKDGGKNSGDKINKENAQEEISRLQKEILVLQTQKEFLKSSYESGMAKYWDLEKQINDMQEEVCYFQEEFNESAVLEDNEARALMTATALKSCQETIIKLQEQQKLSFSEAMVESERVRSSRDKLKNIMKVHGKSLPDLGKFFEKTDSVKFANENVTNDGSNTVDVMYSINQEKIELQATVDKIKEYFQKDSEVSVVEMADKIDALVNKVVDLELMVSSQTAQLNRLCLENTELEKSLHELEEEKPALNSGPGESYSKFKQAEEDLIRVQNLVSSFHAEGTIVHSNFTETITRFRDVSDMLLSPLLEHHQDGSAPMPSDETTPSIDMETSSEHDKTNSENEVDELPEHSKELEPADLCDDNHSSSGYPETKAENCYRGDGSEDLWYSALEDKSSFAAASVNEEESGNADNDSSRDHNNRGEDHAPEIASDDGSSKQQYTVQSHEKPILERLHHISSNDPGDHNAKKEENEQDLSISDESISEGNSEQKINKAGNSCITADTAPISRKVDEVGDQEENMIKLQQLLMNGLQDKEKVLLTEYTSILRNYKNEKRKLTEVETKNQERLNEMSAMISELRSANSMKDEKIRSLLELLNAVLDKDVSGNGHQMNPTTSFSSISRTFRGHRRTPSFSPGHQRKQSVSSISRIILESPKEDDALYDTVTDQESLILEDIKLIDVVKMENASPLEEKFRQDIDALLEENLEFWMKFSTSFQQIQGFQTKYEQLQPEIGKLTNKDKLKTNNGRADDPSAKGDSNAIEKRLRELKIELQVWLEQNAMLKGELQYRFASLCSIQEEIEATMEMGADPEEGAHFTSYQAAKFQGEVMNMKQENNKVADELQSGLDHIKGLQAEIEKVIEKIVERTSLSEAKGSSTWKNAPSRTRVPLRLFLFPAKKKKPSLLACVNPALQKQHSDMVFFTK

SEQ ID NO: 200920 - protein, 136 aa, Oryza sativa
  Clone ID: PAT_MRT4530_96343C.1.pep
ATADTRPPFQQQQSQGHPLQQQQMQQMQQQQQQQQIQQMQQQQQMQQMQQQQQQPQQLQQQQQPQMVGTGMGQQQPQMVGTGMGQQQPQMVGAGMGQQYMQGHGRTVQQMMQGKMAPQGPGSMPGAGSMPGGGYLS

SEQ ID NO: 200921 - protein, 908 aa, Oryza sativa
  unsure (1)..(908): unsure at all Xaa locations
  Clone ID: PAT_MRT4530_96344C.1.pep
MAEKTLREFAAPSADNVTVGPAVNIGDTILDLKCSLVTMAQASPFCGKPNEDASTHLQQFLEICSTYTVEGVIPDASFYNELTPSSRDHLDATTRGAFFLKTVRAAIDLIEKMVSNMGWSEERLQTHHRGMHTIKEMLAAKLDLLMKKLDDQEXGQAVCGRTSHSGNDCPESREEAMFMGNNGYRQQGGHGWNQPWPLYQGGNNGNNNNAELQQKDRDXLAQLAALVPAKETGRIPMQPEPSLENVKAITTRGGKSTRDPPYSNIAGTRQAGKEARSASTTELEENEEVQPDKIPPQEYCDTTLLPFPQRQRKPSVDEQSARFMDVTQKIHINIPFVDAMRVPTYARYLKDILNNKRALPTTEMVNLTEECSNAILHRLREKKKDPGCPTISCLIGIQHFDHALCDLGASVSEMRKDVFDKLNYTVLIPTPMRLQLADSSVYYPAGIAEDVPVKVRDFFFPVDFVVKIRYGPNPPQIQEVEVQLPEMDSLIVFMKKFLQIETTRKRPYPRKTLAKTGARAKKPLAPAPRKPPPTPRNKKKRHSRLFKGYGSQSSRQQHESSDRSSADVPMEDTGAEPLLLTDADLDLVSGREPQAYETLMDRVLAHTRAYVSGLLQKTESIFRRQLPVLRKTDFGKIFLVHRFIDILGPVYLHNMFPLERYMAVLKKYVCNRSRPEASIAKGYGTKEVIEFCVEFIEDLRRIGEHRVIVHSKNISMSDAWITRHHIYTFPTWLQQHLVGNGMIDRQLAFSARGPSCSISTFQGYEINGYIFFTRAQDRKSMNQKSVRIDAMRYDGTTSTYYSVIDNIWELDYGPLKIPLFRFQWVRLTGGGVTIDDNGMTTVDLNKVGHSDEPFVLANDVTYVFYVKDMSSKAKKGKGLDEPRRRVVLPGKRKIVGVKDKTEQKLLSV

SEQ ID NO: 200922 - protein, 105 aa, Oryza sativa
  Clone ID: PAT_MRT4530_96345C.1.pep
ARGSLTCMPITAEMAEKWGLVNHIVDDTQVLSKAIEVCEAIARNNRNLVVLYKSVINDGLQLDLEHARALEKERAHDYYNGMTKEQFASMQKFIQGRSSKPPSKL

SEQ ID NO: 200923 - protein, 49 aa, Oryza sativa
  Clone ID: PAT_MRT4530_96346C.1.pep
MNDMSWWWAGAIGGVRKRHGEHAGDASRPFQSVALVVGSTGIVGTSLVD

SEQ ID NO: 200924 - protein, 516 aa, Oryza sativa
  Clone ID: PAT_MRT4530_96347C.1.pep
MRAPSLVPRPRLLASTTLRAFHAAAHQRHQDPIIPGIYSYASLLRRSAATSDPRLAVSLHAALLKRGFLLASSHIFLCNHLLIACFKSRLHRHGLRLLDEMPRRNAVSWTTAIAGLTQGGQPREALALFKRLRRAGLPPNEFTLVSALNASSFVGGAGVGRARQLFALAVRLGFDSNVFLTNAFLAAMVRHGQLADAVRLFDNANAWDIVSWNTLLTAFAHRSSLRLCMLWRRMAIEGVSADGFSFSTVLSGLSGSANVAATGLQVHAQLVKSGFVDDVCVGNSLLEMYMKNKQLESGIRAFTEMRHRDVVSWTELAAGLLHCGEPAESLRVVSDMILDGIRPNNYTIVAAANACANLANLNQGRKIHGYVIKLGGDSNVGVNNALIDMYAKCRSVTGAHKVFQSMQRQSVVSWTAMIMAFAQNGQAREAVKVFDDMLLEGMAPNHAAFYSVLYACSQGGFVDEGWIYFDAMADKFGVEPGEDHFACMVDLLTKAGRIEEAEELISRMPFRPGVVA

SEQ ID NO: 200925 - protein, 38 aa, Oryza sativa
  unsure (1)..(38): unsure at all Xaa locations
  Clone ID: PAT_MRT4530_96348C.1.pep
KDRCERSSVSYYADSGLEPGGFXTKPAMEDPSIDGLQV

SEQ ID NO: 200926 - protein, 147 aa, Oryza sativa
  unsure (1)..(147): unsure at all Xaa locations
  Clone ID: PAT_MRT4530_96349C.1.pep
DESVRRRAFTEEHARDSFETLXLFSVCRFRELTGSYPQNITVVSYDFKEERFAQLHRSALGFPEGRFFFLGTPATLTARESAVKGEAAVRSQFQEDPYGCLGSLHMKRLKRDPFHRAIPYPNGCPELKGLFSYCGLVPYPGQLPWTQ

SEQ ID NO: 200927 - protein, 261 aa, Oryza sativa
  unsure (1)..(261): unsure at all Xaa locations
  Clone ID: PAT_MRT4530_9634C.1.pep
MEQPLFELSAPRCEFYESPPSSEPIFTACYEIRPELIKALASKIEEPSIVESQPEPSTSTDLTDEAVPEPSSVENEEIQTLDNAPVLFRDGFDEDYDNTLSYFSKKKPLVPLPPPDPMELGFLRETVWELTYIMIDEWLREAELSSETEPQTKPYPLDMWKYGSALQQRPELNPYSTRGTTIKTQPXHLEPSLKPXLGILNRRSDDVTCLARFPKRRLQLPRRADLPKLQRLRDRRKRKGFYSNKLHITAETKHKNGFLTS

SEQ ID NO: 200928 - protein, 62 aa, Oryza sativa
  Clone ID: PAT_MRT4530_96350C.1.pep
HISHKETAMTMITPSSNTTHYEGKLGTACRYQSRNSQGQTPRVPAITETSFLLMALFICLCR

SEQ ID NO: 200929 - protein, 37 aa, Oryza sativa
  unsure (1)..(37): unsure at all Xaa locations
  Clone ID: PAT_MRT4530_96351C.1.pep
MNXTNAGLPRPRGWADLGSPIXVTRSGRNWRIPQSDR

SEQ ID NO: 200930 - protein, 266 aa, Oryza sativa
  Clone ID: PAT_MRT4530_96352C.1.pep
MLPGSVAPAAWSVMFMPTQTVGTVLCCICGVAMQPNPANMCTRCIRAGVNIIEGVPRHAAVYWPDCTFYLQPPRSWLRAGPESPELMQILLRGLNRPLARPSPAPSSSSPSPTPSASTSSSAKWIPVLDGAHARSPSPVLTPALRPSSPPRHRLASEDRAPKKDKAPPPSSKPAKSGGGKQKKKKWSKGKQKEKVNNSVLFDQATYDKLLSEVPKYKQITPSVLSERLRINGSLARRAMKDLMTRGLIRMVSVHCSQQIYTRATNT

SEQ ID NO: 200931 - protein, 67 aa, Oryza sativa
  Clone ID: PAT_MRT4530_96353C.1.pep
FKDKKTKRNGKRSKGRFFMAETGSQSNVKRSKKRGLDYLNRWARSLRPGFSCTTYLRLETCHHYFYR

SEQ ID NO: 200932 - protein, 300 aa, Oryza sativa
  unsure (1)..(300): unsure at all Xaa locations
  Clone ID: PAT_MRT4530_96354C.1.pep
MXAAKKTNLSTDNINNKLQLVMKSGKFSCGXKTXLRTXRNPKAKXGXXXNNGPXXRKAEXEXHXXXAKGTXHHXHGXKXXXGTAXXKXHXXGXHSXXXPXDTXXXKTTXEQEGAPAQQKAHEDRAGGAGPEEGRPGQRTAGTREPKGRGKQGAGRGKKRGPARSEGGKRTAGRERTEPGGRKKERGRGRGPRKGRASPGTTKRREDQGGGPEHAEAKTGAATHNRAGGQRRTTNTGGTAHQRATPAAQARKGDSTAQRSRGGRGPRHGPDQAQGNTPPQRAGEREGEADGRAPTAERTTA

SEQ ID NO: 200933 - protein, 108 aa, Oryza sativa
  Clone ID: PAT_MRT4530_96355C.1.pep
MAPKKDKAPPPSSKPAKSGGGKQKKKKWSKGKQKEKVNNSVLFDQATYDKLLSEVPKYKQITPSVLSERLRINGSLARRAINDLMTRGLIRMVSVHSSQQIYTRATNT

SEQ ID NO: 200934 - protein, 630 aa, Oryza sativa
  unsure (1)..(630): unsure at all Xaa locations
  Clone ID: PAT_MRT4530_96356C.1.pep
RSGNPKERLLPMKTICGSLMHELQVIWDEVGEPEAARDRMLLELEQECLEVYRRKVDQANRSRAQLRQAIAQYEAELAAICSAIGETTVHVRQSNQKACGLRDELGAILPYLEEMKRKKVERWNQFLDVVGRIKKISSEIRPANFDPFKVSVDQSDLSLRKLEELRVELKSLEKEKGERVKQVMEYLKTLHSLCVVLGVDFKKTISEIHPSLDEAEGPRNISNTTIEMLAWAIQRLRETKMQRMQKLQDLASTLLELWNLMDTPFEEQQAYQNITCNIAASEAELTEQNTLSIEFLNYDDNRYNAGRGAHIMLKRAEKARVLVSKIPGPRQTQKPPPRSRLSQLSPPRAIHRXPPALSSHATHTRSRTNTPAPHDPSPTQQTTLPVVSSPLASHHRHLPPHAFPSPRASYIIRGFTRIQPTKTTTSSSRSSTTTSSFSWLAXLVSSWPCRCWFLDMGNYLSCTMAKVPGGKGARVILPDDGGLRQVALPATAAELMMDAPGHFLADARAARVGARLAALSADEELELGAVYATFPMKRLGTPLAPADMARLAAVATREARRSAKVAAAVVAPPPTPLQAEDAAPRLRLDEMVDDEAVAADMNVYKHRLSRARSRRPTLETIQEENYMSTN

SEQ ID NO: 200935 - protein, 65 aa, Oryza sativa
  Clone ID: PAT_MRT4530_96357C.1.pep
PKWHQINTQEWNFKHVTMEYTGKKVSIYIRIGGYGELVNPQFEGPYRISVSSNCVHIQIDYLHLD

SEQ ID NO: 200936 - protein, 99 aa, Oryza sativa
  Clone ID: PAT_MRT4530_96358C.1.pep
MVQGGEGGFGFEGKITAAQDSSSFFSPPPDGRRAATPGRNFWVVLPFFTKRNSTQDRRFTESRTQDTSRVVTGTSIHAVVAVVVHAARAICLHTIGRSS

SEQ ID NO: 200937 - protein, 112 aa, Oryza sativa
  unsure (1)..(112): unsure at all Xaa locations
  Clone ID: PAT_MRT4530_96359C.1.pep
RHYRPKISIGFRVLESANGSYQVASSRILGGFARFLIANKGFIRVSADLMTSDIQPMYVLTFGSXLFYHIIVSRLISTGYYYGLITLPLVDCXNPIDIGWNYSIGLSADRLI

SEQ ID NO: 200938 - protein, 315 aa, Oryza sativa
  unsure (1)..(315): unsure at all Xaa locations
  Clone ID: PAT_MRT4530_9635C.1.pep
RVQLKQPGGSPNELHATNTYREGAPAPKISPGTTRQRERRPKXGRKGGRERRVPGSPPVDAGVGTASRTEXSRRRGLVQRGXRRRSGGRRAKRRGGRGRRGFGEPEEGDAXETGGGPGRRRRRTGARRRRRRERATARARFRRRERAARGGTGRRGCGEGLNRAGAREGGRGREETGAGXSAAINGAGGIXGSGFQPNPRERGREKWGERERESWGVISPSLLRAGTAGGGGIRGGGGARARARRRERREDRDDRWAPPVSEGGGRARPSAARARGEAEWAAGRRREREGDGPSRPKRGRGEKGLFRVFLFIKPF

SEQ ID NO: 200939 - protein, 63 aa, Oryza sativa
  Clone ID: PAT_MRT4530_96360C.1.pep
MKERGVYDTIDVIGNGNMQRIEKLAAAKKSNFRVKLPFGVKLPFEAESRKQRQVDQRVPSLGL

SEQ ID NO: 200940 - protein, 271 aa, Oryza sativa
  Clone ID: PAT_MRT4530_96361C.1.pep
MKRRARSFLFRPIAGGAAPAKLGGVLRRPRRPRNTERISGSEGRTSLGRSRNFVAVENLRRYWRAAMEELELPLPTEKLAVDPGREGGKRGVAVLVATGSFNPPTYMHLRMFELAKDELQQRGYSVLGGYMSPVNDAYKKKGLLSAANRIRLCELACESSSFVMVDRWEAMQKGFQRTLTVLSRIRNALSKDGLADGEELALMTPSSVSRSGSYDNIISVDEIVPNQISSSRVRECIKKCLSIKYLVCDEVIQYIGEHKLYKEADGSDTRK

SEQ ID NO: 200941 - protein, 64 aa, Oryza sativa
  Clone ID: PAT_MRT4530_96362C.1.pep
VPPKLRLFQNHCLGSLKSANFFLCKQFNLMPNNFSQPKCNIPVDPYISPMYTIRHSTDGGDGID

SEQ ID NO: 200942 - protein, 430 aa, Oryza sativa
  Clone ID: PAT_MRT4530_96363C.1.pep
MKPLQQRCKPTDTGTAAKLGGSTMQSLKPGKYINKSSGNASTKYRRAGASSPQLYTEKQSAPKDGSFMEALFHDSKNVSARPPCHSGKIALQLFPIDEEFQKSLQQKNHNPYLELTVAPRKKISSVLQHLNTKWGNSQCARGELMLFPDGTRLDNINGSERWTRSDSCTAADVHVAVGSPSTFRLREQKQMTALSEFPSNFAAPSTEANTVKTMKQDNQSKETPLSWIDCISNISFGALLAEAAPSQDSKQLLPQNNSSLQQIPLTADSFDAAIASLIARQQASSQPKVSTPSLWDAEETCHAFPSQNRISRRTPGTTPSSCGASTLSVLGTILESGTDGEKQCSTEDRREEPNPQASLLANDDNNVKPDIPVSESTGEPRLGASCFQSESTGEPEVGASCSRLLSGTDSLSVSDLLANSLDAFQKFSVF

SEQ ID NO: 200943 - protein, 159 aa, Oryza sativa
  unsure (1)..(159): unsure at all Xaa locations
  Clone ID: PAT_MRT4530_96364C.1.pep
MWRGNNGCKRTNVHALLNKDCRDIPVPSHSKAQRIRDTLDVRRQVNPTVRAALTHHAVDVSLGHVQNXDENQTTSNSXLPLAIGNGKNTLTNMWLTAAHXRDRLRTLTDNCXTLIEADVDARTTDSYVLGTWWMSLTNRCTNHVKTTRCSQARPIRTNS

SEQ ID NO: 200944 - protein, 67 aa, Oryza sativa
  Clone ID: PAT_MRT4530_96365C.1.pep
MLAANPSIDILHGAALAGAERLLLRGHGLPVHLRQRVGGAPERQVHLLLRPRRLLLLRPPLLRRRRH

SEQ ID NO: 200945 - protein, 108 aa, Oryza sativa
  unsure (1)..(108): unsure at all Xaa locations
  Clone ID: PAT_MRT4530_96366C.1.pep
ALFXLVXTDVNTRGLDIPHVAHDTQXDLPDDIDDCADXIGGTGPAXKTGLTTAFVNESNLFLARPICELIQEAYHEDADWIERCSARTWLDNLYINLLSLRARFGGQN

SEQ ID NO: 200946 - protein, 801 aa, Oryza sativa
  Clone ID: PAT_MRT4530_96367C.1.pep
MLAVHLYAAMTPAPPLLCAQSQSQLERTRSRIPSPFASPRKIPKLNRTPRLKAPRTQFFRRLGHRSVGRGTGRRRPRTYHGAALAGAERLLLRGHGLPVHLRQRVGGAPERQVHLLLRPRRLLLLRPPLLRRRRHPALARKLPNPRYPPRRRRTETRTSRALALPRRARGVAWRDAAMAASSYGGGSGSGARGPRGPGAGVGLQNCTPDSFAAEYQKTMKPLQQRCKPTDTGTAAKLGGSTMQSLKPGKYINKSSGNASTKYRRAGASSPQLYTEKQSAPKDGSFMEALFHDSKNVSARPPCHSGKIALQLFPIDEEFQKSLQQKNHNPYLELTVAPRKKISSVLQHLNTKWGNSQCARGELMLFPDGTRLDNINGSERWTRSDSCTAADVHVAVGSPSTFRLRYGWFPPNFGEQNSGVSLGLVHSAGNIIDNEPLDPVVREQKQMTALSEFPSNFAAPSTEANTVKTMKQDNQSKETPLSWIDCISNISFGALLAEAAPSQDSKQLLPQNNSSLQQIPLTADSFDAAIASLIARQQASSQPKVSTPSLWDAEETCHAFPSQNRISRRTPGTTPSSCGASTLSVLGTILESGTDGEKDTMHLLIGLSLQQCSTEDRREEPNPQASLLANDDNNVKPDIPVVLTRASCWIRYCGFILMLVSPVTGRRCTCRDAHDLKICCFSFSEVFKGIECACQRSLKGFCADPWTWFALFDHLILSFIGYACRDRINFKESDAMYAATCLEICMQHADINSQIRCSEQLWLINTVTLSCAAAACWCPSHIHTWPESDSSHQTPLKMMELN

SEQ ID NO: 200947 - protein, 78 aa, Oryza sativa
  Clone ID: PAT_MRT4530_96368C.1.pep
MVWRGLLSRNYCSSSRCDVGCGDTRWGACYPTVVKGRVLRTDMRLWRLWSGLADVVADHVNAKMHVGVIVGAIHGGRG

SEQ ID NO: 200948 - protein, 36 aa, Oryza sativa
  Clone ID: PAT_MRT4530_96369C.1.pep
LVKRQSLLHLGAKHEVTYSCVQLLFSKLEGVFNPLP

SEQ ID NO: 200949 - protein, 232 aa, Oryza sativa
  Clone ID: PAT_MRT4530_9636C.1.pep
MASMLCDPTCPVEAQLLRLPDGLTIAGGMYGWGFWDRWSVNVSSIVVHIISFSDSGTKLSLSPRALVLRQYTMLTGTVHSRSFTFRSRSFTFVHVTFMFQSRSFTFGNVGARSSGGSGALAWRRGGGVSWRRRGVSAAWRGPAAWGGPAACGRGGGVVSRQRGELEAGASATSPWRPHGRYVVGGGGRVEVGVGICRRRSRGRGQPRASTGGGGEDRKTTARDDGGVGVGLP

SEQ ID NO: 200950 - protein, 859 aa, Oryza sativa
  Clone ID: PAT_MRT4530_96370C.1.pep
MAKKSYKQRCKSEKVHMGCMSGLIHMFDFRRSPKLISDGTIRRSSVRSDLKGSEDFHGIIFSDEDKDYGVKTIHASRPSIKALMEEEMASGTQILKETQRNIFGIRSDDLKSVNLQEGSDVDLDLATSLMELYRNHNGSRDIITSEVSDHSSSLIDKEHNTDASTHPKQISCSIEKALEAVAEAVITHQSANGKYTSSSYEARPNEFLDALQLLSANEEFFLMLLKDPSSRMLQCLQNLYTALGNPMLELAEDDKQTKSKVTINSLEQSEVSKYSVQKTHNFFLKEDKLVMRRPPKLNDSPRGVSRIVILKPSPGRSQTSLISSSAMSSPVQTRADLQGQEQSDKYARHFSLRELKRRLRLAISNNRKDVMSSTFQKDDSTQQFILESMSTSMDSSECEKAEKPSIVDKKTIPEDSGSGMGNDATHCASSFFYEKAKKHLIERLDNQKNDTSQIVHKSEPFGKLLSYSENDTFSQTDCPQEDVKLSEDSTASSALLTTEQEDISSNSDPPMKFGELIPLDTSTSANTQLDEFKTDHASHPVKEGTISQELTSEGIDSMNDATDTPQVSIQIETSTESLEQINTDQCFAEESQTMNALPEVSLHTPEKVNEQFNHSPSAVVGLTKPSILTFSCSPENADDKEERLSPQSVLDSFLGDGISPSHKTRTQDELSMPSTRILFKEDDTPSGTPTLQNTPQEAILDDKQARLSFIKVVLEASDFLSEESSEIWYVDGSLLDTSVLAEVGTLYCLTDDAVFLFDCVEEALCKIRDNFFGCDPWVAYLKHSVRPAPVGTGLIQEVDNCIDSLVSDEVPSTLDRVVLKDLESGSWMDLRVDTEEVAIEVWDTLLDDLLEEMVFDLWL

SEQ ID NO: 200951 - protein, 89 aa, Oryza sativa
  Clone ID: PAT_MRT4530_96371C.1.pep
MSAAAGEVEAAVVVGARRASWEPPERRRSVVGGREGGGARNQRLSLAGSLLSGLVHVGPHTPVRNNSSDAPTSYYFLRPTIVMILDCLE

SEQ ID NO: 200952 - protein, 901 aa, Oryza sativa
  Clone ID: PAT_MRT4530_96372C.1.pep
MDLVGSLLVNMTHLVDTSGLQFFGWLITAGSFGLAALIYALLRLQRAASLYWIKAAAREKKAAWKSLRCPSSGHTWTEDYFRGGQPSTCCVCLSSLTTAQGVGSRGADAVVVHRCSVCGVAAHSGCSRGAEKDCKCVSQHGASTLLHHWSERWVELDDNPEMSSFCYYCDEPCGVPFLGVSPIWRCLWCQRQIHVDCHAKLLKETGNTCDLGLLRRLIVPPLSVKEVAQGPAITGMLNSIKEGLVTSSVRGRIKRRGNKKRMNNHPGGKTSPVPTNSSILDSVLEGFARLQNLNGKYALANHKSSGDSVKQTHGYDSPNGGKKKYEIIDLPQDSRPLLVFINGKSGGRNGPSLRRRLNMLLNPIQIFELSASQGPEVGLQFFHNVKHFRILVCGGDGTVAWVLDAIEKQNYESPPPVSILPLGTGNDLSRVMRWGGGLSSVEGQGGICALLNDVDHAAVTVLDRWNVAIKEKNGAEDQCVGCDAKVAYDFHTTREEKPDKFCSQFVNKLIYAREGAKDIMDRSCSDLPWHVSLEVDGKNVEIPEDAEGVIVLNIPSYMGGVDLWQNDNEHDDDFGLQSMHDKMLEVVCISGTWHLGKLQVDGEPWIQPPGCLEISHRGQMFMLRRTSEEPTGHAAAIMSEVLMNAECNDAAGEVYEQLDRMPEMAAVEVFGSIAPFMEAAENFRVLIQETRAKAEEACRLAVVIQKAVAAAALGGGSWDAAAAEEVCKKAAAAVGGGSWDAAAAAEVCKKGAAVGGGCWDVAAASEVCKAADVMLKEVAAPANLIKEGTVEDEADQPLILIPASTTRVFGGGMRRLTQRTMLVDDSDHTALFEKKASVKQIGIEEMRGKAKDVSSEEGNSEEVKSSDYDEDMVIRGYAQNPYDDSGLEDLLQDQDALEKSA

SEQ ID NO: 200953 - protein, 94 aa, Oryza sativa
  Clone ID: PAT_MRT4530_96373C.1.pep
MDLVGSLLVNMTHLVDTSGLQFFGWLITAGSFGLAALIYALLRLQRAASLYWIKAAAREKKAAWKSLRCPSSGHTWTEDYFRGGQPSTCCVCLS

SEQ ID NO: 200954 - protein, 547 aa, Oryza sativa
  Clone ID: PAT_MRT4530_96374C.1.pep
ARGSHWSERWVELDDNPEMSSCCYYCDEPCGVPFLGVSPIWRCLWCQRQIHVDCHAKLLKETGNTCDLGLLRRLMVPPLSVKEVAQGPAITGMLNSIKEGLVTSSVRGRIKRRGNKKRMNNHPGGKTSPVPTNSSILDSVLEGFARLQNLNGKYALANHKSSGDSVKQTHGYGSPNGGKKKYEIIDLPQDSRPLLVFINGKSGGRNGPSLRRRLNMLLNPIQIFELSASQGPEVGLQFFHNVKHFRILVCGGDGTVAWVLDAIEKQNYESPPPVSILPLGTGNDLSRVMRWGGGLSSVEGQGGICALLNDVDHAAVTVLDRWNVAIKEKNGAEDQCTKQVKFMTNYIGVGCDAKVAYDFHTTREEKPDKFCSQFVNKLIYAREGAKDIMDRSCSDLPWHVSLEVDGKNVEIPEDAEGVIVLNIPSYMGGVDLWQNDNEHDDDFGLQSMHDKMLEVVCISGTWHLGKLQVGLSRAHRLAQGKVIRLHLHSSFPVQVDGEPWIQPPGCLEISHRGQMFMLRRTSEEPTGHAAAIMSEVLLNAQCNGVID

SEQ ID NO: 200955 - protein, 62 aa, Oryza sativa
  Clone ID: PAT_MRT4530_96375C.1.pep
MNAVKALPDCDVVRITDQLTKPAGRSVPLPVGLGAWFYWALDEAHDDALLVSSKPEANLPKP

SEQ ID NO: 200956 - protein, 280 aa, Oryza sativa
  Clone ID: PAT_MRT4530_96376C.1.pep
MAAVEVFGSIAPFMEAAENFRVLIQETRAKAEEACRLAVVIQKAVAAATAVGGGSWDAAAAEEVCKKAAAAVGGGSWDAAAAAVVGGGSWDAAAAAEVCKKAAAVGGGCWDAAAASEVCKAADVMLKEVAAPADLIKEGAVEDEADQPLILIPASTTRVFGGRTMLVDDSDHTALFEKKASVKQIGIEEMRGKAKDVSSEEVKSSDDDEDMYNINTGVYEIKEPQSRCINIEIKRKHMFVTSLDITSKLILLLTKMDFNFSNFVIEVRQSLFISLIYWLV

SEQ ID NO: 200957 - protein, 369 aa, Oryza sativa
  Clone ID: PAT_MRT4530_96377C.1.pep
TRRQRKIKEKKNIFSPSRVLPSPSPAMAPPPPPPTATKYFWGDSPEPDEYYASLGLRHAEAYFQSPCGRLFTHSFHPLSAASDGDVKGVVFMSHGYGSDSSWMFQNIAISYARWGYAVFCADLLGHGRSDGVRGYLGDTEAVARAALSFFLSVRRSGAYASLPAFLFGESMGGATTLLAYLRSPPDAGWAGIILSAPLLVFPDDMYPSRVRLFLYGLLFGLADTWAVMPDKRMVGRSIRDPAKLRVIASNPRLYRGSPRVGTMRELARVTALLRESFGEVAAPFLVVHGTDDGVTSPEGSRMLYERAASEDKSLILYDGMYHSLIQGESDENRDRVLADMRAWIDERVRRYGAGAGAAAADGHAEAPAA

SEQ ID NO: 200958 - protein, 114 aa, Oryza sativa
  Clone ID: PAT_MRT4530_96378C.1.pep
MGSDGADDSAPLSLIVGGGYGRAEHRGGGAEGWGHGSRDRADGRGTKSSSCSASLTAASRTSPPLSHVPPSPAAAPALISAALPLPATSTPPPAAGVPAAPALLPCWLCSSTKV

SEQ ID NO: 200959 - protein, 433 aa, Oryza sativa
  Clone ID: PAT_MRT4530_96379C.1.pep
LAALALGSGRRARRRRLLPFFFDFCPRRRARRRRVHSLSPPAPPPIRSEGRQRARERGLSCEGGDAAGGIAQWRQKATNFFSSSSFKLKQAGQSAGDNIADVAGKVGSVVKSRWAVFQEARQRQPPPGETVQERFISAAATTGVLLRKGISETKEKVAVGKVKVEEAAKKTADKSKTILNNIERWQKGVASTDVFGVPIEATVQREQSGKAVPLVLVRCADYLVISGLSNEYLVKSEGEKKVLQQLVSLYNEDSGAPFPDGVNPIDVAALIKCYLASIPEPLTTFSLYDELRDARVSIADLRNILKKLPNVNYMTLEFVTALLLRVSRKSSLNKMDSRSLAVEFAPLIMWQQGDSGTDLRNHLRFTLKAPPKIVDTTSNTTEWDLLDEDDVDASSQIPLDDASPPDYSSIEVIQSLIEHHNAIFTDANETVWR

SEQ ID NO: 200960 - protein, 521 aa, Oryza sativa
  Clone ID: PAT_MRT4530_9637C.1.pep
MGSRSRGGRHLLLLLHLLSLHSSLLPWAAVSAAGGGGSGDPYVGVTIGTAVTNLLSPSDLPEFLRAQRITHVRLYDADPRMLSALASSGARAIVGVPNDELLALGSSPATASAWVARRVLPYAGANSSTPGLIAAIAVGDEVPTALPSALPVLLPAIQSLAAALAAANLSSIPVSTPLPFSVVLDPFPPSQAFFNQSLAKSFILPLLSHLANTSAPLMLNLYPYYSMMQSNGVIPLDNALFKPLPPSLEMVDPNTLLHYTNVFDAMLDAVHVAVKNLNATGGGGPVPVLVTETGWPSYGDRRAEPYATRDNADAYNSNLIKHVNDKPGTPMRPGAQASVYIYELFNEDLRPGPVSEANWGLFHGNGTPVYLLHVSGAGGFLANDTTDRTFCIASDDADEKAVQAAMDWACGPGRTDCTAIQPGQGCYEPNDVRSHASFAFDSYYQSQGKAAGSCYFQGVGMVTTTDPSHDSCIFPGSKSDGANTTTAQTSDAEGSAIWRLRTGRETGFLFILRWLLSLSVV

SEQ ID NO: 200961 - protein, 89 aa, Oryza sativa
  Clone ID: PAT_MRT4530_96380C.1.pep
SPPLRLIVFFICQDDEASRAILLIGLRDLNLARFPKCQLQLPRRADLPKLQRREKAECRCSMSRWWSREEDVTTRTRSDAWADAWADAW

SEQ ID NO: 200962 - protein, 110 aa, Oryza sativa
  Clone ID: PAT_MRT4530_96381C.1.pep
MERDEIEMVAMSRNVACTCIVMERRIGVEARVAACRSDLAMGLREGALKPRSAAFWDVTPNRHMPLVFAYYYLTFPNSIEYPNGVIVSKGKAYQYSGWILHGPQITWTYT

SEQ ID NO: 200963 - protein, 225 aa, Oryza sativa
  Clone ID: PAT_MRT4530_96383C.1.pep
MAAGLQVFGQPASTDVARVLTCLFEKNLEFELIRIDTFKKEHKLPEFIKLRDPTGQVTFKHGDKTLVDSRAICRYLSTQFPDDGNRTIYGTGSLERASIEQWLQAEAQSFDAPSSELVFHLAFAPQLNIPADEARIAENERKLQQMLNVYDEILAKNKYLAGDEFTLADLSHLPNSHYIVNARSPRGKKLFTSKKHVARWYEEISNRASWKQVVKMQSEHPGAFE

SEQ ID NO: 200964 - protein, 442 aa, Oryza sativa
  Clone ID: PAT_MRT4530_96384C.1.pep
MEAPRLRLPFLLLVALVVSPPAVAAAASRMRIEPLPTAALRRLYDTSNYGKLQLNNGLALTPQMGWNSWNFFACNINETVIRDTDDCWSNVKRGKKDQLLPDPKTFPSGIKDLADYVHGKGLKLGIYSDAGIFTCQVRPGSLHHEKDDAAIFASWGVDYLKYDNCYNLGIKPKDRYPPMRDALNSTGRQIFYSLCEWGQDDPALWAGKVGNSWRTTDDIQDTWKSMTDIADKNNKWASYAGPGGWNDPDMLEVGNGGMTFAEYRAHFSIWALMKASTHWVHSVITRMAPIFQYVAFGLHDSNLFVLLLDQAPLLIGCDVRNMTKETMEILSNKEVIQVNQDPLGVQGRRILGQGKNGCQEVWAGPLSGNRLAVVLWNRCEESANIIVKLPSVGLDGSSPYSVRDLWKHETLSENVVGTFGAQVDVHDCKMYIFTPAVTVASS

SEQ ID NO: 200965 - protein, 85 aa, Oryza sativa
  Clone ID: PAT_MRT4530_96385C.1.pep
AVHSRTHINYVMGTIGYIDPEYARTSRLNEKSDVYSYGIVLLELLTGKKPVDNECNLHHLVTIFSFACYCLFENLFLSFTIYSCI

SEQ ID NO: 200966 - protein, 97 aa, Oryza sativa
  Clone ID: PAT_MRT4530_96386C.1.pep
MELAVCEVHVYSTVPKLVDASSLENKNARAVSCGARHSAIITDEGEVFCWGWNKYGQLGLGDSMDRNVPCSVPVDAYHPLNVSCGWWHTLVLAESPT

SEQ ID NO: 200967 - protein, 86 aa, Oryza sativa
  Clone ID: PAT_MRT4530_96387C.1.pep
MEGFRGHNGEDDFGPIVNASSQRQGTKGGEEDRDVVPTAWWRRSGGGVEIDGAVMIPTLAVVEKEHVGNPPDHREAFGAKLAALVL

SEQ ID NO: 200968 - protein, 285 aa, Oryza sativa
  Clone ID: PAT_MRT4530_96388C.1.pep
WCQIHDRRGVGVALCQGGHAVTGAGWREAAAAAAARGLRRQGARGSGGASEGERDAACAGGRGRCGRGAVEQLELERRRDRHGWAPARRCRTTRRCCCCCCRCSGPPGGTPAAGRGGKLVLALAPRRAPGRGRRRRRRPVSNVPSPRLSLAGSAGPISAATAVTHVAASPRRKCWPVPAAPATPPTPSASPVAAAAAGAVGMRFPFEGYPVSHPYYFFGQAAAAAAASGCRMLKIAPAPVTVAALAQSDSDSSSIVDLAPSPPAALAKKAIAFDLDLNCPPPMEV

SEQ ID NO: 200969 - protein, 154 aa, Oryza sativa
  unsure (1)..(154): unsure at all Xaa locations
  Clone ID: PAT_MRT4530_96389C.1.pep
IGEAAVLCGATVPPRKXRCLLHSLEHXMPGWPQASLAWRSRSDLQTPEPCPGGIICYMGKCWQWHGNGCARFGLSDVVGGWCGMMDVCLCMVQCVCCRNEWVLLLDGIEAVLTCTSXECWCSVVVLILFGYQQVINIIRDVXXXMCNLFDLKII

SEQ ID NO: 200970 - protein, 67 aa, Oryza sativa
  Clone ID: PAT_MRT4530_96390C.1.pep
MSYMVTKYEDHCMILKLNAKHIVSYTLAHEERYSAVSDLAGHGFEEEGCHVVDYKSALQTAKSTTDR

SEQ ID NO: 200971 - protein, 39 aa, Oryza sativa
  Clone ID: PAT_MRT4530_96391C.1.pep
HFQIIEFSSIPLNLGLTALCFVRPEVPVTPVWNFRGSGV

SEQ ID NO: 200972 - protein, 108 aa, Oryza sativa
  Clone ID: PAT_MRT4530_96392C.1.pep
MSLQVLRQYFAGSLKDAPKSLGMRPTTLERKCRLFWLDPWPSPKIKKVDHSLRKLQQIIDSVHGAETAFQLNTLYKDLTNTSGSSDNNLSGSVTGPLANQNNLDFEMH

SEQ ID NO: 200973 - protein, 883 aa, Oryza sativa
  Clone ID: PAT_MRT4530_96393C.1.pep
MIPDSEGNLTCMEEGDPQPSISLARTPSEGAAAAVDLDLLEQLLSADNAWLEVAANTSRSPNFFATPSNCLTDASVATTTPANSWWIQPSGASTSVRERFDQALAYIRETQSDADVLVQLWVPVKGNDGQLVLTTSGQPFTLDQRSNSLIQFREVSTKYQFSADVASGSSPGLPGRVFIGRLPEWSPDVRYFTSYEYPRINHAQYLDVHGTMGLPVFERGNYSCLGVIELIMTKQKLNFTSELNTICSALQAVNLTSTEVSSIPRAKLNSASYKDALPEILEVLRAACITHKLPLAQTWVTCAQQGKRGSRHSDENYKYCISTIDAACYVNEPRMQSFHEACSEHHLLRGQGVAGKAFTTNQPCFLPDIGSSTKLEYPLSHHAKIFNLKGAVAIRLRCTRTGIADFVLEFFLPTDCEVLEEQKAVLDSLSGTMRSVCQTLRVVTDKEMEDEAMREMNELNSFSPRGKNKVEELSFGDNTRGDREEASWTTLVGTSQKGSDLAELHTHGMLSHGGHGSSQAGDQTSKEGSKVKRRTKTEKTVSLQVLRQYFAGSLKDAAKSLGGQPSHAPYSQNVSIVITLFFRDSCYCMKVQVCPTTLKRICRQHGINRWPSRKIKKVDHSLRKLQQIIDSVHGAETAFQLNTLYKDLTNTSVSSDNNLSGSVTVPLANQNNLDFEMHQHHRLSSNIPSTSLSHSSCSQSSDSSPSCSGGATKHSPQVGADQVRSGCLPQHSPVQTLQTEAASINEHFSGQEAPIDLLQDVAEKANGEQHMSQSPSSPKQTANVGMRVKVTFGSEKVRFRLKPECDFQELKQEISKRLSIADMNSLIVKYLDDDSEWVLMTCDADLHECFHVYKLADIQTIKISVHLAASPTTRITIGHTGFS

SEQ ID NO: 200974 - protein, 354 aa, Oryza sativa
  Clone ID: PAT_MRT4530_96394C.1.pep
MASNGTSVAEGDKANQEDRLSALPDDILIHILDRLKTRDAVRTSVLSRRWRHLPGVLSKIILHVGSFKPKDGSMLAKDDLRIRSNISVIEATQSILAHKSQCKINFLSVGFYLREESISIAHSINDAMANREIVSTKFMILPEKHGIQRMEDDKIICGKRFMSFSYACPRAFGCLKQLILTCVRLGALHLDFECGRIWIQPEHPKLLAPVLRNLQIASLTCIHEECNLTWIFFLLEAAPLLETMHIKMWDHECKTSEDEELYQKEGTFIASMRKNIMHKNWRKDSRKVVCTVDDVCKPIFITNIIDTRKNIELQPFENICSYFVPIFNYVMQTSPKIAMQISPKTDLIPTSVEL

SEQ ID NO: 200975 - protein, 464 aa, Oryza sativa
  unsure (1)..(464): unsure at all Xaa locations
  Clone ID: PAT_MRT4530_96395C.1.pep
MASNGTSVAEGDKANQEDRLSALPDDILIHILDRLKTRDAVRTSVLSRRWRHLPGVLSKIILHVGSFKPKDGSMLAKDDLRIRSNISVIEATQSILAHKSQCKINFLSVGFYLREESISIAHSINDAMANREIVSTKFMILPEKHGIQRMEDDKIICGKRFMSFSYACPRAFGCLKQLILTCVRLGNSDFTDVLSTCKKLEYLQLISCDFQPSVLQMEHPTLIKMELVVCTFGSVDLKSLPKLRTLIVDTWMGLEEIYPLSFGYVPQLSTLKLTYKGTTRDKNIKLSEFLGNAAIGALHLDFECGRIWIQPEHPKLLAPVLRNLQIASLTCIHEECNLTWIFFLLEAAPLLETMHIKMWDHECKTSEDEELYQKAGTFIASMRKNIMHKNWRKRXAERSCTVDDVCKPIFITNITDTGKNIELQPFENICSYFVPIFNYVMQTSPKIAMQISPKTDLIPTSVEL

SEQ ID NO: 200976 - protein, 65 aa, Oryza sativa
  Clone ID: PAT_MRT4530_96396C.1.pep
MARLYIHSGTISSQLTLETAAAATWRVVSPMMRTAIAAVAVSDDQGGKYMRDQNRLIYSHTIDSS

SEQ ID NO: 200977 - protein, 640 aa, Oryza sativa
  Clone ID: PAT_MRT4530_96397C.1.pep
MDYFTKWAEAVPLENITYAERTNVAVVPSTKLEFVGCEDLSVNHEPTKEFAFVFYLRLPEEIRPIVFPPVERLEETCFLCCGKELLQGINRKNEEHGIKSTGTLTNLKARFWTCTEVKQIFQAKNPPQSPATGGKTKPPFTKPPPEQPSEVNEGNIVPGKVIQKYKVKVVAADEPGTSSSKGGKAKGTKGAADGSGEKVRNLEMVRLRMWMKMMQGVPQQKPWADMIADVMREQFGLKPKDTGNLYRHPYLEWFERVPLPNRYKVPDFSKILGQDNVSTYEHVSRFLAQCGETSAVDALRVRLFPLSLSGSTFTWFSALPYNSVQGWADLEKQFHNYFYSGTYEMKLSDLTTRLIAPIKEKFSSQQFESLSHLAQKVTLHKQRFANAKKNFKKINHVYPYRYDSEEEDNSEVAAAEWARSKKIIACSWVKSSRKEERFDFDTTKADKIFDLLLREKQIQLPAGHVIPSADELGKRKYCKWHNSNSHATNDCKVFRQHIQLAIEGGKIKFDDSKKPMKEKYYAEDDGGFDPHWDCEFFRFCWNEGMRLPLIEDCPGCSGRAGSSSRSYSRGSRLSQKRVSVHQRLGPVHQDHYQDEDEGRKSQWCPSEFEARQADVDDVEEASARLILSPEPAIFKKPKGT

SEQ ID NO: 200978 - protein, 74 aa, Oryza sativa
  Clone ID: PAT_MRT4530_96398C.1.pep
ELTKTSYLANHTHTGLMNDTEDSTVSLHYTYQGLATRIGRAATSCSINRYHTGLIHRSYAHTHTTLIWVALIVA

SEQ ID NO: 200979 - protein, 107 aa, Oryza sativa
  Clone ID: PAT_MRT4530_96399C.1.pep
MALSPSKGGALEGGPRMEGEAAGRRWTEWPQAGSLDFITDRFGKISLLDSDPNQSGGDNTSAPFGLPNSAEIYSNMLSSDLASNHSDGGSLAPSHTATLSRPKNRLN

SEQ ID NO: 200980 - protein, 59 aa, Oryza sativa
  Clone ID: PAT_MRT4530_9639C.1.pep
HASRATPLTLLAAPAVLVAFLSLLICCHRRSWSPQATGGRLSPAWMTQPWERGRMEESH

SEQ ID NO: 200981 - protein, 230 aa, Oryza sativa
  unsure (1)..(230): unsure at all Xaa locations
  Clone ID: PAT_MRT4530_963C.1.pep
MPGIPASSPGIPHQHQHQHHRALAGVGMAVGCAAEAAVAAAGVAGTRCGAHDGEVPMEVARHHEHAEPGSGRCCSAVVQHVAAPAAAVWSVVRRFDQPQAYKRFVRSCALLAGDGGVGTLREVRVVSGLPAASSRERLEILDDESHVLSFRVVGGEHRLKNYXAPVTTVHPSPSAPTAATVVVGSYVVDVPPGNTPEDTRVFVDTIVKCNLQSLAKTAEKLAAGARAAGS

SEQ ID NO: 200982 - protein, 61 aa, Oryza sativa
  Clone ID: PAT_MRT4530_96400C.1.pep
HEQHVQKARKAQPVLAIGRARRRQGADEAAQGSEALHFLTNQTLIKVIMHDWCLHGAFDFS

SEQ ID NO: 200983 - protein, 123 aa, Oryza sativa
  unsure (1)..(123): unsure at all Xaa locations
  Clone ID: PAT_MRT4530_96401C.1.pep
MSSLRPCRGHWRSTPGAATRDGVSVNIAPPTPPARPLRPATTRPRRPAAPRSTPARAHTTGRSSPGSSAXRSPPPIRPPLPAFGPELQPPXTPRPRRRLVAPPHGSWPAAAPPGQSPRLRRTP

SEQ ID NO: 200984 - protein, 94 aa, Oryza sativa
  unsure (1)..(94): unsure at all Xaa locations
  Clone ID: PAT_MRT4530_96402C.1.pep
SLACFLIANKDFIGVSADFTTLDLQPMYSLTFGXRLFYHIIDSRLVSTELYXYVTLSSVNCLYIIIYIGHIIDXQNPVHIGWNYSIGLSADRLF

SEQ ID NO: 200985 - protein, 114 aa, Oryza sativa
  Clone ID: PAT_MRT4530_96403C.1.pep
MVHVGFWGKWGKTFKNPPPPYKKERFVSNLNLVGEYGLRSRRELWRVQYALIPIRNNARVILTLDEKNQRLIFEGEALFPRMNRLGLLAVGQNKLDFVLTLTVENFLAGRFKTF

SEQ ID NO: 200986 - protein, 717 aa, Oryza sativa
  Clone ID: PAT_MRT4530_96404C.1.pep
MAAEEQDTKPFLSPTTTTTIPPRAHRGYQLSACPHHHHHHQMTAAAPDQRSAGAGAAAAAAGQQQTAAAACVLNRESDELPEEEDGGAATWLLARQAPARRISRSFWSAGEYDADTSGAARPPGNVQNRMCVHPKFLHSNATSHKWPFGAVAELLDNAVDEIKTGATRIIVDKVNGCNGSPALLVQDDGGGMDPDSLRRCMSFGFSEKQSGSSIGQYGNGFKTGTMRLGADVIVFSRCMKSSEPTQSIGLLSYTFLAETNQKDVVVPVVDYKYNLLTGEAKPHQRLGPDQFSSNLSVLLKWSPFATEEQLIQNFSDIGPHGTKIVVFNLWSNDNGDLELDFDIDEKDILISGAPKAAETTNAAKRMNESHLANQLHYSFRVYASVLYLKLPAYFRIILRGEEVKHHYIASDLRYTQCIRYRPQAFGKKEDEVDTTIGFLDGAPNINLHGFSIYHKNRLILPFHRVLSSASSKGRGVAGVLEADFIKPTHDKQDFEKSQLYQKLINRLKEMTNEYWDLYSHLVGYHKLPRAASGSHASAALVPTLSGTIATASSERIPAIRDNPTNAIPIAFAPHLVSSPVGTNAVAAVCSQSQSSMQITIGTDLVDTRKRRMETLDQMDGRSKRLSIHDLAGNNSVDSSNQILQICQHMGERELKEFSYLKIENTLLRQECAELESSEKELLLKEQQLSLELEQTEAQYKSLLNEYISVAAVRTVKR

SEQ ID NO: 200987 - protein, 503 aa, Oryza sativa
  Clone ID: PAT_MRT4530_96405C.1.pep
MGTLPPFPPLLLLVAVIFSFLSSSCFAVTSHEAAAIARRQLLNFEKHGDHVHIDIDIEIKVSNPRLAAAHRALHALKRALYSDPGNFTGDWAGPDVCAYNGVLCAPSPDNASASAVASLDMNAADVAGYLPREIGLLSDLAVLHLNSNRFCGVIPEEVANMTRLYELDVSNNRLVGAFPGAVLRVPELSYLDIRFNDFDGPIPPELFLRPYDAIFLNNNRFTSGIPDTIGRSTASVIVLANNDLGGCIPPTIGQAAATLDQFVFLNNSLTGCLPLESGLLANATVFDVSHNLLTGAIPATMGGLAKVEQLDLSHNTFTGVVPGDVRPLPALTNLSVSYNFIAGEDAQCSSALLDAKLDKSLEDEANCMGNVRPMQRSAGECAPVVSHPVDCSKTKPCGWPAPAKKPAPESSKHLPPPPPPPAPVQSPPPPAPVVSPPSPVFFPPPAFLPPPPPKTFPPPPVSSPPPPPPPIMSPPPPIQKPVILPPILSAKYQSPPPPFFEGY

SEQ ID NO: 200988 - protein, 69 aa, Oryza sativa
  Clone ID: PAT_MRT4530_96406C.1.pep
NATPGFVVPAENLRRDTHCRVSTQLLYNTEAYMRATYTNSYSYTVHVRTFTARGSHTHTVLKRRAYNTT

SEQ ID NO: 200989 - protein, 54 aa, Oryza sativa
  Clone ID: PAT_MRT4530_96407C.1.pep
RADFLAIHHNKFKLSNMLRTSYSTSIGDSPPGSSASVIELFCILCLKSFKIIQI

SEQ ID NO: 200990 - protein, 224 aa, Oryza sativa
  unsure (1)..(224): unsure at all Xaa locations
  Clone ID: PAT_MRT4530_96408C.1.pep
MVDLVNGVLNWVATPAMVASLLLFYPPYYLFKTVHSFLSYLFPDDLARKVVLITGASSGIGEQLAYNYALNRASLVLVARREWSLRKVADQAFELGAPDVIILPGDVANPEDCKRFVQTAIDHYGRLDHLVCNAGIASVGAFQEIPDVTNYSSQFDVNFWGSVQSTFEALPHLKRSRGRIVVTASATGWNPVPRXDLLHAANAALINFYETLRTELGSQVGSQL

SEQ ID NO: 200991 - protein, 365 aa, Oryza sativa
  Clone ID: PAT_MRT4530_96409C.1.pep
MVDLVNGVLNWVATPAMVASLLLFYPPYYLFKTVHSFLSYLFPDDLARKVVLITGASSGIGEQLAYNYALNRASLVLVARREWSLRKVADQAFELGAPDVIILPGDVANPEDCKRFVQTAIDHYGRCKSPISLICSVNFFSKMDHLVCNAGIASVGAFQEIPDVTNYSSQFDVNFWGSVQSTFEALPHLKRSRGRIVVTASATGWNPVPRMTFYNAANAALINFYETLRTELGSQVGITIVTPGWIESEMSKGKFLKDHGEMEVDQEMRDAQIGLFPVEYAKNCAKAMVQAVRQGKRCLTVPPWFSTMYLWRVFAPEVVEFCYRLLYMHRHGGSQADAPSKKMAEAGGKKLLYPTSLRSDDIKDE

SEQ ID NO: 200992 - protein, 79 aa, Oryza sativa
  Clone ID: PAT_MRT4530_9640C.1.pep
YPVAHGRRPRMRTRYLVVVEVKRPVGKGVRVRPVCTQCNHYSISHIYIMTYVMIRWNSVLTPFNNVTHYTFLTFKKKKK

SEQ ID NO: 200993 - protein, 55 aa, Oryza sativa
  Clone ID: PAT_MRT4530_96410C.1.pep
MIHCYLVCGSKNRILNTLHTQLEKPSCWPHSDYNAIYGTFGALLIIWQYHTNIFL

SEQ ID NO: 200994 - protein, 146 aa, Oryza sativa
  Clone ID: PAT_MRT4530_96411C.1.pep
GTRRNEGIFTVLTCPSGSPGVAVADFVIFPERWIAQERSFRPPYYPKNCMSEFMGLIKGVYEAKKEGFREGGVSLHSCMTPHGPDTATFERESPCEINPYKLSGTMSFMFESTYLFKLTPFSVNSPINTNYYECWQGLKSNFDGQL

SEQ ID NO: 200995 - protein, 339 aa, Oryza sativa
  Clone ID: PAT_MRT4530_96412C.1.pep
MVNFVEAQKPLLKRLMRMAGLRPVDVEIEPGTTMHIWVPKHHVSKKTGTIRPVVEHGGVDGDGEKAGAAKRKKSAAESRPNVVLVHGFAAEGIVTWQFNFGVLVSRYNLYIPDLLFFGKSATASADRSPELQARCVAAALARLGVARCDVVGFSYGGMVAFKLAETRPDLVRSLAVSGSVVAMTDAVNSATMTRLGATSSAELLMPETLKGLKQLLSISMYKKMWFPDRFYKDYLKAMFNNRKERMELLQGLITSNMDAKIPTFQQKIMLIWGEEDKIFDIELAKKMKEQLGDGCFLHGIPKAGHLLHVERPCAYNRQLQRFLSYVNSEEKEAAGGGAN

SEQ ID NO: 200996 - protein, 215 aa, Oryza sativa
  Clone ID: PAT_MRT4530_96413C.1.pep
MNAFRLAGDMTHLLSVVVLLLKIHTIKSCAGISLKTQELYALVFAARYLDLFIHFISLYNTVMKLVFLASSFSIVWYMRRHKIVRRTYDKDHDTFRHHFLVLPCLALALLINERFTFREVMWAFSIYLEAVAILPQLVLLQRTRNIDNLTGQYVFFLGAYRVLYILNWIYRYFTEPHFVHWISWVAGIVQTLLYADFFYYYIMSWKNNVKLELPA

SEQ ID NO: 200997 - protein, 83 aa, Oryza sativa
  unsure (1)..(83): unsure at all Xaa locations
  Clone ID: PAT_MRT4530_96414C.1.pep
PMPLKKGWLLLLLKYYAGKGLLSKKGYYGKGLLKEGYFGEKKKKPGMTRVRLTRGRQYGGKLPLMCRVEPQKXRIFAAGQYKV

SEQ ID NO: 200998 - protein, 183 aa, Oryza sativa
  unsure (1)..(183): unsure at all Xaa locations
  Clone ID: PAT_MRT4530_96415C.1.pep
MAKGGRAFIRSNSDKYRSPNHSLXMEGNDVGILYSPIVGANLVSESFAFAYLSDKAVTPTNKFFKHPNGNIIGGFGIVQDVPVCFEDREAILDFHIFEIQGFDILIILPIEQLLINTPRLGSLKITLGENVFSIPFSRARITLTDPLPEIESAEEVTAVPLHESPEALLEDEFPNFIKEEADP

SEQ ID NO: 200999 - protein, 61 aa, Oryza sativa
  Clone ID: PAT_MRT4530_96416C.1.pep
MVGEDMRRSVDEVKVVTHSRGGGPVATTERRGEELIVDYLAREMELAKAPSLLPKLIKAQE

SEQ ID NO: 201000 - protein, 315 aa, Oryza sativa
  Clone ID: PAT_MRT4530_96417C.1.pep
MEALPQIRQTLSEIDRRIPDALRVAMGLRLRPTAGAALEEVTRIAASCLPRPCPEGGDDPMECDEAAPARALRMEAASCFLPDHDEDTHFVRPEAGVVALADGVGGYRAPGVDAAAFARALMYNAFEMVVATTPGGAGGICPYALLGWAYEQAVSARTQGASTAVILSLAGATLKYAYIGDSAFAVFRDGKLFFRSEAQVHSFNYPFQLSVKNGNSVTSAARGGVEVKEGDVVVAGTDGLFDNVTSEELQRIVAMGRALGLSPKQTADVVAGFAYEASTTMGRDTPFSLESRKKQGTIFRRGKRDDITVVVAYIV

SEQ ID NO: 201001 - protein, 52 aa, Oryza sativa
  unsure (1)..(52): unsure at all Xaa locations
  Clone ID: PAT_MRT4530_96418C.1.pep
AKLPPASSYIVVWFASCRVNYHTSVHPCTHERHGNKAPLPASLAAXLLRQEP

SEQ ID NO: 201002 - protein, 67 aa, Oryza sativa
  Clone ID: PAT_MRT4530_96419C.1.pep
VGGVFFFAAFLFSFYAPICLCSLSLLLFFLAKTTSSSLLQDYRDSNVNIKKCGGLKYKSTNLKIKII

SEQ ID NO: 201003 - protein, 545 aa, Oryza sativa
  unsure (1)..(545): unsure at all Xaa locations
  Clone ID: PAT_MRT4530_9641C.1.pep
MQREAGGTEPETILGRMDVVEDYISCGFLPPPSEFLLLALNFYGLSLLHLNPNSIAFLSIFSHICEAYIGVVPFLDLFRFYYELRWMESNRVSVCVGFRLRDDLKSRYIPFQCPSSRSKWQTRWFYLQIENSDPVLVVPKDQPXKIPEWPAKPALTPKTAVVXDIIDDLRRRRLSGYEVAADFIGLDSDTVGRCVGQIMISAPSGAGDIPVPLSDKDSAERATTINAATSLKKRVTKEASDAAATTTSGSNVPKKGRKFSSVIGTHRKATSPVRRGLEHRMSELEGHMTDIRGSLRTSFTNLHQLAGECGVTTTIPTHPDEFSLTSSLVELAMAMEEIPSKHEARIGEETSNDIYTGACHVLVCMRLAYPDLDLKKALDRGATDDARKATMEEVVDLGESVLLLFEECVAVEDVQQRGQPDVPAVVLALTLEPHAPLVEVNKSPFVETNMAMTSLVLEDETRGGRELERAMVEVKKDQAVEALRGREVWFNSYLKSCCTAVAEVCKELRVPRGDPEESAAGYISWLNGACAQLEGIGKHIDETLK

SEQ ID NO: 201004 - protein, 33 aa, Oryza sativa
  Clone ID: PAT_MRT4530_96420C.1.pep
MAGRCGLSGSCGQRMGTTTKLAYMYKGLVDQFG

SEQ ID NO: 201005 - protein, 92 aa, Oryza sativa
  Clone ID: PAT_MRT4530_96421C.1.pep
MEKPVRGRGHRRPATGDAAVVRGGAVGGRWERGSAQVGGGSGDVHLSGSGRMLISAVAWSSASSMSCRARAFSACAFSKLRLSSSRRRIGAA

SEQ ID NO: 201006 - protein, 62 aa, Oryza sativa
  Clone ID: PAT_MRT4530_96422C.1.pep
MARVGGKEMACGTGDRAPSPGIAREIERNRPGSCGKGGDRAGAGWRGKGISISYGGEGIGCG

SEQ ID NO: 201007 - protein, 62 aa, Oryza sativa
  Clone ID: PAT_MRT4530_96423C.1.pep
LLQQETLHKQRDLLHPGGRFCPRPPNRQERFIRRFDRQLVHPKVSPELLAIMFNYLSQRDES

SEQ ID NO: 201008 - protein, 116 aa, Oryza sativa
  Clone ID: PAT_MRT4530_96424C.1.pep
GRERNRACAGGWTGVVRQALAIPGSSRVAPRCACWEIIPETRSASSVTTPAPARSARRTGTGSARGELPAARSRNSRGVVAGVHAAPAGAPRRSSSGRRDRVPGHASPRGVLAEVA

SEQ ID NO: 201009 - protein, 99 aa, Oryza sativa
  Clone ID: PAT_MRT4530_96425C.1.pep
RQTRFVHRLFFSSGEAFSPLESIAAAVIRPPAAAASVGIGGAGRVRLGKKERGRRNTTVLHAPRSYQRIGFFFFQLQHENSGGRHIKHPHINKKNRKYI

SEQ ID NO: 201010 - protein, 253 aa, Oryza sativa
  Clone ID: PAT_MRT4530_96426C.1.pep
MAIARTGVYVDDYLEYSSTLAGDLQRILSTMRELDERAHGIMGQTKEQIKYLLGVPSHGFDRSNMDDDESASERMKKDIEASQDNALSLCTEKVLLARQAYDLIESHIKRLDEDLGQFAEDLKQEGKIPPDEPSILPAISAFSRDDKRRPGFSTPQATKKFREREWDRERGMDFDLMPPPGSNKKTTAPMDVDQTIDPNEPTYCICHQISYGDMIACDNDNCEGGEWFHYTCVGLTPETRFKGKWFCPTCRNL

SEQ ID NO: 201011 - protein, 205 aa, Oryza sativa
  unsure (1)..(205): unsure at all Xaa locations
  Clone ID: PAT_MRT4530_96427C.1.pep
PRVRMTAPLSNVQRMKFTKGGVPFVLDFLPKVDYLPLSLMVTAFKKEDVKKPLEGFGALIPYKEQQKHGLKTLGTLFSSMMFPDRAPNDQYLYTSFIGGSHNRDLAGAPTAILKQLVTSDLRKLXGVEGQPTCVXHVHWRNAFPLYGQNYDLVLEAIAKMENNLPGFFYAGNNKDGLAVGNVIASGSKAADLVISYLESCTDQDN

SEQ ID NO: 201012 - protein, 181 aa, Oryza sativa
  Clone ID: PAT_MRT4530_96428C.1.pep
METDRHKRPSIGDVISMLNATEVGCQEAETVESTELLGIHPVELRFVFEPNKLIPCSLHLTNSTAYRVAFRVSPRRPDMYFTEWLCGVVPPMCTYTLIVVMKERQQPLLDLDADEFVLEQSSIMDENDLNVISQGKADTEYNTFFAEIEEKSAVKVQEKKLRAVCDPRGKTASEIMSTMDF

SEQ ID NO: 201013 - protein, 261 aa, Oryza sativa
  Clone ID: PAT_MRT4530_96429C.1.pep
MAAPAASALPLDGRVALVTGGSRGIGREVCAHLASLGARVVVNYASNSANADAFAADLNSRGAAALPRAVAVRADVSDPAAVRALFDRTEEAFGTPPHIVVACAGLLESKYPSLADTAVEDFDAMLAVNVRGTFLVCREAANRFPAGAGGRVVTFSSSILGTLLPGYAAYTATNGAVEAMTRIMAKEVAAKGVTANVVAPGPVRTELFMAGKDEAFVKKVEERSMGRIAETTDVAPVVAFLVSDAAAWVNGQVIRVNGGFA

SEQ ID NO: 201014 - protein, 130 aa, Oryza sativa
  Clone ID: PAT_MRT4530_9642C.1.pep
WGTKTPKGPNIFFLTKGKKGGTPKAKRGFKRKNKKTPTPSKKPTLKGGRKTRENLSKVKTPQGKNVQRGPFTSDNGGLLETRGGAPPGKEKRPCPPGPRPPENRAPRPKKPCPLTQGEKNPGETFGPATP

SEQ ID NO: 201015 - protein, 562 aa, Oryza sativa
  Clone ID: PAT_MRT4530_96430C.1.pep
MLSPATTFSSSSSSSSPSRAHARAPTRFAVAASARAARFRPARAMAASDDPRGGRSVAVVGAGVSGLAAAYRLRKRGVQVTVFEAADRAGGKIRTNSEGGFIWDEGANTMTESELEASRLIDDLGLQGKQQYPNSQHKRYIVKDGAPTLIPSDPIALMKSTVLSTKSKLKLFLEPFLYEKSSRRTSGKVSDEHLSESVASFFERHFGKEVVDYLIDPFVAGTSGGDPESLSIRHAFPALWNLENKYGSVIAGAILSKLSTKGDSVKTGGASPGKGRNKRVSFSFHGGMQSLIDALHNEVGDGNVKLGTEVLSLACCCDGVSSSGGWSISVDSKDAKGKDLRKNQSFDAVIMTAPLSNVQRMKFTKGGVPFVLDFLPKVDYLPLSLMVTAFKKEDVKKPLEGFGALIPYKEQQKHGLKTLGHPASCIELNIQINLATLLYFFSGTLFSSMMFPDRAPNDQYLYTSFIGGSHNRDLAGAPTAILKQLVTSDLRKLLGVEGQPTFVKHVHWRNAFPLYGQNYDLVLEAIAKMENNLPGFFYAGKSMKAPLLYKRNLRYLKHIPVD

SEQ ID NO: 201016 - protein, 191 aa, Oryza sativa
  Clone ID: PAT_MRT4530_96431C.1.pep
LYNNGFPATGISEYVTKKEREYALRSFKSGATPILVATDVAARGLDIPHVAHVINFDLPNDIDDYVHRIGRTGRAGKSGLATAFFNESNTPLARPLSELMQEANQEVPQWLERYAARSSFGGGGGRNRRSGGGARFGGRDFRRDRGSGGGGYGGGGGGYGGGGYGGGGGGGGYGGGSSYGGGGQGFSSAWD

SEQ ID NO: 201017 - protein, 59 aa, Oryza sativa
  Clone ID: PAT_MRT4530_96432C.1.pep
KKNINTMCISKGTGGSSGRPRIQGGMCLIESTESECFALENHVILATIKNNNECPSPDF

SEQ ID NO: 201018 - protein, 101 aa, Oryza sativa
  Clone ID: PAT_MRT4530_96433C.1.pep
MPTSRTSSSSTFGRPYPSSRALPAHSVAADGRASPCSSPASPSQSPKLARNLSSLANSEDTVVFFFRQPLPFSPERRLAAPSLLSAAPRRPLPWLHLLFKH

SEQ ID NO: 201019 - protein, 56 aa, Oryza sativa
  Clone ID: PAT_MRT4530_96434C.1.pep
LKGHGGWYTRGREQALKADLTDDLIRKVAKGQALVQALTYQRIITPENRQGLRHRN

SEQ ID NO: 201020 - protein, 172 aa, Oryza sativa
  unsure (1)..(172): unsure at all Xaa locations
  Clone ID: PAT_MRT4530_96435C.1.pep
GSMEALAYXHSLGLQSIVHGDVKPSNILISDNLIPKVSDFGSSKSALKIKHACADRNYVDPVCLKTGNITEKSDVYSFGVVLVELITRKKAKCNGTSARPDFVRYYTDDDVRRKMYDPDMYASALQSARCMECLDKMAAIAVWCLKDDVDERPTMAEALEELKQLRASMQEI

SEQ ID NO: 201021 - protein, 88 aa, Oryza sativa
  Clone ID: PAT_MRT4530_96436C.1.pep
IQPHRSSLSPDRTTHYLRRSGHLTLHLYQPPPLLGSRKEEENEKGEDTDSGAHCTTIQEVLSASKELTWTQMATLKPREILRHKARHN

SEQ ID NO: 201022 - protein, 43 aa, Oryza sativa
  unsure (1)..(43): unsure at all Xaa locations
  Clone ID: PAT_MRT4530_96437C.1.pep
PPPPPKTPDPEPPXKNPPQGPLPGPPGIFIPVPPLLPIFFGGV

SEQ ID NO: 201023 - protein, 51 aa, Oryza sativa
  Clone ID: PAT_MRT4530_96438C.1.pep
MVYVHMDDVASCRILLYETPRAAGRYICNSAVLNINELLVTLLFFFFSCPR

SEQ ID NO: 201024 - protein, 91 aa, Oryza sativa
  Clone ID: PAT_MRT4530_96439C.1.pep
MATFANNASLGELPSSYTRYMYPLMAQKPYLELDDVPVADARQHQLVQFSKLFSLMSQQSPQLQHYRWAAARGCQKGKELARRRCVGMKAS

SEQ ID NO: 201025 - protein, 48 aa, Oryza sativa
  Clone ID: PAT_MRT4530_9643C.1.pep
QVLKELEKAKKPYPDAFVRIMGLDNVRQVQLTSLLAHKPPGCEESGAN

SEQ ID NO: 201026 - protein, 137 aa, Oryza sativa
  unsure (1)..(137): unsure at all Xaa locations
  Clone ID: PAT_MRT4530_96440C.1.pep
KGFYLSGLFETAKEQKAASRFLPQKPASPIVSKLDQIFXPKSFKVKNQDGLVKLQGSKKGRKGQLPINPKIFXVPPSLFCCXVKKFPGAPLEYEKFCTKGLSPFFRDICWDGQSKHPSLAQSSTLTQSFKSISSHAL

SEQ ID NO: 201027 - protein, 129 aa, Oryza sativa
  unsure (1)..(129): unsure at all Xaa locations
  Clone ID: PAT_MRT4530_96441C.1.pep
MDEAWERAVEAALHAAGEGCSSPSRSLTLDGAVKCLHGRLPFADILERYQSLXPLFVAGVGVVSLARAPSFALPVSPAVLLLPFRLIPSPPSLLPLLALLPFLILCSLLFITPPLLFSLPLLPPLFVPL

SEQ ID NO: 201028 - protein, 460 aa, Oryza sativa
  unsure (1)..(460): unsure at all Xaa locations
  Clone ID: PAT_MRT4530_96442C.1.pep
YRYTAWIFLAAIXHLPSFQSMGLDLRMSLSLFLNIYISSLIFLIVFHVIFFGPWYPGLVSRMAEEKSDMLIIIQDCAVKSIACSVLYSHXTRCGNKXVVSRDKSINRRTASWIVFSLWXKKKHEDNSLISKLSRMHKFKEQICSSWFVSASDYPLLSERAIYGELASNGSXCSNDISRVYSLWATCIGLYIASCGAVHRVCQPSEHIHLIILYWCVLXNSEVKDMGSVIMRKQHLILEKXLNSPFVYLTGHYIYELKGNPMFTWCNCITSXKIVETKSLLGLFRFFLNSVFVSFVSFELLIDGXNGGYEKMKKQLKPDFEGTLGNISVLHKDGXFFSFSRRHPNPSSFSYERHLFFPFXYAFQPPAWYKLEHVALVKPEXSELRKYHGRQCLIVLGNHDKFGSLHTFMRYICHKSWLGEXFLPQKIMNYLALKLPDWWWVFGLDQALHVDIDIWKQNAFR

SEQ ID NO: 201029 - protein, 94 aa, Oryza sativa
  Clone ID: PAT_MRT4530_96443C.1.pep
MHDDVTLIPSCFLLLFKGSDLHACQAGLFPSRSFPWYGWSAGLCTVVYCCKLAIDDEENFSINEQKIYYIRKSWKFDASIIINNKQCTTEFSLS

SEQ ID NO: 201030 - protein, 87 aa, Oryza sativa
  Clone ID: PAT_MRT4530_96444C.1.pep
FCPRASLEPPRAPSPMTALLLGSARRALSGAHCTSRKRGNESAWSTPRMSINYYLHSCPHLERMPADEPPSRACANPTTAADTHQDN

SEQ ID NO: 201031 - protein, 92 aa, Oryza sativa
  Clone ID: PAT_MRT4530_96445C.1.pep
SYFWGASFDATALHRLRLLLFCIGYVLWYVYFLCISCLHRLLPLHRNVFHWHRRYWGRRYMISASTRSFLTAIVTITILFFCAVVERMQPGA

SEQ ID NO: 201032 - protein, 338 aa, Oryza sativa
  unsure (1)..(338): unsure at all Xaa locations
  Clone ID: PAT_MRT4530_96446C.1.pep
GAPTPPPPPVPGTGSIIDMASLIIWDEASMSKRQAVEALDMSMRDIMGCPCSPFGGKTIVFGGDFRQVLPVIRKGARSQITDATLRRSYLWDCMVQLKLVRNMRVQSDVWFADYLLRVGNGTEEVXTDICMSCKENETDLERLIDTVFPNLNDNLTNPNYITXDDPYNYYPPEFLNSLTLNGLPPHVLKLKINCPIMLLRNIDPANGLCNGTRLVVREFGRNAIDVEIVVGQHAGKRVFLPRIPQCPSDDEMFPFRFKRKQFLVRLSFALTINKAQGQTIPNAGVYLPESVFSHGQLYVTLSRATSRTNIKILSMPKKLSKQTAAYTKNIVYREVLTD

SEQ ID NO: 201033 - protein, 1657 aa, Oryza sativa
  unsure (1)..(1657): unsure at all Xaa locations
  Clone ID: PAT_MRT4530_96447C.1.pep
MPNSQPFADDRDASFSTPSNLPMCTGAHGDVTNLTHAEVVRKRARNWYASLTQEQKDERNKKDRERRKRKEEESQVLNKSATNSGVAPLGKLSNISAADLMTCQLEVNDSSTLHKERSDASHLNITPRRLPFTIINNVAHYGPNEVPMSCVIQTTQNRDVKLRNATLTPEQKQAKVDRQRTRRQALTNEQRLEMNDRRRVARQTLPDVEIHDMNARQRSRRQSVTPGERSAHLARHNELYATRRDKPCAQSIALECPEDCSSSFLNPTPSFETTGDVPATSSLQTELAADHLARSSNFDDGIIYICFHLYSQFVPFLILTLYSTKLDMDSFMDDDTDDEHYMFAGLGDDEDDEMVQSDDDDTQALSSSIPDPFDFVYSNIPQSENVLKPEPDCKHCGAKRFQYEPPGFCCRDGKIKLVENETPPELMRLWTSSDPDAKHFRDNIRYFNGHFSFTTLGVSLDSAFANMSSDVLRNNPYSETFRSLGQANDLANYRVTLNLDYRLDQRRYNVPVTTEVAAVWVEGNERRKFEPSVTKNGNDRTRKSIQPFYGCYDSLSYPLFFPRGESGWHQGLPKDKITMEDANARNGDDPDCNSRIRVSVRDYYCYKFQMRRGIFNPILHGGRLFQQFAVDMYIKVESSRLDYVWNNQKEIRADLYQGLMDSIQAGESRASAVGKRTVLPASFVGGGRNMKRRYMDAMALVQKYGKPDVFLTMTSNPKWDEITRELEPVQTPQDRPDLVVRVFRAKLEDLKKQLFEKHILGXDQYDRIISAELPDKKKXYPELYNMVVKHMMHGPCGRLNGRCQCMRDGKCRNNYPREFNPTTSQGKDSYPLYRRRNDGKSRVVRGHPLDNRWVVPYNPYLLRMYNCHMNVEVCSSIKAVKYLFKYHYKGHDKASISINEANKNGEIDEIQRYRDARWVIPPEALWCIYGFDICHISPSVRQLQLHLPNMHMLAFDADKDLRDVLDKEDAGRSMLTAYFEANRQHVWVRDILYRDFPMWFTWQTAGKYWKKRDRGGQVGRIVCAHPAEGERYYLRVLLNHVAGSTSFEDLRTVDGVVMPSFRAATERRGLIEADNTLDECLTEARVFQMPASLRRLFATILVYCEPSDVRGLWDKHLDAMSDDYRRNNACPHVVQQMVLIDIRGMLQSMGKEITSFSFPEIDESHDSTRGDPREIIEESSIGVETDDMNLSDQLNDEQRSAFNKIMNAVGSAQGGVFFVDGPGGTGKTFLYSALLATVRSKGDIAVATATSGVAASIMPGGRTAHSWFKIPLNIEEGSCCSFTKQSGTAKLLQMASLIIWDEASMTKRQAVEALDMSMRDIMGCPRSPFGGKTIVFGGDFRQVXYLWDCMVQLKLVRNMRAXWFANYLLRVGNGTEEVNKEGLIGLPSDICGSCKGNETDLERLIDTVFPNLNDNLTDPNYITCRAILSTRNEFVDRINMKMIERFRGDVMTYHSFDRADDDPHNYYPPEFLNSLTPNGLPPHVLKLKINCPIMLLRNIDPANGLCNGTRLVVRQFGKNAIDAEIVVGQHAGKRVFLPRIPLCPSDDEMFPFRFKRKQFPVRLSFALTINKAQGQTIPNAGVYLPEPVFSHGQLYVVLSRATSRTNIKILSMPVEDKKQNKKSKRTGVKDNEKKGKELSKQAATYTKNIVFREVLTD

SEQ ID NO: 201034 - protein, 266 aa, Oryza sativa
  Clone ID: PAT_MRT4530_96448C.1.pep
MSCKENETDLERLIDTVFPNLNDNLTNPNYITCRTIMSTRNEFVDRINMKMIGRFRGEVVTYHSFDRPEDDPYNYYPPEFLNSLTLNGLPPHVLKLKINCPIMLLRNIDPANGLCNGTRLVVREFGRNAIDVEIVVGQHAGKRVFLPRIPQCPSDDEMFPFRFKRKQFLVRLSFALTINKAQGQTIPNAGVYLPESVFSHGQLYVTLSRATSRTNIKILSMPVEDKKQKKKSKRTGVKDNEKKGKKLSKQTAAYTKNIVYREVLTD

SEQ ID NO: 201035 - protein, 78 aa, Oryza sativa
  Clone ID: PAT_MRT4530_96449C.1.pep
YQHTHICTTLKRRKEMPMKIMVSSGLTWLYGRSYITLLFSFGVVGRNSRGWDVGLGLFGSTDGCRMETPGRTIGPSLR

SEQ ID NO: 201036 - protein, 114 aa, Oryza sativa
  Clone ID: PAT_MRT4530_9644C.1.pep
SVEPKEVAKGLIPSQLPVELLDLPAIIRNWSPFFSGSACSSSANLILRGGGEGSKRRKSPAGSSRGDPQLGDQSAHRHADGRIWRRTRRRRRRRLGFAWSVPLHRLTESYRPGR

SEQ ID NO: 201037 - protein, 59 aa, Oryza sativa
  unsure (1)..(59): unsure at all Xaa locations
  Clone ID: PAT_MRT4530_96450C.1.pep
MRGNIVCVRRGGLCMLCPAAERVTDEEMMRGTNAAPXXVPGTGSIIDEALCLMKLRENV

SEQ ID NO: 201038 - protein, 402 aa, Oryza sativa
  Clone ID: PAT_MRT4530_96451C.1.pep
PRRRRWWRRRSRLVIVVVGGGAASRRPPAPDPWRGQGGRPPDLGGDGRVPSSPARPPDPQPARSRRHRGREGRSRGRPPVRQICRPCAPFAAGKGRSRRPPVPPVPAAASPHPPAATELTTVPPSPRLSSAPPLHQQPARSGAPLLSTRVAAVPTARHRPSPPHRASTPSRRGAGRTAPPPPPGAPLLSTRVAAVPTPPLASPPPSTCVASSPLDALDHSRWSQTPSSEGMYPLPPEFLNSLTPNGLPPHVLKLKINCPIMLLRSIDPANGLCNGTRLVVHQFGKNAIDAEIVVGKHAGKRVFLPRIPLCPSDDEMFPFRFKRKQFPVRLSFAFTINKAQSQTIPNAGVYLPEPVFSHGQLYVALSRATSRTNIKILSMPKELSKQAATYTKNIVYREVLTD

SEQ ID NO: 201039 - protein, 78 aa, Oryza sativa
  Clone ID: PAT_MRT4530_96452C.1.pep
TGSVAIFRDQGLKFDILQEKILWSFLVHVAFQFQVLEPSGVQLHYPYITRTYLFSISSACFFYLCNHSHLNFKIAYLW

SEQ ID NO: 201040 - protein, 57 aa, Oryza sativa
  Clone ID: PAT_MRT4530_96453C.1.pep
KNNMCYSNIHTYRHALYYSSSSLLCSILAFFTCICMAVSGLLLARWTREGNRIVDNG

SEQ ID NO: 201041 - protein, 54 aa, Oryza sativa
  Clone ID: PAT_MRT4530_96454C.1.pep
MWETTAVAAWPPQLFPYVFSSSADLYASLWRGGGKEPTQPGEIRRRQRRLILQQ

SEQ ID NO: 201042 - protein, 40 aa, Oryza sativa
  Clone ID: PAT_MRT4530_96455C.1.pep
KNLKLQILVTTKSIEKLQVYNRGLPEQEARTTRSSTHCAR

SEQ ID NO: 201043 - protein, 57 aa, Oryza sativa
  Clone ID: PAT_MRT4530_96456C.1.pep
MGQARQHDGPPYHLTAHTLPRRDDESMAAIQASSRGLSYTSGPKTMSYPTAIEIDPS

SEQ ID NO: 201044 - protein, 124 aa, Oryza sativa
  Clone ID: PAT_MRT4530_96457C.1.pep
TTPPPLPSLSSSHPPRRLHLRPQPPLRCADGNGTPPHIPAHPSTRHHISFPQLPPTGRRRLPPPSETCTVVTAAVATSPLPPSNLDQATNQGTSSSSAHAKGKKWKRGEKKNLARLGFFVRGHD

SEQ ID NO: 201045 - protein, 240 aa, Oryza sativa
  unsure (1)..(240): unsure at all Xaa locations
  Clone ID: PAT_MRT4530_96458C.1.pep
MATTHAPPPPQPPLPPAPAPLPXVSPPPPXLPPLPPAPSPPPPSPPPPPLPPRPLAAGPPTPAPPPRQPPRRRPPPSSRSRGSTTPASPRPPSTRPTPRPXAAPSPPGAAPPRAGTPVVPPPPPTAPPPPARRRHXTRHTPTPSPPRSPSAPGSAPPPPSTTSSPXPPAPPPPXPPRAAGHSPPPPAAAAASSALSSTCTAARAPWPWRRARSSCGGRWRRRVRLGPDELRARAGPGPGG

SEQ ID NO: 201046 - protein, 82 aa, Oryza sativa
  unsure (1)..(82): unsure at all Xaa locations
  Clone ID: PAT_MRT4530_96459C.1.pep
FFFFFFELKNESSHXVXKRVDXPIQYAKAIXHMXSCIXRXSYXXXPXQKPXLSXXPYIXPLGFPXXXXXILNXSXPXNFYGE

SEQ ID NO: 201047 - protein, 382 aa, Oryza sativa
  unsure (1)..(382): unsure at all Xaa locations
  Clone ID: PAT_MRT4530_9645C.1.pep
SQYPLYPVYGYPPSTVARQVGTLGAQGSSPCRNRARAVALSLLRRRRPLAGLLRSPGLFPAPASPPSASPHRRRPRPPPRRARRPPERRRPRRPEPRRRLPPLQPPFSSSPSTXGEPWTAASFPPSLPLSRPPLRRAYGRRRRPXGRGCRLPPAAALSRPKTTSPRRIRARAVVLSLRRRRRAPVRRRRRSGPPPDSASPPSASPRPRRPRPLLRFARRLPLYSKSPKMVLGWAQGAWFXIXHLGHIRTGLRASVAKHYRTSTCLVGKAXFVAQSGYKQRYMDGDGRSRGSMDISRTNEGYTSCGPVVEMSWHRAGVLLLGAQSCLPVPEVPAVGGVGSVLLSRARMGWKLCHVFHPYTVVVCGTWLHVRKMCLVALVGVSC

SEQ ID NO: 201048 - protein, 156 aa, Oryza sativa
  Clone ID: PAT_MRT4530_96460C.1.pep
MWGPHAILSLLLPPLFLPSLFLSLSLLSPSAGRGEHGLERRRAAAAAAAVEADAAAARLEVRDSLLCGLYASLLCLLHRGAPGAGGSRSFETVDSLNIFRAKDYDATIELYWAPMLAESNSDGAAVLDDRLIRSAPMNKHSTFWKGADVLVFNSHR

SEQ ID NO: 201049 - protein, 89 aa, Oryza sativa
  Clone ID: PAT_MRT4530_96461C.1.pep
RSPSDWHGTGILRVLSLQGWSTWSLAFGLDCTCIWDPSCSAFRFKAPASVICRQLHPSQFAPLALSTTAILESPGLSQSGYSTDLNSQP

SEQ ID NO: 201050 - protein, 236 aa, Oryza sativa
  unsure (1)..(236): unsure at all Xaa locations
  Clone ID: PAT_MRT4530_96462C.1.pep
MVENRLVGMKSHSVYETLGDTIMAAAIRELESLTLDREIMQWKDILALKIRQVGLCWPLVRPTPAIHGCLHGEEPLQPVRGGHFLQHGIGRIDMVENRLVGMKSHGVYKTPGDTIMAAAVRELESLTLDREIMQWKDILALKYTKLVYVGRWFDPLQQSMDAFMEKVTETTTGSVTLKLYKGSVNIASRKSPYILYGEDISSFENGKIYNQAKXAEGFIRLYGLPTRVRAVLDKGL

SEQ ID NO: 201051 - protein, 219 aa, Oryza sativa
  Clone ID: PAT_MRT4530_96463C.1.pep
WRRPTRTRTPARRSPRARSPRSPSSSSPGPPPPPPRLLLGTSPSRARGRTATTTSGPPAGAAGRRAGGGCRRVVAMSSSPPSPPPGSVQKAEEDWEAIPSPEQFRILRLKGTEYPGTGEYDKLFAEGVYECAGCGTPLYKSSTKFNSGCGWPAFYEGFPGAIARTPDPDGRRIEITCAACGGHLGHVFKGEGFNTPTDERHCVNSISLKFIPASEDSKL

SEQ ID NO: 201052 - protein, 91 aa, Oryza sativa
  Clone ID: PAT_MRT4530_96464C.1.pep
GWAQVGQPHRPVRGCRCRCTSMLLLRVHRKVDLYQLRTVLVRIGSKSVHPIKSALYVTFLAHAMTLTITLAAELGSGAITRDHHARFESFL

SEQ ID NO: 201053 - protein, 65 aa, Oryza sativa
  Clone ID: PAT_MRT4530_96465C.1.pep
MSGGAPPPTGAAPPPTPTGAGSGAGAPGGGAVNDGRTPRGGRRHFYLPPPSHPRRIQRHAHHSTP

SEQ ID NO: 201054 - protein, 185 aa, Oryza sativa
  Clone ID: PAT_MRT4530_96466C.1.pep
MAAEGSSRGGGGGRKASWLGMSSEGGAAKFLSGLPSRGNFSSISASSTLGRLRVYVCEHDTDPPEGQVIETDTTNILIRHLQLKKKEMDAKEAKEARDAGSRNQGETVKWKRVAPRSLDGQSSSKRPNLGSSSGLSSAEEAAPGFSGHTLQTFTVERLRALLRQRGLMTKGKKDELIARLRESQD

SEQ ID NO: 201055 - protein, 80 aa, Oryza sativa
  Clone ID: PAT_MRT4530_96467C.1.pep
HEQQGSVLSVVFSPSSPCSRRRDHGGVPPPRPCGLHPGPLCQQDGLRCTVRLRLGEAHASAWHARASSRETAAQCASRSV

SEQ ID NO: 201056 - protein, 140 aa, Oryza sativa
  Clone ID: PAT_MRT4530_96468C.1.pep
MEGKEEDVRRGSNKISERQPIGTAAQGSDDKDYKEPPSAPVFEPGELKWWSLYRAGIAEIMATFLFLYITGLTVMGVNNSTCKCATGCIQGICWSFSSMIFGLGYCTDGIYGGHINPARTFSLLTLRKLIITRVLFYMVM

SEQ ID NO: 201057 - protein, 55 aa, Oryza sativa
  Clone ID: PAT_MRT4530_96469C.1.pep
TFNFHIKKNIKHDYEHDIFIHYKTYNCSTFIYSLLQKHHLLLHILSVHNTNSIIN

SEQ ID NO: 201058 - protein, 1492 aa, Oryza sativa
  Clone ID: PAT_MRT4530_9646C.1.pep
MVDGAELEHLSTDRISAEYVTALRRGWTERHNVSADRIGAVFQDLSAIGSGAEVLHPLAEPRPAARPFFLPPQWLSAEAQRRRTISLLPSKKSKKSPLNRRILEGKLLEDIVARDDSFDLNRTLFYDEPNYEAFDDEGAMKSQSVKSLTVEEVIESQGMGVDVNMQKKKAVDANEGRNQESDRVEINVELQKEEAVEANKARRLESEGVEVNVELQKEEATEVNEARSQVVPIVGNHVDDDNEVADGSMGGGGEERTTDAQLASLVRFCFRDKIYTRRECEETLLMNGLSVDLLHQHSKEYDDTHEEEGYEVEYAVDSDDDHLVAKMSQEEREVFEKLVGRNPEVVQFEDVSDYELAVVDGGVTYNGIIDAMGEEPKNGLEFKSLELLQIWLQSYSISVHRPFHVKHSNASKKYTVACIEESCEWQVRARKTKDGRWRVTGVGKEHTCCSAEASGNHLQLTSKFIGNRLQPFVRAEPTLTHVAIVEAVEAIWHYRPSYGKAWRAKQVAMKNIWGDWDEAYVRLPTLLNAIKAKNPTMHYVVEPHPERSRPVDGVMRRVFGRAAWIFRPAWTLAGIATDPEDVEEMNEYDTHTRARATVKYGPIRDRVTRELMRSVNDVGVALGTPAGSENEVGILRSALQRLKQRSRMLAARLGCRSTDAVDPQPRLMWTQAGETSQQRAEEEGEEEYDEGEEEDGQSDEEEEEQPEEIGSSQLAGAPQPSQPSQGRPQRKRAPVDRYTPSTSGRRAHPATQHPSGGNLSAKSASTEMADLSARFFGAEMRLRIPRVAISAPNQMALRWPTSVPDFPQCELVELSMAKQSLVLTLIMLAPQVDKETRADVIKAGRGAGKRDPHGSDSGRAVHGGSGPRTGEERRTTRRPRDGRTDGPDLPKGRSDGGGSSRPMFNREKGKNVSGYASSNSSFQLNPPLASRELTRAHPWSIPSMLLGSQLPLVGSQDQNQYVFDRTFATQVNELPMPEEDVPFCHDCREQGHYALNCPWVYVKEAPSFGLAGQTSLNQPPHTKSSLQPSVQSREPNGENPWNPGKCFPPSLSYHVGSRTKQAKVKKSKNQKRKAPMRTEEEVRKMTITSTEWPPAGITIPRRQRGNTFRGARQLTQHLLSHGGRVSDSEGSDQVSSDDEDESPRHVGEEEMESKACTRCGEIGHIASMCLTLCPHCEEDHPPGECPTRKVTCFLCEGTNHVPKDCQLSVLLTKTAEIQRTTLRLSHQLVSSNSNIDDIIHSTNAPPAPPNSAINHSNNTFSTNHSLHRQPQQRIVVDGRSCVSPRPTPGRAKGNQPLEGDTKQKTVIRASHLGAASFGFAHPRRPRPPLRFGRRPPERRRPRRPEPRHHLPPLRPPPPSPPSPRGEPWTVASFPPSLPSLGRRSAVPVVAGGYHRDAGAPPPALAWPPWLGRPRARRVAAAWGPAVSRPRPRVRLTRGTPGAGRCEPGAPGPPWTVRLPRGPHSRGPGPRALSPRLVHPRLNKTPTSGYSTH

SEQ ID NO: 201059 - protein, 63 aa, Oryza sativa
  Clone ID: PAT_MRT4530_96470C.1.pep
GDKEGLYHKCTKDGSFIATKQLPANNTKMIRHPPATPRGISRGQTRRKRTNRNGGTPQPHPLY

SEQ ID NO: 201060 - protein, 58 aa, Oryza sativa
  unsure (1)..(58): unsure at all Xaa locations
  Clone ID: PAT_MRT4530_96471C.1.pep
GKTIXPVGSGTAASCSGLVDQFNSCCRICIIDKKKKKKKKKKKKKKXKKKXXXXXXKK

SEQ ID NO: 201061 - protein, 168 aa, Oryza sativa
  unsure (1)..(168): unsure at all Xaa locations
  Clone ID: PAT_MRT4530_96472C.1.pep
TETTRTIRIVSILVSLVLLGQGDTYGYKYKAPYEEXGRLTRRRSTRSTWSPRSRSTSINNXTIFGTTEATAYKPTYAKTRRQISTSGIGMAIPLRCLRIPSGETKALSLRSKATLXSTTSQTFRPPCRQQLDRLFHILYCLAYILAPTIPILSKYRSRDIKRRQWRAR

SEQ ID NO: 201062 - protein, 404 aa, Oryza sativa
  Clone ID: PAT_MRT4530_96473C.1.pep
MEAPPGPEPMELDAPPPPAAVAAAAATAGISEKKKEEGGGDAVTGHIISTTIGGKNGEPKRTISYMAERVVGTGSFGIVFQAKCLETGETVAIKKVLQDRRYKNRELQLMRAMEHPNVICLKHCFFSTTSRDELFLNLVMEYVPETLYRVLKHYSNANQRMPLIYVKLYIYQLFRGLAYIHTVPGVCHRDVKPQNVLVDPLTHQVKLCDFGSAKVLVPGEPNISYICSRYYRAPELIFGATEYTTSIDIWSAGCVLAELLLGQPLFPGESAVDQLVEIIKVLGTPTREEIRCMNPNYTEFKFPQIKAHPWHKIFHKRMPPEAIDLASRLLQYSPSLRCTALDACAHSFFDELREPNARLPNGRPFPPLFNFKHELASASPELIHRLIPDHIRRQHGLNFAHAGS

SEQ ID NO: 201063 - protein, 158 aa, Oryza sativa
  Clone ID: PAT_MRT4530_96474C.1.pep
RRRRTPAGFGWREGDAEDNLAAATEKTATRSTGEIPARWMERPARHGGVPAKYGRHRGLAGEEDGVSVPGEVVATSAGARETRQRRPGVEQWWQRHCCRRGRTSRGLRAKRRAGQWRGGCCDAGEGGGTAGRRVGEAVGVAGGWPAPRKEKEEAGRGG

SEQ ID NO: 201064 - protein, 96 aa, Oryza sativa
  Clone ID: PAT_MRT4530_96475C.1.pep
MIVATATIPFFPSFHRPRFRPGGLPRRVVVLRCSASSWEEREEARWLREEQRWLREEQRWLREESRWRAERESLLAEIGALRLRLGTVEAGPLPLP

SEQ ID NO: 201065 - protein, 358 aa, Oryza sativa
  unsure (1)..(358): unsure at all Xaa locations
  Clone ID: PAT_MRT4530_96476C.1.pep
RRTGAAETARGRRRRTARERLRRRSLDEGETQPAQRLTTRSRGRRRRRXGHDDRERREDDDDDDRGRRGGDEGSRQRLHGDEDGVEDAAAMTMTVAAQRDDEPGDRRDVDDENEWRRRRWTAEGFGWRGSDAEDDLAAAIPEKTTTRSTGEIPARRMERPARHDGVPAKYGRRRGLAGEEDGVPVPGEVVATSAGARETRQRRPEAEQWRQRHCCQRGRVSGDFPTNRRRRRGRGCTCEAEGEDGAAGRRSGEEGEAAGVQRAAASSVDVRGRRRLLRRRARPREARPGQRRRWAAGRAEAAKSEAGERQGPGVTLHSSTPPRRRLHAAAPPRTKPPRRALRQHRHRRCRRRCRRRRR

SEQ ID NO: 201066 - protein, 200 aa, Oryza sativa
  unsure (1)..(200): unsure at all Xaa locations
  Clone ID: PAT_MRT4530_96477C.1.pep
HHATRRGNDNDERARRRQXGTMEANGEGTTSAAILGRRRDAAGTRLDDAELRTKMTTGXAAHLTKRGRQTRMSRRRDERHDDRKRREDDDXDDRVRRGGDEGSRQWLHGDGDDVEHAAAMTMTEAAPRDDDVGRRSDEGQQPALDLFNGCGWDYLNTKVVRTLALEYISRGAESKFTMHARYVATFDSAVVVTVGELLDV

SEQ ID NO: 201067 - protein, 149 aa, Oryza sativa
  Clone ID: PAT_MRT4530_96478C.1.pep
MYGKTTKFLGPLLPSFLKIDILPEALRGNIDPTSCQEYLNNLWRKTEQAVPPESFVGNLQLSGKPLSRPCEPFFLSPDGAPTDGRGSGGGSVPVAEKKKKKKLSGAVVATIAVGGGMAALLALVLLLIELLRKRHVNATSDEDRVKFAT

SEQ ID NO: 201068 - protein, 84 aa, Oryza sativa
  unsure (1)..(84): unsure at all Xaa locations
  Clone ID: PAT_MRT4530_96479C.1.pep
ESTDGKSSTRTVLGLYHIVWGPISPSSTWRSADPRYIRDPXGQDLRRRISPPTDPPXPRKPEPAEANSPGDLVELTRLRSHRYL

SEQ ID NO: 201069 - protein, 355 aa, Oryza sativa
  Clone ID: PAT_MRT4530_9647C.1.pep
LTELFISSATLTQDHLSALITLNRLLYLKLISDKLENFEMKHGAFPSLRRLCFVVKSVTSDLPTIKQGALPNLVSLHLLCRGLVGLSGIEIRHLKHLKEVVIDSDVTPQTKQDWAHAAKNHPNRPKFSWPRKVDLVESEEPAKHLKTEKRKYCSNYELDYNLQEMRLSESRDHKRQKIGEGDTSKSSVGLVYPMYGDVETDRTQVHLFNQETRRYDRTEVDQKCPEMLQEYKDKHSMVVDVDLRSDEQVNPPHPKLKNLMPGKEYDRQELIPTEGAKVGQCQSGGDEDQIVHNTNGKKVVVQANHFFEQEDQGSQWHALSPQQDIASFDDWWASAEIRVDDQVRKGFNSTVVLGA

SEQ ID NO: 201070 - protein, 162 aa, Oryza sativa
  Clone ID: PAT_MRT4530_96480C.1.pep
MSGETTKFLGLLLPPFLKIDILPEALRGNIDPTSCQASSQAEYLNNLRRKTEQAVPPESFVGNLQLSGKPLSRPCEPFFPSPDGTPTDGRGSGGGSMPVAEKKKKKKLSGVAVAAIAVGGGTAALLALVLLLVRGTAPPAAYRLLALSPPATARHSRGEREG

SEQ ID NO: 201071 - protein, 108 aa, Oryza sativa
  Clone ID: PAT_MRT4530_96481C.1.pep
PEFRAFTGSGNRLDGKASKPLAAGISSNPAAASSAISDSNKKVNQETAASGVSNSTRQKKGKLVFGSNKSSSSSKEPEKAPPVKVDELAKKEEPKFQAFSGTSYSLKR

SEQ ID NO: 201072 - protein, 46 aa, Oryza sativa
  Clone ID: PAT_MRT4530_96482C.1.pep
PKPVKCFNHIEKLTLTRVSLNITLARPPKVDSCYRLRMRPTLISGP

SEQ ID NO: 201073 - protein, 376 aa, Oryza sativa
  Clone ID: PAT_MRT4530_96483C.1.pep
MAPPPPAPTNCLIECPNNNINWVTTNSSHIGEVLVPTADQELGDSEDKDDTPYIITKDFSEVTHDKCSTVGFVIKCGANQADDTFQAMTGASKVVPTYAQPMDNFSSRMNDDNKLITLISTRCSVKWHGEDKNVWSFTIVSKEDNLVVGCWLMKSIGTVQRCNCYLGPSNYHLATYLKAQLCKQENMAVVIVLPQIFYQVAMASKVGKWDMRVICMVMLGIESWQPANNMVLNSKEEMLNENASFYAKVICEKQLAKGYRRTSSTREGANSIQDEIYPFDLVSANVLEEVVYITSGYTWPCKCLMGGMRMPRNVLNHNTWTQQLSKLEVLDREGNRDDRGMMAMAMVVVSTAGGENEGDGEADGLLPRLVRLWVEE

SEQ ID NO: 201074 - protein, 57 aa, Oryza sativa
  unsure (1)..(57): unsure at all Xaa locations
  Clone ID: PAT_MRT4530_96484C.1.pep
FLPFGEGXWRLFFISLHACQGILSLRLLSSFRLQAWALCATKPPPFQAPTRCGLMPV

SEQ ID NO: 201075 - protein, 256 aa, Oryza sativa
  Clone ID: PAT_MRT4530_96485C.1.pep
MENKDTTEKARLLSGALSKEGSSGTSNEGKKIQANGVDGSKAKSTSSGEKVTQGNTLSNYEKKEEKPWGREEIELLRKAIQKYPKGTSRRWEVVSEFIGTGRSVEEILKATKTVLLQKPDSTKAFDSFLEKRKPAPSIASPLSVRTETVGLPTEKAAGNASSKAPAQHASSKTSDEKAAAPAPAPVSNGTPSGTADPEAWSEAQVLALVQALKAFPKDASQRWERVAAAVPGKTMVQCKKKVAEMQKNFRSKKSAE

SEQ ID NO: 201076 - protein, 397 aa, Oryza sativa
  Clone ID: PAT_MRT4530_96486C.1.pep
MQAVAAATSRAWAASPRRRRHVASCSSPPPPTTTATTTTSSLNRCPVAGAGAPVLPLGIRGGRMLLAPPLLWNSGAAARKAAVATAAAASPPAEGGGKANGGAVAGGISRTVQLGAMILVWYLLNIYFNIFNKLVLKSVPFPYTITTFQFASGSFFITLMWLLNLHPKPRLSLGQYAKILPLALVHTMGNVFTNMSLGKVAVSFTHTIKAMEPFFSVLLSVLFLGETPSFLVLGSLVPIVGGVVLASMTEVSFNWIGFWSAMASNLTNQSRNVFSKKLLADKEETLDDINLFSIMTVMSFLLSAPLMLSVEGIKFSPSYLQSNGVNLQELCMKAALAGTCFHFYQQVSYSLLARVSPVTHSVANCVKRVVVIVSSVLFFRTPISPINALGNLTTKFN

SEQ ID NO: 201077 - protein, 372 aa, Oryza sativa
  Clone ID: PAT_MRT4530_96487C.1.pep
MLLAPPLLWNSGAAARKAAVATAAAASPPAEGGGKANGGAVAGGISRTVQLGAMILVWYLLNIYFNIFNKLVCTYIFFPQFVNFLLLLDMFFFVSNLFMADLVGIHGLQVLKSVPFPYTITTFQFASGSFFITLMWLLNLHPKPRLSLGQYAKILPLALVHTMGNVFTNMSLGKVAVSFTHTIKAMEPFFSVLLSVLFLGETPSFLVLGSLVPIVGGVVLASMTEVSFNWIGFWSAMASNLTNQSRNVFSKKLLADKEETLDDINLFSIMTVMSFLLSAPLMLSVEGIKFSPSYLQSNGVNLQELCMKAALAGTCFHFYQQVSYSLLARVSPVTHSVANCVKRVVVIVSSVLFFRTPISPINALGNLTTKFE

SEQ ID NO: 201078 - protein, 98 aa, Oryza sativa
  unsure (1)..(98): unsure at all Xaa locations
  Clone ID: PAT_MRT4530_96488C.1.pep
LEAANSRIQEAEKRINKVEDRXVGVTGAEPKREKRLKTNEESLRELWDNIKHNNICIIGVPEGEEMKKWTGKMFQQMPGPAQQDGAEERVLWNLRKKS

SEQ ID NO: 201079 - protein, 65 aa, Oryza sativa
  Clone ID: PAT_MRT4530_96489C.1.pep
YEFSSNPNSLSLRMPTSMHCQHICGHHTSLQQPNPIQQFQHCINIPAGTVQALAWLQLPVASHVV

SEQ ID NO: 201080 - protein, 101 aa, Oryza sativa
  Clone ID: PAT_MRT4530_9648C.1.pep
ATGVPVDQQRLIFRGRVLKDDHLLSEYHLEDGYTLHLVARRAAAEGQHSSGTSDENTHANVNVAGNGLLGDISRSVRYILVSLGLVTPGGMYHTTFSVPFT

SEQ ID NO: 201081 - protein, 45 aa, Oryza sativa
  Clone ID: PAT_MRT4530_96490C.1.pep
MRPSGPSDYASRAVENTGGVAGNIEFSLANIELFLAVLFTNHQRK

SEQ ID NO: 201082 - protein, 411 aa, Oryza sativa
  Clone ID: PAT_MRT4530_96491C.1.pep
GGRRRGATGVLLLPQARRARPGAWPRRVPAAARAHRGARGRAPPRELARRAAARRRRAPRRRRPQPRRPGQRRVPEARPEVPRRPAGAPRRRRRVRRRRGGRRVGDQDRHRVRRRRGVLPRRRRGPPRHRVRAHRRGEGERVGARADHRLRVRPRGGLRRGHRRHGDARGAPPRVLPAAPLPRRHGRAPRLALPRLPHRRLRGGARRVGRGARGARRRGGVARVAPHERQERAGRALRRRHVRARRRGLAGVHARAQVVASQRAGRHRRRRRVRAPPRRRRGVLRRRRHGVLLRVQGDEAGGRRHGGGKEPGICQSYWHQESIQFSARHRRRGGGRRRRPRRGGGRRRRPRGGGWRRRPRGGGWRRRPRGGGRSRRQRRGGGWRRRWRGGGGAGGGGAGGAGGVRQTAVVV

SEQ ID NO: 201083 - protein, 108 aa, Oryza sativa
  Clone ID: PAT_MRT4530_96492C.1.pep
PPPPGGPPLFLPFFSNFFGWFPGKKGPNFFPGFFKTGGGLFPPPFFFKKRFFFWGSRARGFPLFLAPPFKGFLGTFSGLGFFRAPGPLFLLGGPPQFTPFSSFFFWAF

SEQ ID NO: 201084 - protein, 495 aa, Oryza sativa
  Clone ID: PAT_MRT4530_96493C.1.pep
MEVARTGSGGAAPVGGAAAMYPEDCEIDVQQLLRRWRAEGFIKAIEENFVTVFSDPNSLVSQGKVGRLLLDYRGQENVMPMCSMVTCNVRSVSIFGYREQMLPISDLNVFRVLHIESGNKMMEICGIGKLLQLRYLRIDLVTHLTEEIGELLFLEILDLPRGIGTEELPKGIVKLRRLKFLHVHDARLPDGVGNMQALEELAVSTKEDNLSSINSLEQLGTLTKLRILHLSLSITDENNHKSKHLDTLTSSLNKLLSYNLRYLYFDSYWQLGSAYINLDFSSSPSYLLQELHIRPLLLHGIPERPASLANLTYLDIRIQQVTQETLEILGDLPALLSLLLVSAFDNTKRFSIYRNKFRCLESLNLDCSASDMMFHAGAMPTLVDINFTIKAHSTKYACANRNLGIHHLSTLKALNVYIDCQGATAKEVEAVVAAIKNEASLLPNCYIQHIRISREEGLEDIDISREEGWEEGGHSIEQQEEITNPHTEHTITPAT

SEQ ID NO: 201085 - protein, 70 aa, Oryza sativa
  Clone ID: PAT_MRT4530_96494C.1.pep
FFWGFFFLLPVFLFPGGPQIGGPPSLWCPGSPPPKGPWPPPPGGVPPPPLPGNFFPPILVVKCPPPPGFP

SEQ ID NO: 201086 - protein, 371 aa, Oryza sativa
  unsure (1)..(371): unsure at all Xaa locations
  Clone ID: PAT_MRT4530_96495C.1.pep
MSETDSSAAAAEGRKPRRLRGHKKGAVTCCVASSSRPGVVASSGEDGCLCWFDLRTKDVLFTMEATNQPISSVCFKAGNEDLVYASAGNEILSFDVRMGPQAKPLDTYNYNRDEINQIAVSSILAIPAADDSGDVKISELPCFGAIXSSVQFIPWRPWTAITGGLDSKLAVWDFSKGRTLFSIDYGSPEMQNGSSGGQCFNPPFVHSIAVSEEGILGGSYKVCAVARGDGAVDVVDLEYELAPAKSKGLPRMADLSLSSKRTDLGDGCGSQSQGNRIHLDYTVGGHTSSVSCVTFSAFGEKGKFLVSGGNDSSIKLWDWSKGFSSETNNSAELVLDIKVXKKVNWLCTTPTDSDNLIVCDTSKVVKVYNLP

SEQ ID NO: 201087 - protein, 124 aa, Oryza sativa
  Clone ID: PAT_MRT4530_96496C.1.pep
LIPIIPSIQRNSRDALVAMYNTNQAGSRTNTHIYLSRMHVYLYISCMYIPVTIPWYTVHAHTHTYCWHTHIIQSVTHHQLSPCHIYNNLINQSHNLSSKSPLHHKKPKINRRMQKPIMHWQYTS

SEQ ID NO: 201088 - protein, 334 aa, Oryza sativa
  Clone ID: PAT_MRT4530_96497C.1.pep
MKVFVVVCMLAVAFRLVAAVVVPSAAPGGLTVGYYNGKCNNVNVESIVYNTVKDFLDADRSKGAALVRLLFHDCFVRGCDGSILLDNSTANPSPEKMSGANIGIAGLDVIDAIKAKLETACPGVVSCADMSCSRAATRRAGRLDGVVSSAADATNTLPDSKTGVATLISNFAKKGFTPEELVILSGAHSIGKAHSSNFDDRLTAPDSEINADYRDNVLNKTCKSSSAAANPTLANNIRDIDAATLGDLASYVVPAVGGDYLDNSYYKNNKNNLVLFHSDWALVGTNSTLQHVNEYAENGTLWNIDFAQALVKLSKLAMPAGSVGQIRKTCRAIN

SEQ ID NO: 201089 - protein, 190 aa, Oryza sativa
  Clone ID: PAT_MRT4530_96498C.1.pep
MGDDGGGVKVAAAAATTATGMKQITRLRELLQKWQAMALGANKGDVATAGDEEDEEVVEVAPAAAAAAAIPPFVMRRLQRTVTVDSDDESCQSPEPPADVPRGYCPVYVGPEQRRFVIPTRYLGHPVFRLLLEKAEEEFGFCHQGALAIPCETEAFKYILQCVERHDNGLAAGDVVDGVVDVNDRAPPRD

SEQ ID NO: 201090 - protein, 345 aa, Oryza sativa
  Clone ID: PAT_MRT4530_96499C.1.pep
MKVFMAVCMLAVAVRLAAAIVVPSAAPCALTVGFYNGKCGNVSVESVVYDTVKAFLDADKSKGAALVRLLFHDCFVNGCDGSILLDNSTTNPSPEKFAGANLGIAGLDVIDAVKAKLETACPGVVSCADIVVFAGRDASRYMSNGGVNFDVPAGRLDGIVSSSVDAQNTLPDSKADIGKLIANFAAKGFTPEELVILSGAHSIGKAHCSNFDDRLTAPDSEINADYRDNVLSKTCKSAPNPTLANNIRDIDAATLGDLASYVVPAVGGDYLDNSYYKNNKNNLVLFNSDWALVGSNATLQHVNEYAENGTLWNIDFAQALVKLSKLAMPAGSVRQIRKTCRAINY

SEQ ID NO: 201091 - protein, 1235 aa, Oryza sativa
  Clone ID: PAT_MRT4530_9649C.1.pep
RRKNDKPKTGGEKKPAKDAPESSKKKNRKSGKRKAQAEVLATEYADPPKRPDPQSSDTKKTWCPIHKSDRHSLEDCLIFKKSLAKHMALEKGKRVRVAEKDAKAATQESDSAYPDSDLHVSHIFGGSTAYSSKREYKKVEREVCSTWQGAAPKIKWSEQKIEFSEEDHPKTAVIPGRYPIVVEPTIRNIKVARVLIDGGSSINLLFASTLDAMGIPRSELTPTDQPFHGITPQLSSKPLGKITLPVTFGQANNFRTEQITFDVAEFDTAYNAIIGRTALAKFMAASHYAYQVLKMPGPKGTITIQGNAKLVVQCDKQSLDMVEHTPTPPATAEPPKKPSDMPRVPREVIEHKLMVRPDARPVKQKLRRFAPDRKQAIREELDKLLKAGFIRKACPKDHFPLPRIDQLVDSTAGCELLSFLDAYSGYHQISMAKEDEEKKAFITPFGVFCYVKMPYELITAGNTFQHTVQGALSNQLGNNVEAYVDDIVVKTKTSDSLIDDLRETFDNLRRYCLMLNPEKCTFGVPSGKLLGFLVSGRGIEANPKKIKAIENMKSPTRLKEEAEEAFIALKRYLSNPPVLVAPQPNEELFLYIAARPYSVSTVIVVEREKVQRPVYYISEALHDAKTRYPQIQKLLYAVIMTSRKLRHYIQAHRVTVVSSFPLGEVVRNKDIVGRIAKWVVELSQFDVRFVPQTVIKSDNQINNETWTMAFDGALNSQGAGAGFILTSLLGDQFKHAIHLNFRATNNTAEYEGLLAGIRAAATLGVRRLIVKGDSELVANQVHKDYKCSSPELSKYLAEVRKLEKRFDGIEVRHVYHKDNIEPNDLARRASRREPLEPGTFLDVLTRPSVKEASGENSPVAPNISSGATEAEHAVADIETTDDWRTPLIKFIGSEELPEDDAEAEKISRKAKVYCMIGNDLYKKAPNGVLLKCVSSDDGRHLLLDIHEGICGSHAAGRTLVGKAFRQGFFWPTALKDACDMVQRCEACQFHSKHTRLPVQALQTIPLTWPFLCWGLDTLGPFPRGQGGYRFLFVAIDKFTKWIEATPMGLMSHDKKWVEELPSVLWAIRTTPTTSNKETPLFLVYGSEAMLPTKLRHQGTRVQKYSDEDQEEQRSDDVHLLVEHRERVAVKAASYQQALRRYHEKRIRAHTLSIGDYVLRRVQQLDQSDVNEGNVMTITPDKLTPNQKKEFEAMMQQARNQFLNSFMQTRKGTVVQKYQVRVVADVPGTGSSKDGE

SEQ ID NO: 201092 - protein, 99 aa, Oryza sativa
  Clone ID: PAT_MRT4530_964C.1.pep
MPVTQHLGSEGDGAQVQYEATLAYSGAVAGVTIEELAGRTSSWSSVSYVLDLGTKEVSATAFEDLNEAHSRRPEQVGTLGAGVIAARMVLLFVLTVDND

SEQ ID NO: 201093 - protein, 104 aa, Oryza sativa
  unsure (1)..(104): unsure at all Xaa locations
  Clone ID: PAT_MRT4530_96500C.1.pep
DGVLKPRRNATCLSSGDATTTSAGARDDGGRPPGPMLGQLLLRGSCSGPEATGQXXXPPPHLGHARARRHVWPHERSLWLADAEAVLPRRPLLADLDDGGICLL

SEQ ID NO: 201094 - protein, 101 aa, Oryza sativa
  Clone ID: PAT_MRT4530_96501C.1.pep
QREGKSKQQKEEGRWEMFEGSPPARADNPLVHDPHFLLNQRPHAAAAAAAPELSIFDHRSTHHGHHPAYSSSSSFAPSFAPAVRIQGFDVAACRSSHGSGG

SEQ ID NO: 201095 - protein, 374 aa, Oryza sativa
  Clone ID: PAT_MRT4530_96502C.1.pep
LLDLEGCQYHLDKNHLKDICSILHLKYLSLRRTDVADLPHEINNLHELEVLDIRQTKVSEHATKNIVLLKLRRLLAGQVDPSTSHEMGKPLRSAVLIPRKINKMENMEVLSNVKAYSRNGAELKEIRKLGQLRKLGVVIVNNENHLKNLLWAMSDLKECLQSLSITILKTRNEGDTANKQKVLPHDLYNHLIQPPKVLESLSIDGPPKNTILSLFATANHIAKVTLSDTCLKQGDLQILAKKPKLCWLLLLDKSYDESHLTFNKDEFPKLKHLTITCSKISGINFAKESACKLEKITWSFTELESLSGIDNLPELKELELEGKSVPLQVWRDINAHNKKLIHKRTQVQDEPKGGPTLANKKKSAFFSIFPSTHR

SEQ ID NO: 201096 - protein, 84 aa, Oryza sativa
  Clone ID: PAT_MRT4530_96503C.1.pep
LAPMAHNMIRWQAERNFEQQQIVLKGNVLLLQTLYFADREKTEAVICELLVGLNYICRYEQQQNALLDCSSSLDFDDCMEWQLQ

SEQ ID NO: 201097 - protein, 237 aa, Oryza sativa
  unsure (1)..(237): unsure at all Xaa locations
  Clone ID: PAT_MRT4530_96504C.1.pep
METTRTTRIISILVFLVLFGQGDTYGYKYKTPXEERGETXTIDQDTRSTYKPTYAKTSCRISTSERSLVDPHRYLWMPSGGVXALSLISPRTDLRREATLLSTPSQHFRPPNRQQLDRLPHILYYLAYTLVPTIPILCKYQNRDIKRRHIAPLALHSRTPNLTLQPRSLAAKERSGHGFVCAIFLGLRRQGRTRGRSPSPRPFFRGPRRRSQPAQASSWRSRGRERMRPQGSVSSPI

SEQ ID NO: 201098 - protein, 326 aa, Oryza sativa
  Clone ID: PAT_MRT4530_96505C.1.pep
MEMQGHGSKASGHGLRGTDSARQQHQGTAAAIATHLSERTDNENTHLKKRLIQMGFDPMTHRPRTDFFAALPQLIALATLRDHLAGMACGGGGADHAGRRSVPITATAIDHSGGQTQALCAFSEAPVITSDDVEANVEGSLATGSSTPPPVPVAGERGIAELTCGPKGTFDISPQFACRLDNLRSRNHDIHCLHNTNGLVAAPIIIAQNLGSVEPSKLILSEKRQCHTVVATKLDLPERARGRGQSGRGEEGGGNRLGPSLRVTGSTVGETDTIDSNDPRTRSGTSPRGVEGEEEGGGGGMEMKGEKCRGSGLRPSPLGTWIRWRG

SEQ ID NO: 201099 - protein, 65 aa, Oryza sativa
  unsure (1)..(65): unsure at all Xaa locations
  Clone ID: PAT_MRT4530_96506C.1.pep
PSKPPPLPWFPAGTGPRTWALKAKRGGRPRFRPPELSKIRLKELVFPWGRRPPPILPLLNGRRGX

SEQ ID NO: 201100 - protein, 287 aa, Oryza sativa
  Clone ID: PAT_MRT4530_96507C.1.pep
MAGVGVEEEEAFEHTLLVVREVSVYKIPPRTTSGGYKCGEWLQSDRIWSGRLRVVSCGDRCEIRLEDPASGDLFAACFVLPGQREAAVETVLDSSRYFVLRIEDGRGKHAFVGLGFGERNEAFDFNVALSDHEKYVKREHEKEAADGGAGGGEENDDGQIDIHPAVNRRLKEGETIRINVKNKPSTGSGMLSSAGLSGGASAKPKASMLLAPPPGSAGKLRSPLPPPPNDPAAARMNSGSNAGIRAPKEPAKRNSDAFSDLSAMKQNLPSSTESAQTKSTGAGWAAF

SEQ ID NO: 201101 - protein, 82 aa, Oryza sativa
  Clone ID: PAT_MRT4530_96508C.1.pep
MAMRLAAAAAFVRRLVPARNPVISAEAEAVTCGRGDKKTKRGKRFKGSYGNARPKREKKIERIKDRVEVPRSTPWPLPFKLI

SEQ ID NO: 201102 - protein, 127 aa, Oryza sativa
  Clone ID: PAT_MRT4530_96509C.1.pep
TTKNGPKLYKKMDQNSGLESSSKRGHLCALYNHSRSSGERIVTSIQTNNWTSKNCTEKKITKPQKVKLNIAFCMDQISGLNPPKRDYICAQYNRSRSSGERIFTSIQTNKQTKKGRAKKHCKTKIQS

SEQ ID NO: 201103 - protein, 838 aa, Oryza sativa
  Clone ID: PAT_MRT4530_9650C.1.pep
MNRSVCHHLLTQCKTIRELQRIHAQALTHGLHPNQQSISCKIFRSYAEFGRPADAGRLFDEIPHPDIISFTSLMSLHLKLDHHWKAISVFSHAIASGHRPDGFAAVGALSASGGLGDQRIGSVVHGLIFRCGLDSELVVCNALVDMYCRCGKFEPARTVFDRMLVKDEVTWGSMLYGYMKCVGVDSALSFFYQMPMKSTVSWTALITGHVQDKQPIQALELFGKMLLEGHRPNHITIVGVLSACADIGALDLGRAIHGYGSKSNATTNIIVTNALMDMYAKSGSIASAFSVFEEVQMKDAFTWTTMISSFTVQGNGRKAVELFWDMLRSGILPNSVTFVSVLSACSHAGLIQEGRELFDKMREVYHIDPRLEHYGCMVDLLGRGGLLEEAEALIDHMDVEPDIVIWRSLLSACLAHGNDRLAEIAGMEIIKREPGDDGVYVLLWNMKFSIKANMQRHVKEIHEDETATKSNRQFVCKEEGCNKVFKYASKMKKHEESHVKLDYVEVVCCEPGCMKTFTNVECLRAHNQACHQYVQCDICGEKHLKKNIKRHLRAHEEVPSTERIKCSFEGCECSFSNASHDQVKPFACRFTGCEKVFPYKHVRDNHEKSSAHVYTQANFTEMDEQLLSCPRGGRKRKAVTVETLTRKRVTMHGDASSLDNGTEYLRWLLSGESGSCIGRSRAHPNSITPTLAWMRRLEESYTTSPAVAHAGLWADVSTGESGADMRGPPVSGSGEGGRGAGTRGPPVSDSRGRAVHRGPGPRGWSTAGPRNRRPRSPSGPIGRAAMEAAAGLGSASKPTGRPGLAVTARGRRRRRPAAWEAVAAAEGDGARLEAAARH

SEQ ID NO: 201104 - protein, 141 aa, Oryza sativa
  unsure (1)..(141): unsure at all Xaa locations
  Clone ID: PAT_MRT4530_96510C.1.pep
ALNDRISVVQRVIEPRGXLILPHYIKGAFIVYIIQRRWITGFTLQGCPESYQQQFHQSCQASLTESQSQSEKFXYEHQKIHRLLQGDGIALPAGVAHRGYNDHEVPVAVLYITDLNSVASKLDRRQRDFXIAGTKRNPNAY

SEQ ID NO: 201105 - protein, 181 aa, Oryza sativa
  Clone ID: PAT_MRT4530_96511C.1.pep
AEFLQSSSPPRALRFTRARCSAGTRRAAAMEEVTEAVGNLTISAGEAAGAGGGAAEAHKKNRVQVSNTKKPLFFYVNLAKRYMQLHNEVELSALGMAIATVVTVAEILKNNGLAVEKTYSKICAEIMTSTVDVKDDSRSRPMQKAKIEIVLGKTDKFDELMAAAAEEREAAAAEAEAEEQS

SEQ ID NO: 201106 - protein, 909 aa, Oryza sativa
  Clone ID: PAT_MRT4530_96512C.1.pep
MANFRGFRRAVIVVVLCICHVNVVRGQSTDPAEVNALRAIKGRLIDPMNNLKNWNSGDPCTSSWKGVFCDNIPINNYLHVTELQLFKMNLSGTLAPEIGLLSQLKTLDFMWNNLTGNIPKEIGNIHTLRLIGTFSIKYPNQLLIDSTIREMCRQLIVVAYFHGTLNGNQLSGSLPDEIGYLQNLNRLQIDQNEISGPIPKSFANLTSMRHLHMNNNSLSGQIPSELSRLPELLHLLVDSNNLSGPLPPELAETRSLQILQADNNNFSGSSIPAAYENIPTLLKLSLRNCNLQGGIPDISGIPQFGYLDFQNNSLGNIPAAFEPPEEVTILLYGNPVCTNSTPARAARLCQPTSVTEAPSGQGSQVSINCSPCPTDKNYEYNPSSPLPCFCAVPLGVGFRLKSPGISDFRPYKEDFQKNLAHLLVLADYQIYMERYIWEVGPRLNMHLKLFPNNTNLFNTSEVVRLRHLLAGWEITLSNVFGPYELLNFTLGSYEDEFPTVASSGLKRGALAGILAGTITASIAASVFTTIFIMRRRSKRRTTSRRSLLSRYSVKVDGVRCFTFDEMAAATNDFTDSAQVGQGGYGKVYKGNLTDGTAVAIKRAHEGSLQGSKEFCTEIELLSRLHHRNLVSLVGYCDEEDEQMLVYEFMPNGTLRDHLSAKSRRPLNFSQRIHIALGAAKGILYLHTEADPPIFHRDVKASNILLDSKFVAKVADFGLSRLAPVPDVDGTMPAHISTVVKGTPGYLDPEYFLTHKLTDKSDVYSLGVVLLELLTGMKPIQHGKNIVREVNTAYQSGEIAGVIDERISSSSSPECVARLASLAVKCCKDETDARPSMADVVRELDAIRSALPEGEELLPEYGDQSATSTSLTATGPLSSSSTTGALFISSGSGGHANSKSGIPSGTVAPR

SEQ ID NO: 201107 - protein, 95 aa, Oryza sativa
  Clone ID: PAT_MRT4530_96513C.1.pep
HLGYCYCLHCFSTVTMGLISKEDPVKGLFNASSAESLHIPSEPPSEDELPPPPPVVHQHHPPGPKRRVRPIPTAFFHLRKVLGKKKSRRYQDVNA

SEQ ID NO: 201108 - protein, 81 aa, Oryza sativa
  Clone ID: PAT_MRT4530_96514C.1.pep
KKAFPDLSVLGWYSIGTNVHATDMGIHHGDYADMQIHQTEKHRNDRLIEIQEKRRNWMREIDSKESYQEVETLAKFSPKSL

SEQ ID NO: 201109 - protein, 424 aa, Oryza sativa
  Clone ID: PAT_MRT4530_96515C.1.pep
MAASLAWLLVAIVLASLYLAMHHRVAAARRRRLPPGPTPLPLVGNLLSVSRSGPHRSLARLAERYCPLMRVRLGVVDYVVASSPAVAGDIHHHSHNAHLASRPLFDVWRGAEHHRNSVIVLPLHGVWRAQRRLATEEVMSPRRLDALAPTRREKGLRRRMGKLVARAYGIIDELLARRKGGREAGEPRKDDMLDVALDNEDEWKNNNPVIDRNNIKGLIADLFVAGTDSGSTAIEWAIVELLQNPQSMQKVKDEFRRVLGTRTEIEESDISQLPYLQAVLKETLRLHPSVPMTYYKAEATVEVQGYIIPKGTNIILNIWAIHRKPDVWADPDRFMPERFMETDTNFFGKHPEFIPFGGGRRICLGLPLAYRMVHMVLASLLFHFDWKLPEGAEKDGVDMREKYGMVLHKETPLKALAIETYNRK

SEQ ID NO: 201110 - protein, 448 aa, Oryza sativa
  Clone ID: PAT_MRT4530_96516C.1.pep
MAAATQPHVMVLPFPAQGHVIPLMELSHRLADQGFKIDFVNTEFNHDRVLKALAEKGAIPGGIRMLSIPDGLDPADDHTDIGKLVQVLPDAMLSPLEKMIRSEKIKWVIVDVSMSWALELATTMGVRIALFSTYSAAIFALRMNLPKLIEDGILDETGNVKKHEMVQLMPPIDAAEIPWVSLGSTQERRRYNIQNVFKTNRLMALAEMIICNTFREIESEALELLSNALPVGPLLAPASGPTGHFLPEDMTCLTWLDTQAPGSVIYVAFGSSTIFDIAQFHELANGLAVSDQPFLWVVRPNFTNGIQEDWFNEYKDRIKGKGLVISWAPQQRVLSHPSIACFMSHCGWNSTMEGVLHGVPFLCWPYFSDQFCNQSYICNVWKTGIKLFRDKQGVVTQEEIKNKAAQLLEDKEIKERAVTLKTTARASIQEGGSSHQNFLELVNLLREQ

SEQ ID NO: 201111 - protein, 88 aa, Oryza sativa
  Clone ID: PAT_MRT4530_96517C.1.pep
CPSGCRRGLRWATDYRSLEGCFFTYGEILLYKIINDRETARSRGFGYSTFYSEQAMRNAIEGMNGKELYGRNITVNDAQSLRSGGGGC

SEQ ID NO: 201112 - protein, 46 aa, Oryza sativa
  Clone ID: PAT_MRT4530_96518C.1.pep
KFFGVSPSQAVKLEWARSSLELELELTPKLDQYPSSARVHVKLKPT

SEQ ID NO: 201113 - protein, 4473 aa, Oryza sativa
  Clone ID: PAT_MRT4530_96519C.1.pep
MDPGGMLLEDFGQRVDLTRRIREVLANYPEGTTALRELIQNADDAGASRVRLCLDRRAHGAGSLLAPALAQWQGPALLAYNDAVFTDEDFASISRIGDSRKVSQVWKTGRFGVGFNSVYHLTDLPSFVSGKYIVLFDPQGAYLPNVSAANPGKRIDFVSSSAITLYNDQLSPYCAFGCDMKAPFQGTLFRFPLRTAEQASLSRLSRQVYTEDDILSLFAQLYEEAVYNLLFLKNVLSLEMYVWESGMSEPKIVYSCSIGSQHDNLRWHRQALVRFSGTAAESSEKKIDSFSMDFVSKSFLGEKFEKKSYTYFIVQGMASALSKIGIFATTAAKDYDLHLLPWASVAACISNVGPEEVILRQGRAFCFLPLPVKTGLSVHVNGYFEVSSNRRDIWYGADMDRGGKLRSDWNMLLLEDVVAPLFRELLLQLRTVLDSKISYYSLWPTGLYEEPWSILVEQICKFIYTSPVFHSEIKGGTWITPAESLLHDEGFSRSDDLSEALVMLGMPVVRLPGAIADMFPKFHSKYMLKIVTPATVRHFLKDFENLGTLEKSQKLILLEYCLADLDSGNIGKCMNGLPLIPLANKQFGIFSGISQENQYYVCDSIEYELLSAVSDRIIDRSIPPVILDKLYQIASSSQVNISLIEGRIFLQFFPWLFPPGWKCRNQVPWDPESGGSSPTAAWFKLFWQYIGDCSYDLDLFSDWPILPSTSGHLYRASTVSKLINTGSLSNLMKELLTKLGCKILDTKYLSTCQHLSNYVYDGDASGVLHSIFGVASLEGVDLQALFQRITPAEKNELYQFVLDAKWYLGPHLSDMSINLCKKLPIFRVFDGGSPSSYGFSDLSTSRKYLPPLGVAEQLLNDDFVFCISPSDEDIIMRYYGIERMPKSNFYQRYVLNRLDELQTEFRDSVLLTILQDLPQLSLENPRFKEALKVLRFVPTTNGVLKSPQSLYDPRVEELYALLQESDCFPHGLFQNPEVLDMLLCLGLRTSVSIDTIIQSARHIDSLVHKDHHKAHSRGKVLLSYLEVHAHKWYVHKPFDGRKKVNMLAKVTTVLRSRDTSWEADLEKFWSDLRMICWCPVLVTAPSPALPWPSVSSMVAPPKQVRMQDDMWIVSASSRILDGECTSSALSYSLGWLSPPSGSVIAAQLLELGKNNEIVTDQVLRQELALVMPKIYSLLSNLIGSDEMDIVKVVLEGCRWIWVGDGFAKTDEVVLTGHLHLAPYIRVIPIDLAVFKDLFLELGIKEQLDPVDYASILTRMATRKASTSLQAEELRTAVLVVQHLAEFRFQDHQTQIYLPDSSARLCLSSELVFNDAPWLLDFDEDITGNAPSIAFNSKKYVHNFVHGNISNDVAERLGVRSLRRLLLAESSDSMNLSLSGVAEAFGQHEDLTTRLKHIVEMYADGPGILFELVQNAEDAKASEVVFLLDKTHYGTSSILSPEMAEWQGPALYCFNDSIFSPQDLYAISRIGQDSKLEKPFAIGRFGLGFNCVYHFTDIPGFVSGENIVMFDPHASYLPGISPSHPGLRIKFVGRRILEQFPDQFTPFLHFGCNLQQPFPGTLFRFPLRNEAAASRSQIKREQYTPQDVEMLFSSFSEVVSEALLFLRNVKNITLYVKESDSQEMKLVHRVSKHNSYEMAKEPHALNTMLAFINGNQPSGMDRNQFFNKLNKTKDSDLPWSSQKVSIFEQSPAACLVHSWILTESIGGGHARKLSTASGSKSHFFVPWASVAAYLHSVTVDNTKELSGEAEVNLDDLVLKQLSLGSSKDRKFFEGRAFCFLPLPINTSMPVHVNAYFELSSNRRDIWIGNDMAGGGRVRSEWNLALLEDVAAPAYGHLLAAIAQELGPSDLFLSFWPTAVGVEPWSSMVRKLYVSIAELGLHVLYTKARGGHWVSTRQAIFPDFSFSKAIELAEVLSEAGLPVVSVSKQIVDSFLNAYPSVHLLNPHLLRNLLIRRKRGFRNREEAILVLEYCLSDMGDPSFPDKLQGLALLPLANGSFTTFTNRGEGERVFFSSQMEFELLKDSIPHLVVDNSLPDAILKKLYDIACSARSNIYLFTCNFLLELLPRILPPEWQHAKQLFWSPGHQGQPSVEWMVSLWNFLRHSCEDLSIFAKWPILPLVDGKLMQLGNASNVIIDDGWSENMYSLLQKLGCFFLRSDLQIEHPQLANFVQEATAVGVLNAVQSVASNFQDIKELFMGISLAETHELRSFIFQSKWFSGNHMNSSHMNTIRNLPIFESYKSRELVSLTSPRKWLKPEGVHEDLLNESFIRTESAKEKSILVSYFAITEPQKAEFYKDHVLPRISEFLSQPAVVSAILRDVKLLAENDTSVRAALHETPFVLAASGAWVHPSRLYDPRVPELHKLLHKETFFPSEKFMTTEVIELLASFGLKSKLGFSTLLDIARSVSLQQDDALEHGKRLLTYLNFLEFKASNMEDKKTFHGDDNQEASKTDGSFEAENDGDGYDPEETILSLFSNFDHDLPEDEFWSELKNISWCPVHVAPLLKGLPWFISEDHVAPPITTRPKSQMWLVSSKMRILSADSCSMYLQRKLGWLDPPNANILSSQLVEISKSYDELKMFSEDSTNDAVPQKEIQLIYSKLQDIIDTADTNILKRNLDGHPWVYIGDRFVPPQALAFDSPVKYHPYLYAVPSELSEYKRLLSVLGVKQTFDAADYLNVLQCLQSDAKGEPLSTEQLSFVHRVLEAFVDCYPDNQAPDMMVNSLLIPDSFGVLTPARNLVYNDAPWMNADPTSKSFVHLSIGNDLANRLGVRSLRGSSLLDDELMTDLPCMEYAKISELLALYGESDFLLFDLIELADHCNAKKVHLIYDKRDHPKQSLLQQSLGDFQGSSLTVVFEGTIMSREEVCSLQLPPPWKLKGNILNYGLGLLSSYFVCDTLSILSGGYFYIFDPLGLTGGTTSIATSSARFFSLIGNDLVERFHDQFTPMRVTQEASLSSANSTVIRMPLSSKCLKELEAGCNRVKHIFDRFTQNPSSTLLFLRSIIQVSLSTWEGGASQPTLNYSVLVDPSVATLRNPFSEKKWRKFQLSRIFASTSAAIKMQAIDVHVIDNGCNYIDKWFVALCLGSGQTRNMALDRRYLAYNLTPVAGVAAHIARNGVSTNIHASSCILSPLPLSGSISMPVTTLGHFIVRHNGGRYIFGSSHDKSLSDLEMHKNKLVEAWNKELMLCVRDSYVEMVLEFQKLRKDPLSSAIESRSKQHPASLTGYGSTVTNVNSPRASKADWQSLVEQVIRPFYVRLADLPVWQLYGGNLVKVDVGMFLSHSGSGDDDNLPSASVCSFIKEHYPVFSVPWELVREIQAVGVNVREIRPKMVRDLLKASSSILLRSIETYMDVLEYCFSDMDPYRFSDFHIHEESRVSNQQSEIMNSSISNSMPSSSSSVSYHRNTQRQGASGGDALEIVTYFGKALYDFGRGVVEDISKTGGSASHRTQAAENNVLSSIITELKGVPFPTSTKCLTRLGSTELWIASEEQQLLMRPFLHHFIHHQCLQKPFLELLLTTQVIHRPLKLRSFSPHLLSGHLKHIFDERWVHLAVEKKSPWIPWDNNANSSTAGPSPEWIRLFWKIFSSMSGDLSLLSDWPLIPAYLDRPVLCRVKECHLIFVPPADDSNPDSGDSAARVVDTSAHPGDETGEAELNSILDTAFQSMNSAFPWLPALLYKLNIPVFDLSFPECGTICNLFPSRDRTLGQIIASKLVAIKNGGHLPLPLSLSSEDCDKLFALFVSEFRLSSNHLYQREELDVLRELPMYKTVTGTYTSLSGSDHCILSPTAFFHPADSRCLSSTANADLFLQALGVEQLSDQEILVRVVQTRELLDPSDALLTSVFSGERHKFPAERFLSDGWLVILRKAGLRTSTEADMIVQCATKIESMGNDIVSSSEDPSDFEADFSGSKNEIPFELWSLAESVVNVILANFATLYDSSFCENIGKIAFIPAEKGFPSIGGKRGGRRVLASYSESILSKDWPLAWSSAPILTNQAIIPPEYSWGAFRLRSPPAFTTVLKHLQSVGRGNGEDTLAHWPTSSGIMTVEDAFLRILQYLDKIWGTISSSEKNELQTLAFIPVANGTRLVTVKSLFARLTINMSPFAFELPSLYLPFVTILREIGMQETLTNTYARELLLDIQKACGYQRLNPNELRAVMEILDFMCSGVNQATDGSEDIFDSVIPDDGCRLVSAVSCVYIDPYGSHLLSNIDTSRIRFAHPDLPQNICNTLGIKKLSDVIVEELDGKEELKMVNSICSVTLDKIKEKLLSKSLQDALRIVMIGVSNHFPSFEALNLAQIESVLKDISQNLQFVQRLHTRFLLLPMLQDVTRSSQRPPFPEWSSNGKHRSVCFVNKSTGQILVAEPPNFLTIHDAIAIVVSYRLGAPVILPIASVFACPDGTEKEVLKILRLGTDIGVSKREGRYNGSLGAELLSQDARQVQFLPLRPFYSGEIVAWKTGKEGENGDLEDPIRYNLTYSI

SEQ ID NO: 201114 - protein, 42 aa, Oryza sativa
  Clone ID: PAT_MRT4530_9651C.1.pep
MNNARVKEITSLYVVSSNTLKLRKQIIVQFYLGVLGQTKPKV

SEQ ID NO: 201115 - protein, 965 aa, Oryza sativa
  Clone ID: PAT_MRT4530_96520C.1.pep
MDPGGMLLEDFGQRVDLTRRIREVLANYPEGTTALRELIQNADDAGASRVRLCLDRRAHGAGSLLAPALAQWQGPALLAYNDAVFTDEDFASISRIGDSRKVSQVWKTGRFGVGFNSVYHLTDLPSFVSGKYIVLFDPQGAYLPNGMASALSKIGIFATTAAKDYDLHLLPWASVAACISNVGPEENQYYVCDSIEYELLSAAEHFFSSFPGYFLLDGNAETKFPGIQNRVDHLLQQPEQLLNDDFVFCISPSDEDIIMRYYGIERMPKSNFYQRYVLNRLDELQTEFRDSVLLTILQDLPQLSLENPRFKEALKVLRFVPTTNGVLKSPQSLYDPRDHQTQIYLPDSSARLCLSSELVFNDAPWLLDFDEDITGNAPSIAFNSKKYVHNFVHGNISNDVAERLGVRSLRRLLLAESSDSMNLSLSGVAEAFGQHEDLTTRLKHIVEMYADGPGILFELVQNAEDAKASEVVFLLDKTHYGTSSILSPEMAEWQGPALYCFNDSIFSPQDLYAISRIGQDSKLEKPFAIGRFGLGFNCVYHFTDIPGFVSGENIVMFDPHASYLPGISPSHPGLRIKFVGRRILEQFPDQFTPFLHFGCNLQQPFPGTLFRFPLRNEAAASRSQIKREQYTPQDVEMLFSSFSEVVSEALLFLRNVKNITLYVKESDSQEMKLVHRVSKHNSYEMAKEPHALNTMLAFINGNQPSGMDRNQFFNKLNKTKDSDLPWSSQKVSIFEQSPAACLVHSWILTESIGGGHARKLSTASGSKSHFFVPWASVAAYLHSVTVDNTKELSGEAEVNLDDLVLKQLSLGSSKDRKFFEGRAFCFLPLPINTSMPVHVNAYFELSSNRRDIWIGNDMAGGGRVRSEWNLALLEDVAAPAYGHLLAAIAQELGPSDLFLSFWPTAVGVEPWSSMVRKLYVSIAELGLHVLYTKARGGHWVSTRQAIFPDFSFSKAIELAEVLSEA

SEQ ID NO: 201116 - protein, 4737 aa, Oryza sativa
  Clone ID: PAT_MRT4530_96521C.1.pep
MDPGGMLLEDFGQRVDLTRRIREVLANYPEGTTALRELIQNADDAGASRVRLCLDRRAHGAGSLLAPALAQWQGPALLAYNDAVFTDEDFASISRIGDSRKVSQVWKTGRFGVGFNSVYHLTDLPSFVSGKYIVLFDPQGAYLPNVSAANPGKRIDFVSSSAITLYNDQLSPYRAFGCDMKAPFQGTLFRFPLRTAEQASLSRLSRQVYTEDDILSLFAQLYEEAVYNLLFLKNVLSLEMYVWESGMSEPKIVYSCSIGSQHDNLRWHRQALVRFSGTAAESSEQKIDSFSMDFVSKSFLGEKFEKKSYTYFIVQGMASALSKIGIFATTAAKDYDLHLLPWASVAACISNVGPEEVILRQGRAFCFLPLPVKTGLSVHVNGYFEVSSNRRDIWYGADMDRGGKLRSDWNMLLLEDVVAPLFRELLLQLRTVLDSKISYYSLWPTGLYEEPWSILVEQICKFIYTSPVFHSEIKGGTWITPAESLLHDEGFSRSDDLSEALVMLGMPVVRLPGAIADMFPKFHSKYMLKIVTPATVRHFLKDFENLGTLEKSQKLILLEYCLADLDSGNIGKCMNGLPLIPLANKQFGIFSGISQENQYYVCDSIEYELLSAVSDRIIDRSIPPVILDKLYQIASSSQVNISLIEGRTFLQFFPWLFPPGWKCRNQVPWDPESGGSSPTAAWFKLFWQYIGDCSYDLDLFSDWPILPSTSGHLYRASTVSKLINTGSLSNLMKELLTKLGCKILDTKYLSTCQHLSNYVYDGDASGVLHSIFGVASLEGVDLQALFQRITPAEKNELYQFVLDAKWYLGPHLSDMSINLCKKLPIFRVFDGGSPSSYGFSDLSTSRKYLPPLGVAEQLLNDDFVFCISPSDEDIIMRYYGIERMPKSNFYQRYVLNRLDELQTEFRDSVLLTILQDLPQLSLENPRFKEALKVLRFVPTTNGVLKSPQSLYDPRVEELYALLQESDCFPHGLFQNPEVLDMLLCLGLRTSVSIDTIIQSARHIDSLVHKDHHKAHSRGKVLLSYLEVHAHKWYVHKPFDGRKKVNMLAKVTTVLRSRDTSWEADLEKFWSDLRMICWCPVLVTAPSPALPWPSVSSMVAPPKQVRMQDDMWIVSASSRILDGECTSSALSYSLGWLSPPSGSVIAAQLLELGKNNEIVTDQVLRQELALVMPKIYSLLSNLIGSDEMDIVKVVLEGCRWIWVGDGFAKTDEVVLTGHLHLAPYIRVIPIDLAVFKDLFLELGIKEQLDPVDYASILTRMATRKASTSLQAEELRTAVLVVQHLAEFRFQDHQTQIYLPDSSARLCLSSELVFNDAPWLLDFDEDITGNAPSIAFNSKKYVHNFVHGNISNDVAERLGVRSLRRLLLAESSDSMNLSLSGVAEAFGQHEDLTTRLKHIVEMYADGPGILFELVQNAEDAKASEVVFLLDKTHYGTSSILSPEMAEWQGPALYCFNDSIFSPQDLYAISRIGQDSKLEKPFAIGRFGLGFNCVYHFTDIPGFVSGENIVMFDPHASYLPGISPSHPGLRIKFVGRRILEQFPDQFTPFLHFGCNLQQPFPGTLFRFPLRNEAAASRSQIKREQYTPQDVEMLFSSFSEVVSEALLFLRNVKNITLYVKESDSQEMKLVHRVSKHNSYEMAKEPHALNTMLAFINGNQPSGMDRNQFFNKLNKTKDSDLPWSSQKVSIFEQSPAACLVHSWILTESIGGGHARKLSTASGSKSHFFVPWASVAAYLHSVTVDNTKELSGEAEVNLDDLVLKQLSLGSSKDRKFFEGRAFCFLPLPINTSMPVHVNAYFELSSNRRDIWIGNDMAGGGRVRSEWNLALLEDVAAPAYGHLLAAIAQELGPSDLFLSFWPTAVGVEPWSSMVRKLYVSIAELGLHVLYTKARGGHWVSTRQAIFPDFSFSKAIELAEVLSEAGLPVVSVSKQIVDSFLNVYPSVHLLNPHLLRNLLIRRKRGFRNREEAILVLEYCLSDMGDPSFPDKLQGLALLPLANGSFTTFTNRGEGERVFFSSQMEFELLKDSIPHLVVDNSLPDAILKKLYDIACSARSNIYLFTCNFLLELLPRILPPEWQHAKQLFWSPGHQGQPSVEWMVSLWNFLRHSCEDLSIFAKWPILPLVDGKLMQLGNASNVIIDDGWSENMYSLLQKLGCFFLRSDLQIEHPQLANFVQEATAVGVLNAVQSVASNFQDIKELFMGISLAETHELRSFIFQSKWFSGNHMNSSHMNTIRNLPIFESYKSRELVSLTSPRKWLKPEGVHEDLLNESFIRTESAKEKSILVSYFAIREPQKAEFYKDHVLPRISEFLSQPAVVSAILRDVKLLAENDTSVRAALHETPFVLAASGAWVHPSRLYDPRVPELHKLLHKETFFPSEKFMTTEVIELLASFGLKSKLGFSTLLDIARSVSLQQDDALEHGKRLLTYLNFLEFKASNMEDKKTFHGDDNQEASKTDGSFEAENDGDGYDPEETILSLFSNFDHDLPEDEFWSELKNISWCPVHVAPLLKGLPWFISEDHVAPPITTRPKSQMWLVSSKMRILSADSCSMYLQRKLGWLDPPNANILSSQLVEISKSYDELKMFSEDSTNDAVPQKEIQLIYSKLQDIIDTADTNILKRNLDGHPWVYIGDRFVPPQALAFDSPVKYHPYLYAVPSELSEYKRLLSVLGVKQTFDAADYLNVLQCLQSDAKGEPLSTEQLSFVHRVLEAFVDCYPDNQAPDMMVNSLLIPDSFGVLTPARNLVYNDAPWMNADPTSKSFVHLSIGNDLANRLGVRSLRGSSLLDNELMTDLPCMEYAKISELLALYGESDFLLFDLIELADHCNAKKVHLIYDKRDHPKQSLLQQSLGDFQGSSLTVVFEGTIMSREEVCSLQLPPPWKLKGNILNYGLGLLSSYFVCDTLSILSGGYFYIFDPLGLTGGTTSTATSSARFFSLIGNDLVERFHDQFTPMRVTQEASLSSANSTVIRMPLSSKCLKELEAGCNRVKHIFDRFTQNPSSTLLFLRSIIQVSLSTWEGGASQPTLNYSVLVDPSVATLRNPFSEKKWRKFQLSRIFASTSAAIKMQAIDVHVIDNGCNYIDKWFVALCLGSGQTRNMALDRRYLAYNLTPVAGVAAHIARNGVSTNIHASSCILSPLPLSGSISMPVTTLGHFIVRHNGGRYIFGSSHDKSLSDLEMHKNKLVEAWNKELMLCVRDSYVEMVLEFQKLRKDPLSSAIESRSAHSVSTILQAYGDRVYSFWPRSKQHPASLTGYGSTVTNVNSPRASKADWQSLVEQVIRPFYVRLADLPVWQLYGGNLVKVDEGMFLSHSGSGDDDNLPSASVCSFIKEHYPVFSVPWELVREIQAVGVNVREIRPKMVRDLLKASSSILLRSIETYMDVLEYCFSDMDPYRFSDLHIHEESRVSNQQSEIMNSSISNSMPSSSSSVSYHRNTQRQGASGGDALEIVTYFGKALYDFGRGVVEDISKTGGSASHRTQAAENNVLSSIITELKGVPFPTSTKCLTRLGSTELWIASEEQQLLMRPFLHHFIHHQCLQKPFLELLLTTQVIHRPLKLRSFSPHLLSGHLKHIFDERWVHLAVEKKSPWIPWDNNANSSTAGPSPEWIRLFWKIFSSMSGDLSLLSDWPLIPAYLDRPVLCRVKECHLIFVPPADDSNPDSGDSAARVVDTSAHPGDETGEAEQNSILDTAFQSMNSAFPWLPALLYKLNIPVFDLSFPECGTICNLFPSRDRTLGQIIASKLVAIKNGGHLPLPLSLSSEDCDKLFALFVSEFRLSSNHLYQREELDVLRELPMYKTVTGTYTSLSGSDHCILSPTAFFHPADSRCLSSTANADLFLQALGVEQLSDQEILVRFALPGFGNKSAQEQEDILAYLYSNWKDLQLNSSVVNTLKETNFLTSANEFCTELFKPRELLDPSDALLTSVFSGERHKFPAERFLSDGWLVILRKAGLRTSTEADMIVQCATKIESMGNDIVSSSEDPSDFEADFSGSKNEIPFELWSLAESVVNVILANFATLYDSSFCEKIGKIAFIPAEKGFPSIGGKRGGRRVLASYSESILSKDWPLAWSSAPILTNQAIIPPEYSWGAFRLRSPPAFTTVLKHLQSVGRGNGEDTLAHWPTSSGIMTVEDAFLRILQYLDKIWGTISSSEKNELQTLAFIPVANGTRLVTVKSLFARLTINMSPFAFELPSLYLPFVTILREIGMQETLTNTYARELLLDIQKACGYQRLNPNELRAVMEILDFMCSGVNQATDGSEDIFDSVIPDDGCRLVSAVSCVYIDPYGSHLLSNIDTSRIRFAHPDLPQNICNTLGIKKLSDVIVEELDGKEELKMVNSICSVTLDKIKEKLLSKSLQDALRIVMIGVSNHFPSFEALNLAQIESVLKDISQNLQFVQRLHTRFLLLPMLQDVTRSSQRPPFPEWSSNGKHRSVCFVNKSTGQILVAEPPNFLTIHDAIAIVVSYRLGAPVILPIASVFACPDGTEKEVLKILRLGTDIGVSKREGRYNGSLGAELLSQDARQVQFLPLRPFYSGEIVAWKTGKEGEKLRYGRVPEDVRPSAGQALYRFPVETSAGETCMLLSSQVYSFKSVSMADLSPAPLQLDSGRAAGGQQGFSPINTGTEAADDVATGLEYGKVSSTELVQAVHDMLSAAGVRMDATKETLLQTTLSLQDQLKESQVALLVEQEKAEAAVREADVAKSAWSCRVCLNAEVNMTIIPCGHVLCNRCSSSVSRCPFCRTQVSRMMKIFRP

SEQ ID NO: 201117 - protein, 125 aa, Oryza sativa
  unsure (1)..(125): unsure at all Xaa locations
  Clone ID: PAT_MRT4530_96522C.1.pep
MGGRVGSSSQSKKLSCSCSWMAYMATTGSRLLKTSFGGARLPGAGRNPTVSVAPCTGSTICNSISXSDTVPNYDLNAMRVRPIKECIVSCEMTRLYMTRMITYADTDVLVVXGAGSAGLFCAYEL

SEQ ID NO: 201118 - protein, 46 aa, Oryza sativa
  Clone ID: PAT_MRT4530_96523C.1.pep
VIRMCQMAILDNGICISWGTLILSYTRDCSKVDRRERFLYWFKPLK

SEQ ID NO: 201119 - protein, 60 aa, Oryza sativa; identical to SEQ ID NO: 173878
  unsure (1)..(60): unsure at all Xaa locations
  Clone ID: PAT_MRT4530_96524C.1.pep

SEQ ID NO: 201120 - protein, 50 aa, Oryza sativa
  Clone ID: PAT_MRT4530_96525C.1.pep
LDPPIQNFFSKRQQHPSQGGTIYKITRQRTSHHHRSDLPQRPDPFPVIIK

SEQ ID NO: 201121 - protein, 972 aa, Oryza sativa
  Clone ID: PAT_MRT4530_96526C.1.pep
MARMARTPVHPRSSSIVAAFTYLLLVLFRDAITTAAASPKAPASTNGCIAAERDALLSFKAGITRDPKKRLSSWLGENCCQWSGVRCSNRTGHVIILNLSNTYLYYDDPHYYKCAHVDFPLYGYISSSLVSLRQLKRLDLSGNVLGESMPEFLGSFQSLTHLNLARMGFYGRVPHQLGNLSNLQFLDITSEIYDHPPMHTADISWLARLPSLKYLDMSYVNLSSVVDWVRPVNMLSRLEVLRLTGCWIMSSSSTGLTNLTSLETLDLSENTLFGTVIPNWVWSMKTVKMLNLASCQLSGSFPDGLGNLTLLEGLNLGGDSYHGSNSFEGTLPSTLNNTCNLRVLYLNENLIGVEIKDLMDKLPSCTWNKLEELDLSYNDITGNLDWLGSQTSLTSLYLSWNKFSGHLPLLIREMANLTTLILHNNNISGVISNQHLSGLESLERIIMSYNPLKVVLDESWSPPFGLFDVYFASCQLGPEFPVWIKSLNNCYSIDVSSSGIKDELPNWFWNLVSDVANVNISHNQIRGKLPDSFQGMSTEKLILASNQLTGRLPSLQENLYYLDISRNLLSGPLPFHFGGANLGKLILFSNHINGSIPQSLCKMHNLGALDLADNFLVGELPHCLPTELKPSTGGSFIHSTSLNIHILLLSKNQLSGEFPMLLQSCQSITILDLAWNKYSGKLPEWIGGFTKLDHLRYLDIANNSFSGTIPQSLPCLKGMINEPENLETWFLFGEALENGFGAFDVFGLFHYSISCVLQGQQLEYSKGLVYLVGLDFSSNKLSGHIPKEIGSLVELVNLNLSWNQLAGNIPDQIGELHQLTSLDLSYNQFSGEIPSSLSNLTFLSYLNLSYNNLSGRIPRGHQLDTLNADDPSLMYIGNPGLCGYPLAKNCPENGTSQGQTVKSHHDGSFCAGLSVGFVIGVWMVLASLLFKKSWRFSYFHHFDRQYDRLNVFLTVTSAIYLQKATRFKDGRS

SEQ ID NO: 201122 - protein, 78 aa, Oryza sativa
  Clone ID: PAT_MRT4530_96527C.1.pep
PPTTPVNSCFSPQGFGLFFFLGGGKLGFLGTRIPGTTRGFFFRLSRGFGGGAVQSLRGLVLKWALGSPGEPAAGVPRG

SEQ ID NO: 201123 - protein, 70 aa, Oryza sativa
  Clone ID: PAT_MRT4530_96528C.1.pep
MGGVVRWREMDDVVTAPRCHSVGTQETGVVARNRYAISMPHSATLFACTPPCETRAMNSGQSSETTQTSN

SEQ ID NO: 201124 - protein, 97 aa, Oryza sativa
  unsure (1)..(97): unsure at all Xaa locations
  Clone ID: PAT_MRT4530_96529C.1.pep
MRRGRSHQCAPVPHRHHARPPPPPSTSLAAAPVPRRRHPHPLPPPPHPHPPPPSPXSPPPPRPSPAAAVAVAVLIYRGRHWARLRVPGRRRHRHGQR

SEQ ID NO: 201125 - protein, 251 aa, Oryza sativa
  Clone ID: PAT_MRT4530_9652C.1.pep
QRPEDRSLYGRGGSTVDRVHPGSHRPAPSVPRVSRTQGRGRLMAWPHAAATRRARGRPCRHGQRETVRPCPDGRRRRPPARRSGRREREGKGERRRRSTAHPGATAATEEAAGAEGGGGAARVDGVDGIPAVGDRNGEVDEVGEDAANPKEAAPRWEAVRGDDGGGPELGGDGGERERRRELESGEEEGRREAETDGGAHPLSPNLPAVTASTSRHRPCRPPCRRPHRHPGGTCVNLPPLPAPPALATIYA

SEQ ID NO: 201126 - protein, 65 aa, Oryza sativa
  Clone ID: PAT_MRT4530_96530C.1.pep
CMTLFLTYELLSLFTHSSYPDPPTVAMLLGALSVVRVDTTYGMASCKVNRVGLAACSLASTVAHH

SEQ ID NO: 201127 - protein, 163 aa, Oryza sativa
  Clone ID: PAT_MRT4530_96531C.1.pep
MKRVDRVGFDLGKIKLDFDRDIWINGSCENSRQLMVSSSNDSQRASRGKNSCQPTGKFAAMPAISESFRVVFFSLEVYPLIAAMTFVTGLCTFQLTRNVFMNPDVRVNKNNRKSAVLENAEEGEKYHQHAFRRFLATQRPEVFPALNRFFAGPATVARSDRHD

SEQ ID NO: 201128 - protein, 79 aa, Oryza sativa
  Clone ID: PAT_MRT4530_96532C.1.pep
TVADYGPVRLHVLWLRPAAQPAPTVLHTHGAAATSLPSKPWPTGWGSRIVEDEEGSSGNPWTALLPRPVELVAPPEGSP

SEQ ID NO: 201129 - protein, 97 aa, Oryza sativa
  unsure (1)..(97): unsure at all Xaa locations
  Clone ID: PAT_MRT4530_96533C.1.pep
ISKNPSQPLPKKKARIKIPGFKSXTQKNSKGGNKTPKKKKKNQIDKKPKKKGAPNQKKKAPKKKPPLKKKRGPRPFRPWAPFINKPNIKGPPHPPPP

SEQ ID NO: 201130 - protein, 165 aa, Oryza sativa
  unsure (1)..(165): unsure at all Xaa locations
  Clone ID: PAT_MRT4530_96534C.1.pep
SCRRGRAYDAWVGDLALETNPQISVTLVEQLVALXIAVRGMQLDEEEPDQITWKFTTHGQYSASSAYKAQCIGAPGTTYDPLIWRAWAHGKCKLHAWLIIQNRVWTSDRLTNREWQNNGQCPLCRREDETALHLVAECRYSKRIWSMVANWVGYLHLDPRLWETT

SEQ ID NO: 201131 - protein, 189 aa, Oryza sativa
  unsure (1)..(189): unsure at all Xaa locations
  Clone ID: PAT_MRT4530_96535C.1.pep
GRGRLTAGLHVAATRARPRAATPARSAEGGAPAPRWSPAAAIDAAERRPREGREGGKEATVHGSPRGDGGDGGGGRSGGRRWRGSGRRGQQRSIGRRPKRRGGRGRRGCGEAEGGGAEAGDGPGERRKPAGGRRRRRRERATARARFRRGGRAARGGNGRRRCGEGLNRVGRGXSGRRGRKPAREVGHH

SEQ ID NO: 201132 - protein, 1396 aa, Oryza sativa
  Clone ID: PAT_MRT4530_96536C.1.pep
MACVLASEVATVLAIMRRNVRWAGVRYGGDDGADDEHLDHPLIAGLKSLRRRAASWDTRQWRDVEPLLYLRPFLDVVRSDETGAPITGAALSSLHKILTLDLVGPDAPNVAEAMGAVVEAVTGCRFEVTDPASEETVLARVLQVLLACVRGRAAPALANRHVCNIVSTCFRVVQQAGTKGELLQRVSRQTMQEVIRCVFARLPDVDATVVADGQTACSKNQGLSDGEIGNGKSDFVCLNSSGDEVGGGFGVVQDQAMSELFGVPCMVEILQFLCSLLNIAEDIEVNPRINPIDFDEDVPLFALGLISSAIELSASSINKHPELLAFVQDELFRNLMQFGLSMSPLILSTVCSIVFTLFYHLRQELKLQLEAFFSCVIIRLGQSRYGASYQQQEVALEALVDFCRQKEFMAEMYANMDCDLQSSNIFEDLANLLSKSAFPVKSPLSTLNVLALDGLVLVIQAIAERTDNAPQHHEQTVPEISEYFPFWQLKCENTNDPDQWVRFVHQQKSIKRKLMVGVEHFNRDKKKGFEYLQGAHLLPERLDPRSVALFFRYTPGLDKNLLGDYLGNHDEFSILVLHEFAKTFDFKEMNLDAALRLFLETFRLPGESQKIQRILEAFSERYYEQSPQMFVNRDAALVLSYSVIMLNTDQHNIRVKKKMTEEDFIKNNRRINGGNDLPREFLSELYYSICRNEIRTIPEQGAGCSEMSFSRWVDLMWKSKRTSAYIACDSFPFLDHDMFTIMAGPTVAAISVVFDNVEHEEFLTGCINGFLSVAKLAAFYHLDDVLNDLVVALCKFTTLLNTSYINDPVTTFGEDTKARMATEAVFTIATTHGDHIRSGWRNIVDCILRLHKISLLPGCLTGDTADDQESSSDMLPSKLASSRAAPQVVPISTPKKSYGLMGRFSQLLYLDAEESRFQPTEEQLAAQRNASETIKKCQIGTIFTESKFLQADSLLNLARALTQAAGRPQRITSSLDDESTSVFCLELLITVTLNNRDRIVLLWQGVFEHITHIVQSTVMPCNLVEKAVFGLLHICQRLLPYKENLVDDLLRSLQLILKLDARVADAYCENITQEVTRLVKGNATHIKSQMGWRTIISLLCITARHPDASDVGFEALVFIMSEGAHLSPANFVLSVEASRQFAESRLGSAERSIHALNLMAESVNCLTRWSREVKEAGGEADRILEGIAEMWLRLVQALRKVCTDQREEVRNHALLSLHRCLVVDGISVPSSAWLMSFDIIFQLLDELLEIAQNYSPKDFRNMEVSLLHAVKLLCKVFLQSLNDISSQSSFSKLWLEVLDMIEKLMKVKVRGRRTEKLQEVIPELLKNILLVLKANRVLSKTSTSEENSLWEATWLQVNKIAPSLQPEVFPDSEGDVATQSAKNKSDSPAQSEGVNV

SEQ ID NO: 201133 - protein, 557 aa, Oryza sativa
  Clone ID: PAT_MRT4530_96537C.1.pep
MAVGVPSGGAAGATSAFRRTLGGRPGLRVAYGLVGEERIMACAASSVKGSLNVGGAKAFSNNLFRDYLKSSVSYPVSEISSPIRAQHVAYGSNLIVRGSKSRDFSSKLASTNGSSKISEERVTVLVIGGGGREHALCYALERSPSCDAVFCAPGNSGIAQSGDATCIPDLDISNSDAVISFCRNWGVGLVVVGPEAPLVAGLANELVKAGIPTFGPSSEAAALEGSKDFMKKLCDKYHIPTAKYQSFTDPSDAKKYVEEQGAPIVVKADGLAAGKGVVVAMTLEKAFEAIDSMLVEGSFGSAGSRVIVEEYLEGEEVSFFALVDGETALPLESAQDHKRVGDGDVGPNTGGMGAYSPAPIVTEKLKCKVMESIIVPTVKGMATEGCKFVGVLYAGIMIEKKSGLPKLIEYNVRFGDPECQVLMMRLQSDLAQVLLAACRGELGSVSLTWSPELATVVVMASEGYPGVYKKGTVIKNIDEAEQVSPAVKIFHAGTALDRDGNFVAAGGRVLGVTAKGKDIEEARAKAYDALDVVDWPEGFFRHDIGWRAQKYRRMVAH

SEQ ID NO: 201134 - protein, 43 aa, Oryza sativa
  unsure (1)..(43): unsure at all Xaa locations
  Clone ID: PAT_MRT4530_96538C.1.pep
MKIIFFFALLAIAACSASAQXFDALTQVYRQYQLQPQLMLTDA

SEQ ID NO: 201135 - protein, 62 aa, Oryza sativa
  Clone ID: PAT_MRT4530_96539C.1.pep
YGAQKSSYTSVHSHHHNSLVDIVCSSVQQGTHTCHERLLDFKFCYSPPPQYPHCKPYISSPQ

SEQ ID NO: 201136 - protein, 229 aa, Oryza sativa
  Clone ID: PAT_MRT4530_9653C.1.pep
MSRLFTSWGFVYSRVNQPGERSARTGSTGVGPTRQPLGPRWTGCTRLTPAGAVGPTRQPHPRARAADGRAPHGSRGARPKAASPAQPTGGDAPAPLWSPAAAIGTAERRPREGREGGNEMGGPRLTPGRRRRRERRPERKKAAARHGSTGTAAFRRSAGETEGWTRSARTRRSRRRRRRGGRRSEATTAADRSSAVTAERESDGASLIPAERESGEWRKRWREARGAFI

SEQ ID NO: 201137 - protein, 456 aa, Oryza sativa
  Clone ID: PAT_MRT4530_96540C.1.pep
MSATEVMEECTETARERREEERLRNVNLDDWLPITSSRTAKWYYSAFHNVTAMVGAGVLGLPFAMSQLGWPTGVAAIASSFAITLYTLWQLVELHEPAPGGGKRFDRYHELGQAAFGRRLGVCLIVPLQLIVQVGTDIVYMVTGGQTLKKFVELACDGRCADIRLTFYIMMFASAQFVLSQCPNFNSISAVSAAAAAMSLCYSMIAFFASVLKAHPAAAAAVDYGFKATTAAGRVFGAFNALGAVSFAFAGHNVVLEIQATIPSTPERPSKRPMWRGVVVAYAVVALCYFTVAFGGYHAFGNAVAPNVLISLEKPRWLVAAANLMVVVHVIGAYQVYAMPVFDMIETVLAKKLHLRPGLPLRVTARSAYVALTMFIGITFPFFDGLLGFFGGFGFAPTTYFIPCIIWLIMRKPAKYSLSWLMNWCFIIIGMLLMLVSPIGGLRQIILDASKYKFYS

SEQ ID NO: 201138 - protein, 200 aa, Oryza sativa
  unsure (1)..(200): unsure at all Xaa locations
  Clone ID: PAT_MRT4530_96541C.1.pep
GRGPRPRRRRRRPRPAAASAPAPPPRAPRASAPGTPPPRGTRRARRTPRRTPHPPPCLPLPRRRSPPPPPPSRRPRTAPRRRWRLPSPSGARSPTPPRATRTPAISPPPRWARALPXPTPTSRRSCPTPAAPSSRRHPPPPPXRPPEPPELKPPPPRRPGHGAHLPVAGEDLPHGHGGMIPPACVTAHNPGLLQPRGSTS

SEQ ID NO: 201139 - protein, 373 aa, Oryza sativa
  Clone ID: PAT_MRT4530_96542C.1.pep
MASAAAAAAAEWEEAERKVLVARKAAFGLPTACPTCLPVLLYLRMCNVPFDIHVDSSFPDAAAHRLLLPLRLAFSSLKFSFLSSLSSLAADAGEAAAWTARRRRWERREWTMRRRRADGFYTSAAQEVVAAMEVVVATTAAVDLILFGVHLFEPGQLAGDRLAGVYGRQEIVGELFNRTLFLAEAGEDGGEAGPNSRRRTGRAAGGGFRVTGGEIDDIVVGLPKPIELDIINVNGEEMRELSVTLSIRQVQLRSLEEEEEAAAGGRSGARVAEQEGEAFSWVIVGGAHSLEEEVAPVVSESERGMEEEEAAVDPVVSEAERGVEEEEVAPVVGEARRGAAWRRTPAVVLRGRGGLIREGSEAVRGTAQLSFGL

SEQ ID NO: 201140 - protein, 342 aa, Oryza sativa
  Clone ID: PAT_MRT4530_96543C.1.pep
MSSISPPVTLNPPPAALPLTDVVAGISEKQRPVEELTNDLLAAIDAGEPVSGQLARLEEMNAEEDSVHFNLVSNAKPREIEGTQRGEDPGRARCGRRSLALACPSAETVARNPRFALPKPIPAAPISLSRHRFLRSRAENPQNQQAKPRTQIAAATLQEESHKITKEKSRHKIIQEKSRTPSPRTPRRSAPSSRLPSVPAAPAVGLRGSVPGGRSGRSKGVGEGEGRGGRQIHRRRCRHNDLHGGDDLLRRGGVEAVRPSAPHRPLPPLPPSASRRPLQPPPSLPSPSGRRSERRMRRGRRRGDAHGGGFPGVRREGGEGGEEGELEGGEGEAKGEEKAMRR

SEQ ID NO: 201141 - protein, 276 aa, Oryza sativa
  Clone ID: PAT_MRT4530_96544C.1.pep
LAQQLYAPVQKDQNENSVESDEQIWPGCENVLAHFEALMTAKSAEVESPKDKMLIDETDEFGNEVPLGKIVKILKSQGAKKAGRKQKTKSGSINMEKDDDVLGLVREINLDNQENLGESEKSKPKKKRMDAKESNDKPVDFSTPKRKRSVSKSRPHSTKGNKNSDELLLQSVDPDETINSFENKVEGAKKRDDSVDTELVTSPASVKTPVSKGKKGAKKPHPEILSSSPKKSDEAGSSKRTVDSGSLNGSIKRQKPKLVSGLAKCTTHDTGSEDLI

SEQ ID NO: 201142 - protein, 94 aa, Oryza sativa
  unsure (1)..(94): unsure at all Xaa locations
  Clone ID: PAT_MRT4530_96545C.1.pep
LFFPNKEKEGKLSFNILYFNNNALSKKQINHGDGQKVQDALIYLLTLYEFLLCAIKIIVNKQAFQKFSNGILVAVLLLLNDFNHPLSAYXPDAG

SEQ ID NO: 201143 - protein, 71 aa, Oryza sativa
  unsure (1)..(71): unsure at all Xaa locations
  Clone ID: PAT_MRT4530_96546C.1.pep
RLVSTAPASSPSKPRTCTPYQKCTGTPGRPRERTPRRSPGRPPRTPTRRGTRRRRRRTPSSXPPAPTASTR

SEQ ID NO: 201144 - protein, 65 aa, Oryza sativa
  Clone ID: PAT_MRT4530_96547C.1.pep
MLRQVGVQPPRMSAIRHPADVCVCGSEFHVARPRSVKPAVACIGLLKHVNSLLGGFYRLMSVVVA

SEQ ID NO: 201145 - protein, 504 aa, Oryza sativa
  Clone ID: PAT_MRT4530_96548C.1.pep
MRITNGLAMVSLVLSSCDLLRLCSDRERPLGGREFATVVYLVSLFAHPDAPATTTGDDDDGQGGSRRARPAAAEPAPMHGHGGGMMEADDEEIVAAVASGALPSHRLESRLGDCRRAARLRREALRRVTGRGVEGLPFDGMDYQAILGQCCEMPVGYVQLPVGVAGPLLLDGREYHVPMATTEGCLVASVNRGCRAISASGGAFSVLLRDAMSRAPAVKLPSAMRAAELKAFAEAPANFELLAAVFNRSSGSRGPHVFRCALAGRNLYMRFSCITGDAMGMNMVSKGVENVLGYLQNVFPDMDVISVSGNYCSDKKPTAVNWIEGRGKSVVCEAIIKGDVVQKVLKTTVEKLVELNIIKNLAGSAVAGALGGFNAHASNIVTALFIATGQDPAQNVESSQCITMLEEVNDGDDLHISVTMPSIEVGTIGGGTCLASQAACLNLLGVKGSNHGSPGANAKRLATIVAGSVLAGELSLLAALASGHLVKSHMMYNRSSKDVAKAAS

SEQ ID NO: 201146 - protein, 80 aa, Oryza sativa
  Clone ID: PAT_MRT4530_96549C.1.pep
FDKHKATQPNGGIFNTTWGPQTQKTHEESEYKSPKTTIRQRYMKNEKCNRHGTTKLNYPTQALNNTPTLETPRIGLLIPL

SEQ ID NO: 201147 - protein, 119 aa, Oryza sativa
  Clone ID: PAT_MRT4530_9654C.1.pep
MMSEASMLSSPAATYSGLWLSSPSSVAEKARKERNSFGKEDVADVAVAPNTDADLREPDVVKLRGSTLPKTTKLRGEQHATDSNPVGLGFSTSKLTTIEIVPRVENGISLTTYTDHIYG

SEQ ID NO: 201148 - protein, 51 aa, Oryza sativa
  unsure (1)..(51): unsure at all Xaa locations
  Clone ID: PAT_MRT4530_96550C.1.pep
FFFFFFFFFFFFSXKKSNXLPQKVKQRXVYNPXSXIPXXQLKXVTSLXXEQ

SEQ ID NO: 201149 - protein, 751 aa, Oryza sativa
  unsure (1)..(751): unsure at all Xaa locations
  Clone ID: PAT_MRT4530_96551C.1.pep
MGTARGRVALEGGGRRRRKLDEEDDEEYVADDDEEKDEDEDEEEYQQAAAPSDDGEEGGDDEGEQEDESGADFVGDEEEEEEDLEDAYDLEEVKAPRPKRPPKGKPPPRSRRRRQKDDDDDYEEEEEEDADFDPDVDEDDEEEKDSTKNHVAKRQRPPARKKNKRNPARVFKTKHKKHSSGRRRRERWDTDDDEEQEEDADHILKDDQEVEPDARHPKKKAXAARKTRDVTPEPDVEASAWPAVESDTSEFEFVTSDEEAADKEAPAAEPAKTKGKKGRKRWGSGSESSSDSDYVISEQELKDLEVSMPPDAALQSPATLPRRTFLSRRVGEKGKEPEEAWKQTCGICLSEEQRATIQGVLNCCAHYFCFACIMEWSKVESRCPLCKRRFTTITKSSMADLGLGSRKAVIRVEKRDQVYQPTEEEMRRWLDPYENVVCIECNRGGDDNLMLLCDICDSSAHTYCVGLGRQVPEGNWYCGGCRSGGEGPSAQDTVVHCRESNTNPANSSSGSFGSATPSGVFQRPPPINTQPSLQGFDLNLSPRETPDEDKREESHVSADAVSTPTGRHATLDRRRAFNRRIRILLFRPRVTPNGWQNPIQSDRTIPENEQNPQSTSTPTEVNPSCSRDSSMQNQQSSSSFVQPARGLIERTYGGGSNFQQTEGAKEQLIPIVKRNLKLMCAQSPLGQSDFKNVARRATHTILALSGIAHNEDFVVTILDEREMEMNIVQSNVMLRNGCSTEYRPCLSCLRS

SEQ ID NO: 201150 - protein, 111 aa, Oryza sativa
  Clone ID: PAT_MRT4530_96552C.1.pep
MEQFQNMHLVRPQMQPLWVPQDQQNLQEDIRTQIEFYFSTNNLCHDTFLRRQMDDQGWVHIDVITKFNRMRRFTNLVDTNYILDAVRGSELVEVQGNTVRRRNNWAEWLLL

SEQ ID NO: 201151 - protein, 102 aa, Oryza sativa
  Clone ID: PAT_MRT4530_96553C.1.pep
PNPTPTQGQINSTPPPNSHQTPSDPRPRRPGGETGSCSRGSRVEHRRIRRGFGRPGARNARREPADSGGGEGRGARRRQREERRGGRGDRGEGGGGGGGEWK

SEQ ID NO: 201152 - protein, 70 aa, Oryza sativa
  Clone ID: PAT_MRT4530_96554C.1.pep
RRKPGEKEWEFRSISRLYGGGGGQQRSIVRDAPAAYLNTEVRQRERSQEGGRAGIRGMGAGNSRTATIRI

SEQ ID NO: 201153 - protein, 47 aa, Oryza sativa
  Clone ID: PAT_MRT4530_96555C.1.pep
MVIYTCFESIYKQRIQNKWRFDYFFCPLILFKSRKFFAFYLCIHFYL

SEQ ID NO: 201154 - protein, 76 aa, Oryza sativa
  Clone ID: PAT_MRT4530_96556C.1.pep
MAVLLLVIVPVLMPLGWHAENIGHSDTTKELTGILCACQDFRQRDASAKYIMVIPLRPGCSTDLKTQCVHDRCDHI

SEQ ID NO: 201155 - protein, 85 aa, Oryza sativa
  Clone ID: PAT_MRT4530_96557C.1.pep
TYDDSIPQSEPMHFLICQLTMDDDFRISQVDVDLRFGLTAKLGQIHVMNVIAVQTHRHQEPKLATRSKYLFLDLDWPSTANYFKL

SEQ ID NO: 201156 - protein, 2192 aa, Oryza sativa
  Clone ID: PAT_MRT4530_96558C.1.pep
MKHLNDVRVGSKVARMYLVQANCVGGYKGRYFYECVECDLGGNLLCCDSCPRTYHLECLNPPLKRAPPGNWQCPRCRTKKVSLKLLDNADADTSKRERTRRMRTSTTSDSPSPSPQNKASFNTSRGAAFRDDEPGAKDNEVEKRKPLILHLKKRSTKELSTDTTSSKSGLLGKSSEEKQEKHGSALKVKKHLHPMELSPKKYKNKKQHNHRDSKRSEAKKVQYLASDVDSDSSMEPSTSLEHSESPPPKRKSLDGRTPASSTKKGKKKVKFVDKKHPENAVHITEKEHGGAGDKITTQGDLQVDRILGCRLQTSQIISPAHASSEQIDMAPPSASGAPEPSQALLKGLHEEIQSSNSDTNVTEDACADELANDGGENNLDCSDAQKESNVRSHGHKESLNAKEIMNTASACSADQIVTVKDAGAVQTYVTASVNGEYETVTDIPEEKNDTKHPVSKADTEVHTKQEHTPDSKLHGKIQETELKEHDGTTYEFLVKWVGKSNIHNSWISESELKALAKRKLENYKAKYGTDEIEEALIKWCALPYDECTWERLDEPTMVKYAHLVTQFKKFESQALDKDKGGSHAKPREHQEFNMLVEQPKELQGGMLFPHQLEALNWLRKCWYKSKNVILADEMGLGKTVSACAFLSSLCCEYKINLPCLVLVPLSTMPNWMAEFASWAPHLNVVEYHGSARARSIIRQYEWHEGDASQMGKIKKSHKFNVLLTTYEMVLVDAAYLRSVSWEVLIVDEGHRLKNSSSKLFSLLNTLSFQHRVLLTGTPLQNNIGEMYNLLNFLQPASFPSLASFEEKFNDLTTTEKVEELKNLVAPHMLRRLKKDAMQNIPPKTERMVPVELTSIQAEYYRAMLTKNYQVLRNIGKGGAHQSLLNIVMQLRKVCNHPYLIPGTEPESGSPEFLHEMRIKASAKLTLLHSMLKILHKDGHRVLIFSQMTKLLDILEDYLTWEFGPKTFERVDGSVSVAERQAAIARFNQDKSRFVFLLSTRSCGLGINLATADTVIIYDSDFNPHADIQAMNRAHRIGQSNRLLVYRLVVRASVEERILHLAKKKLMLDQLFVNKSESQKEVEDIIRWGTEELFRNSDVAVKDNNEASGAKNDVAEVEFKHKRKTGGLGDVYEDRCADGSAKFIWDENAITKLLDRSNVPSTVAESTDGDLDNDMLGTVKSIDWNDELNDDPGATEDIPNIDNDGCEQASEAKQDAANRVEENEWDKLLRVRWEQYQTEEEASLGRGKRLRKAVSYRETFATIPNEALSEDSDEEDEPKREYTAAGLALKEKYEKLRARQKERIAQRHVIKNYADDRLEEFMKLYDSSANPLRIVEDPNPVQPSGAKRLGESTAEMKQSSKKTKRYPEIPQELYAKLTGNAASSKHHPKAADISNSGTPHHLLPVLGLCAPNADQMNSYKGSVCGPSTKEQKRASGELANKPLLTPAVDHSSEQKHDGQPTPCKPMFPGSSEETLRRLNNIIPDSYFPFQPIPPISGKGIGDHVENPVSSIPSFQGKLGLPNFSLEDSIPLKHLKSVPDLFPNLSLGTSNEYLRNCVPELPNSSFLPSFMADIAGTSKQKNKFMADMSGLLPGLAINPVQQIHSSMPENHKKVLDKLMMRAQYSSSKFLKNASNKFLKKSLKPDYWSEDELDALWIGVRRHGRGNWEAMLRDPKLKFLSHRSHEELASRWILEEQKIIEEPMPTATRSSNSTSFPGISDAMMSRALNGSSFSKLRMEPPKLQSHLTDIQLGCNDIPTRFSHVEPTNYMNLSEGGPSLTPWQDFKNRSGHSGDFPGPLDKWEKPDMGLIPPFMPNPFMKESIGSLPINRHSSNSIQQNEVGSSSHESILHGFSDGQAKLFHEMQRRVKLGKLPIEMNLNHTKLSDPLAENSGDFESSKPNKLPHWLQEAVRAPPSKPPECELPATVSAIAQSVCLLLGEQKPAIPPFPIPGPRLSLPKDPRSAPKKRRVHKVQQASSLVDHSKTTVGQGDHNSTPSAPLSMEAAPASPAVIKSSDTPSLNLNSPSSSSAGSRGQDASTPSTFEEPERTMEVSEPASVAAATCPSRPEPPETGTHRIEFSAVDDMDTGSCRSPVRDTPDPDNQKSELSGSGNTPTELSVLPLVDAPGTSSEPAVVPVSSDEESTQEGVPGKAVSTGDQEKRTPPDESENSGAANPVSAAQTADEDKVDEMITDEH

SEQ ID NO: 201157 - protein, 89 aa, Oryza sativa
  Clone ID: PAT_MRT4530_96559C.1.pep
IFVSVAPDWMKSEHIDAVFMSTDSRKTFGVRLHSQMEGFYSCRKWFLSSKPLFFSLNFLKYFFNYNKCTNSMQICSISKHSITIGVFRY

SEQ ID NO: 201158 - protein, 349 aa, Oryza sativa
  unsure (1)..(349): unsure at all Xaa locations
  Clone ID: PAT_MRT4530_9655C.1.pep
SRVNKPRGRGARTGSTGVGPTRQPHSPRWTRCTRAHTGRRRGPHTSAAPEGGHAGAVGGRRRACAPMIAAGDHRRGGAAAERGEGXGERRRRSTAHPGATAATEEAAGAEGGGGAAQVDGDSGAPAVGNRNREVDEVGEDAVKPKEAAPRWEAVRGDDGGEPELGGDGGERXRWRELDSGEEKARQRVETGEGSAGRVXIGLEGGESGRRGRKPAREVRPPSMAPARFAXGQIRPFEREREREKWGERERGSRGVIPPTLLHAGTAGGGRICSGGGARARGRRRERREEGDDGWAPPVSEGGGRARPSAARARGEAEWAAGRGEREWGEERCAGPAQGKEGGLLGFFFL

SEQ ID NO: 201159 - protein, 29 aa, Oryza sativa
  Clone ID: PAT_MRT4530_96560C.1.pep
KEEHCGFLLIHHLLIGFLTKESPSFLPPP

SEQ ID NO: 201160 - protein, 398 aa, Oryza sativa
  unsure (1)..(398): unsure at all Xaa locations
  Clone ID: PAT_MRT4530_96561C.1.pep
MGRGGIGGAGLVAAVAKADVENTDSTRGFVKDVKRIIIKVGTAVVTGPNGRLAMGRLGALCEQVKQLNFEGYEVILVTSGAVGVGRQRLKYRKLVNSSFADLQNPQMDMDGKACAAVGQSVLMAICDTLFSQLDVTSSQLLVTDRRPMDPSFGNQLRETVNSLLDLKVIPVFNENDAISTRRQPYEDSSGIFWDNDSLARLLAQELKADLLIMLSDVEGLYSGPPSDPQSKIIHTYVHEQHGKLISFGEKSRVGRGGMQAKVAAAFTASSKGIPVVIASGFAIDSIIKVMRGEKIGTLFHREANQWGXCSKEATAREMAVAARDCSRHLQKLSSEERKKILLDIADALEANEDLITSENQAXXLDLAQDIGYDKSLVARMTIKPGKIKSLAGSIREIA

SEQ ID NO: 201161 - protein, 139 aa, Oryza sativa
  unsure (1)..(139): unsure at all Xaa locations
  Clone ID: PAT_MRT4530_96562C.1.pep
GVARGGAVREVLLTQWEGRDDQLLVYGLLPAGVDHGELMGRARFCLWPTGDDEGAAVASRRVVEAITAGCCAVDIAVSFLRRRRRTTCTPSXAPCRATGFASISSCXRRRSWWQPCAVTDKHHRTAAMAEHGQGAMAAL

SEQ ID NO: 201162 - protein, 453 aa, Oryza sativa
  Clone ID: PAT_MRT4530_96563C.1.pep
MGVAASNCGLQRRRRRCPSSDDRLEGELGRNLVGEVVAVPPAGAGDDDDGRGSPWSDLPPELAGLVFCRLLSHGDRRRFRAVCSDWRLAAREQVAVTTGPSSSSLQLPPSLPWLALDRRTYQSLPDGEVHRFADGPGIMVCRGSFDGWLLYHRNGYRDIRSSFLWNPFSGAVLDLPSRCDDAAGGEPMCFVNAIKRKIVVCSPDLVAAAVEYTSLIFHLPNKHSSWARTNPNICCHDIAFHHGKLYSINNNDALFVHEFFTTTAADRGGGSARVTASSDWAAVTDARPPREHLGNHGYHLRFTSYLVASLAGKLLLVRWSLPDELFSGEGGRLAFSLLSNLITVRVFEADMEARRWTEVTDIGDDQALFVSATCSRALRLPDNNGGGRHGFLRGNRVFIVGSDLGRRCGGGGGGIGCCCCSCGVYDMSNGRFSTVSLKRWRAGHEQRSRDTSE

SEQ ID NO: 201163 - protein, 1332 aa, Oryza sativa
  Clone ID: PAT_MRT4530_96564C.1.pep
MEMEAAAAAAAAASDETLAAIFAQLKPHTVTLLDLIRTRTPASKSAAASSLRAMASFLRSAPAPALQLCFEKEANASGELDISDAIAEGGLACLEVLLTKCRLTSVNQMVALLKKLTFGAMLSPSEASEEFRQGIIRCFRAMILQLHPCLDRSCSCKQATALSTALSFTSLEVGTIVTPKYSAQPEECLLAFLQSQNASAAVGHWLSLLLQSSELEASRGHRGSADVRKESLITLRVLIGKVGSADALAFFLPGLVSRLGKVLYTSKNMISGAAGSALSIEQAVLGLTEALIVVLNDKENLSELDISSVENVALCSGGNSSSEHVLQMLRQLPAKTLSKQIGSGEATEDVNADGSKTSADRRELHVKRTKKWLEETANNVDKLLSATFPHLSIHSSEKVRRSVVNGIRVLLSSCSYTLRKSKMLLVECLCILACDDAASVSEAAQDSLDYLFIEGERVLTEDDVSDIFTRFVEKLPQMVLGSEETTAISHARRLLALTYYAGPQFLANYLHRSPVVAARLFDCLGLCISQSSQFSGSMDKLIVSKPLSVGYLFSVAELKSGAYPKDENYGFQHAMPASTATKISVIHDNGLPNTTHSSVDYELPHVPPWFVHVNSQKLYFALAGIVRLVGLSAVSGEETSASLSLFVDILLDQFRRLSTELRSGGQRWYMKSDAGQTLRQASSAVCMLNELIYGLSDRSLSICLQIFNKNSAQMIGAPGQNDQLTAFGQNNGGTNRNIWKISEQMGTKNHIIHCIGSILHEYMAPEVWDLPTEPDSELSLTELNIPLYFFRDTAALHQVMIEGIGVFGVVLGQDFASSGFMHSSLYLLLRKLISSSVQIRIASDAVLRALAAAGGYCSVGQFVVANADYIVDSLCRQLHHLDLNPHVPDILASMLCYIGASRDILPFLEEPMRAVSSELEVLGRHDHPHLTVPFLKAVSEVAKASRHESVSLPDEVESFFMKVRSEGEAIQSLIEKRRDTCAMPERMDVDAQPDFMGLEYWEDLLCKLNEMRRYRRIVGSLVGSCVVASTPLLSSTKEAACLVALDIVENAIMSIAKVEEAYKCESRCKAVIEETIQLLSVDELHDDMDAAEDVDENRLLPAVNKLWPYLVICLGNKISVSVVRKCTEVLSKVIQISGGDFFVRRFHKDGSVIWRLLTLSPFQRKRMALMDEKAIILPYRNTSLTSEEPMAEISSQKIQIAVLDMLAEISSNKRSAIALGSVLKKVCGLVVGIAYSGLIGLREAAIRALTGIASIDSDLVWLLMADVYYSLNQRDIPLPPKQDLVELSDLLPPPMSSREYLFVLYGGEGVRCDIDPSSVREVFKSMQDTVLT

SEQ ID NO: 201164 - protein, 68 aa, Oryza sativa
  Clone ID: PAT_MRT4530_96565C.1.pep
HAPSLVKAAAAGSVAGEQRGHRHKPPADPPMHNSPSCCSHSSPPAQPPPPGFLTDTTGDGSGSLTANV

SEQ ID NO: 201165 - protein, 129 aa, Oryza sativa
  Clone ID: PAT_MRT4530_96566C.1.pep
GPILFIFGARPFGLGLRGPTDKTKKGTKPCKNHQGSRGRPTMGGGREKTTGEGGKGPPKKEGGGNPTKKRKKKKEEKRSIKSGGGGCFFPGGGREGHPPRGEGDNPTPGGGKKPDGNPNYGGKETPFRG

SEQ ID NO: 201166 - protein, 149 aa, Oryza sativa
  unsure (1)..(149): unsure at all Xaa locations
  Clone ID: PAT_MRT4530_96567C.1.pep
MAEDDDDHGNCLDRRPCLRYFLLATFIATLLSLIAYGQWNSIXAPVFNSPSASTTRPRAARSAPAGPARRCRGRLRADRGDQRRGGDTRRAVRAHGEPAAAARARVAGGGGEDGGLLRPAACDVVVHGRAAWPARGALPLPLRLYGQGW

SEQ ID NO: 201167 - protein, 490 aa, Oryza sativa
  Clone ID: PAT_MRT4530_96568C.1.pep
MAAANLLSRALLPALNPNPSSHSNRVSPSAVSLRCRHGLTASVRASLSTAAPSPPPRPAAAAADGRAPKRCFRRGADGHLYCEGVRVEDAMGAAERTPFYLYSKPQVVRNFTAYRDALEGLRSIVGYAVKANNNLRVLQLLRELGCGAVLVSGNELRLALRAGFDPTRCIFNGNGKTLEDLVLAAESGVFVNIDSEFDLENIVTAARVAGKKVPVLLRINPDVDPQVHPYVATGNKTSKFGIRNEKLQWFLDSIKSYSNDITLVGVHCHLGSTITKVDIFRDAAGLMVNYVDEIRAQGFELEYLNIGGGLGIDYHHTDAVLPTPMDLINTVRELVLSRDLTLIIEPGRSLIANTCCFVNRVTGVKSNGTKNFIVVDGSMAELIRPSLYGAYQHIELVSPSPDAEVATFDIVGPVCESADFLGKDRELPTPDKGAGLVVHDAGAYCMSMASTYNLKLRPPEYWVEDDGSIAKIRRGESFDDYMKFFDNLSA

SEQ ID NO: 201168 - protein, 52 aa, Oryza sativa
  unsure (1)..(52): unsure at all Xaa locations
  Clone ID: PAT_MRT4530_96569C.1.pep
XXXFFAXXXXFXKXXXXXXXXLAKEXLXIXXXKGPSXXXSXSHXSSXPXLXX

SEQ ID NO: 201169 - protein, 215 aa, Oryza sativa
  unsure (1)..(215): unsure at all Xaa locations
  Clone ID: PAT_MRT4530_9656C.1.pep
MWGPHVRPFFNLRPPPRPSPSRRLPPPIPPKSEPDSSGFLSLSSSVCPLSRALPCLLAPPRRVPSPPPPPPVFGVVAAPSPPSPSLAVIAKRCAVGEQAAGAPEGGLAGTADGRRRTRAPMVAAGDQRRGGAAPEREEGRGKAXRRSMAHPGTTRAAEMATGAEDDGGAXARVDEDGGVPAVGERSGGADGVGEDAAKPKGVTPKREEVRSDDGD

SEQ ID NO: 201170 - protein, 101 aa, Oryza sativa
  Clone ID: PAT_MRT4530_96570C.1.pep
IGLAAAKHETAARPQPSRGNVSLPSPTLGEHEGPKLGGGGEESESARRPDPARRGVGDNADRWGVGAEDHRHCSSSSLRRRVRGRREEESREWNSMGGGSS

SEQ ID NO: 201171 - protein, 1045 aa, Oryza sativa
  Clone ID: PAT_MRT4530_96571C.1.pep
MHCLAPHFLLFLPLSSASRHALPHTPPAPLLLPSHPAQAQAQARAGPLRLPSARSPSRAAAPVSDDDEDEEDDEEIDIRDDADVDEEYDDDDDEELDEESGGEEEEEEEGDDGVEELEEEEGGREGTAARRRRSEEYKSQRVGKLVAEVREFGEDIIDYNELAGIYDFPIDKFQRLAIQAFLRGSSVVVSAPTSSGKTLIAEAAAVATVARGRRLFYTTPLKALSNQKFRDFRNTFGDHNVGLLTGDSAINKDAQILIMTTEILRNMLYQSVGMAASEGRLFQVDVIVLDEVHYLSDISRGTVWEETVIYCPKEVQLICLSATVANPDELAGWIGQVPLIRDTLSQLWENDMLPAIWFIFSRRGCDAAVEYLEDCRLLHDCEASEVELELKRFRMQYPDAIRESAVKGLLRGVAAHHAGCLPLWKSFIEELFQRGLVKVVFATETLAAGINMPARTSVISSLSKRIDAGRQLLTPNELFQMAGRAGRRGIDTVGHSVLVQTTYEGPEECCDVIFAGLEPLVSQFTASYGMVLNLLAGSKVTHNQKESDDIKVKRSGRTLEEARKLVEQSFGNYVGSNVMVAAKEELERIQSEIQYLSSEITDESIDRKCREELSEEDYAEISLLQKKLKYKDKDSVQHTIPAVFIGSLSSFADQKIVSLILLQVENDSPVAGKQKVDNEGQQYYPSYYVALSSDNSWYLFTEKWIKAVYKTGLPAVPSAEGGPLPRETLKQLLLREDMMWDKIAKSEYGSLLCMDGSLDTWSWSLNVPVLNSLSEDDEVERFSQEHQDAVECHKQQRKKVSQLKKTIRSTKGFKEFQKIIDMRNFTKEKIERLEARSRRLTRRIRQIEPTGWKEFLQISKVIQEARALDINTQVIYPLGETAAAIRGENELWLAMVLRNKVLLDLKPSQLAAICGSLVSEGIKLRPWKNSSYVYEPSSVVTGVINYLEEQRNSLVDLQEKHSVKIPCEIDAQFAGMVEAWASGLTWREIMMDSAMDDGDLARLLRRTIDLLAQIPKLPDIDPVLQKNAQIACNIMDRVPISELAG

SEQ ID NO: 201172 - protein, 335 aa, Oryza sativa
  Clone ID: PAT_MRT4530_96572C.1.pep
MGPRRRRAPATVLEINVVTPSYPPGHYDGYTMPDLIITSRAWRRLTRLHLSHAWLDGGFGEQLGDGCPLLEDLALRRCAMAPGFRRIRCGSLRTLVLHYTGCGGGDAGGGDEEEEEETLVISAPRLASVRVKITSYACRHGVSFDGSTADSLVEASIRVGRRRRRRALPTGVEAVLLAGMVNVTTLSSKVYRQRDGTVSLYGVNSLVEASIDVSNCQMSPSGEAMLLGALFSATNLELKGTRAMAILDEELDKFPLFNNLRNLSLHCCLRDKGNLSDRFKALGRLLQKSLNLEKLTLQDFWASWCRNTSSVLGKIQVLVLLLFIPILLHVASDLN

SEQ ID NO: 201173 - protein, 261 aa, Oryza sativa
  unsure (1)..(261): unsure at all Xaa locations
  Clone ID: PAT_MRT4530_96573C.1.pep
MCFHEHERWTGRAAASPLRERLPRARGILGLVGWFGLHVSETDRPGGGVGKGAKYGRRRWRRSVPTSGFSKEERGELSASSDRVVSSSGAAHVILGWLGREERRVGRLESVVAMEHGEAEVGFAAALGSSSHGVXGEGGRVALLCLDGGATHQLARGGQGSIYREGEDFRGHTQAARMGGLCRRCRRRAEEARSHWRPLQPCEARVVVVVVTPKSRGAHRWPLQPREARAVCVVVAPRSAVAGYSSHTAAAGSAAAAAAAR

SEQ ID NO: 201174 - protein, 77 aa, Oryza sativa
  unsure (1)..(77): unsure at all Xaa locations
  Clone ID: PAT_MRT4530_96574C.1.pep
MATPPLMGIFIITAGLPPSPPNGXWSHSRRWSSLYSPPAFLRRRPRCLHFHDAMAAQLCCHCWASSSSMLTALSYAD

SEQ ID NO: 201175 - protein, 286 aa, Oryza sativa
  unsure (1)..(286): unsure at all Xaa locations
  Clone ID: PAT_MRT4530_96575C.1.pep
WADDTILLTKATEENILALKFLLFCFEEMSGMKINNHKSEVYVIGXVKKMEERFADMLNCKVGAXRLTTLLWIRMGVEKIGRRELLLVMQKVEKRHMCXGNLYYGCREIIINSCLSSITLYTMGFYKLCEEFYKKMDEVRGRFYWQGVGKKRKYQMINWQALCRPMEYGGVVFLNTKDMNTCLLSKWVMKIKGNXDDMSVVLFRKKEVTNEVSWDISSTRKLDLLDKXSFGEIMALLSGLTLSEEPDKTFWPHTKNGIFTTKSMHNLIKQWGCVDLWSMEIWGFKI

SEQ ID NO: 201176 - protein, 66 aa, Oryza sativa
  Clone ID: PAT_MRT4530_96576C.1.pep
MARSLGCEETSRRRTRRSTLKTKTPNSDNRVVQPWRRESEDTLDDGEGKLVVNTMMTIDDCVTIKP

SEQ ID NO: 201177 - protein, 548 aa, Oryza sativa
  unsure (1)..(548): unsure at all Xaa locations
  Clone ID: PAT_MRT4530_96577C.1.pep
GHTTVVGRLHLYRPAAFVTADWCFRLYGWMVTPPLLGVYIFTDRLPSPPPTGVSAYTIRWPHHRXWASSSSPPACLRRRRLVFSPIWLDGHTTVVGHLHLHRPAAFAAADWCFRLYGWLVYTXLMGIFIITTSLPPSPPTSVFAYTVGWSHHRCWASTSSPIGCLRRRRRVFLPIWLVGHTTVDGHLHHHCRLASVAADWCFHLYGWFVTPPLMGIFNITIGLPXAANWCLCLHGWLVIPPLLGVIVFTSGHXLPPTDYLATMAAQLRRHCWTPLSSXNTYLLMPTSFFASMVARLHHHLLELSSSPPNVFVFTAGXAFVAADWCFPLHGLMVTQSSMVIIVFTTSFPSPSSKVSSLSRLASRKFXFHHHSTSSIADCDYIFIVFCTGKLYCLYFARFATSPTTTSTRASTSRHASRNMMPCYFTTTSGASTIFKNSTQTSSTRIFNXAMTTRQQEASVLESGXYTNTRLXKFDRCYVNMKQSINKPMSXIFVFTSEQAFYFINSNYFSGNFGFXSPPQSTPKFSRXPSLRFYLHVREFGVINQLTQI

SEQ ID NO: 201178 - protein, 52 aa, Oryza sativa
  Clone ID: PAT_MRT4530_96578C.1.pep
MACRGSSTMAGNHGVGSLGMKQLDGAKLDGDGLFVTTLRKSRLAGDMPETIL

SEQ ID NO: 201179 - protein, 186 aa, Oryza sativa
  unsure (1)..(186): unsure at all Xaa locations
  Clone ID: PAT_MRT4530_96579C.1.pep
SSLLYSLSLSLLLLLLLPVASSHTSHPSRHTSXYPHPSTPAXQRLHHAPPPHHTTTRNIHLPRSANSNIXQXPNITTRTXSPHTRTAPSITLRPPPTQHSPLPLNTXPAASRPRNHTNQLTPHTITNQKSRQSHNWFPCNYTGFPHSLSSPKPHNRIRKSTHSPPSPLSLNFPLIKKQEKKQHTKH

SEQ ID NO: 201180 - protein, 875 aa, Oryza sativa
  Clone ID: PAT_MRT4530_9657C.1.pep
MEWKQNTPNNLAPSLSLSLSLPPSFCEKPPPTFSRLLNCFSPSSPTQLWWLQQERERGSEGSKNSVAFQLPWERGQESRRKNSSGGGGGGGRRRGGEMDVEGGGGGGGGAPPRGRNSWGWQKGTLLLAYQSFGVVYGDLCISPVYVYKNTFSGKLRLHEEDEEILGVLSLVFWSLTLIPLLKYIILVLGADDNGEGGTFALYSLLCRNSKMGLLNNMRANHGSLSAYNKEEPCKESRNSMLIKAFFEKHYSLRVVLLLFVLMGTSMVIGDGVLTPTMSVLAAVSGLRIKFPELHENYTVLLACVILIGLFALQHYGTRRVGFLFAPILISWLTCIGGIGIYNIIKWNPSVIRALSPYYIYNFFRKAGKDGWSSLGGIVLCLTGAEAMFADLGHFSKLSLRLGFTIVVYPCLVLAYMGEAAYLSKHREDLQSSFYKALPDRVFWPVLFIATLATAVGSQAIISATFSIISQCRALGCFPRIKVVHTSSHVHGQIYIPEVNWVLMSLCLAVTIGFRDTEMIGNAYGLAVILVMCATTCLMFLVITTVWNRWVVWAAAFTVVFGSVELLYLSACLAKVPHGGWLPLLLSLTTLLVMSTWHYGTAMKQQHEVQNKVCLDHFLGLSSGIGLVRVPGVGFVYSSTTNGVPPMFAHFVTNFPAFHRVLIFVSLQTLAVPKVSPEERFLVGRIGSPANRLFRCIVRYGYKEGRWDHFNFENQLLMKVVEFLRHQDGSGGGGGDRMSAAASGEDEAMSVIPATSSSGGSNQHAFDAGTTTSSCEIDATAGGGGRRKVRFDNDGGGGGEEEEEAAEVKELMEEKEAGVSYMIGHTCVFAHESSSAVKKFAVNVVYGFLRRNSRRPAVVLGIPHTSLIEVGMAYRV

SEQ ID NO: 201181 - protein, 120 aa, Oryza sativa
  Clone ID: PAT_MRT4530_96580C.1.pep
MRHRRIWGLDILISRATTALSCAGGGDSSSSADGALGSGRPASRRLQIRCGVAERGANLVGMAEVASCLARRWWRCWWLAGSGRDGASMAFNRAMSGYGSVTQSAPKALVQEHLGLAGDV

SEQ ID NO: 201182 - protein, 144 aa, Oryza sativa
  Clone ID: PAT_MRT4530_96581C.1.pep
MVAVAGGGQGDGLRTRWKTGNGGGSGGDEVEDMDSRRIYPSRSPASPTPSRWRSEGQAQRWRRSIQWGGAQHPEVNFNGELKDDDGCHDNDNDNRALRRFLRLLHPLSSPRSLKHAAAQAPSGGSDSLRWWGHHRRWSSVMGGG

SEQ ID NO: 201183 - protein, 98 aa, Oryza sativa
  Clone ID: PAT_MRT4530_96582C.1.pep
MGEKSKLYGGPGLDDTPYKFEIVLVLHWYEDGGFTGARARAKDPQLSWSPVARHEQNRSVPELDAVLRTYNSGARTLSPPSSFSTQHGNNVQRVGVLS

SEQ ID NO: 201184 - protein, 46 aa, Oryza sativa
  Clone ID: PAT_MRT4530_96583C.1.pep
EAKAWRGRITVVWVRKSERVRWVPKTARRLKRLPPACGRRHGRKHR

SEQ ID NO: 201185 - protein, 57 aa, Oryza sativa
  Clone ID: PAT_MRT4530_96584C.1.pep
PYCLTSASLFSWGPPIVLAIFFPCLAEVKSILLECLYLCKFLVVLPSLLLFFFFFFF

SEQ ID NO: 201186 - protein, 148 aa, Oryza sativa
  Clone ID: PAT_MRT4530_96585C.1.pep
MTLGSSGAGSSVVVPRNFRLLEELERGEKGIGDGTVSYGMDDADDIYMRSWTGTIIGPHNSVHEGRIYQLKLFCDKDYPEKPPSVRFHSRINMSCVNHETGAVDSRKFGVLANWQREYTMETILTQLKKEMATPQNRKLVQPPEGTFF

SEQ ID NO: 201187 - protein, 153 aa, Oryza sativa
  unsure (1)..(153): unsure at all Xaa locations
  Clone ID: PAT_MRT4530_96588C.1.pep
LYSSSSGGRPDWRERRVRXRRPAWRERRGRCFXRRPRCVVELPVGVARSSAHEGWPAGGVGAGAPHVGRVXVVVEHRYIIRGFAGGERRVKTXPGLGQTDNDGYFPLLRALSCCLTPQGQLPGSLVIIPLSLHEEFSDHSPFSPRSSCIVQLV

SEQ ID NO: 201188 - protein, 342 aa, Oryza sativa
  Clone ID: PAT_MRT4530_96589C.1.pep
MYKSRLQELCQQRRWAPPEYTHRCAGPAHAPLFGATVSVNGVEFRTPEDAARSAKEAHNIAAKAAFDHLSSLPLPPPPPPSENQSSYKSQLQIYAQKKGKLLPSYQTIREGPGHASRFKSVVTVDGKAFESPEYFHTVKEAESAAAKLALMSLPQEASSSEQVPVQPLSYKNLLQELAQKHGFSLPVYSTTSDGSVQAYDGSFQGEPANTKKQAEMNAARVAFQHFEDRRKNALSSTVLRGPHLGQGTVHISAGQVKIAEPVFSVPLASTATSHSATGATDRDYHSLGSTNPLPIAKSTNCADVHIQPCRRKLRLRNVAVDKNWSRCFCEVVASAKFNLPQA

SEQ ID NO: 201189 - protein, 847 aa, Oryza sativa
  unsure (1)..(847): unsure at all Xaa locations
  Clone ID: PAT_MRT4530_9658C.1.pep
NLSCLFVRRRRRRFRRIPPSPRAIKWGESFPVIPSPFSPAFPSLSPSDSFGFNPASFTGVIDGAEISAADSSLSGRSLPLPTLYNCSPXSLLRFRHSPLALPVGFVLAPSSSLSAVAAELRFAAAVAPDFLPTRRHLHRLRRVVVDLVRSSVSPADRRSTVVLAVPNRAAAFLHSGRRFRRPRRPGVSRGPPLSLPSLLRSLGRRSAAPVVAGGDHRGAGAPPPVGRAGEAAFGRAPRLPSGARPSAARARGMFNREKGKNVSGYASSNSSFQLNPPLASRELTRAHPWSIPSMLLSSQLPLVGSQDQNQYVFDRAFATQVNELPMPEEDVPFCHDCREQGHYALNCPWVYVKEAPSFGLAGQTSLNQPPRTKSSLQPSVQSEEPNGDNPLNPRKCFPPSLSHHVGSRTKQAKGRKSKNQKRKAPMRTEEEVRKMTITSTEWPPPGMTKRQRRNTFRGAPQLTEQLLANGGRVSDSEDSDQVSSDDEDEKSPQGFNQNKMEHKACSRCREIGHVASSCATTCVHCEEDHPPDRCPTSRITCFFCEGTDHVPKDCQFSFLLTKKMANQPASSNGEKHQGNTNPRQDYSFSLTPVPGQRNQNEKRKCRVREDICCFNCQGMGHFADKCPKPRNIAAGTSVHVTPCTQKLAPQRIVIHASRSSPIARVATAPTPARALPQGVNAQFQPQPSVDKTEAXSALYLWMFQHSSQXNQVQDEEPEQDHPPGECLTRXVTCFLCEGTNHVPKDCQLSVLLTKTAEIQRTTLRLSHQLVSSNNNIDDIIHRTNAPLAPPNFAINHGNNTFSTNHSLHRQPQQRIVVDGRSCVSPRREMGNLYEVDSKDMNYTKFWN

SEQ ID NO: 201190 - protein, 43 aa, Oryza sativa
  Clone ID: PAT_MRT4530_96590C.1.pep
LHGEPLRRRGPRLCRVEAAVRRVRAAGGGYINEERRGVDRWPE

SEQ ID NO: 201191 - protein, 101 aa, Oryza sativa
  Clone ID: PAT_MRT4530_96591C.1.pep
MHEATSHRNEAVRSSVQCTRWPMAMPCVRDDRASLRPSRQRMHARHPPQDSKAISSRACQAASCARRTCEAGALAVACLVVLVSSLLRITERPPRRGLFVG

SEQ ID NO: 201192 - protein, 60 aa, Oryza sativa
  Clone ID: PAT_MRT4530_96592C.1.pep
YIGSSVSSTSTTAAIASPSSSCAFSRTLVHDALPCIHDHSTAPLLLVSSPVQVSALLTLG

SEQ ID NO: 201193 - protein, 117 aa, Oryza sativa
  Clone ID: PAT_MRT4530_96593C.1.pep
MAGALLLPRRYLARRVYQLSPPEDLALAMSTVRPSRRFLNDATMNGDVLTEGRYGTVRRVYVVAEEDEWKPAEIQRLMVSWNPGTEVRALQGADHMPMFSKARELSELLMEIANKYS

SEQ ID NO: 201194 - protein, 79 aa, Oryza sativa
  Clone ID: PAT_MRT4530_96594C.1.pep
SSIGYGLLGNGGVGQSCVGRSAPYVTAPLIRFPHQTRFGFVCSRICLGGGLDSWPGFDCPRCCFLSLCINENLAAGLLP

SEQ ID NO: 201195 - protein, 1034 aa, Oryza sativa
  Clone ID: PAT_MRT4530_96595C.1.pep
MGWTWSYVDRASRWIPWPDYFALCKFRFPRLSVAVFYFPSLIPLSPRISLSRFPLFFSSLLVFSARRERDLVGVSACWRGLSRRYKCSPERTVLSVCMLTGEMPRVQTSRLGKNPIEVDSDGGEDLHVDYEVGNDVDEGPEHGEIDGLFSVVLRKMIVQEVKKNLVDTSSVNFHNPIDKKSKVHSKTEPSYSRFSTKYFSTVLSSLSPDQQRTIGDYDKVIAINKECVHYILGLPIGGMEFPTDCDAGKSFILSKFGKSALPSVRFFGDKFIRKETLSDDEVITSFLIVAMACFLCPNSSLVPSTKYLTVFENVDELRSYDWSKFVYEWMMTSIKKIQKFNTLGGCWFLWAVLYLDYVEFGDKNIPIGFPRISHWKNNMITLYSDLDKVDEENFGLRPIKDFNDTTYFKVVPPENRINTFRDKLESAIGTMLPAFIKEKICSMVVSHCSANHIVDSESCEDIAISIMLLLCEHAGSRDGGDPDENLIFDNINPGFQPNYAIDVENEIPCDAHNNGSTNKSVASKANETSFRHTPSHDKELGVNDDSVIVSKSVVRFSLSPNFEKDQGLLTPEVGYANNSNSRFASGPTVSAVAAVRNVANKIKSRLSQLNNDDKRGPLFPDLIDSCEDEAVGYAKSLSCQKEYLNPRYVTSSSSQPGISFHCLDNSPIQVIGINNNEGTSRTHCIQNVKKRRFDDVTNSPDVEYLGHSIFPDCCKVLCTQTNNLYNAKNMLKSNNLDLSSTGGKLPPHGPRRVLVPSRKFSDPYVLSVRRQFPVSDQEKRHYNAICKLSESSKWHSYDAVDIDNVRAKFSSFGQSLMKGGIVLSYVINVFCRVLFNNNHPSNSKRHYFFSSIGELLLTDLSCADLSKVKRSFLGAASARKLHLSDMLFFPIEHLEHWFLFVVDIKDRMLVLLDSLHEKGDPYFEDIECLLINNLQTFWDSYDGSSIDFTTLKKVYPCVPKQRSCFDSGIFVMKCMELWSSRVVLPNEFSSDDIDNIRMLYANQLFFHPTNKMLQTEVEEVVLNWFNPDQFAGEG

SEQ ID NO: 201196 - protein, 1645 aa, Oryza sativa
  Clone ID: PAT_MRT4530_96596C.1.pep
MGLCFSKKQQVRRRREEQQQPPCHEARKAGGGKKAGAKEVAIVPEAAKKAPPPRKAVPKAEEPAADKRTVFVVKAAAAAAAAEVAASASGEAADEEAKRPAPEEEEAKPVVVSRVPVRTSSCTKEEVDAILIQCGRLSRSSSSSGKVASGEGGGGHRRYSGSKRSYDFDRERRGGGGGGVDDDCDWERQGAAVSRPSPRRRTPERKRSGSHERSGGSGSRRVSRSPGRRADSVPATASGERASRQQPGKMVSVPAREKGRAPSPVPAASGKRYPSPRSNSPARAGAAGNENAAAQLAHGPSLSRSSSRKAEHSPYRRNPMAELDENTLGNHHSCNNNGRPQKKPTESGGALPQKVAEWAKDQVAASRTAAKEKQEIVEVPVASSDTKGGNSGRMKATHSVSIVAESVVNQKGRSSRRSSHDFDNNGNSYASLLLEDIQNYHQQSTGSAAAPAPAFSLPACVSKACSILEAVADLNSSSSENKSFELDRSANDKCSANGRYGDGKVAGGGTLVVESEVVVKDDLMEPSLHKYVSVRDIRGEAEPQESAGSNSFAGNAWTPSWEPSSVDSTDRTWTASQSNNGDEVEQLSSGAVSPLELSWQGKQKLPSQEPSGGGRSRVGPTGNAQRGRSAHRGGGGAVNARSDVRAAPVPAQGDVASLFRSMSRSQSTCRSDLLTGKMPRVQTSRLGKNPIEVDSDGGEDFHVDYEVGNDVDEGPEHGEIDGLLSVVLRKMIVQEVKKNLVDTSSVNFHNPIDKKKSKVHSKTEPSYSRFSTKYFSTVLSSLSPDQKRIIGDYGFNSLLMFDNAYVPNKFASWIANHVDVKSSQIVLKDKVIAINKECVHHILGLPIGGMEFPTDCDAGKSFILSKFGKSALPSETLSDDEVITSFLIVAMACFLCPNSSLVPSTKYLTVFENVDELRSYDWSKFVYEWMMTSIKKIQKFSTLGGCWFLWAVLYLDYVEFGDKNVPIGKNVPIGFPRISHWKNNMITLYSNLDKVDEENFGLRPIKDFNDTTYFKVVPPENRINTFRDKLESAIGTMLPAFIKEKICSMVVSHCSANHIVDSESCEDIAISIMLLLCEHAGSRYGGDPDENLIFDDINPGFQPNYAIDVENEIPCDAHNNGSTNKSVASKANETSFRHTPSHDKELGVNDDSVIVSKSAVRFSLSPNFEKDQGLLTPEVGYANNSNSRFEHFRSASGPTVSAVAAVRNVANKIKSRLSQLNNDDKRGPLFPDLIDSCEDEAVGYAKSLSCQKEYLNPRYVTSSSSQPGISLHCLDNSPVQVIGINNNEGTRRTHCIQNVKKRRFDDVINSPDVEYFGHSTFPDCCKVLCTQTDNLYNAKNMLKSNNLDLSSTGGKLPPHGPRRVLVPSRKFSDPYVLSVRRRFLVSDQEKRHYNAICKLSESSKWHSYDAVDIDNVRAKFSSFGQSLMKGGTVLSYVINVFCRVLFNNNHPSNSKRHYFFSSIGELLLTDLSCADLSKVKRSSLGAASARKLHLSDMLFFPIEHLEHWFLFVVDIKDRMLVLLDSLHEKGDPYFEDIECLLINNLQTFWDSYYGSSIDFTTLKKVYPCVPKQRSCFDSGIFVMKCMELWSPRVVLPNEFSSDDIDNIRMLYANQLFFHPTNKMLQTEVEEVVLNWFNPDQFAGEG

SEQ ID NO: 201197 - protein, 218 aa, Oryza sativa
  Clone ID: PAT_MRT4530_96597C.1.pep
YDAVDIDNVRAKFSSFGQSLMKGGTVLSYVINVFCRVLFNNNHPSNSKRHYFFSSIGELLLTDLSCADLSKVKRSFLGAASARKLHLSDMLFFPIEHLEHWFLFVVDIKDRMLVLLDSLHEKGDPYFEDIECLLINNLQTFWDSYDGSSIDFTTLKKCMELWSPRVVLPNEFSSDDIDNIRMLYANQLFFHPTNKMLQTEVEEVVLNWFNPDQFAGEG

SEQ ID NO: 201198 - protein, 427 aa, Oryza sativa
  Clone ID: PAT_MRT4530_96598C.1.pep
MEFPTDCDAGKSFILSKFGKSALPSVRFFGDMFIRKETLSDDEVITSFLIVAMACFLCPNSSLVPSTKYLTVFENVDELRSYDWSKFVYEWMMTSIKKIQKFNTLGGCWFLWAVLYLDYVEFGDKNVPIGFPRISHWKNNMITLYSDLDKVDEENFGLRPIKDFNDTTYFKVVPPENRINTFRDKLESAIGTMLPAFIKEKIYSMVVSHCSANHIVDSESCEDIAISIMLLLCEHAGSRDGGDPDENLIFDDINPGFQPNYAIDVENEIPCDAHNNGSTNKSVASKANETSFRHTPSHDKELGVNDESVIVSKSCSSGPTVSAVAAVRNVANKIKSRLSQLNNDDKRGPLFPDLIDSCEDEAVGYAKSLSCQKEYLNPRYVTSSSSQPGISFHCLDNSPVQVIGINNNEGTSRTHCIQNVKKRRFDD

SEQ ID NO: 201199 - protein, 107 aa, Oryza sativa
  Clone ID: PAT_MRT4530_96599C.1.pep
MKATHSVSIVAESVVNQKGRSSRRSSHDFDNNGNSYASLLLEDIQNYHQQSTGSAAAPAPAFSLPACVSKACSILEAVADLNSSSSENKSFELDRSANDKCSANGRY

SEQ ID NO: 201200 - protein, 65 aa, Oryza sativa
  Clone ID: PAT_MRT4530_9659C.1.pep
MVIGSIQSAEAQGGKFCPQFCYDGLEYMTCPSTGSQHLKPACNCCIAGEKGCVLYLNNGQVINCT

SEQ ID NO: 201201 - protein, 155 aa, Oryza sativa
  Clone ID: PAT_MRT4530_965C.1.pep
MKMHGECCRRRIRPASRRLPPYARCFSSHAEKKTPPPAHFPRRYLPGRPRGFQRRFCPRATRAADDLAAPAPGGGAAGSDSRAATSSALERLVGIGVLDRREAHSGGTLTGSVQEARRRRRKWPPAVTSSGAQRSSDARRLLCWRQQWRVLRSAV

SEQ ID NO: 201202 - protein, 47 aa, Oryza sativa
  unsure (1)..(47): unsure at all Xaa locations
  Clone ID: PAT_MRT4530_96600C.1.pep
IANQSIXTPPLXCHVVYTLRYHXSIPGPYYLNIDIYMSIFSSYKKKK

SEQ ID NO: 201203 - protein, 2280 aa, Oryza sativa
  unsure (1)..(2280): unsure at all Xaa locations
  Clone ID: PAT_MRT4530_96601C.1.pep
MVNTEGTEEQRKAEEDAALQAGKKESVAGESSFFTKGMMGLRSGIGPSEIKLEVMPNEVRLEGTKNYLSWSRRARLMLRAKGVEHYLEETCVEPIDKSSVEWKMWNATNSTVVAWLMTSVSPSIARMIEAIQNATIIWKTLSNMYSGEGNVMMMVEAQDKVDNLKQEGRTVQEYASELQHLWADLDHYNPLQLKHDDDIVIGNKWLQRRRVIHFLKGLNKEFEDRRAAMFHQATLPNMEEAISAMVQEEMRQKVMKGSNPVRSAYITINDRECYNCGLKGHVSYNCPSPRNNNGRGVARGGARGGYGGFNGSRGGYGGYVGDRGGRGGERGGRGGSRGRGLGGPRANVVMGESSSITLTGEQAAQWEEWQKNKGPVDSNQQNSAKATTSHFGNFANYAHTGEGTQAHALASTYRHHVDWIIDSGASKHVTGLPNNFSSYSPIAPSETIQIADGSSQLIHGIGSVECTPSISLSSVLHVPSFLVNLLSVSSIIDQFKCIVIFDENSCLFQEKGTGRRIGTGVRRNGLWYINQEEMGLAVVVGDTEKEIILLHCQLGHPSFESLSKLYPDLFTKVDKSRLVCDACEFGKHTRSTYAGIGLRSCEPFILIHSDVWGPCPVTSVSGFKWFVTFIDCYTRMTWIYMLRHKNEVLRCFQDFHKLVTNQFDARVRIIRIDNGTEYINSEFVSYVSDHGIIHQTTCPGAPPQNGVAERKNRHLLEVARSLMFQMNVPKYLWSEAVMTAAYLINRMPSRILGMKSPAELLLGKREFKVPPKVFGCVCFVRDHRPFVGKLDPHAVKCVFVGYASNQKGYKCWDPIGKRLFVSMDVTFREFEPYYRSRGDLDQFLEEFSTVIEIDSRVGEIVEVDAHKQGDEDVVIGSIPSFVGDTIEKVVDIGEKVVDISCDKDEGVVVGTIPCPLERVEVQQTEMRVYQRRNKNQVDKVTGKEQVHQRSQIQNQGERSGEPMQEQDKESQQLQQFEYPVPDSSSSLSPTSSSLLETSVPIPKDWRCAKQDPRWKDAMKEELRALEKNKTWELVKLPMGKRAVGCKWVFTVKQTPEGKVDRYKARLVAKGYSQTYGIDYDETFAPVAKMSXDVKNAFLHGDLXRRFRRVLCNMGYSQCNGDHTVFYRHRGTHITILAVYVDDIVITGDDVEEIKCLKQRLGEAFEVKDLGPLRYFLGIEVARSSKGIVLSQRKYVLDLLTETGMLGCRTSATPIDRNHQLSAQSGDPVDRETYQRLVGRLIYLCHTRPDISYAVSVVSRYMHDPRTTHLEVVHRILRYLKGTPGKGLWFRKNQHLDVEGYCDADWASSVDDRRSTSGYCVFVGGNVVCWRSKKQAVVARSTAEAEYRAMALSLSEMLWVKNLLLELRLFRNNTVVLHCDNKSAINIANNPVQHDRTKHIEIDRFFIKEKIDSGALRLQYIKSSEQLADCLTKGLGPSERDECMITDYAITKISNMYSSLTEDKLISSFFTCDDSPSESSIGSPLKLCQICEATKANRRTQKKGDFFNPRCNSYLKPTVERTYIDLARITYYKLESLHTNARVVFQNVVNFASESACFTTLSTCILFQAQCFLSEDEGGSGPFRKPLCIALQAPGLSQYGPTGEEAAHETDSNKAQKSTCRSDLLTGEMPRVQTSRLGKNPIEVDSDGGEDFHVDYEVGNDVDEGPEHGEIDGLLSVVLRKMIVQEVKKNLVDTSSVNFHNPIDKKSKVHSKTEPSYSRFSTKYFSTVLSSLSPDQKRIIGDYGFNSLLMFDNAYVPNKFASWIANHVDVKSSQIVLKDKVIAINKECVHHILGLPIGGMEFPTDCDAGKSFILSKFGKSALPSVRFFGDMFIRKETLSDDEVITSFLIVAMACFLCPNSSLVPSTKYLTVFENVDELRSYDWSKFVYEWMMTSIKKIQKFNTLGGCWFLWAVLYLDYVEFGDKNVPIGFPRISHWKNNMITLYSDLDKVDEENFGLRPIKDFNDTTYFKVVPPENRINTFRDKLESAIGTMLPAFIKEKIYSMVVSHCSANHIVDSESCEDIAISIMLLLCEHAGSRDGGDPDENLIFDDINPGFQPNYAIDVENEIPCDAHNNGSTNKSVASKANETSFRHTPSHDKELGVNDDSVIVSKSAVRFSLSPNFKKDQGLLTPEVGYANNSNSRFEHSRSASGPTVSAVAAVRNVANKIKSRLSQLNNDDKRGPLFPDLIDSCEDEAVGYAKSLSCQKEYLNPRYVTSSSSQPGISFHCLDNSPVQVIGINNNEGTSRTHCIQNVKKRRFDDVTNSPDVEYLGHSTFPDCCK

SEQ ID NO: 201204 - protein, 274 aa, Oryza sativa
  Clone ID: PAT_MRT4530_96602C.1.pep
MSGMSLAVGPRTSGTDDTAAERGQQQPSTMLGGVMGSLRVIELQLVAFIMVFSASGLVPLIDLAFPVATTLYLLLLSRLSFPPLHSTLPSSSSSSQEIFRGSTWFQAYVVLGTTVGLFLPLAHVLGGFARGDDGAVTSATPHLFLLSCQILTENVVGALGAAFSPPVRALVPLLYTVRRVFVAVDWVYDAWGNRAAAAAPQEAVAWMWFGRYLAVANLVYFSTNLLVFLIPKFLPRSFEKYFRMRDEVYAETAEDRHAAAATVAAKPVESKKAD

SEQ ID NO: 201205 - protein, 52 aa, Oryza sativa
  Clone ID: PAT_MRT4530_96603C.1.pep
MSLPDRERAQAERVVRMAKRYVLELSRGLTASGEGFLCHLFLKLGPLGQVRA

SEQ ID NO: 201206 - protein, 73 aa, Oryza sativa
  unsure (1)..(73): unsure at all Xaa locations
  Clone ID: PAT_MRT4530_96604C.1.pep
PPSQNPAIKNGFPTPVPXGKRSTLEAAXXGXRXKKLXFEVXFGFAGTMNXAAMNSPATSTPPAVGFHDGEVFQ

SEQ ID NO: 201207 - protein, 112 aa, Oryza sativa
  unsure (1)..(112): unsure at all Xaa locations
  Clone ID: PAT_MRT4530_96605C.1.pep
MKIIFFFALLAIAACSASAQFDAVTQVYRXYQLQPHLMLQQQMLSPCGEPPRVSDGPGFPLPPASPPPPVSLSPRWIPSSPPPLLHLPPPPLYPAPPLLPPPFRFCSLFSLL

SEQ ID NO: 201208 - protein, 56 aa, Oryza sativa
  Clone ID: PAT_MRT4530_96606C.1.pep
IYKLPLPSLRAAYSEGPKTRRSENIIFTKRLGVFRTEEDAQPTYPSMDLRSLIIKR

SEQ ID NO: 201209 - protein, 134 aa, Oryza sativa
  Clone ID: PAT_MRT4530_96607C.1.pep
MAVAYTSDHRHHHHHHDVVGRLSSLVALCGRGLSRVSRRLLLLDRRCYGGGRSAPAKQDGGGGEAIWQRTILMGERCQPLDFDGAVHYDSFGRRMAAPRSASSLSSCCSSDSLGAATSEASYITSTSTCDDGVL

SEQ ID NO: 201210 - protein, 233 aa, Oryza sativa
  Clone ID: PAT_MRT4530_96608C.1.pep
MEPSSPPYVAEADLPIGAAGERRHACSANYDHRGGVGGWEDDDFEFAPLLPQRRRLRGECRRPRTSAAAVAACRGTAVVHAVLTQPPTPVKQRTPRRRQAAAAAEAKSSAAPASTPTAAARRVRWHEMAFGSVRVPAAMDMGEIRRRLHARRRRLAYGDGEAGDAAAAAAGWAPWRLIRSLSCKGIEAVAVAAAAAPYHNLLGLILLRKHNGILELTNIMEMDDFLFSDVQDN

SEQ ID NO: 201211 - protein, 112 aa, Oryza sativa
  unsure (1)..(112): unsure at all Xaa locations
  Clone ID: PAT_MRT4530_96609C.1.pep
TRKTSNILLDKEMTPKISDXGRARMLAXDDTEINTVRVVGXXYGYMAPEYARDGVFSVKSDVFSFGVIVLEXISGKRNRGVYSYSSHLNLLARAWSSWSEGNSLDLVDKTLN

SEQ ID NO: 201212 - protein, 121 aa, Oryza sativa
  Clone ID: PAT_MRT4530_9660C.1.pep
LPCWTPSVVAWEQSELQTDAIQSYAGSVVDPVAIVSPLAMHDGLVLVISFAFGICGRCLCVGHGLRSSVHRALSFASNGPCACWVHLVELILVERLDAVGPGVACGVVSNEGPRGAGAWAL

SEQ ID NO: 201213 - protein, 100 aa, Oryza sativa
  Clone ID: PAT_MRT4530_96610C.1.pep
MASSSSSSSFLAHPSSLLRQVVHGFAGYLAGLCRSLQNLKPSAAPKQDADDEFAVNNTAASSSEEVENVQMRTRAMPRSERPVLREGNGGKGGAHHNAGL

SEQ ID NO: 201214 - protein, 512 aa, Oryza sativa
  unsure (1)..(512): unsure at all Xaa locations
  Clone ID: PAT_MRT4530_96611C.1.pep
MDEQEGIKVKASKCRNPIRPPAALLISNGREISIRALFLAHEYLMESSRSPLSNGSSLIAKFHLNEPQLKQQGAASPVMGIWACNFIWDPGPSGAHVGNKVDLHRQDQQPTEXLSSTHRKXGPTTALSXLEWSSGVIRWYQSFRCSARVSGLHKGKRDGHAQHRLLHDQRDITTSSRIAYEVHDNDLARVESNLPVFDGHLFMLACSVESNILKNPREKQGAQNIHHEEKSNMLEMPSPSLTKEEEKTDAPILSEEGIKGKLNGANISQGECASDESHLSTIHANLEQILVETTSDLPLLQVDLLAVSCDKEELCDNASLKSMPQLVNEPAISSVSLCADFKHVVHIANDVEERKLITSLNTLGYVQFDDFCELNNLEEKLFAKSDLPCPTNAIFHIFDEYNDRKIYLVHRVFICSDLEKHVIPNHTTSSFSSLDWMKHVILNGLCEEHHMEKPRTVFHEEGEYDVTIATTDTTIAHIMDGQEDIKVKASKCWNPIRPPAALLISNGREISI

SEQ ID NO: 201215 - protein, 112 aa, Oryza sativa
  unsure (1)..(112): unsure at all Xaa locations
  Clone ID: PAT_MRT4530_96612C.1.pep
ASSFVQVGAYAFFHVLPVAYPPPYMPSQTNTSLFCTICPHSCAPVLTRAHXGKNFPIGRPSXIAPSQARLTLEFFGDWLPEKKLQRVDMSILLILLSPWPGCYTRGCQNDYS

SEQ ID NO: 201216 - protein, 105 aa, Oryza sativa
  Clone ID: PAT_MRT4530_96613C.1.pep
ALRRLRNPRDVVCVDVEEVVDRTGSTFSSACVLLTVLPSRSAPQSSGAFTGIHNPGKEHHAQIVRPCRFIYILGCNPKAPFRSTCQQRPLAERIDPPSIHKDHIG

SEQ ID NO: 201217 - protein, 305 aa, Oryza sativa
  Clone ID: PAT_MRT4530_96614C.1.pep
MAGLRKGIREHRLLHLRRDMTTSPNDAYEEDQHIQEKENGILEKKEDEAPAMSEESSQGKLNGAERNEGIGLICTGKINNPRREWGGGAEEGVYLGFSARLTVESQRGGDGGGAEEEEAAELVPASTTSPGGGGVDNEDPAAAMTPEVEAASTTRNRRRKRRSRQRSWRRRRWEEEAAELVPASTTSPGGGGVDDEDPVAAMTPEVEAASMMRNRRRKRRSRRRSWWRRWEEEAAAAAEKRSRQTSPGGGDNSRRGGRRSRGEVELDLAAVVVETAGRSRRRMRRPSVGEELDLAVAVERRREWI

SEQ ID NO: 201218 - protein, 484 aa, Oryza sativa
  Clone ID: PAT_MRT4530_96615C.1.pep
MATMDTTTTHIMDEQQNIKIKSSKCWNPIRTTATLLTSNGHRICIRPPFLPREYLMESSRSPLSNGSSLITKFHLSRQQLKKQVGIGLICTGKINNPRRVISTHQKIGPTTAISVEWNSGFIRWYQSFRCPPTPSSTDLIAAVQQVFAKASIHLTSIGVLGCVGVCRHHSACIGIRKKTWDNCAEHEHLRRVMRNDQHDQYEDMLACQRYRTLSHLLQLACNAESKLEEDMKKQHDIFLPPITNYLQEVHNHGKEERDMKKPSFPLFTLKFDAPPSSEERITVEQPLLEPIVEMPLSQVDLLAVPCDKEELCDNVSLIFVPQLVNEHAISNVVLNRPRDEHHMEKPMTVFHEEGEDDVTMATTDTTIAHIMDEQQDIKIKSSKCWNPIRPPATLLTSNSHQICVRPPFLACEYLMESSRSPLSNGSSLITKLHLGRQQLKKQGGATPVMGLWACNFVWDPGPCGVLPNLVEHDPRSLLVVLPPL

SEQ ID NO: 201219 - protein, 324 aa, Oryza sativa
  unsure (1)..(324): unsure at all Xaa locations
  Clone ID: PAT_MRT4530_96616C.1.pep
MAMVHAEMEMKSAAFWNPIRPPEIVLNSNGCQISIWPPFWAHEFLMESSRNPLSNGSNLIVKFHLSHRQLKKQGAALNKVDLHRQDQQPTERCIDRKGATQHLGYTKSLELFVLKVDIFTFDNTWQVTNMTQISGLQESNENTMTRFFRGHNSNIQVGLVNVTYNHIGQLFMLACNVERKILENPTEQQAMLLPPITDVLQEVQNSPQNEKNDMFEMSLPSLANEEKAVEPTLFEKGIKDTQPSVVVPRKCKLESSVRTTDMEMKFAAFWNPIRPPEIVLNSNGCKISIWPPFWAHEFICTGKINNPRRGVLIAKAXHNVLYGC

SEQ ID NO: 201220 - protein, 204 aa, Oryza sativa
  Clone ID: PAT_MRT4530_96617C.1.pep
MKHYKCLDKIGRKSRVWCIGCRTRGLGKPAVKCLHRGINYGEVECFREPRCLEACQGHPYLVEHPTTHREMKRGGDGRACPCCYVVTEYINRSSLVRVVQEERWLLGSIMANILTGGPLFLIPTLHRHVRAQLVHVVGVTPGFHRRHEEEEQHDRRNRCVSAGMKCEFVQEVVPINTREKHFCSLGKIKKHLIGTTDIDNLLDK

SEQ ID NO: 201221 - protein, 53 aa, Oryza sativa
  Clone ID: PAT_MRT4530_96618C.1.pep
DMLYHFYVEDWTVHICKTICCNLSIDVFFIQTPTLVGFCPITNKTEDSCFWWE

SEQ ID NO: 201222 - protein, 80 aa, Oryza sativa
  unsure (1)..(80): unsure at all Xaa locations
  Clone ID: PAT_MRT4530_96619C.1.pep
IAHIMDEQEDIEIKYSKCWNLIRPPTTLLTSNGHRXCIRPPFSARGAHXGAPQPGIRLICTGKINNPRRGVSIAKAQHNV

SEQ ID NO: 201223 - protein, 356 aa, Oryza sativa
  unsure (1)..(356): unsure at all Xaa locations
  Clone ID: PAT_MRT4530_9661C.1.pep
GEQARGRGRADRVHGSGAHAAASRPTVDRAHLGSHQPAPWVPRVSRTQGRGRLTAGPHAAATRRARGRPRWRXGGRRRARAPMVAAGDHRHGGAAAERGEGXGERRRRSTAHPRSTAATEEAAGVEGGGGAARVDGVGGAPVVGDRNGEVDEVGEDAVNPKEAAPRWEAVRGDDGGGPKLGGDGGEREXRRELKSGEEEGRREAETDEGGAGRVXIGLEEGESGRRGRKPAWRSRAPSMAPAGLGEGFQTNPRERGMQNWVEWERGSRGVIPPTLLHAGTAGGGGIRGGGGARVRGRRRERWEKGDDGWAPPVSEGGGRACPSAARAQGEAEWAAGRGERGGGRWAEFGPLGFFFL

SEQ ID NO: 201224 - protein, 200 aa, Oryza sativa
  Clone ID: PAT_MRT4530_96620C.1.pep
MVSLRLPLILLSLLAISFSCSAAPPPVYDTEGHELSADGSYYVLPASPGHGGGLTMAPRVLPCPLLVAQETDERRKGFPVRFTPWGGAAAPEDRTIRVSTDVRIRFNAATICVQSTEWHVGDEPLTGARRVVTGPLIGPSPSGRENAFRVEKYGGGYKLVSCRDSCQDLGVSRDGARAWLGASQPPHVVVFKKARPSPPE

SEQ ID NO: 201225 - protein, 248 aa, Oryza sativa
  Clone ID: PAT_MRT4530_96621C.1.pep
MATTDATIAHIMDEQEDIEIKYSKCWNPIRPPTTLLTSNGHRICIRPPFSGREYLMESSRSPLSNGSSLFSEFYLVWPESQEQGVASPIMGLWACNFIWDPGPARVSAKPSVCLFFGTPTYHLVKFLLQKPEALNGFRQGFQLASKKRVFFAPGKNQQPHGKGFSIVKGPTQRFERFYPNSPKDRANNSLECREELRVHQVVSELSLLGIGLICTGKISNPRRGVSIAKAQHNVSYGCSRIVNVSPKS

SEQ ID NO: 201226 - protein, 466 aa, Oryza sativa
  unsure (1)..(466): unsure at all Xaa locations
  Clone ID: PAT_MRT4530_96622C.1.pep
MVTTDTTIAHIMDEQEDIKIKFSKCWNPIWPHATLLTLNSSRICIRPPFSSYDLIYTSKINNPRRVSSSFRVSSYGHVLYHSRRCPCVSYFEGNYDPHAYINWELVVDSEFKMHGLSEKQKVMCASSVLINEASNDWKYICRHNKIPQSWKDLKRYLRDVYVPMYYANILFNKLQCLKQDTRTDSSYYHDMSSFTDHLQEVHNHEMEERDMNEPSVPLSTLKELCDNASLISMPQLVNKHAISNVSSLCDDFKHVIHITNEVEEYELASSLNTLGYVQCDDLCELDSLKEKLFAIYYLPCPTNAIFHIFGEYNDREMDLVHRVYICSNLEPPVHVDKTCKLERQVISNHITSSFSCFDWXQIVLNXPRDEHHMEKPRTVFREEGEDDVIMATIDTTIAHIMYEQEDIKIKSFKFWNPIWPHGTLLTSNGCRICIRPPFSALRLICTGNINNPQRGVSIAKAQHNVL

SEQ ID NO: 201227 - protein, 78 aa, Oryza sativa
  Clone ID: PAT_MRT4530_96623C.1.pep
MLRLSERNMKILFVAALVVGSVFFLLLPGPSAADEKKKGPKVTVKVYFDLRIGDEDIGRVVIGLFGKTVPKTVDNFVA

SEQ ID NO: 201228 - protein, 97 aa, Oryza sativa
  unsure (1)..(97): unsure at all Xaa locations
  Clone ID: PAT_MRT4530_96624C.1.pep
MATTDTSVAHIMDEQQDIKFESSKCQNPIRPPATLLTSNGRRICIRPPFSAHEYLMESSRSPLSNGSSLIAKFHLSXGIGLICTGKINNPRRGLSIA

SEQ ID NO: 201229 - protein, 53 aa, Oryza sativa
  unsure (1)..(53): unsure at all Xaa locations
  Clone ID: PAT_MRT4530_96625C.1.pep
MQRNWYRFPCXPNGAIEVINAQQRQDGARFRSKMEDEKVAKSGIAIQTPQGAY

SEQ ID NO: 201230 - protein, 184 aa, Oryza sativa
  Clone ID: PAT_MRT4530_96626C.1.pep
MAHKLLCFAALISMAALAAGATSEEDTGALLLPGSTGSNQCVYTLYVETGSIWKAGTDAAIGVELYTAAGNGILIRNLQAWGGLMAAGHDYFERSNVDIFSGRGPCLGAPVCRMKLVSNGAGEHHGWFCKSVEVTVAGPHARCNRAAFDVQQWLATDAPPYQLYAERSVCGKISTATAAAEEES

SEQ ID NO: 201231 - protein, 623 aa, Oryza sativa
  Clone ID: PAT_MRT4530_96627C.1.pep
MAGLCKGKQDGHAQHQHLHHQRDIATSSRITYEYTVGNKLETWDECKTMMRKKFVFSYYKRTLLEKLEHLKQGHLFMLACSVESNVLKNPKEKQAMLVPPINDILQGAQNIHHEEKSNMLGMSSPSLTKEEEKTDAPTISEEGIKGIRLICTGKINNPRRGIRKIIGDSCAQHRYLRRDMRSDQHDDYKEVRNHEKEERDMKEPPIPLFTLKFETPRSSEEDIKGKVNGTEINQGECVVNEVNLSTFHAKVEQPLVEPNASIPLSQVDLLDVPCDKEELCDNASLISMPQLVNEHAISSVSLCVDFKHVIHIANEVEERKLLSSLNTLGYVQFDDFCELDNLKEKLFTKSDLPCPTNAIFHIFGKYNDRGIYLVHRVFICSDLEKHVIANHTTSSFSSFDWMKQVILNGLCEEHHMEKSRTVFREKGEDDVTMATTDTSVAHIMDEQQDIKFESSKCRNPIRPPATLLTSNGRRICIRPSFSARIRLICTGKINNLRRGVSIAKIILNGLYDEHHMEKLRTVFREEGEDDVTMATTDTTIAHIMDEQDDIKIKSSKCWNPIRPPATLLSSIGRRICIQPPFLTRISLICIGKINNSWRGVSITKAQHNVSYGCSRIVNVSPKL

SEQ ID NO: 201232 - protein, 82 aa, Oryza sativa
  unsure (1)..(82): unsure at all Xaa locations
  Clone ID: PAT_MRT4530_96628C.1.pep
RNNPPKWQNTINILNWLRSIYSRVTLDSRHRMIWQSLLRPFVQFHSNSYRCLPLINIQHAHGNGGXXXXXXXXXXXXXXXXX

SEQ ID NO: 201233 - protein, 70 aa, Oryza sativa
  Clone ID: PAT_MRT4530_96629C.1.pep
MDADLSPINAADDGRRRRPSNRQPIKHAGTKTTPSPPSDRPTDGHDRSPPFAGLINYSHCTSKDGSTVAF

SEQ ID NO: 201234 - protein, 87 aa, Oryza sativa
  Clone ID: PAT_MRT4530_9662C.1.pep
YQNEQQKCNNRQKQTNMTVKLYHKLATLGSQLMEQTPSAHRAMLCRWEVVLRSVLATRPLRGVSPWPEIIDHGELVVFSPRVSPRVR

SEQ ID NO: 201235 - protein, 106 aa, Oryza sativa
  Clone ID: PAT_MRT4530_96630C.1.pep
MEGVPSFVVVAFPFAASLPSSGLIFHRMTPIEQQKLRLPPQNTAPGADRRAVTLCPFVASSLPGSSIRIGFQKQRKRAEPATKRRAKTVEPNCARALATTTSPAIP

SEQ ID NO: 201236 - protein, 116 aa, Oryza sativa
  Clone ID: PAT_MRT4530_96631C.1.pep
MAVTKGLTSARRGCGADMRGPHVSGARMAGLPWTGTTRVIHRRSTGSTARIGPEPIGRCGGGQARLGSAQSRPTGHGDGARTRTRVADDGNRRRRRQRKAAPKGGEAKATTNGRRR

SEQ ID NO: 201237 - protein, 44 aa, Oryza sativa
  Clone ID: PAT_MRT4530_96632C.1.pep
MGTAKPKGGTRPTLPIPGKGRWGKFHGGARTTVNRHDPDKAGCP

SEQ ID NO: 201238 - protein, 192 aa, Oryza sativa
  unsure (1)..(192): unsure at all Xaa locations
  Clone ID: PAT_MRT4530_96633C.1.pep
IWSIAYNRGHGYSNSFTLAKGAQLYPQDTIHRHVTMSSCAXDAHITMSSDCDKTLHITPSDQSHRTSGFTPTPRKAAGSPLSCHGESRSRSTEYPSQPNSITPTLAWERQPEESYTSSQAVTHSCLWQALYVFQGFPRTGPSLPWVRPAKPCTHSPPWLTSARREGGAAPTSGARMSAAHGWPVYRGRGPRG

SEQ ID NO: 201239 - protein, 797 aa, Oryza sativa
  Clone ID: PAT_MRT4530_96634C.1.pep
MMEFLGIPDRRCVQYVKHPVPLRQRKLQFNWQAPQVTAEIPHMCCAHRLSCAALSFRRRLMQLAETKEGNAMTLTKERLWFCVRYVVCLDYSVRRCRIFTVIPYNICCDFKPFQHTDGSSHSSSELASPEDSLDLSSSSSSSSPPIILLRLNVPHESNKSWADTSPGLLGEKSTASNSISNSDFLGNSFTKTSMNAGHTVRRKSKKKSKKHKQRCRKPTAGSEIKCKGNNCPTPAISMVDCEDSTLSPKCVGDILFEDTFSPSSSVKEASEEAHDSENDDDYPACSVASVLSVSYCDETELYRPTTACLELFGQHNKSNIRCLDNNCNTTLVHSSQETCAGSSGDCWDDNKVLLSFENERGSDPCETTECCSRDGVGDNCSSRICSPNGVGMRNGIQAVHLCSDTSSDSDFHLVISRKRARKEKKMALWKSSNGERLSAATRGRNDNYVGRSSRQIFQELNTKDLSCRQNRVGSIHLQHGVVLKNSKNTIHKPSNICMQVEPHSRVASKVSKHARILLHSSNPKEDSSRKSNSDFNEWNIDSDKKLPNAMHGIKSNCCEMRLDSPSETTAPKFTMGNCPSESGRSTNCTVGALPLQKRGLGTSHQTNDAIGTTPGPLLPGSGSAQADLVAVEWNHSFQKLCSAEMLLTEMFRVVGDAYQVQVSADAHLAAGHPITDLDTFIYLATPVIGHVPCMKGSNCSKDQLVNDSICQQNLSNISLRSIWEWYEEPGCYGLELFGWSRKSMNHSFGIGGGETSNTGSSLCSHLVSARLLGPFEHSMCFAGLTSSIQCYPNGESQ

SEQ ID NO: 201240 - protein, 39 aa, Oryza sativa
  Clone ID: PAT_MRT4530_96635C.1.pep
KVDKPSRQIEVAVHDKYTRKYFNVSSSCYPIASVLDPTC

SEQ ID NO: 201241 - protein, 45 aa, Oryza sativa
  Clone ID: PAT_MRT4530_96636C.1.pep
RPTTAGARWLGRAAARACCKAYVCSPVVRRNWQEPLQAAGTVNCV

SEQ ID NO: 201242 - protein, 112 aa, Oryza sativa
  unsure (1)..(112): unsure at all Xaa locations
  Clone ID: PAT_MRT4530_96637C.1.pep
RIAHLEQTDTERISSSRLFLALKEGKLAMANHLLGRPYALRGTAVQGQQLGRKLGFPTANLCLPADKLWPKYGVYAGWVNLNALDAPIPAVINLGDRPTVNGQXPSAEVHLL

SEQ ID NO: 201243 - protein, 116 aa, Oryza sativa
  unsure (1)..(116): unsure at all Xaa locations
  Clone ID: PAT_MRT4530_96638C.1.pep
MHKPFLRLYSGRHRAHARAFLDRSVGRELARPAMAAVPEXALRHGAGRPXPAVGVGTADSAATSPETKRGAALAXXEVGFRHFDTAALYGTEAPLGKASAEATRRGXLVASREEVF

SEQ ID NO: 201244 - protein, 245 aa, Oryza sativa
  unsure (1)..(245): unsure at all Xaa locations
  Clone ID: PAT_MRT4530_96639C.1.pep
MATNGSSPRARETESSLEKVKRQLSSGSGRYLLQGPLLKRSETLRKWNERWVILDPTSGKMEYKIRRNETAIKGTIIFDASSTITLSPVNFQGMPKYDGCCFYIGTPQKKDYFLCAETPGAAKAWVSTLLATQLVLQAHKEAVNSLAGNGSPATLGTVATAVANANATALEATKEIEAAMKASMRAALGLGAINPKEGQLDDLTIMXKETLRXKDEELAEFGQGYSLLGMLQIKEIAXKINRVLQ

SEQ ID NO: 201245 - protein, 36 aa, Oryza sativa
  Clone ID: PAT_MRT4530_9663C.1.pep
SWVPSPVGAWSRESTKPFRSADVLMVIGDVLDETLV

SEQ ID NO: 201246 - protein, 507 aa, Oryza sativa
  unsure (1)..(507): unsure at all Xaa locations
  Clone ID: PAT_MRT4530_96640C.1.pep
MAAAPMSFAFTLLAACISFLHHAPAAAAAAPANQTAGFLDCLAASLPAGVVYTHASRSYQSVLESSIKNLLFDTPATPTPVAVVEATDASHVQAAVRCGVGHGVSVRSRSGGHDYEGLSYRSLDAARAFAVVDMAGGALRAVRVDVLGRAAWVGSGATLGEVYYAIANKTSRLGFPGSVGPTVGVGGFLSGGGFGLMLRKHGLASDHVLDATMVEAKGRLLDRPAMGEDXFWAIRGGGGGNFGIVLSWKLRLVPVPATVTVFTVHRSRXPNQNAQFESLYLGTRAGLVAAMADAFPELNVTASDCIEMTWVQSVLYFAFYGTGKPPEMLLDRGTGRPDRYFKAKSDYVQEPMPSQVWETTWSWLLKDGAGLLILDPYGGEMARVAPAATPFPHRQALYNIQYYGFWSESGEAAAAKHMGWIRGVYGEMEPYVSKNPRGAYVNYRDLDLGVNDDGDGGGGVARARYEKATVWGRAYFKANFERLAAVKAKVDPDNYFKNEQSIPPLPS

SEQ ID NO: 201247 - protein, 168 aa, Oryza sativa
  Clone ID: PAT_MRT4530_96641C.1.pep
NLAGGRPGEGGGGEACGRRGRGAATTTTPGGGGGCPPLPSPSLPDLAGGRLGEGGGGVDGDDDGSGRQRQRLPSPPRSGRREAGGGRRRRGMWSPGHRAAAPRGPGRRRRRPSPSCRPLEARTCAGPPWPGSAVPTVHLPSSALCYLLFSFFSSLLFSVRRRRHKGFP

SEQ ID NO: 201248 - protein, 83 aa, Oryza sativa
  Clone ID: PAT_MRT4530_96642C.1.pep
QHLGWIYRASTGRHEPPAPHRLSKNQEQNRERRMKNWIERRSASFILSKETEEGLSPPLRRGRSGQESARLRRSKEKNAGGGR

SEQ ID NO: 201249 - protein, 107 aa, Oryza sativa
  Clone ID: PAT_MRT4530_96643C.1.pep
KKFSAQGKKGKKKKGVSKRGSKKDDKKGTNRMVGTLTKSFSQRGGPKIFTPEQGPGSQTGKGGLWGGETGGAHLGGHQGRTRVPRKPFKTGGPLRKKKGGLTVPGQK

SEQ ID NO: 201250 - protein, 33 aa, Oryza sativa
  Clone ID: PAT_MRT4530_96644C.1.pep
MLRASLKMVFLFLCSRSDELLVSSWRFRHMSFY

SEQ ID NO: 201251 - protein, 359 aa, Oryza sativa
  Clone ID: PAT_MRT4530_96645C.1.pep
MDNLLALSTPRLHFVAALNHPSSFPCGSSPLPSLIQCRRRLTNRPATVRLSPAPSPCPMSPPPLNTVRCGRYTSTPLDIAACPPLSVLSICRRPRLRIFAIRNAMQRMGIAMVSCGQRGEMVAAIVAVSCGQRGRDGSNNGWQHELESPDSCWAHPSICLFYRLACSDLVPSSGLCTQELLARFPLHFSLSSISDDEQPITMEIIYFFYKVLMCYTFLLHFSLSSIGNDEQPTTMEINYLYKLREGKIEEALLATVGRTMLVCIGGTHVLHVRFPLHFSLSSIGDDEQPTTMEINYFYKILEKISMVVQIGDDEQPKTMEIKRVKIVVHVASITSMILAFRLMFIIYVPMSYVKPLSYR

SEQ ID NO: 201252 - protein, 48 aa, Oryza sativa
  unsure (1)..(48): unsure at all Xaa locations
  Clone ID: PAT_MRT4530_96646C.1.pep
HASGSISFMVEFLSVEALNIGTVVLPQLHIPPSIHFNTKIFLLFLXXL

SEQ ID NO: 201253 - protein, 151 aa, Oryza sativa
  Clone ID: PAT_MRT4530_96647C.1.pep
MTCLSNSRHGCCLFVRPMLVLVMVLELTILIPPASCLASPVRNISAIFIFGDSTVDPGNNNNRLTPSKANFPPYGQDFPGGVATGRFSNGKAMRDMIASKLGVKELIPPYLGDGLQLDDLLSGVAFASGGSGYDPLTSKITTAISSSQQLQ

SEQ ID NO: 201254 - protein, 761 aa, Oryza sativa
  Clone ID: PAT_MRT4530_96648C.1.pep
MATAVVPGICHAVALMWLLLVLFCWAPGLTSAADTAAYIVHMDKSAMPRAFASQASWYESTLAAAAPGADMFYVYDNAMHGFAARVTADELEKLRGSRGFVSCYPDDARAVRRDTTHTPEFLGVSASSGGLWEASEYGEDVIVGVVDTGVWPESASFRDDGLPPVPARWKGYCESGTAFDAGKVCNRKLVGARKFNKGLVAATNLTIAVNSPRDTDGHGTHTSSTAAGSPVAGASFFGYAPGTARGMAPRARVAMYKALWDEGTYPSDILAAIDQAIADGVDVLSLSLGLNDVPFYRDPIAIGAFAAMQRGVFVSTSAGNDGPDPGFLHNGTPWTLTVASGTGDREFAGIVRLGDGTTVIGQSMYPGSPSTIASSGFVFLGACDNDTALARNRDKVVLCDATDSLSAAIFAVQVAKARAGLFLSNDSFRELSEHFTFPGVILSPQDAPALLQYIKRSRAPRASIKFGVTILGTKPAPVVATYSSRGPSASCPTVLKPDVLAPGSLILASWPENVSVSTVGSQQLYSRFNVISGTSMSCPHASGVAALIKAVHPEWSPAAVRSAMMTTASAVDNTNAPIKDMGRANRGATPLAMGSGHIDPNRAVDPGLVYDAGADDYVKLMCAMNYTAAQIKTVAQSPSSAVDCAGATLDLNYPSFIAFFDPGATAPAARTFTRAVTNVGDAPASYSAKVKGLGGLTVSVSPERLVFGRKHETQKYTVVIRGQMKNKTDEVLHGSLTWVDDAGKYTVRSPIVATTASSAPL

SEQ ID NO: 201255 - protein, 233 aa, Oryza sativa
  Clone ID: PAT_MRT4530_96649C.1.pep
MRPKKLCRLLIKLLSDLLLKESGKYEYVHPPPMETQAADLPELSQDMLMEIFALLEIPDLVRAGSVCQSWRSAYTSLRDMGQYKQQTPCLLYTTESSGEKVSCLYSLVEKRAFRLTLPGTPLHKRLPIGSSHGWVVTADELSELHLVNPITGQQIALPPVITIEQVKPIFNDIGVVQGYKIGWYCAEKDYGDPYGEPSPILTPSELRDHLYYKAFVFPDPLTRSFIVVVIHYP

SEQ ID NO: 201256 - protein, 61 aa, Oryza sativa
  unsure (1)..(61): unsure at all Xaa locations
  Clone ID: PAT_MRT4530_9664C.1.pep
VVESYREPNVAPXPSATMSSQAAVRXRSQPAAPPPQTPPVTPLSGDXSPDXLTXXGDATTR

SEQ ID NO: 201257 - protein, 90 aa, Oryza sativa
  Clone ID: PAT_MRT4530_96650C.1.pep
MREAETKAGPQYKGRLASRSVVDAATGGGFGRIRAVHESRLPAAHRHATRVLRVHTKRRPPTQARTRDEATTNAKEKKKNISLSFVVATY

SEQ ID NO: 201258 - protein, 438 aa, Oryza sativa
  Clone ID: PAT_MRT4530_96651C.1.pep
MPAGINYLAGTGMGSHYPCPSCPTGIPKRDRRRRRADRAAAEPSRIESNRIETLLLPIQAAAAAAIAGGMNKRPRDEPSSSFASAPKRQYGAGGGGYGGHGYSEERSSARRVADHYSARSNQTLEERENSPIIHLKKLNNWIKSVLIQLYAHPGDCVLDLACGKGGDLIKWDKAKVGYYVGVDIAEGSIKDCMTRYNGDTDQQRRKKFSFPARLICADCYEARLDEHLYEDAPFDICSCQFALHYSWSTEARARQALANVSALLRPGGVFIGTMPDANVIIKRLRETDGMEFGNGVYWISFGEEYAEKKFPASRPFGIKYKFHLEDAVDCPEWVVPFHLFKLLAEEYDLELVLTKNFHEFVHEYLQKPEFAELMRRLGALGDGRQDQSTLSQDEWEVAYLYLAFVLRKRGQPPSQRRANNANRGKMFLTENDIDFLGV

SEQ ID NO: 201259 - protein, 40 aa, Oryza sativa
  Clone ID: PAT_MRT4530_96652C.1.pep
RHHARLFTGWCAGVVRDREAEPPRYVQAQLLRRARSPCRR

SEQ ID NO: 201260 - protein, 108 aa, Oryza sativa
  Clone ID: PAT_MRT4530_96653C.1.pep
CQEKHRVYHKKAKHGKELNKGKVTTMEKGISNPQTKQGGRPGGWAPKGGKNLGKEPQKGRKVFPGKKKSFGPPRDPLNRFSGGEFGGAKKNCKGAQKNFQKRGKPGGP

SEQ ID NO: 201261 - protein, 153 aa, Oryza sativa
  unsure (1)..(153): unsure at all Xaa locations
  Clone ID: PAT_MRT4530_96654C.1.pep
VPSFLHIFGLFMLRILNFHSFYXIFRDXRSNRQTTTTXRRPPPLSSRXEIGAATXQRTNSRGVDAEGILEAPTTNEERESXAGADXVCGGGXXGAGREPRXRPSRRRLAGDCLARGRTTTRRTVRRRSTGDDSYGGVPGSIGKEEGXRGDGVR

SEQ ID NO: 201262 - protein, 478 aa, Oryza sativa
  Clone ID: PAT_MRT4530_96655C.1.pep
MASAAVAVAPVVSDLVDFLNASPTAFHAVDEAKRRLKAAGFSQLSEREEWAGLQPGRKYFFTRNHSTIVAFAIGAKYAAGNGFHIIGAHTDSPSLKLKPVSKVTKGGYLEVGVQTYGGGLWYTWFDRDLTVAGRVIVREKKDGAVSYAHKLVRVQEPVMRIPTLAIHLDRNISSEGLKINNQNHLVPVLATSVKNEMQKLVAENGSESSESKNTKHHPLLLQLIAKEANCKPDEICDFELQLCDTQPSTVAGAMKEFIFSGRLDNLCMSFCSLKALIESTSSEESLAHESGVRMVALFDHEEVGSDSAQGAGSPAMLDALSRITGSFNSSNSRLLEKAIQRSFLVSADMAHALHPNYMDKHEENHQPKLHGGLVIKHNANQRYATNAVTAFIFREIAERHHLPIQDFVVRNDMGCGSTIGPILASGVGIRTVDIGAPQLSMHSIREMCAVDDIKHSYEHFKAYFEEFTELDSKVKVDC

SEQ ID NO: 201263 - protein, 436 aa, Oryza sativa
  Clone ID: PAT_MRT4530_96656C.1.pep
MGRRRRRRNRDAEFDMAEIDRMVPVMKLDRTRQPWLTVPGRSSCTCDCCNVTTKKKPSNKALIPAWLFRSDDDDDDHHEESAEEEEEDNQLQGLNKHLAEYRIGQYEIRGATIKRYPYTDGYELTEKLNAELPAGERRYTPTFVLEGSSHRDGFFGLSWHSEYRMHETAPTSLPRSRFTTPHPRWDYEADNMLQLCSLSLAAGAGSGGDGRRLLVYGIVAARDDMEGLPNFVFNRTRDNAQEVTLSSPALELSSPLRGISAFEHVLLEFDLKLKNTAGDGADADADDVLVDACKEFVDRTITCSAGRLLRSRIEGPICSLDMDYMFIKSGVEAAVEVFLGDSCASCFQSVAAVYRAIAGDGDGGGDGIVIHEESIPLPPKLMLAADTATAQAAAVATVVAVPSAGELTVTLSFATARHRTRTSPPLSYLFARSIPI

SEQ ID NO: 201264 - protein, 405 aa, Oryza sativa
  Clone ID: PAT_MRT4530_96657C.1.pep
MEAKDVSPLVTVPPAPAAAAPPPAAAPAPPPSQPPPPPLPFAQQAPPPAANPAAAPMRLSFDQMAGKAPGGEQQHHHHPGPMLYAAAPAGGAAPPPQGGNVMGMGELMRKKRGRPRKYAPDGSMALALAPISSASGGAAPPPPPPGHQPHGFSISSPASDPNAKRRGRPPGSGKKKQFEALGSWGIAFTPHILTVKAGEDVASKIMAFSQQGPRTVCILSANGAISNVTLRQPATSGGLVTYEGRFEIISLSGSFLLAEDGDTRSRTGGLSVALAGSDGRVLGGCVAGMLMAATPVQVVVASFIAEGKKSKPVETRKVEPMSAPPQMATYVPAPVASPPSEGTSSGSSDDSGSPINHSGMPYNHSGQQQQHQQHQHMPPAYASGGWSLSAHHQNRHDSDMKMMSN

SEQ ID NO: 201265 - protein, 469 aa, Oryza sativa
  Clone ID: PAT_MRT4530_96658C.1.pep
MGRRRRRRNRDAEFDMAEIDRMVPVMKLDRTRQPWLTVPGRSSCTCDCCNVTTKKKPSNKALIPAWLFRSDDDDDDHHEESAEEEEEDNQLQGLNKHLAEYRIGQYEIHIGSQSSISETVPESKNTYILGQMEYMNISCLAGGATIKRYPYTDGYELTEKLNAELPAGERRYTPTFVLEGSSHRDGFFGLSWHSEYRMHETAPTSLPRSRFTTPHPRWDYEADNMLQLCSLSLAAGAGSGGDGRRLLVYGIVAARDDMEGLPNFVFNRTRDNAQEVTLSSPALELSSPLRGISAFEHVLLEFDLKLKNTAGDGADADADDVLVDACKEFVDRTITCSAGRLLRSRIEGPICSLDMDYMFIKSGVEAAVEVFLGDSCASCFQSVAAVYRAIAGDGDGGGDGIVIHEESIPLPPKLMLAADTATAQAAAVATVVAVPSAGELTVTLSFATARHRTRTSPPLSYLFARSIPI

SEQ ID NO: 201266 - protein, 147 aa, Oryza sativa
  Clone ID: PAT_MRT4530_96659C.1.pep
ALGWQATAGRTSMQRCAASTQWFNERISLARYAHVPLGNFELDWLLFTADVFFSRALRDQQQKVQCPRAVPCNLSIDLPDQRSWEHYGATASGNSGGDQNRIETAPIEMTTTVWGPACPFPVHDIMHERFGLGPTTLSLRPPHRRLR

SEQ ID NO: 201267 - protein, 142 aa, Oryza sativa
  Clone ID: PAT_MRT4530_9665C.1.pep
MSSLPGSHDLGQIILCTARHEPIDDGHLEPVNVYHQLTLIDMRGREGGGGGAWKSFYSEGKQKSQKVRSGRFRRHADPSSRSPTQITKKFTDFPPKGAALTTAAATDSPQQQISTPMVLPLLLLRWFIAVRSYATSRDKSTA

SEQ ID NO: 201268 - protein, 66 aa, Oryza sativa
  Clone ID: PAT_MRT4530_96660C.1.pep
QQLNHFNRGPEKQLKILRGLNPAGCSSLIFLDGHSLGNLVHSEQIWQHPAQFSERPYHNLEQPKNP

SEQ ID NO: 201269 - protein, 226 aa, Oryza sativa
  unsure (1)..(226): unsure at all Xaa locations
  Clone ID: PAT_MRT4530_96661C.1.pep
SHRRRLHPPTTIALLPLRTTHAVLAPRHHPRRPSTAPVSLPPPPRCTXRPPEPPGTPLITTVPAYYHHPLLPVGSSPSPPPSPLASHRRRRGCAPTVDVVVIAPFYLQTSPPPPPRCRVSLPPARGLAPRATLGXPPLHLGRPPPPRRHALTPLSRGDPGGRRPDLGHPTTFTSTPPPKPTSPPPRXSPPPPPDLDGRVPDLAGGAASPSWRLPYGRSRGRELRDL

SEQ ID NO: 201270 - protein, 58 aa, Oryza sativa
  unsure (1)..(58): unsure at all Xaa locations
  Clone ID: PAT_MRT4530_96662C.1.pep
NQANXMKEVPXGTXEXLVHDXGMKXDXNKXVNSXASDFXXXXHRXXXLQXSASMYXPS

SEQ ID NO: 201271 - protein, 45 aa, Oryza sativa
  Clone ID: PAT_MRT4530_96663C.1.pep
MAYHTCSKKAEASCPWNREKSSPRAGTALASSIFEWAAKPTLAKT

SEQ ID NO: 201272 - protein, 742 aa, Oryza sativa
  Clone ID: PAT_MRT4530_96664C.1.pep
MERRDNFLQPPAAAAAPAAGGGKGLPVPATGDATNLTSSSSSTSSLTLSPPDFLRQVQAALKRHRPTGSMQSNQPRATRVLVSRGEGSTKAVANPSVAQNPEGKVMQQRRGLLGASRLRNAAPDQNKAVVSSQDELLLTTPLTLGTITDTHDQNGGQNHQPKSDTDLLVDRKKSSMEVSSSQMASANALVGEDFKKDLFYLTSDPQLTSQTGDNFPVAQVADDQGKNHKEIGIASAAVEMDIKYDAANLSRRIDEACDQNHGEPMTRCSAMGSSVTAVSLYSGPTIQSKSAAQIDQYASPAQMPQCGRESSGVSGHGSQKLHGVAMNHADCNTNKQQVDTNGGMDKPVSSSAVCLPSQGLSGNDQSLSAKDDGAPRRSKVEKECRKKNYDPDVFFKVNGKLYQKLGKIGSGGSSEVHKVISAECTIYALKKIKLKGRDYPTAYGFCQEIEYLNKLKGKSNIIQLIDYEVTDKSLLQDDSLSPRDGRIKDDHYIYMVLEYGEIDLANMVAQEWKKRNTSNMKIDENWLRFYWQQMLKAVNTIHEERIVHSDLKPANFLLVRGALKLIDFGIAKAIMNDTTNIQRDSQIGTLNYMSPEAFMCNEQDSGGNVIKCGRPSDIWSLGCILYQMVYGKTPFADYKNFWAKFKVVTDKNHKIKYEPVDNPWLIDLMQRCLAWDRNDRWRIPQLLEHPFLVPLVPRDLPSIDQDPCRLLMERVRVHWANPKLHSFIAELEKDQCRPATQM

SEQ ID NO: 201273 - protein, 38 aa, Oryza sativa
  Clone ID: PAT_MRT4530_96665C.1.pep
MAYRTGHDMAKERLHSQLALYAVDKMVELKETKDSIVE

SEQ ID NO: 201274 - protein, 782 aa, Oryza sativa
  Clone ID: PAT_MRT4530_96666C.1.pep
MATLRHLAAVLLILFAAASPAAAAAREQSTYILHLAPEHPALRATRVGGGGGAVFLGRLLRLPRHLRAPRPRLLYSYAHAATGVAARLTPEQAAHVEAQPGVLAVHPDQARQLHTTHTPAFLHLTQASGLLPAAASGGASSPIVGVLDTGIYPIGRGSFAPTDGLGPPPASFSGGCVSTASFNASAYCNNKLIGAKFFYKGYEAALGHAIDETEESKSPLDTEGHGTHTASTAAGSPVTGAGFFDYARGQAVGMSPAAHIAAYKICWKSGCYDSDILAAMDEAVADGVDVISLSVGAGGYAPSFFRDSIAIGSFHAVSKGIVVSASAGNSGPGEYTATNIAPWILTVGASTIDREFPADVVLGNGQVYGGVSLYSGEPLNSTLLPVVYAGDCGSRLCIIGELDPAKVSGKIVLCERGSNARVAKGGAVKVAGGAGMILVNTAESGEELVADSHLVPATMVGQKFGDKIKYYVQSDPSPTATIVFRGTVIGKSPSAPRVAAFSSRGPNYRAPEILKPDVIAPGVNILAAWTGESAPTDLDIDPRRVEFNIISGTSMSCPHVSGLAALLRQAQPDWSPAAIKSALMTTAYNVDNSSAVIKDLATGTESTPFVRGAGHVDPNRALDPGLVYDAGTEDYVSFLCTLGYSPSIISLFTTDGSVANCSTKFPRTGDLNYPAFAVVLSSYKDSVTYHRVVRNVGSNANAVYEAKIDSPSGVDVTVSPSKLVFDESHQSLSYDITIAASGNPVIVDTEYTFGSVTWSDGVHDVTSPIAVTWPSNGRAASM

SEQ ID NO: 201275 - protein, 116 aa, Oryza sativa
  Clone ID: PAT_MRT4530_96667C.1.pep
FFFGFTPPFCLFKKKTQHPFLLIRFKTRPKIHPPGKNLTFFPILGQPNTGAQPNPTFFRDQDRPLQARGHTDTLFGKDPHPYKPRQLNLKPKPPMGTRAGRASLAGDKGPGYCPHP

SEQ ID NO: 201276 - protein, 354 aa, Oryza sativa
  unsure (1)..(354): unsure at all Xaa locations
  Clone ID: PAT_MRT4530_96668C.1.pep
ASTASPVVGVLDTGIYPIGRGFFTPTDGLSPPPASFSGGCVSTASFNASAYCNNQLIGAXALGHAIDETEESKSPLDTXVGHGTHIASTAAGSPVTGVEFDYAHGQAVGMSPAAYKICWKSGCYDSDILAAMDEAAADGVDVISLSVDAGGYAPSFFRDSIAIGSLHAVSKGIVVSASAGNSGPXEYTATNITPWILTVGASTIDREFPADVVLGNNQVYGGVSLYSGEPLNSTLLPVAYAGDCGSRLCIIGELDSTKVSGKIVLCECGSNARSPAASGAHPRAQESRLVAPTGTTNPKKHAGSHVCASPPLSPRYLHAFLSHLRLLLSLQMRPPLPFLLLLPLPSPLCRRRRD

SEQ ID NO: 201277 - protein, 94 aa, Oryza sativa
  Clone ID: PAT_MRT4530_96669C.1.pep
FVLAIKITLEKNVFNSHFHFICSTFSESNTIIFCNLNQKKSSLPNNKTSKVVAPNNNMVIHWMPNSRALFSFSNSASLPMVKKPSALPPSHAVN

SEQ ID NO: 201278 - protein, 86 aa, Oryza sativa
  Clone ID: PAT_MRT4530_9666C.1.pep
RFSNNNNNNNNNNNNNNNNNNNNNNNNNNNNNNNNNNNNNNNNNNNNNNNNNNNNNNNNNNNNNNNNNNNNNNNNNIVIHCRLWIT

SEQ ID NO: 201279 - protein, 105 aa, Oryza sativa
  Clone ID: PAT_MRT4530_96670C.1.pep
MGKRKSKAKPPPKKRMDKLDTVFCCPFCNHGSSVECRIDLKNLIGEASCRICLETFSTSVNALTEPIDIYSEWIDECERVNNPEEDNANHYEDDNASRYRYDEEE

SEQ ID NO: 201280 - protein, 58 aa, Oryza sativa
  Clone ID: PAT_MRT4530_96671C.1.pep
MDEALGGIDVSGRYTCGHRLKEDLIKAESEAEIEFRSRAGIGWNPDRLRLGSAGSESG

SEQ ID NO: 201281 - protein, 145 aa, Oryza sativa
  unsure (1)..(145): unsure at all Xaa locations
  Clone ID: PAT_MRT4530_96672C.1.pep
MADDEPQQMDAEVEQEAPAPVEEEVPLDPTXALKAVXRXSLFHDGLARGLHEAVKALDRRQAHLCVLSSSCDEPVYVKLITAXCNEHQIPMIKVEDSKILGEWXGLCRYNADGNPVKVVGXSCVVIRSWGEETAARQYILQHLKG

SEQ ID NO: 201282 - protein, 279 aa, Oryza sativa
  Clone ID: PAT_MRT4530_96673C.1.pep
MGSDGHVSLAKLSGCACEPLDWSWTEDPNPHQQNYADIHAPVGYYVFGFGYRDMDGTKVHKAWRSNYADQGYGEGDVLGFYIHLPDGELYEPKQPFLVHYKGLPFRAEAPKAAEQKTPDPVPVAGPELGGPRQERQRTGSGRSELKTWFSRLLHAGAAGSAAALAAAGNGLSSRRLRSSSAVEMRRERERRRAREQQPRCGEVAGGTAAECVAVFCCFPFAVVELIVLAVVRIPAALCRRAVQRKRRGHAAAVRGPRRGEARSTANSSRHTVVDVKHEA

SEQ ID NO: 201283 - protein, 71 aa, Oryza sativa
  Clone ID: PAT_MRT4530_96674C.1.pep
KCEVQRMPKRIEPSNKLKKKSPNCYFLANRIVVEREFSSVPQVANNWYCRSDASFRYRNTSPSHLTIFFCR

SEQ ID NO: 201284 - protein, 433 aa, Oryza sativa
  Clone ID: PAT_MRT4530_96675C.1.pep
MAGKQGDGREEDGAKVGLPALDISLAFPQATPASIFPPSASDYYQIDDLLTTEEQSIRKNVRAIMEKEIAPIMATYWEKAEFPFHAIPKLSSLGVAGGTIKGYGCPGLSITASAITMAEIARVDASCSTFILVHSSLAMVTIALCGSEVQKQKYLPSLAQLTAVGCWALTEPNHGSDASSLITTATKVPGGWHIDGQKRWIGNSTFADVLVVLARNANTKQLNGFIVRKGAPGLKATKIENKIGLRMVQNGDIVFNKVFVPEEDRLPGVNSFQDISKVLAISRVMVAWQPIGISMGVFDVCHRYLKERKQFGVPLVAFQLNQEKLVRMLGNIQAMLLVGWRLCKLYESGKMTPGHASLGKGWTSRMAREVVSLGRELLGGNGILADFLVAKAFCDLEPIYSYEGTYDINSLVTGREITGIASFKPAALAKARL

SEQ ID NO: 201285 - protein, 81 aa, Oryza sativa
  unsure (1)..(81): unsure at all Xaa locations
  Clone ID: PAT_MRT4530_96676C.1.pep
FLCWRNHQRCRQMLAHDHDESYQRNQEPISLIISSSSEPNVHXFDQHIEPQQLLHHNHNPLLQRTNTKIGRPGPVLFGISG

SEQ ID NO: 201286 - protein, 43 aa, Oryza sativa
  Clone ID: PAT_MRT4530_96677C.1.pep
PVFFAPVIETENGIGGSLRSRRIVACLRCNHLLYCCSVNYAGS

SEQ ID NO: 201287 - protein, 56 aa, Oryza sativa
  Clone ID: PAT_MRT4530_96678C.1.pep
MDRRRKRMSMRIKQRQVDENEEVAGEVLVGRSAPTASTPSPRSNMQPHRKFDKVDG

SEQ ID NO: 201288 - protein, 62 aa, Oryza sativa
  Clone ID: PAT_MRT4530_96679C.1.pep
MAVERPVQPTLVTEHDTMRFTQVDVTLKAGSGVCGPPPALPPPMRPPRDLRTEVPEKFLKKV

SEQ ID NO: 201289 - protein, 58 aa, Oryza sativa
  unsure (1)..(58): unsure at all Xaa locations
  Clone ID: PAT_MRT4530_9667C.1.pep
VEKSSDPIGDQGAEGXLFGFPPFPKXPISPSXARSGDRLTRASKVLEQLSGQTPVFSK

SEQ ID NO: 201290 - protein, 305 aa, Oryza sativa
  unsure (1)..(305): unsure at all Xaa locations
  Clone ID: PAT_MRT4530_96680C.1.pep
RRAARGRPCKFPGRPSPPPRTPPQAALTPPPERPLPEPTPSPPLSLXPPPSPSPSSTPDPAASPPAXPAAPPHGRRATTPPPPCKPVSQSGPPQRSHPSXQQPPSARRPSARAVLPSPATPAITTLAIRESDPAVGTPDPGGAPPEPPPPXVPLPAAGPPPLPSRIAPSXPPSPPPAAXPPPGRAAAPDPAMGVPDPPPPHTAPPPPLLPAPRPTPVVPSVASAVAADAVEYASLPCPAMTFYPPFSTLFGNQKMEFLLLGGNHNNAVVAVDQTCRTVLYDPGEHAVRTMPALPYQSGCLPLPSP

SEQ ID NO: 201291 - protein, 153 aa, Oryza sativa
  Clone ID: PAT_MRT4530_96681C.1.pep
IRARPQIRRHLHRPTPAAPPHRRHATTPLPPCKPASQSGPPQRSHPSGSSPHRRSSTRSGGKHCRRQPLPRRPAARRRTHRPRRRRPPVAHAPSFRTRRPPVRRGRRPITTLAIRESDLAAGTPDPGGAPPEPPLPCQVPLPAAGSPPPPLAA

SEQ ID NO: 201292 - protein, 67 aa, Oryza sativa
  Clone ID: PAT_MRT4530_96682C.1.pep
MEAGKKSFPLDTWHGPRGGVGVGMPRPIGTLPGGVGAGMPRPIGTLPGGGTLLIIAPYPPAELTTSR

SEQ ID NO: 201293 - protein, 296 aa, Oryza sativa
  unsure (1)..(296): unsure at all Xaa locations
  Clone ID: PAT_MRT4530_96683C.1.pep
PAPRTLANRRNRHRPPAAPGRWDPLDRRGARPPLRPRAPPPAPRRPAPPAPLRDAARPGPGRGAARPPPRPPPPPARRAPLGPRPAAPWPRAPPGRGPPLRAXARASARPPAPRPPAAPAPRAAPGAGXGXXGGPLPSPPPPHFPSGPASQPPPTATAPRGPPPASRPPELTGQREPASLPRAPPPPPPAGRLRRLLIGRRSWXPPGPHRLPPWLPSPPPPPHPMRSPMPLPPLRLTVDNPLPSASSFRSLFISSIAHCLIFVSRRQLLSRFLTPYLFFSLLRLLISSPVCARAVG

SEQ ID NO: 201294 - protein, 94 aa, Oryza sativa
  Clone ID: PAT_MRT4530_96684C.1.pep
MAWGVRGGRRRALARARVRATILGGVHGAVSATWPVPEWTAEISSPTSPNPNEVLAVLTSGERSSWVRERLAATAGGRRRGRARRRAGEARGTL

SEQ ID NO: 201295 - protein, 54 aa, Oryza sativa
  Clone ID: PAT_MRT4530_96685C.1.pep
FFFFFDSNAYGEENTSNVRVTNVAVLTTAVYVQEVHLLSTYIYECIVYVESYSI

SEQ ID NO: 201296 - protein, 97 aa, Oryza sativa
  unsure (1)..(97): unsure at all Xaa locations
  Clone ID: PAT_MRT4530_96686C.1.pep
ISGAQSQLVCSGCRNLLMYPAGATSICCAVLPVCTXIHSEQKSSCNVHENKERLKGNTNGFRAPQQCACRVDGVPALRSLEKKYTLKLLWSYLHYCV

SEQ ID NO: 201297 - protein, 92 aa, Oryza sativa
  Clone ID: PAT_MRT4530_96687C.1.pep
MCSCFVVAPFAPPGSPPRALSSATASTPTLKPPASPTAAEGAPSSTSSPAIRFRSSPSTSSTTSSSTTTSASPTASSMTASLLSSQASGRRT

SEQ ID NO: 201298 - protein, 51 aa, Oryza sativa
  Clone ID: PAT_MRT4530_96688C.1.pep
ETYPLPDTGARHAAAGRGGSGVRRRPQRVNVVLWTHWPQHALKLYPEPKLP

SEQ ID NO: 201299 - protein, 78 aa, Oryza sativa
  unsure (1)..(78): unsure at all Xaa locations
  Clone ID: PAT_MRT4530_96689C.1.pep
REGGAXAAGGTRAGDAAVPVDDALXXSISLSLSPSPAVLAVHRRRRRCCRLRRRCAECTGRERERESEVFNLGRRAMR

SEQ ID NO: 201300 - protein, 84 aa, Oryza sativa
  Clone ID: PAT_MRT4530_9668C.1.pep
WVFFFFFFFFFFFVFFRANAGVAPGFPPRFLPGARRRPRCAYLELGLIGGGGYSCVKPVCNCNSPPLSHRMHTGGILGGPLGGT

SEQ ID NO: 201301 - protein, 452 aa, Oryza sativa
  Clone ID: PAT_MRT4530_96690C.1.pep
MAGDGGNGAADGGGEHLELDFFPSPLLDNFDVLELLDLSVLGDVDDDGAPPAPAPVQMSVDGAGGGRINKPGSSVDDLVDWSTAFGNNCSKIDGEYGGASTSSSAAPALAPPQEDYCSGCQVLREVVHSNGLEITKLCIHGGVASGEFYHAILDVYRVSASAPAPALAHHSIINFRGRGYDWVKQYLTEYALRRAGGGFAVVQDSLSAFHDALCTTMAPCSSHVGDDDAHRRASSSAAAAAEERTNGNGDHGQLVVHNAAVLPMLESSRCLVAADQAATTNNNGSGDRRLVVLDTTAIQPPASGCILHMAFPSKSYQSSRPTTLPSRYQECTCNPVAYEMDGVRSSLAPICWPELLGYNVTNREKTKQLQLSDIAPYFELPIAKAAKKLDICATALKGICRKHGVLRWPYRKVRSIDRQIATLRRSGNGDATRNEIETLIASRRRIVAGLDQ

SEQ ID NO: 201302 - protein, 83 aa, Oryza sativa
  Clone ID: PAT_MRT4530_96691C.1.pep
GLFGTAPAPAPPLLELELSQTVSAPPELGVETIPYIKNLPKEITLDKESGKGLAVARPAGWTGRNERDGDGGGAHLSEDERMR

SEQ ID NO: 201303 - protein, 257 aa, Oryza sativa
  Clone ID: PAT_MRT4530_96692C.1.pep
MGGRKKPGSKKMPTPAVMRIRSPPPDPHRRARAAPRRCIPPLASDSESSASSPTTSPAAAAAALPGIAQARHEFFAKHTVYHYGAPPTAQRNEQRESAGGCQSVRGGVRRQPADGLAAAAGRGHLRGFLLAPSRIGGGARGAVDAPGLIGDRFLDSGHGSLAGTGMDAPAGGERIGVRPMESSDDDSTFCSRCARAQRGAASATALVTTAVAAATSARCHSTTAGRDPGAATCVVDGAPPPPGGVYATTRTIGEISW

SEQ ID NO: 201304 - protein, 78 aa, Oryza sativa
  Clone ID: PAT_MRT4530_96693C.1.pep
GNGILGTAPLNHLGKVEPLFFKSGSDDPMRVYIVDPVCSPCFCGRSGRSNGVHLLLVTSGLTGCWYFFPWPLVCHKKK

SEQ ID NO: 201305 - protein, 93 aa, Oryza sativa
  unsure (1)..(93): unsure at all Xaa locations
  Clone ID: PAT_MRT4530_96694C.1.pep
MATSSTAAATSVVARAGLARPVGLXDEGEEDQEGEVQLLQGGRDTGGGRQGSRRVATGDGGDGGARDGARRREDVDGGHRXXXRAEQQPCGVD

SEQ ID NO: 201306 - protein, 103 aa, Oryza sativa
  Clone ID: PAT_MRT4530_96695C.1.pep
MRRRWNRPPIPTANASLFFTYNEATHPLTPPASSRRHVRALVAAAARAPTGRVRAAEAKLDRACCRNAELEEKVRQMRAEGQAWMGVAKSHEAVATGLHATLD

SEQ ID NO: 201307 - protein, 106 aa, Oryza sativa
  Clone ID: PAT_MRT4530_96696C.1.pep
KTMCDPSSRAFLSALDLNQRPSFPRPAMLIPPGMGIYSSSSCSSVFKQQSLKLFNSMLGLDYLPVKTESVSKAIVFGLVWFSTFCICPILYASFSIKTSTQIILFF

SEQ ID NO: 201308 - protein, 57 aa, Oryza sativa
  Clone ID: PAT_MRT4530_96697C.1.pep
MDHDPKERLLLTSRAEEVVADNGAHRRAAPDVGGGGGGVDIDRHGLKRRGGGPQSWG

SEQ ID NO: 201309 - protein, 183 aa, Oryza sativa
  Clone ID: PAT_MRT4530_96698C.1.pep
VMHKVQDEVRQTLAVRDRVTEDAISNLNYMHLVIKEALRLHPPVPLLLPRECRNTCQVLGFDVPKGAMVLVNAWAISRDPQYWDEPEEFIPERFEDSNIDFKGTNFEYTPFGAGRRMCPGIAFGLANVELMLASLLYHFNWQLPDGMDTADLDMTEEMVVSARRLHDLLLVPVVHVPLPVASS

SEQ ID NO: 201310 - protein, 44 aa, Oryza sativa
  Clone ID: PAT_MRT4530_96699C.1.pep
INKTNQTEIRLTLTKTLENSAADRQGRRLIYSRLIPPPLRVWRT

SEQ ID NO: 201311 - protein, 112 aa, Oryza sativa
  unsure (1)..(112): unsure at all Xaa locations
  Clone ID: PAT_MRT4530_9669C.1.pep
MATPLVAGLSVAAAAMGSRYMLQAWQAFRTRAAMPRVRRFYXGGFEREMXRREAALILGVRERAAFDKIKEAHTRXVMVANPPDAGGSHYIASKINEAKDMLMGKGKSGSMF

SEQ ID NO: 201312 - protein, 171 aa, Oryza sativa
  unsure (1)..(171): unsure at all Xaa locations
  Clone ID: PAT_MRT4530_966C.1.pep
GTYCGSVMPVTQHLGSEGDGAQVQYEATLAYSGAVAGGTRAELAGRTSSWSSVSYVLRPGVRPPTPRCPCLPSMGAASAMPTLPPADLLRHSRTATPTTAHSWPLYIAPXSLTTSICISCMSGCVPCCHSTKEVSATAFEDLNEAHSRRPEQGKVGELGHVPGSEDQGREA

SEQ ID NO: 201313 - protein, 495 aa, Oryza sativa
  Clone ID: PAT_MRT4530_96700C.1.pep
MFSLLIQSVDFTDDAAAAAATAVAAGETSGTSHPLSPRSGDPLPITTSASVTAPLELPGATSASPARNPKINYTRGILHLYRSSSSSSTASYASAVAATPSSSSSGPAAPQLASDCLLPPWRGTRLLVLAVPTHVSPDDFVRFCGPYIEHASDIHVVRDDGVEDRYSVLVEFEDQKSADGFYLDLNGWRFSSSEVEVCHVLFIVAVQYTPSTKPAVTPPVGSTELPTCPVCIGGDQVCQFCQKQSKNPTCSVCQTSGNLWICIICGFVGCGRYEEGHAIRHWKETQHCYSLDLETQRVWDYVGDSYVHRLNHSKSDVKHSKFKSKCKYSGDKCANCSCNDEEDIGGAIFSSKAETYYEARLSEAKKEKEQHISDAVDKAVNDKSKEIQQKIENAMLEKKKLADMNEKLTKNQDIWRRTLKEIEERERAQLKLKDDTIRDLEEQIKDFKFSIKLQKSIEKNKNADDLKGGLLVPLPMVPDSGTKGKRSSRTSKRRN

SEQ ID NO: 201314 - protein, 515 aa, Oryza sativa
  Clone ID: PAT_MRT4530_96701C.1.pep
MFSLLIQSVDFTDDAAAAAATAVAAGETSGTSHPLSPRSGDPLPTTTSASVTAPLELPGATSASPARNPKINYTRGILHLYRSSSSSSSTASYASAVAATPSSSSSGPAAPQLASDCLLPPWRGTRLLVLAVPTHVSPDDFVRFCGPYIEHASDIHVVRDDGVEDRYSVLVEFEDQKSADGFYLDLNGWRFSSSEVEVCHVLFIVAVQYTPSTKPAVTPPVGSTELPTCPVCIGGDQVCQFCQKQSKNPTCSVCQTSGNLWICIICGFVGCGRYEEGHAIRHWKETQHCYSLDLETQRVWDYVGDSYVHRLNHSKSDVKHSKFKSKCKYSGDKCANCSCNDEEDIGGAIFSSKAETIVDEYNRLLASQLETQREYYEARLSEAKKEKEQHISDAVDKAVNDKSKEIQQKIENAMLEKKKLADMNEKLTKNQDIWRRTLKEIEERERAQLKLKDDTIRDLEEQIKDFKFSIKLQKSIEKNKNADDLKGGLLVPLPMVPDSGTKGKRSSRTSKRRNQ

SEQ ID NO: 201315 - protein, 77 aa, Oryza sativa
  Clone ID: PAT_MRT4530_96702C.1.pep
MVRDGEKGRQPLVGSWASPPTGRPSPPMPPWPRGRLLLPKNEGRHDNKFHAATSFFFIHHYSNTLDCENRPPKAMPP

SEQ ID NO: 201316 - protein, 511 aa, Oryza sativa
  Clone ID: PAT_MRT4530_96703C.1.pep
MKLRMDPLEYLPVRFHFGGDFINNGRETFYIGGSEGMSYIKRDKVSLPEIVGHLKDHCEVIPGMLLQWLFPGKELADGLRVLIDDEVYNYMSNCVGEGGVADIYVETVMAEGSSESGSKEDSDFEDELQDISPADDEWDDEEDEDLFELNIGKEVLVIVSTPEKTKRDLEQVRAFRTPDKEKAMVVAEPSDKGKAVVVGKERPKKPVISDSDSDYVGGDSCSSEEDEEVQQIRKAYKEFKKKLKDGEVGNLDDVICEGSSRQTNSRALVQIEGDDSASPYDNSSADDDSYEEDSDGQLKEFKEAVVQLALDSKRFIRFIKDEGYRTRAKCDLATCPWACLLSKNSRTESWQIASLVDEHTCPPRKDNHLVTYKRIAQKYEKMITDNPTWSIQSMQSTVSEEMFANVSVGQCKRAKAFVFRKIYESTRGEYFRIFDYQLELLRSNPGSTVVVKLDTDQPSPIFKRIYICLAACKQGFLAGCTKVVQPDAPPTITSALISLYFHFTVLFCTAI

SEQ ID NO: 201317 - protein, 63 aa, Oryza sativa
  Clone ID: PAT_MRT4530_96704C.1.pep
SGVFSGYLRIMICRWSAGADWRSIPFWLCRPYATVNSSLLHMVCEYFGGECLRLLLCSIPNIC

SEQ ID NO: 201318 - protein, 372 aa, Oryza sativa
  Clone ID: PAT_MRT4530_96705C.1.pep
MLEGDLVGDSGEDGRRTPRRRVSCAQGNEGGTLKGDEEGSLRHGRGGHALHIGQHQLLVEEDEAKGLIVYCHYYVVFRLRMDPLEYLPVRFHFGGDFINNGRETFYIGGSEGMSYIKRDKVSLPEIVGHLKDHCEVIPGMLLQWLFPGKELADGLRVLIDDEVYNYMSNCVGEGGVADIYVETVMAEGSSESGSKEDSDFEDELQDISPADDEWDDEEDEDLFELNIGKEVLVIVSTPEKTKRDLEQVRAFRTPDKEKAMVVAEPSDKGKAVVVGKERPKKPVISDSDSDYVGGDSCSSEEDEEVQQIRKAYKEFKKKLKDGEIEGDDSASPYDNSSADDDSYEEDSDGQLKLVPTVPVLQGFIPAVLEMSL

SEQ ID NO: 201319 - protein, 892 aa, Oryza sativa
  Clone ID: PAT_MRT4530_96706C.1.pep
MSYIERDKVSLPEIVGHLKDHCEVIPGMLLQWLFPGKELADGLRVLIDDDVCNYMSNYVGEGGVADIYVEIVMAEGSSEFGSKEDSDFEDELQDISPADDEWDDEEDEDLFELNTGKEVLVIVSTPEKTKRDLEQVRAFRTPDKGKAMVVAEPSDKGKAVVVGKERPKKPVISDSDSDYVGGDSCSLEEDEEVQQIRKAYKEFKKKLKDGEVGNLDDVICEGSSRQTNSRALVQIEGDDSASPYDNSSADDDSYEEDSDGQLVRKKSKYPRFNVNRPIARLALGMKFDGKKEFKEAVVQLALDSKRFIRFIKDEGYRTRAKCDWATCPWACLLSKNSRTESWQIASLVDEHTRPPRKDNHLVTYKRIAQKYEKMITDNPTWSIQSMQSTVSEEMFANVSVGQCKRAKAFVFRKIYESTRGEYSRIFDYQLELLRSNPGSTVVVKLDTDQPSPIFKRIYICLAASKQGFLAGCRKVVGLDGFFFKGSTYGELLCAIDQQKGILNAVENWAPNAEHRNCARHIYANWKKKFSKKEWQKKFWRCAKAPNVMLFNLAKAKLAQETVEGARAIMNTDPKHWSRAWFRFGSNCDFVDNNICETFNKWIVQARFLPIISMLEAIRRKVMVRIQAQRTVMDKWVGSVCPNILKKLNAYIIDSSSCHAICNGMDKFEVKHQTHRFTVDLEKKTCSCRYWELSGLPCCHAIACIHFRTNCLDRYIAPCYSIYSFKKTYSYCLEPVEGMESWPKSDRPSPQAPSYVKMPGRPSKKDRRREPHEKPKATRVSTVGTVMTCRLCKKPGHNKASCLKRSQTQPNVQMASASTSTRARASPRTMEKTRTSPRNVAKTRTLPRNVAKTRTVAQTRTSPRASAKRTSATAGMVAVEQSRKKLKVRRSSG

SEQ ID NO: 201320 - protein, 95 aa, Oryza sativa
  unsure (1)..(95): unsure at all Xaa locations
  Clone ID: PAT_MRT4530_96707C.1.pep
XXXXGFNXAXISXXTNHXXXGGFYCXLIKXGXPPXGXFSVAXXLXLPHXQSXQETTXFPTLXXPPLXKFLXARGIXXFXXXGPXPXGTPLFXPFX

SEQ ID NO: 201321 - protein, 71 aa, Oryza sativa
  Clone ID: PAT_MRT4530_96708C.1.pep
LQALLHVQLGVETKGNPKHAFPSKETLRPDETQSDSNLPVRPATHRRSDRLSTGGLTGQDTAVRPAHSEET

SEQ ID NO: 201322 - protein, 165 aa, Oryza sativa
  Clone ID: PAT_MRT4530_96709C.1.pep
AQIHQPSSGLSCSSLDPPISSPKSSRVVISVFCCLFRSISSQPVRSSPPPSFAARSDRSKQHTGPASHGADAAGVRPRRGLLLRDRHGRHHGAGAAMASGGLRRLPLLGRRLRRRRPVRPPPRRVNTHTLTNSGRPNSTRIEIQSVILTLHFLPTAPSKKKDKKL

SEQ ID NO: 201323 - protein, 266 aa, Oryza sativa
  Clone ID: PAT_MRT4530_9670C.1.pep
LSVEICKASILLHLAVERESLQARAIFDARRGWHDAPRARHHAALPWRGGEAGEVVAADRAGGPLEQPPGDARRVERVPARQVRRRRLAPLAGRQAVQADPAGVAGARLQPDQPADERHGLAEHQLHRHLHARGEAVVAAGEAVVVVPPHRAVDPRGGVVVGHGRRPVAAGEVDAAELPHPGEHGPRHPPRLLVVEEDVAAGAVQHVLALRLQRELDAVVAHGLASAAEPPRPAPHLDVADEAHVRGALLQRRRPVVALQLLAAAP

SEQ ID NO: 201324 - protein, 86 aa, Oryza sativa
  Clone ID: PAT_MRT4530_96710C.1.pep
WFFFFLGWPIVAGLDGIILNLETAPMETFHGIWGKKRKWFTGTFPIVTLLFSKNDTFTMLSKIFHSDSNLDATNYNALCTTCFKAF

SEQ ID NO: 201325 - protein, 79 aa, Oryza sativa
  unsure (1)..(79): unsure at all Xaa locations
  Clone ID: PAT_MRT4530_96711C.1.pep
AGIGTRGFALELGAPRDPLRRFTLPRAGCIVGCSGIVAPXVFLGLFQIVIKMVDGECPSPKAMAQHVLCYLEENGYLQA

SEQ ID NO: 201326 - protein, 84 aa, Oryza sativa
  unsure (1)..(84): unsure at all Xaa locations
  Clone ID: PAT_MRT4530_96712C.1.pep
KFADEVFKGKHDSPGILSMANAGPNTNGSQFFICTVPCSWLDGKHVVFGRVVEGMDVVKAIEKVGSRGGSTVXRVVIVDCRQLS

SEQ ID NO: 201327 - protein, 833 aa, Oryza sativa
  Clone ID: PAT_MRT4530_96713C.1.pep
MAAFATAHPGERASIQAALGSLPRAPSSTMYYRFGSHGLQVLGENREPSASGGGGQAQATQQQQGTSSGVADNRREHAFDFGVGSSSSSSGRRHAMGAAPSVATGISGSKRVAREEGGHSCGFEFEGSDQGRHAARGQACGLGGLDQGPSGGSAHDEDARGYGFGDARCVGQRKDAAPTHQLRIGAGRDQGRSVRLRRDAREDGRGRRLEEGNRAGDGYVAASVQAHGDACVEDQGAGSSSVQQLPSSVDGSDGMIAFEVGKELTLHGSVVSSPWNELWLGKPLIFHDLDLVRAMKDQGGMPNERIDLSGKITSILLSHPGPVSYFRIDSSVINNGAQQKIEEWCDVLRKKNVETVVMANCQWPSHPIEFPLQSLNCSSLRTLHLCFFNIPDMYLDHVSSLAVIDLACCRISDENLFALVCQCVSLRELDIGMFSEGKERIRSESLKFLQIWRSSVSHITIQWAPKLEKVIIGAAQGMKSFSSRTSSSTWISILGAPMLREVWFNLSSQTRSIDNVYLDVGHVPITSLRKLELSIAFKERKGRHALLNFFRSCTELKELVLWREDKVYFEEECDVHSDDWSSALKDIACLKSHLQVLKLFDYGGGETEIAIASAVLEHGASIENLTIMSTTSNADDILSQAKQKLEKVERDSQITGDKKKYSIRDSQENWRQKIQIIQRVAVKQALIPREFIQSINSPRGLRFLLRGWGSSRVTDPAGAVAQDAELMESVGAGHRPDVVALLEILEAHRAALLCRLAHSQVVKIAAGECMFHGVRGGGGGGGGGILAKVAGLHTMHWRIPYHPTRDLLDEVALGICRGGCGIHACANASRSRG

SEQ ID NO: 201328 - protein, 368 aa, Oryza sativa
  Clone ID: PAT_MRT4530_96714C.1.pep
MEAEKEMSMREWCVALPKVELHAHLNGSVRDSTLLELAKQLGDKGDIVFEDVKDVIMKNGRSLPECFRLFELYHILTTDHDTVTRITKEVVEDFAMENVVYLEIRTTPKNNEAKGMTKRSYMNAVIKGLKTVEAVEVVLFDSNSRADKTPMSELGGDTRKKKIYVRLLLSIDRRETTLAALDTVNLAMEMKDQGVIGIDLSGNPVVGEWETYLPALEHAKELGIPITIHCGEVANRNEIRAVLDFCPQRLGHVCCLNDEEWKKLKSLMIPVEICLTSNVMTGGAPSLELHHFADLYNAKHPLSLCTDDSGLFSTSLSNEYYLVASTFGLSKAELFQLAQDAVEFVFAGDELKRSLRELFERVGKELTT

SEQ ID NO: 201329 - protein, 195 aa, Oryza sativa
  Clone ID: PAT_MRT4530_96715C.1.pep
PSGGSAHDENARGYGFGDARCVGQRKDAAPTHQLRIGAGRDQGRSVRLRRDAREDGRGRRLEEGNRAGDGYVAASVQAHGDACVEDQGAGSSSVQQLPSSVDESDGMIAFEVGKELTLHGSVVSSPWNELWLGKPLIFHDLDLVRAMKDQGGMPNERIDLSGNEIFLKSDIVFHMDKYSWSSYASRSMVQLVKSD

SEQ ID NO: 201330 - protein, 111 aa, Oryza sativa
  Clone ID: PAT_MRT4530_96716C.1.pep
SVKQALIPREFIQSINSPRGLRFLLRGWGSSRVTDPAGAVAQDAELMESVGAGHRPDVVALLEILEAHRAALLCRLAHSQVVKIAAGECMFHGVRGGGGGGGGGILAKVAG

SEQ ID NO: 201331 - protein, 240 aa, Oryza sativa
  unsure (1)..(240): unsure at all Xaa locations
  Clone ID: PAT_MRT4530_96717C.1.pep
VLXCNXRGPQMAANELAEFKKQLYXLKEFWNIPSKTSLWGSWVIFGGRKDITMRMCLDYRALNEDTIKNKYPLTRIDDLFYQLKRATVFSKIDLRSGYYQLRIPEXDIAKTAFTTPYRLYKFTVMXFLLTNAPAFFMNLMNKAFMEYLYKXVVVIIDDILLYSQSEEDHEHHLRLMLXKYLKHQLYAKLSXCEYXLCEVKFLMHVIFAKGVAVDPKTVTRVNDWKQPNIITXIRRFLGLA

SEQ ID NO: 201332 - protein, 145 aa, Oryza sativa
  unsure (1)..(145): unsure at all Xaa locations
  Clone ID: PAT_MRT4530_96718C.1.pep
AAATFVAVGSDAGSSCRHHHARSRRHRRIHRGKPPVDXPRERPAPLMPPDLLTGSRHTKRRRQEERRGGEGVAERVRQRRSGATGRERGREGERRRXGGEGRRVAERGRRRRSGAAGRERGGEGERRHRSGRGRAEGRARGRVKV

SEQ ID NO: 201333 - protein, 214 aa, Oryza sativa
  Clone ID: PAT_MRT4530_96719C.1.pep
TMTVLSTIHCDPKDSFPPLSRYGRRRRPSKWRRRRLTDCGGGDGGDGDGGDVGARCGAARRLRGGGAAALCDGAAAWRRRRGGVEAAARRRGGGGVVAWGAGREERQRRGSSGGTGLGGRGAAGDATRDGDSAATATRWPNAYGARRWNGQRGAVAAAARGSGERRGTGREATTATARQWRRLGSGDGTARDAMGQRDGTARRDGVERRATARR

SEQ ID NO: 201334 - protein, 175 aa, Oryza sativa
  Clone ID: PAT_MRT4530_9671C.1.pep
MATPVNQDSITPVNTWEEDELELEEEEGLLCKRKRAKFSDSTVRQQQGIEAAAMDMVMEEAAALSLGVSASNCKEPVHVATGRVEQSNCGAKHEPARLRLHKICSATHWKEPSYDFEEQGPSHLKLFTCKVTIHVDTFTTTIVECISEPNRSKKAAQEHAAQGALWYLKIFGHAN

SEQ ID NO: 201335 - protein, 56 aa, Oryza sativa
  unsure (1)..(56): unsure at all Xaa locations
  Clone ID: PAT_MRT4530_96720C.1.pep
GDTHAXVKNYLDRILYAVADAXSIQKLVDSGGGFSLSQAMQVARNMSGIERACQVF

SEQ ID NO: 201336 - protein, 77 aa, Oryza sativa
  Clone ID: PAT_MRT4530_96721C.1.pep
IGSVRFSWAVAAQPQRCSSPSIILLPESCSYSVPHPTPRRLPLTPLPFLPNLISSILPLMPSAFLPNLNFTIMCSHS

SEQ ID NO: 201337 - protein, 44 aa, Oryza sativa
  Clone ID: PAT_MRT4530_96722C.1.pep
YSIIYIRRCSCAPPLAELLAATGVDQTTAWIAQSTTWWWANNNK

SEQ ID NO: 201338 - protein, 300 aa, Oryza sativa
  Clone ID: PAT_MRT4530_96723C.1.pep
MKGIDSYGFKGGKELGFTGEREEAVREEDDDRGWDPRGLAQSAHMSVLAIYEVRLPELSPSAFPKLAVFAWMCRTCGFDPTTELFAILFTACATTKDVNMPAGPRKTVFGCVNFMLRPERSDAWPVPASMVKWEWNWMQKWFYINNPYPAEDDKANWLRFWRLAVSIVVKPKVEIDGTLESRLILLRKVLRRLSTHNLCEEFCLLRISPLACDWGVSINKGEVVLGLPRLVLPAGTELRTTAEFARLLQRQADGQVNRVHGGELANRSIPSKAGDDDVGMSRKHKRAVAKSGQVRTRRAA

SEQ ID NO: 201339 - protein, 416 aa, Oryza sativa
  Clone ID: PAT_MRT4530_96724C.1.pep
MAAGGHGRWPGKAQPFRAIKSTNQVAGARHLSFLASDSPVAGEGEVEGNSPDTKKQARHRRVGLAKVKLKELILSKGIDSYGFKGGKELGFTGEREEAVREEDDDRGWDPRGLAQSAHGVTAGSTGENPGEGWSCYLGKSLVKEPDLAEFVLSGALAEGQMSVLAIYEVRLPELSPSAFPKLAVFAWMCRTCGFDPTTELFAILFTACATTKDVNMPAGPRKTVFGCVNFMLRPERSDAWPVPASMVKWEWNWMQKWFYINNPYPAEDDKANWLRFWRLAVSIVVKPNVEIDGTLESRLILLRKVLRRLSTHDLCEEFCLLRISPLACDWGVSINKGEVVLGLPRLVLPAGTELRTTAEFARLLQRQADGQVNRVHGGELANRSIPSKAGDDDVGMSRKHKRAVAKSGQVRTRRAA

SEQ ID NO: 201340 - protein, 66 aa, Oryza sativa
  unsure (1)..(66): unsure at all Xaa locations
  Clone ID: PAT_MRT4530_96725C.1.pep
LLPAPAAASPPLPPPSGGLXHQRLAYSAAAGASKLALPFPRPIRASPPRWQRRSPPQSAANSSKPW

SEQ ID NO: 201341 - protein, 229 aa, Oryza sativa
  Clone ID: PAT_MRT4530_96726C.1.pep
MPDSDNESGGPSNAGEYASAREQDRFLPIANVSRIMKRALPANAKISKDAKETVQECVSEFISFITGEASDKCQREKRKTINGDDLLWAMTTLGFEDYIDPLKLYLHKFRELEGEKAIGAAGSGGGGAASSGGSGSGSGSHHHQDASRNNGGYGMYGGGGGMIMMMGQPMYGSPPASSAGYAQPPPPHHHHHQMVMGGKGKVEEVQSKGKIRDFLQLQASMLELIQGEN

SEQ ID NO: 201342 - protein, 425 aa, Oryza sativa
  Clone ID: PAT_MRT4530_96727C.1.pep
MSPNLQNQCKLGPSAGLTLVLFDVAAESAWDPRGPHMSGCHAGFIGGGNVVGAALHDCDRCSDAAPAPGTTSGRDERRRARLRVLKNGRDFTSVAPAAGPMAGGEVLGERQVMRSRASASAGPNDLAITGSAMRPKGWRGVERQQEWWAAHWIRRPSSPPSSPLPLPSPPPPAIVDPAGSVSPTARRRRPSQIRRRRHRMRRPSRPASSAAADPSPQPPAIVGGTGSAQCGGATRGGQAAPAVAALRKREGRLIVVGEEGMAGCRAEAAKPAAARRRRCPPAEGSPLPSLLAADPLSPSSIVVIVIVRKNRPKRHAWAREGRSHALAKPESHPASPRHQELLLPTTIENSSSPPPPWDSPSRTPPPRRRWPLTVAAWGWEGIHRCRWYVDHARRGREEKEETGGQIRRRRHGAPPRGRGRRWRRR

SEQ ID NO: 201343 - protein, 122 aa, Oryza sativa
  Clone ID: PAT_MRT4530_96728C.1.pep
MTSRVNVSLGPIDDRAFMTGLLPLPNFFGCSGPRFRRRRGRCCPGPRFLVGPHLRTSHLARAVPACWPPCASFDTCSLFRSGDVLSEHSSGVDSLGFGGNFWISCSSSRNQGRGCLRLSSVG

SEQ ID NO: 201344 - protein, 138 aa, Oryza sativa
  unsure (1)..(138): unsure at all Xaa locations
  Clone ID: PAT_MRT4530_96729C.1.pep
PFVLTRAGFIGSQRYAAAWTGDNLSNWEHLHMSVPMVLQLGLSGQPLSGPDIGGFAGNATPKLFGXRWMGLGALFPFSRGHTETGSIDHEPWSFGEECEEVCRLALLRRYRLLPHIYTLFYFSHMKGTPVAAPVFFAD

SEQ ID NO: 201345 - protein, 112 aa, Oryza sativa
  Clone ID: PAT_MRT4530_9672C.1.pep
LFLQLFLFFTGGLRRRRTNKLILIFIWLAVIWVPFLLVHLGGQDTITAFSIEDNNVEATEIVGCFVDCFNNRPSNNDQDEVIMGVSKEGNVDVRLNLLSISQRFEVGIIQLH

SEQ ID NO: 201346 - protein, 67 aa, Oryza sativa
  Clone ID: PAT_MRT4530_96730C.1.pep
FPPKGVVVLSPPSRVVAGRNPVLTSLNPNGRCRRFPIASDIKDVVLASHSPSLSIPWCKLTLGVGFA

SEQ ID NO: 201347 - protein, 45 aa, Oryza sativa
  Clone ID: PAT_MRT4530_96731C.1.pep
RTVGTANSLYPRLPTSIATARVLDPRMLFYLAARASCVLLLAYQH

SEQ ID NO: 201348 - protein, 30 aa, Oryza sativa
  Clone ID: PAT_MRT4530_96732C.1.pep
LLHMLRRTTSTVGGRLVTDIRHIVIMVSNC

SEQ ID NO: 201349 - protein, 513 aa, Oryza sativa
  Clone ID: PAT_MRT4530_96733C.1.pep
MQQRNNADSHRCAPRAPGYLRTAAALAAVVQSLLDEPRPRPRPGSQTLHAQLLESGLRPTDDLSVKLLLLHLRCGSHHNARAVFDGMPAPTHAAHNYLAAGYSRLGLPEEALGIVRRLARCTGRLNVFVLSMALKLSAALALPRAVREVHARVVRSVVESDDVLFAALVDAYVKNASLRYARRVFDVMPVRTVVSSTALIVGCMNEGLYEDAEEIFNTMDEKDVVVYNAMVEGYSKTEETAESSMEVFKSMHRARFRPTVSTFVSVLGACSLLSSPEIGEQVHCQVIKSSLSSDIKAGSALLDMYSKCGRVDDGRRIFDRMAERNVITWTSMIDGYGKNGLSDEALQLFEQMLRRHDDAIRPNHATFLSALSACARAGLLSRGQEVFQSMEREHALRPRMEHYACMVDLLGRFGSVRRAHDFIRGMPARPSSDVWAALLGAATLHGDVETAGLAAREVFELSRAAGRQRPGAYMAMSNTLAAAGKWDGVRQVREMMRRRGVLKDAACSWVGSE

SEQ ID NO: 201350 - protein, 104 aa, Oryza sativa
  unsure (1)..(104): unsure at all Xaa locations
  Clone ID: PAT_MRT4530_96734C.1.pep
SXIKACSSSKQPAGSSASVSPAAARHSQARRVTSCIRWALISFNQSSVSQPHSSCNGAHSALQLIDDTGGSSVSGTVHYSLHPFKCFNAHCTYYSTNHLAPFVF

SEQ ID NO: 201351 - protein, 325 aa, Oryza sativa
  Clone ID: PAT_MRT4530_96735C.1.pep
MEYHVGGVIGQSPKPKVVFVLGATATGKSKLAISIAERFGGEVINSDKIQVHDGFPIITNKVTEEERAGVPHHLLGVLHPDADFTAEDFRREAAAAVARVLAAGRLPVVAGGSNTYVEALVEGGGGAFRAAHDCLFLWTDVAPGLLRWYTAARVDHMVRRGLVGEARAGFVDGAGAADYYTRGVRRAIGIPEMHGYLLAERSGGEAADDGELAAMLDGAVREIKANTYRLAATQVAKIRRLSALDGWDVRRVDATVVVARMAEGAPHRETWEAVVWKPCEEMVGRFLEASAAVDDDDNAAAGSPAALAPMTAACRLRAQLVQLQY

SEQ ID NO: 201352 - protein, 87 aa, Oryza sativa
  Clone ID: PAT_MRT4530_96736C.1.pep
HIACNNLATTLTPSPMDLTHTTCHLLDLPQPCSTLLSKPDKKTHYSARHFPPSHSCCFCCIPNKAKHRNGIHTKFSLLLFFHINNGR

SEQ ID NO: 201353 - protein, 80 aa, Oryza sativa
  Clone ID: PAT_MRT4530_96737C.1.pep
HWQLICSFYKKGECVNDRLSRLFSESRQNFTFLKGKWDFTFFKGKCVNNRLSSESRQNLPNPTLCLFYITPAGPGFCSGI

SEQ ID NO: 201354 - protein, 91 aa, Oryza sativa
  unsure (1)..(91): unsure at all Xaa locations
  Clone ID: PAT_MRT4530_96738C.1.pep
MERTRRHLEKELESSRIIEDVQVKVEAQTNSTSSAIRSPVPVCTKMGAQVAYVLGLGSSLYGWKAKKITFPMXLVPRPNSFRVNGNQPNKL

SEQ ID NO: 201355 - protein, 586 aa, Oryza sativa
  unsure (1)..(586): unsure at all Xaa locations
  Clone ID: PAT_MRT4530_96739C.1.pep
MAAAKEAVVPVEGRRNVLVTSALPYVNNVPHLGNIIGCVLSAXFARYCRLRGXNVLYVCGTDEYGTATETKAMEEGCSPREICDKYHAIHKEVYEWFDISFDIFGRTSSPQQTEVCQDIFLKLLDNNWLSENTMQQLYCNSCQRFLADRLVEGYCPTEGCNYDSARGDQCEKCGKLLNSTELVCGSTPCVRDTDHLFLELPLLREKLEKYIDETSLTGSWSQNAIHATNAWLKEGLKPRCITRDLKWGVPVPHEKYKDKVFYVWFDAPIGYISITACYTPEWEKWWKNPENVELYQFMGKDNVPFHTVMFPSTLLGTGENWTLMKTISVTEYLNYESGKFSKTKGIGVFGNDAKSTNIPPEASDTLFTWTDLQAKCNNELLNNLGNFINRVLSFIAKPEGTGYGSVVPDSPDVDSHALTQSLAETVGKLIDQYIDAMDKVKIKQGLKIAMAISSEGNAYLQESQFWKLYKQDPASCATVMKTSVGIVYLLACLLEPFMPTFSKDVLQQLNLSPEEHLSFCDEKGEVEKAKRPWDLIPSGHRIGKPAPLFKGLENEAVKGLREKFAGSQAERKLRTQVAAQLEATSI

SEQ ID NO: 201356 - protein, 621 aa, Oryza sativa
  Clone ID: PAT_MRT4530_9673C.1.pep
MMRELFLFFTGGLRRRRTNKLILIFIWLAYVGADLVAVYALGLLSRYEYKSKIGSDSLTVIWVPFLLVHLGGQDTITAFSIEDNNLWLRHLLNLVVQVSLALYAFCNSFGQISLQLVVPAIFIFVAGIIKYGERTWALKCGSIDGLQSSAGGYKDKEQEEQKDNKYGSYLSKVFYAHQMVLYARGLFAGVTVSQLGQKVRKELTHGIRRCEKYVKAKIIELELSMMYDILYTKAMILQTWIGCILRCISHIAMVVAFVLFLVTPKHGHRMADVAITYTLFAGALLMEACAIGVVVASPLTWARWRRHNYVNLLAIGKIIGAKEERSVVPISLGQFSLATCALHDGSTPRIMSNALYAFGLEKIYRDVRHVKHVEATEIVGCFVDCFNNRPSNNDQDEVIMGVSKEGNVDVRLNLLSISQRFEVGIIQLHLFTDIYTTSVLLLEPGIWEEKTGIVWECVMLSNYMMYLLLAHPSMLPVSSDYAVMEHLNYMAKLVDMYKYAGGKLDPHARMDLLLKALEQMTSNTNSDLIVVARELIYITRVSGTLLKLVKETWILLLIYAASKSRGELHARRLDNGSELLTFIWLLLVHHGLGNVAEFGLTLGRYVTSEAPPSLSEIIDIP

SEQ ID NO: 201357 - protein, 90 aa, Oryza sativa
  Clone ID: PAT_MRT4530_96740C.1.pep
FQASDTLFTWTDLQAKCNNELLNNLGNFINRVLSFIAKPEGTGYGSVVPDSPDVDSHALTQSLAETVGKLIDQYIDAMDKVKIKQGLKIA

SEQ ID NO: 201358 - protein, 330 aa, Oryza sativa
  unsure (1)..(330): unsure at all Xaa locations
  Clone ID: PAT_MRT4530_96741C.1.pep
RRGEQLRRQWWRXRDNSRGFDKGTRGVRRFKYHQLVSATNQFSMENKIGAGAFGEVHKGYLTELGREVAVKKILKECREGNKDFFDEVQTISRAKQKNLVELLGWGIKRRWNIIDFMCWCRQKKSDLFLVYELVDNGNLHRHLHEEAAVVLPWTARYKIVKDIGCALIYLHHDRKPYILHRDIKPSNILLDKEFNAKLADFGLSRTADNGTIQSSMVVGTANYLDPECMKTGKFDRSSDVADDRLRGEFDERQMERVIFLGLQCCQPKASMRPTMQEAMGFLEDNSPLPELAKPEDSSKARSGGGATTATTMSGGGGATTAMTTGAAAMQ

SEQ ID NO: 201359 - protein, 115 aa, Oryza sativa
  Clone ID: PAT_MRT4530_96742C.1.pep
PTFSKDVLQQLNLSPEELLSFCDEKVEVEKAKRLWDLIPSGHRIGKLALLFKGLVSLYAYLGTIFICFTNLPLLHASHYVQENEAVKGLREKFAGSQAERKLRTQVAAQLEASSI

SEQ ID NO: 201360 - protein, 317 aa, Oryza sativa
  unsure (1)..(317): unsure at all Xaa locations
  Clone ID: PAT_MRT4530_96743C.1.pep
EEETTQTTDDTVRQQSNNTENKRTMHTRATETXHQHKKAARAEGDARERDSRMRKEEKAEEXRERRRQANGARRDSAKDHRRTRQHTXETSTKQQRQEIREKENENTEEQPENTKRGEEEHEDEGSREESRKDKMSKRGEKESXREEGERSDKTMTTTKREKTRXSTNRRKEEAGEDKRRTRTTQSIQQRSRESKSKTKRTXLNKRRRGKRRHKRRRNRRQSEXSRCRTXDATRNRAEAKMHNTGRTXTRRRRTHMYGDERRGQRSMNHRLRDTESDEXAAHTDQAISARIERTANXQDVTERETRHERRQRRDEXX

SEQ ID NO: 201361 - protein, 110 aa, Oryza sativa
  Clone ID: PAT_MRT4530_96744C.1.pep
MGLLGLNRLMSIQREQRCRQIEANRLLASTDKRKGSPCKQDNSRCSKRERYSQPDLPEDIWRHIHSLLSLQDAARAACVSRAFLCLWRCRPHLTFSLQTLGLSEMACKKG

SEQ ID NO: 201362 - protein, 56 aa, Oryza sativa
  Clone ID: PAT_MRT4530_96745C.1.pep
IYEPGLEGYMCVECWMTHIPAPAPLAISSTVFFCVIYKAILFEFDLKSIKAVMYIR

SEQ ID NO: 201363 - protein, 73 aa, Oryza sativa
  Clone ID: PAT_MRT4530_96746C.1.pep
YVNSCKRGKQWAVNNTDDVAFELHIQMSPVKHLTCTAPNISVVEAICDLQQHLTLHTRHDLICTNKHTTHLGG

SEQ ID NO: 201364 - protein, 276 aa, Oryza sativa
  Clone ID: PAT_MRT4530_96747C.1.pep
LTISGYNAHDCHKMLTVFLPIAIRAVKPVHTKLVITKLCYFFNRVSHKVFDPEELGPLHKFAIETACQLEMFFPPSYFNMIEHLIVHIVPQIIEIGPLYLHHMWAYERYMSVLKWYVCNQAHLGGSMIDGYITEEVVECCIDYMKDATLIGMPPPVHEGRLAGKGTVSKKWFYDEAYKVVAEAHSSMLQQRAILEPYIEEHMNEIRACNPRRPASWVSKEQKHKFPEWLKEKDLPFGETIEEKTLNRLATGPSSLVTSWQGYGIGRYTFYTIGKVD

SEQ ID NO: 201365 - protein, 123 aa, Oryza sativa
  Clone ID: PAT_MRT4530_96748C.1.pep
AYLLVTLTPPPPSPPPCRRRRARILFDNGCTLSWCRCHQRGQGLTGIDCFLAVLAERPNTAARNGRPRLLVFLNDITRNIISNNDAEILLVYYGYRVHPQAHGYTIVAFHPRVFPRYHIYFIP

SEQ ID NO: 201366 - protein, 91 aa, Oryza sativa
  Clone ID: PAT_MRT4530_96749C.1.pep
MAAAEEEETAAGSWRSSSSRSSSRSSTPYHHSDLRSMTAKYNIDTHPYEHMHVYLIHPILMSIFEDWASKSWRLTRSHHRCLAVDGDLRCY

SEQ ID NO: 201367 - protein, 244 aa, Oryza sativa
  unsure (1)..(244): unsure at all Xaa locations
  Clone ID: PAT_MRT4530_9674C.1.pep
MGNVAIGVGRRRRRWPEVEERLTQPRRLLRQLSDVDSGRLRRLIRSGDLAPCFDAAEDDAGLDEDCPICFYVRFYPSLNRSKCCGKGICTGQGSGYGAWSGPNGGSYTASGHGLGLGSGYGYGSGSAYGAGANGGTNGGSDCDTGSGSNYGSSTGSSSGYGSGGVSYRSRGHGGSSSIGSGSGVGLGATSGVGAGSNVGPSGGCSTCGSGSXGSGSSSSSGSTGMSYGSSGAGSFSGSSSGSNS

SEQ ID NO: 201368 - protein, 940 aa, Oryza sativa
  Clone ID: PAT_MRT4530_96750C.1.pep
MPNLEHLNLSSNQFSGEIPASLAKLTKLQSVVLGSNLLHGGVPPVIGNISGLRTLELSGNPLGGAIPTTLGKLRSLEHINVSLAGLESTIPDELSLCANLTVIGLAGNKLTGKLPVALARLTRVREFNVSKNMLSGEVLPDYFTAWTNLEVFQADGNRFTGEIPTAITMASRLEFLSLATNNLSGAIPPVIGTLANLKLLDLAENKLAGAIPRTIGNLTSLETLRLYTNKLTGRLPDELGDMAALQRLSVSSNMLEGELPAGLARLPRLVGLVAFDNLLSGAIPPEFGRNGQLSIVSMANNRFSGELPRGVCASAPRLRWLGLDDNQFSGTVPACYRNLTNLVRLRMARNKLAGDVSEILASHPDLYYLDLSGNSFDGELPEHWAQFKSLSFLHLSGNKIAGAIPASYGAMSLQDLDLSSNRLAGEIPPELGSLPLTKLNLRRNALSGRVPATLGNAARMEMLDLSGNALDGGVPVELTKLAEMWYLNLSSNNLSGEVPPLLGKMRSLTTLDLSGNPGLCGHDIAGLNSCSSNTTTGDGHSGKTRLVLAVTLSVAAALLVSMVAVVCAVSRKARRAAVVVEKAETSASGGGGSSTAAAVQASIWSKDTTFSFGDILAATEHFNDAYCIGKGSFGTVYRADLGGGRAVAVKRLDASETGDACWGVSERSFENEVRALTRVRHRNIVKLHGFCAMGGYMYLVYELAERGSLGAVLYGGGGGGGCRFDWPARMRAIRGVAHALAYLHHDCSPPMIHRDVSVNNVLLDPDYEPRVSDFGTARFLVPGRSTCDSIAGSYGYMAPELAYMRVTTKCDVYSFGVVAMEMLMGKYPGGLISSLQHSPQSLSAEGHDGSGGGGGEEASASASRRLLLKDVVDQRLDAPAGKLAGQVVFAFVVALSCVRTSPDARPTMRAVAQELAARRRPILDRPFEMIKIGDLTNSHR

SEQ ID NO: 201369 - protein, 121 aa, Oryza sativa
  Clone ID: PAT_MRT4530_96751C.1.pep
KKKGEQPSPPQPWFCFSKSQIITWQSNTKTKSQSESSQNINETKFQPKKMRRGKGRSSRRPRCSLPNHHLAALLPGGGQARELNPEPPLPPGSRRPVVALGSCRAAGSPLPRKSTAPPWSR

SEQ ID NO: 201370 - protein, 196 aa, Oryza sativa
  unsure (1)..(196): unsure at all Xaa locations
  Clone ID: PAT_MRT4530_96752C.1.pep
MPLTLFFLSLSFFPLLLPCSRAEARRRLAQPETARPRRGGGGKMTKLAEMWYLNLSSNNLSRKVTPLLGKMRSLTTLDLSGNPGLCGNNXCSSNTTTGDGHSGXRAADVVIENAETAASGGSSAAATTTAVQASLWSKDTTFSFGDILAATEHFNDAYCIGRGSFGTVYRADLSGGRAVAMKQLDVSETGDACCSS

SEQ ID NO: 201371 - protein, 568 aa, Oryza sativa
  Clone ID: PAT_MRT4530_96753C.1.pep
MGAREVRRTGFGCAWLRSGAPVGRMAAGPHAAARLSVDCAHGREDGGRGRLTGLARSKPRWRRRGAYVAATRAGGRRKKGRPRWTADGGRVHRSKRDGFGLRGAHRSDEGVEKERANGSDSPEGVRRRWNSTVAAGGERKGKSLRGDEDSIKGGGSISGVQGTHFRGRMGLSGAVEVRRREAASGGGRQWRWGHAGWRRSLGRRLRAFGRATELPRKLAGTRESEEGEREEALPSRAGSDGQSTARGELSGLGPGKGKKKDGKEAVWEGEPTLAVKESELAVIDACSQGGDRKKVGEQGALLVFTGGSGGFVGSAKAATVWMRWAAKAVDRASENRTAGAGGLARAGAVKKNQWGSGGVQAPASENWKYERAEASMGADAVQVGDVRAGGLGEHATAGGWREVGDRACAWTAADGIVDDRQQSYGKVLPFGAVLAEVLGVRRWSLEKIPPPSSVITRAGTAHGRQCPSYSPPPVQQEAKPLTSDILQARTAAALHQPPNPTCAKVVRSLRRGRGHGYIVLEERAGPRLKKGKRLAVLEEICKSKKGVGGMLTPNNLDYNNHKLKETGP

SEQ ID NO: 201372 - protein, 284 aa, Oryza sativa
  Clone ID: PAT_MRT4530_96754C.1.pep
MSAARFTGEWVHAGVALGLVVLTRSRPMWLRRGAYVAATRAGGRRKKGRPRWTADGGRVHRSLSRRFEREGAHRIKETEEIKCATGSDSRKGDRRRRNAAALAGGEKKGKRRRGDEDSIRGGGSISGVQGVRFRRRMGRKSTKEGWRRAAASGSGRQRRRGHAGRRRTRGGARESEEGKREEALPSRAGSDGRSTARGEFFGLGPGKGKKKGGRSPLRLLAHTLASPARATAKGGSAAARRQQRRGGDAGDVGLGREETDLVGGQGCKGGELAVVDACSQGGGR

SEQ ID NO: 201373 - protein, 220 aa, Oryza sativa
  Clone ID: PAT_MRT4530_96755C.1.pep
MRVRFKGGGASPGFKESVSGVGWGGKSLRRAGDEQRPSGADGNGGEAVPGGDGAREWFGETLGSSRTVVARDGENLGEELTGVRERYRRRFGDGKGWKADGGTRPSGGARRMTPRRRGVEASAPGEKRGRGGARSSSSRVHARTGSLGARRQTATARTAGRQQWRGEGEGKTRGIWGGGSGFIGAGNVGLGREETDLVGGQGCKGGELAVVDACSQGGGR

SEQ ID NO: 201374 - protein, 555 aa, Oryza sativa
  Clone ID: PAT_MRT4530_96756C.1.pep
MLSPPLIESSSLLGDFPFLSPPDAAIEFHRRRTPSGDSEPFGSLLLDALVTPGLCLCGTVRIRILGPVPMGNSSSIIKVQPQGASSVAFSGCSELQPKLRCSTADNSHGYKWHDNRVRDSGRYRAYLRVKMTEHFDQMFSSELDGMSISCHVRPPSHRPRRAVLGGSLLGEMKRRHWSHPSCGLLLLVAVFCLLLVFRCSQLRHSGDGAAAAAPDGGAGRNDGDDVDERLVELAAVDPAAMAVLQAAKRLLEGNLARAPERHRDVALRGLREWVGKQERFDPGVMSELVELIKRPIDRYNGDGGGGGEGEGRRYASCAVVGNSGILLAAEHGELIDGHELVVRLNNAPAGDGRYARHVGARTGLAFLNSNVLSQCAVPRRGACFCRAYGEGVPILTYMCNAAHFVEHAVCNNASSSSSGAADATAAAPVIVTDPRLDALCARIVKYYSLRRFARETGRPAEEWARRHEEGMFHYSSGMQAVVAAAGVCDRVSVFGFGKDASARHHYHTLQRRELDLHDYEAEYEFYRDLESRPEAIPFLRQRNSGFRLPPVSFYR

SEQ ID NO: 201375 - protein, 574 aa, Oryza sativa
  Clone ID: PAT_MRT4530_96757C.1.pep
MEVAGMRKASSHASMAAAAADPDDFDLTRMLNHRPRINVDRQRSFDDRSLAELSISGTASRGGGGGGYPAMMESYESMYSPGGGLRSLCGTPASSTRLSFDPHPLVFDAWDALRRSLVCFRGQPLGTIAAVDHSSDEVLNYDQVFVRDFVPSALAFLMNGEPEIVKNFLLKTLLLQGWEKRIDRFKLGEGAMPASFKVLKDAKRGGAERLVADFGESAIGRVAPVDSGFWWIILLRAYTKSTGDLSLAETAECQRGIRLIMNQCLAEGFDTFPTLLCADGCCMIDRRMGVYGYPIEIQALFFMALRCALLMLKPDAPEGKETMDRVATRLHALTYHMRSYFWLDFQQLNDVYRYRTEEYSHTAVNKFNVIPESIPDWVFDFMPSRGGYFVGNVSPARMDFRWFALGNFVAILASMATPEQAAAIMDLIEERWEDLIGEMPLKISFPAIESHEWEFVTGCDPKNTRWSYHNGGSWPVLLWLLTAACIKTGRLKIARRAIELAEARLARDGWPEYYDGKLGRYVGKQARKLQTWSVAGYLVAKMMVEDPSHLGMISLEEDRAMMKPVLKRSASWTV

SEQ ID NO: 201376 - protein, 445 aa, Oryza sativa
  Clone ID: PAT_MRT4530_96758C.1.pep
MGAREVRRKGFGCAWLRSGAPVGRMAAGPHAAARLSVDRAHGREDGGRGRLTGLARSKPRWRRLGAYVAATRAGGRRKKGRPRWTADGGRVHRSKRDGFGLRGAHRSDEGVEKERANGSDSPEGVRRWWNSTVAAGGERKGKSPRGDEDSIKGGGSISGVQGTHFRGRMGLSGAVEVRRREAASGGGRQWRWGHAGWRRSLGRRLRAFGRATELPRKLAGTRESEEGEREEALPSRAGSDGRSTARGELSGLGPGKGKKKDGKEAVWEGEPTLAVKESELAVIDACSQGGDRKKVGEQGALLVFTGGSGGFVGSAKAATVWMRWAAKAVDRASENRTAGAGGLARAGAVKVGVASRRWRLRLCLRALAAKEWRHGVVAWEGKREGRTVERGGFTMPVWEKGGGRGRGERVRQRDALPPRLGRTRAQGGGERQGGMGGRAAQAARA

SEQ ID NO: 201377 - protein, 84 aa, Oryza sativa
  Clone ID: PAT_MRT4530_96759C.1.pep
MGIEKIKMKTQGYIRDEIITYLDLLQAISTPQFSAGAGIELSRFLEERSKFQKSQKLRMSVFVNPEKTQRIMMYEVSMLGSVRT

SEQ ID NO: 201378 - protein, 420 aa, Oryza sativa
  Clone ID: PAT_MRT4530_9675C.1.pep
SAMASHRAAVFAVLTLLLSVAAIAMARPIRRSDLGLGLGANGGLGVGLGLDIGLGGSGSASSSGQGSGYGAWSGPNGGSYTASGHGLGLGSGYGYGSGSAYGAGNGGSASGCGSGSTSCSGSGSGSVGLGTSINVGVGVGANGGTNGGSDCDTGSGSNYGSSTGSSSGYGSGGVSYRSRGHGGSSSIGSGSGVGLGATSGVGAGSNVGPSGGCSTCGSGSRSGSGAGGGSYSGSNSGSSSSSGSGSNSNSIGGSGSSSGAGSGSSASSGYGGSSSGSMSGSGSSSSSGSTGMSYGSGAGSGSSSSSWSGSNSGSGSGSTMPSGIGVASNAGSSSGSWSNAGSNTGTLSGAGSSNWSSSTSGSTSSSGLGGGQGVGSRFGSGAQPTFGMGGGGGFGAGYGFGAGAGGWYGGGMGTTRGSDH

SEQ ID NO: 201379 - protein, 270 aa, Oryza sativa
  Clone ID: PAT_MRT4530_96760C.1.pep
MRVRFKGGGASPGFKESVSGVGWGGESLRRAGDEQRPSGADDNGGEAVPGGDGAREWFGEVLGSSRTVVARDGENLGEELTGVRERYRRRFGDGKGWKADGGTRPSGGARRMTPRRRGVEASAPGKKRGRGGARSSSSRVHARTGSSGARRRTTTTRAGQAATRRRWWFGAPGAWRPEEPAGRRRRSGPVLQPHRRRLRHRLRPPGFRRPVRGLAPVLQLALLLPLQAGAIRPPAELLGESVEDHLPRGRRLILFLTATQTYFTVFPAKN

SEQ ID NO: 201380 - protein, 175 aa, Oryza sativa
  unsure (1)..(175): unsure at all Xaa locations
  Clone ID: PAT_MRT4530_96761C.1.pep
MGAREVRRTGFGCAGLRSGAPVGRMAAGPYAVARLSVDRAHGREVGGRGRLTGLAQSKPRWRRRGAYVAATRAGGRRKKGRPRWTADGGRVHRSKRDGFGLRGAHRSDEGVEKERANGSDXSPEGVCRRSPLPASDGAEEHQGGLATSGGLRERAATAARPCRAAAGLGNGLGRS

SEQ ID NO: 201381 - protein, 586 aa, Oryza sativa
  Clone ID: PAT_MRT4530_96762C.1.pep
QQQPPLRSLQSFWRLPCSSWLRGDSRSRGSELSPCYSTSLLGLPFSHSGSTLLLLSPILSNPIQSSPALVRSYHKLVGPIPPEIGRLNQLQALSLQGNSLYGSLPPELGNCTKLQQLYLQGNYLSGHIPSEFGDLVELGTLDLSSNTLSGSIPPSLDKLAKLTSFNVSMNFLTGAIPSDGSLVNFNETSFIGNRGLCGKQINSVCKDALQSPSNGPLPPSADDFINRRNGKNSTRLVISAVATVGALLLVALMCFWGCFLYKNFGKKDIHGFRVELCGGSSIVMFHGDLPYSTKEILKKLETMDDENIIGVGGFGTVYKLAMDDGNVFALKRIMKTNEGLGQFFDRELEILGSVKHRYLVNLRGYCNSPSSKLLIYDYLAGGNLDEVLREKSEQLDWDARINIILGAAKGLAYLHHDCSPRIIHRDIKSSNILLDGNFEARVSDFGLAKLLEDDKSHITTIVAGTFGYLAPEYMQSGRATEKTDVYSFGVLLLEILSGKRPTDASFIEKGLNIVGWLNFLVGENREREIVDPYCEGVQIETLDALLSLAKQCVSSLPEERPTMHRVVQMLESDVITPCPSDFYDSE

SEQ ID NO: 201382 - protein, 260 aa, Oryza sativa
  unsure (1)..(260): unsure at all Xaa locations
  Clone ID: PAT_MRT4530_96763C.1.pep
SAPRAFFIFSDSQSPAAQQQSNPLPLGKPGTWFGSNRPRPGVPNYWHARFPRRLRRGPRGHAQRGQAIXPARARVVGPLGARGRGRPTGGSGAPRGVPGGARLSVTGFTEGRAHGKGSDRVWWTWFGRVRRVERGAMGPRAAAWLIVVCARTETGDDESRQPSPEVRKGANGRGATRIQFEAVEASPGFKESVSGVGWGGRAPRRAGDERRPPGAGGNGGEAMPGGGGSRGGVYARGGEGERGRGTGGGTMEKRRFGRGN

SEQ ID NO: 201383 - protein, 431 aa, Oryza sativa
  Clone ID: PAT_MRT4530_96764C.1.pep
MRRVWWVCGLGYWVQGFRCFPWLALNFHLTRGLGLTPAALQLVQNAGNLPLVAKPLFGVLSDAVYVGRAHRLPYISIGALLQLMAWGTLAVIPVTGDTFPTQMACILIGNLGASVTEVVSDAVVTEFSRTQKAGVLQSYAFIILAAGSLLGNLSGGYVLLRTQEPKTMFSAFSILLGLQLALSLSTKETLPSSHRNWNICHVRTSLSDNLRKQFSNLRTAISEEQIFYPLMWIMTSFAVVPILSGTMFCFQTQYLKLDPSVIGLSKVVGQVMVLSLTVLYNKYLKKIPLRRLVAGVQTMYALAVLSDLVLVKQVNLMLGIPNEIHVLCFSALAEAIAQFKVLPFSVLLSSQCPPGCEGSLFAFFTSGLVFSAIVSGVFGVGLSSLIGVSGGDYTSFPLCILLQSLAALVPLGWISFLPEKWTADDKILKPR

SEQ ID NO: 201384 - protein, 308 aa, Oryza sativa
  Clone ID: PAT_MRT4530_96765C.1.pep
MALSPTGGEETDGARRERRSGGRRHGGGSSGDHVTASKIAHTCSGRRIRVSLHLPRCFIDGFSDPVEDEYYKPYQLQRQQIMLDENIGFLSYSGDGGHEFMVADIRNYHDRSQQEAAQRWVNDVVLTLHSRYLRCVDLYNDIRLIDTNNLRSFSYIPLPEEAMTHDRHIDEDKPDPARRVSITSAGSINLVCIDNVIVRSEIRRLMIDHPKMTSSLVYPVQYNPSNMCSDVVHPVRWSRCRFDSELTGWSKQLRQLFCKLSLIKSVHHGGHLTSRLCPGETSDREAGNATTTVHHHPATHNQLEAASD

SEQ ID NO: 201385 - protein, 88 aa, Oryza sativa
  Clone ID: PAT_MRT4530_96766C.1.pep
MESGSALDTPWIGEWLMILLPPLDFPLPPLAPADLTVKRTFVGDGEEGERGDDGRREKEATVPPPPPGGVRAAVDLAHRCSAVDAARH

SEQ ID NO: 201386 - protein, 87 aa, Oryza sativa
  Clone ID: PAT_MRT4530_96767C.1.pep
CRRPSSTRQKQTATKQTQTGQEQQPVQAGKGAKGRVVSVIGAVVDVQFDEQLPPILNALQVDGRSPKLILEVAQHLGDNTVRTIAMD

SEQ ID NO: 201387 - protein, 269 aa, Oryza sativa
  Clone ID: PAT_MRT4530_96768C.1.pep
MSGQTQRLNVVPTVTMLGVMKARLVGATRGHALLKKKSDALTVQFRAILKKIVAAKESMGEAMRASSFSLAEAKYVAGDGVRHVVLQSVRSASLRVRSHQENVAGVKLPKFTHFVDPAAGSAGPSNASPSLTGLARGGQQVAACRAAHVKAIEVLVELASLQTSFLTLDEAIKTTNRRVNALENVVKPRLENTISYIKGELDELEREDFFRLKKIQGYKKREIERQMAAAKQFAEEQLAEEVALKRGISVGAATNMLVAGGERDEDIIF

SEQ ID NO: 201388 - protein, 1216 aa, Oryza sativa
  unsure (1)..(1216): unsure at all Xaa locations
  Clone ID: PAT_MRT4530_96769C.1.pep
MEGIKLKFQGYRRDQLTTEESLRQKPTYRGSQLTAQASLQEKPAYGVSRLTTQARRSKAYDGRCRCLKHRHGNLDGSAAVATKYRRQTNLLHDPEVSFWMSFVLWTSPIWALDATKNMSDITKKEFAELALDGSNYLTWALDVEIKLDSIGLDHTIVLPELGTVESTKAEKAKALHFLRHHLHPDLKSEYMTEKNPLVLWQSLKDRFDQQGSIVLPQVQHDWITLHFQDYKSTAAYNSAPHRIISQLRFCGQKITDAEMIEKTLSTFHPNNIVLQQQYRNSKYPKYSDLISVLLVAERQNEVLLKNHSARPTGSMAVPEAHANVVGNSRGRKRGHGEKKGKGKGSIKFKGKSKGKPRGKGELKKVTGESSGEKQDNCYRCGGRGHWSRNCHVPKHLVELYQQSMNEKKSQHESHFTIEPEAQIEKHDDMLINVKDGGDVRMDDDWNNLLEKDDNIFGDLKPYGNPMAEEDICLVDNATTNTILRETMYFHTLTKKTRNIMTIAGSNAHIVGTGSATLVLPMGTHIFVKDALLDPDSKRTLLSFKDIRANGFHIETEIEQDAEYLLIRKIDGYQKQVVERLPSLPSGLYYTYIKPTEEYVAMKTIFRNPESFRVWYDRLGHPGLGMMRRIISNSAGHNVETNDFPNPEDFICPACAKGKLIIRPSLLKIRDESPVFLVRIQGXDHVDLLSTRNHAFXKLIAQIIKLKACFPDSRVQSIRMDNAGEFRSKAFDDYCLAMAMGIKVEYSVPHVHTQNGLAESLIKRIKLIAQPLLQDWGERHPEECRDIIWNATGMQSLDPRTSEAELEVQRIINLQNIVNKLPDAFTDYKGVTRSHIPTVNAPERVEVTQKVTDSALTPHPRKMGRPPVEEAQPEVEKAPEEATQPEVEMVPEGHHPKDGEPSALRAYLGSGRSEHSNSVVMGNHDELEEINEEISTNCSDTGELHHRKTTIVDIHFASKIVVIMDPDPEPKSMIECQKRSDWDKWKAAIEAKMRSLYKREVFGPAVPTPPRIIPVGCKWVFLRKRNGQVVRYKARLVAQWSMQRPGIDYDETYSPVMSGITFRYLISMATNMNLDMQLMDVVTAYLYGSLDSEIYMRVPEGLKIPNPKGNRNMYSVRLQRSLYGLKQSGRMWFNRLSNYLLKRXYSATPTRRHWVGVKTILRYLRGTQDLGLWFPKNQDPSMVGYVDAGYMSDPHNAISQTGFIFLCGNTAISWRSV

SEQ ID NO: 201389 - protein, 39 aa, Oryza sativa
  Clone ID: PAT_MRT4530_9676C.1.pep
KGCFKRSINAPLHEERQAYNPETRTTMKQCCKTVPVNQK

SEQ ID NO: 201390 - protein, 124 aa, Oryza sativa
  Clone ID: PAT_MRT4530_96770C.1.pep
EHQAESKAYASDSKTYPTMAGTICIDGYIRLWNGAGVAAYETAYNGGKHGHSEGLFVATDMITADMLAYIETCDDNCDDRPVNRTEDLFIDVSEDGLASLVTANGDTKVDYWVPTVDHLLGGIK

SEQ ID NO: 201391 - protein, 630 aa, Oryza sativa
  Clone ID: PAT_MRT4530_96771C.1.pep
MSDIVKKEFTELALDGSNYLTWALDVEIKLNSMGLDHTIVLPEVGTVESTKAEKEKALHFLHHHLHPNLKSEYMTEKDPLVLWQSLKDRFDQQGSIVLPQAQHDWITLRFQDYKSVAAYNSALHRIISQLCLCGLKITYTEMIEKTLSTFHPNNIVLQQQYRNSKYPKPTGSMAVPEAHANVVGNSRGRKRGHGEKKGKDLGGNPMAEEDICLVDSATTNTILRETRYFHTLNKKTGNIMTIARSNAHIVGTGSATLVLPMGTHIFVKDALLYPDSKRTLLSFKDIRANGFHIETEIEQDAEYLLITKIDGYQKQVVERLPSSPLGLYYTYIKPTEEYVAMKTIFRNPESFRVQHDRLGHPGLGMMRRIINNYAGHNVETKDFPNPEDFSCPACAKGKLITRPSLLKIRDESPVFLARIQGDICGPIQPLSGPFRTIFPAFGGERHPEECRDIIWNATGMQSLDPRASEAELEVQRIINLQNIANKLPDAITDYKGVTRSHIPVVNAPERVEVTQKVTDSALTPHPRKRGRPPGARDKVPRRQGPEPLVPLKESVEEAQPEVEKAPEEATQPEVEMVPEGHHPEDGEPSALRAHLGTGRSEHSNSVVMGNHDELEEINEEISTNYADTGE

SEQ ID NO: 201392 - protein, 986 aa, Oryza sativa
  Clone ID: PAT_MRT4530_96772C.1.pep
MSDIAKKEFVELALDGSNYLTWALDVEIKLDYMGLDHTIVLPEVGTVESTKAEKAKAFHFLRHHLHPDLKFEYMTEKDPLVLWQSLKDRFDQQGSIVLPQAQHDWITLRFQDNKSVAAYNSALHRIISQLRLCGLKITDAEMIEKTLSTFHPNNIMLQQQYRNSKYPKSSDLISVLLVAERQNEVLLKNHSARPTGSMAVPEAHANVVGNSRGHKRGHGEKKGKGKGSIIFKGKSKGRGHWSRNCRVPKHLVELYQQSMNEKKSQHESHFTIEPEAQIEKHDDMLINVEDGGDVRMDDDWDNLLEKDDDIFGDLKLCGNPMAEEDICLVDSATTNTILRETRYFHTLTKKTGNIMTIAGNNAHIRTLLSFKDIRANGFHIETEIEQDAEYLLITKIDGYQKQVVERLPSSPSGLYYTYIKPTEEYVAMKTIFRNPESFRVWHDRLGHLGFGMMRRIINNSASHNVETNDFPNPEDFICPACAKGKWSHVDLLSTRNHAFSKLIAQIIRLKASFPDSRVQSIRMDNAGEFRSKAFDDYCLAMGIKVEYSVPHVHTQNGLAESLIKRIKLIARPLLQDWGERHPEECRDIIWNATGMQSLDPRNSEAELEVQRIINLQNLANKLLDAFTDYKGMTRSHIPAVNAPERVEVTQKVTDSALTPHPRKRGRSPGVQDKVPRRRPRRQGPEPLVPLKESVEEAQPEVEKAPEEATQPEVEMVPEGHHPEDGEPNPEPMSMIECQKHSDWDKWKAAIEAELRSLYKREVFGPTVPTPQRVIPVGCKWVVLRKRNGQVKSLNGSCIILVYVDDLDIIGTTEDIKEAMAYFKTEFEMKDLWKTKFCLDLQLEHLPEGVFMHQSTYTKRVLGKFNMNKCHPLKTPMVVQSLEADKDPFKPKEDDEEVLGPEVPYLSAIGALMYLANCTRPDIVFAVNLLARYSATPTRRHWVGVKTILTYLRGTQDLGLWFPKNQDPSMVGYVNAGHMSDPHNARS

SEQ ID NO: 201393 - protein, 501 aa, Oryza sativa
  Clone ID: PAT_MRT4530_96773C.1.pep
MSDIAKKEFAELALDGSNYLTWALDVEIKLDSMGLDHTIVLPEVGTVESTKAEKAKALHFLRHHLYLDLKSEYMIEKDPLVLWQSLKDRFDQQGSIVLPQAQHDWITLRFQDYKSVAAYNSAHHRIISQLHLCGLKITDAEMIEKTLSTFHPNNIVLQQQYRNSKYPKYSDLISVLLVAERQNEVLLKNHSARPTRSMVVPEAQANVVGNSHGRKRGHGEKKGKGKGSIIFKGKSKGNPEDNCYRCGGRGHWSRNCHVPKHLVELYQQSMNEKKSQHESHFTIEPEAQIEKHDDMLINVKDGGDIRIARLKSPSTMPASNAPSLILFSIRDVAYVEAAMIIFFFLMQRSHWEFGLPYHILHIASSSVSRGGDLWVLGTRFRGDVRGDKDLSHLFHSKNQLKKLNLKLRKPHKWQLNLKDTILKMEDPVPYACTLALEDRNTPTRSLWEITTIPTPPRIIPVGCKWVFLRKRNGQVVRYKARLVAQGFTQRPVLTMMKLTLL

SEQ ID NO: 201394 - protein, 81 aa, Oryza sativa
  Clone ID: PAT_MRT4530_96774C.1.pep
LQLEHLPEGVFMHQSTYTKRVLGKFNMNKCHPLKTPMVVQSLEADKDPFKPKEDDEEVLGPEVPFEVLKILGCGSRRTKIH

SEQ ID NO: 201395 - protein, 1161 aa, Oryza sativa
  Clone ID: PAT_MRT4530_96775C.1.pep
MPLGELRRLPFRLLRSFSPLPGRPLARRADAAITVVVVVLPASGFNTQNSLEIWAKFLGVTSMAVPEAHANVVGNSHGRKRGHGEKKGKGKGSIIFKGKSKGKPRGKGKLKKVTGESSGVKQDNCYRCGGRGHWSCNCHVPKHLVELYQQSMNEKKSQHESHFTIEPEAQIEKHDDMLINVKDGGDVRMDDDWDNLLEKDDDIFGDLKETRYFHTLTKKTGNIMTIAGSNAHIVGTGSATLVLPMGTHIFVKDALLYPDSKRTLLNFKDIRANSFHIETEIEQDAEYLLISKIDGYQKQVVERLPSSPSGLYYTYIKPTKEYVAMKSIFRNPESFRVWHDRLGHPGLGMMRRIINNFAGHNVETKDFPNPEDFICPACAKGKLITRPSLLKIRDESPVFLARIQGDICGPIQPLSGPFRYFMVLIDASTRWSHVDLLSTRNHAFPKLISQIIRLKASFPDSCVQSIRMDNAGEFRSKAFDDYYLAMGIKDPTGSWGYTLVMRLSIIKYLEPMTGDLHTARYADCIFDEDHFPTLGGVRHLEECRDVIWNATGMQSLDPRTSEVELEVQRIINLQNIANKLPDAFTDYKGVTRSHIPAVNAPERVEVTQKVTDSALTPHPRKRGRPPGARDKVPWRRPQRQEPEPLVPLKESIEEAQPEVEKAPEEATQPKVEKAPEEATQPEVEMVPEGHHPEDEEPSVLRVYLGTRRSEHSNSVVMGNHDELEEINEEISTNYADTGELHHRKTTIVDKHFASKIADIMDPDPEPKSMAECQKHSDWDKWKAAIEAELRSLYKRELMDVVTAYLYGSLDSEIYMRVPEGLKIPNPKGNRNMYSVRLQRSLYGLKQSRRMWFNRLSNYLLKRDYLNNDHCLCVFIKSLNGFCIISVYVDDFNIIGTTEDIKEAMAYLKTEFEMKDLGKTKFCLGLQLKHLPEGVFMHQSTYTKRVLVNLLARYSATPTRRHWVGVKTILKYLRGTQDLGLWFPKNQDPSMVGYVDAGYMSNPRNARSQTRFVFLCGNTAISWRFVKQTLVATSTNHSEIIALYEATREYVGLMRMIGHIQKSCGLNIDNTPTIIYEDNATCVAQIHMGYVKSNFTKHITLKFFYPHELQKSGEINVLQTKSCENLADLFTKSLPASSFHRCVRGIGMRRLSELQESGGANN

SEQ ID NO: 201396 - protein, 226 aa, Oryza sativa
  unsure (1)..(226): unsure at all Xaa locations
  Clone ID: PAT_MRT4530_96776C.1.pep
WSHVDLLSTRNHAFPKLIAQIIRLKASLPDSCVQFIRMDNAGEFRSKAFDNYYLAMGIKLRTSMGPTGSWGYTLVMRLXSIIKYLEPMTRDLHTARYADCIFDEDYFPALGGEKHPEKCQDIIWNATGMQSLDPRTSEAELEVQRIINLQNITNKLPDAFTDYKGVTRSHIPAVNVPERVEVTQKDTDSALTXPHPRKRGRPPGARDKVPRRRHVSARFIADAGAL

SEQ ID NO: 201397 - protein, 91 aa, Oryza sativa
  Clone ID: PAT_MRT4530_96777C.1.pep
PEPSMFFFCGPPPFVPFSWPRGALFYGFHPRANPALNCHVFPLSPLRCFPLLKVKTSQELIWDGVLPHISGGKWNKFSIDDLIKPEGFGLF

SEQ ID NO: 201398 - protein, 356 aa, Oryza sativa
  Clone ID: PAT_MRT4530_96778C.1.pep
MKRGLIVGKYYMNMSDIAKKEFAELALDDSNYLTWALDVEIKLDSMGLDHTIVLPEVGTVESTKAEKAKALHFLRHHLHPDLKSEYMFEKDPLVLWQSLKDRFDQQGSIVLPQEQHDWITLRFQDYKSVAAYNSALHRIISQLRLCGLKITDTEMIEKTLSTFHPNNIVLQQQYRNSKYPKYFDLISVLLVAERQNEVLLKNHSARPTGSMAVPEAHANVVGNSRGRKRGHGEKKGKGKGSIIFKGKSKGKPRGKGELKKVTGESFGVKQDNCDRCGGRGHWSRNYRVPKHLVELYQKSMNEKKSQHESHFTIEPEAQIEKHDDMLIIVKDGGDVRMDDDWDNLLEKDDDIFGDLK

SEQ ID NO: 201399 - protein, 91 aa, Oryza sativa
  Clone ID: PAT_MRT4530_96779C.1.pep
LGFGLPHRYSGPVEVPGLDVISSLLWSWYAWGCCNASLWGWDVVWPPQRRRRAREVPDGDERVRSRGTGRGVEARAGQYSVPELGKRRLKE

SEQ ID NO: 201400 - protein, 202 aa, Oryza sativa
  Clone ID: PAT_MRT4530_9677C.1.pep
MTQRKQNLISLLCLIDVNFLLKNLFIHEFRMIDRRTFIACAGELCRADVLLNAYGKMLREQCDKLVPGIGTIIKDHAKYANVMVMILTPQMMCFPADVVRKIEEADAAADDAREKVDCSLYYSINRKADKLEELSRLKAGALRKLKSLVCDCSGGQKRSLTEVDDGVLGKKKVKGTPRLIGGAKAKMRSLRQRAPRHCRCCC

SEQ ID NO: 201401 - protein, 114 aa, Oryza sativa
  Clone ID: PAT_MRT4530_96780C.1.pep
SRCCLIRPPTTRCSPGAQNRQMTLCVLYERLRIPASLTRRAIIDLMTRGLVLMPSVALKPANRRHSNQHLRGRLKCVFICPDADGRLDYSITNVTFVKVANVKPNELLGIGMMS

SEQ ID NO: 201402 - protein, 273 aa, Oryza sativa
  Clone ID: PAT_MRT4530_96781C.1.pep
MPNSGGIIGQPCRRRHQSAADEAAGGEVVVVISNGSGEDKPAEWTRGRSTGKLHGPKLIGCMHVCQVFGPQCMLSLVLTEPAGSKSGLPQPRYEIYMYANEHERRFEGCCQRKTKGEQGNNNNNDNNNMVITKRLDEAAQAINEAADSVVAAAPPAKKDEVEAATWKRRIFAITALGMAQGDEKKVAATSLAYKKAAKAVLDAAPADKFKLMDESFKVAVMQVSCATPFYYCRNHVSTKALLAPVDKRLDEAAQAINEAADSVVAAAPPAKKG

SEQ ID NO: 201403 - protein, 106 aa, Oryza sativa
  Clone ID: PAT_MRT4530_96782C.1.pep
GADDDATYAVVSRVLGFSAVPRRLRAADVAPPRHRQQMVAVAPVLESVSGLRISAWRRDVDGALVVNGVPSECVDIVKERDIIVHVMAGVLMDAEFERSFSSEFDN

SEQ ID NO: 201404 - protein, 69 aa, Oryza sativa
  Clone ID: PAT_MRT4530_96783C.1.pep
TSLVYLYTICWFLGVRDYLNKYNLMAKNNGFISLSPHRWLDFFFPYIFLLNFLLFIRASDGILQVFVGV

SEQ ID NO: 201405 - protein, 115 aa, Oryza sativa
  Clone ID: PAT_MRT4530_96784C.1.pep
SLKSSLHFIIDTASGDHQFDPYLSLLKVGGVMVLLSFPSEIKVHPENLNLAARSLAGSVTGGTKDIQEMINFCAANNVYPDIEMIKIDYVNEALQRLINRDVRFRFVIDIENSFK

SEQ ID NO: 201406 - protein, 171 aa, Oryza sativa
  unsure (1)..(171): unsure at all Xaa locations
  Clone ID: PAT_MRT4530_96785C.1.pep
HGNGRPRSTLSKTDGRDPSVHDRATGNGNDDVSDDVSDDVSTGGGSATHARRRTTARRRKRRTPTGRGRRGELTGDQNDGGRATDGAGDEEEAAATFGSTVTAVLQRSSAATKRWTGTATRRRPRRXPPRAVTTTGATAKHGWSGGDDCGTKRHDARALPTARDEDEGGGG

SEQ ID NO: 201407 - protein, 94 aa, Oryza sativa
  Clone ID: PAT_MRT4530_96786C.1.pep
GRHRTRIFLSTRVSRRSPSAAGGGNFWRILGVRRFLLRTPSKHTHSPLWGSGLGRSASSPLLVDESRHPWRIKGIGTTSRCSIECPEDSTCRCF

SEQ ID NO: 201408 - protein, 622 aa, Oryza sativa
  Clone ID: PAT_MRT4530_96787C.1.pep
GEQVLKKKEETHSCHALMSVVQSSVSHTWDAFQLAHASFRLYCVRNNHVQSVKLGPRLLGDAPKINITPPENEMVEEEGSSDVFPAIKIYDDDINMKFLLCGVPSTPDPCLLGSLEDGLNALLNIEIRGCKLQNRISASPPPLHAASLPRGMVTMRCDITTCSSSHVSLLVSGSAQTCFDDQLLESHIKDEIIEKSQLVHALPNNDDKLSSSVPFTSMSTACGASTFEVWMTLPKWAAQVLKHLAPDISYRSLVALGIGCINGTPVASFDRRDADRLLFFCTNQHKDLAIENGPYFHLPRWSASLTKERVKVGLESKPKLLGANGIPEDKKRLIEGPSSSSKAKLKPATMRPIPHSRKQQMHPFMGFLEATVHETSQVKPNLPAAPPVKHNSVPAAPATHRKSTSGPSHAQSIIQLNPLPLKKHGCDRLPIQMCSEEDFLKDVMQFLIQRGHNRLVPHGGLAEFPEAVLNAKRLDLYNLYKEVVSRGGFYVGNGINWKGQVFSKMRNHTVTNRMTGVGNTLKRHYETYLLEYELAHDDVDGECCLLCHSSAPGDWVNCGLCGEWAHFGCDRRQGLGTFKDYAKTDGLEYICPHCSLANYKKKPPPQKVANGFANTVSVSRNV

SEQ ID NO: 201409 - protein, 118 aa, Oryza sativa
  Clone ID: PAT_MRT4530_96788C.1.pep
MREARGVSEGEGEPKSAGMVALSLLVVDTTFGTATSITFMVRRPTGEELKREKEREIGKRGVGILLRLTRGSHCISFLFVDCSSWAFLAKTNRSSWKTRSVYLGTLQLQINRAVSMKV

SEQ ID NO: 201410 - protein, 109 aa, Oryza sativa
  Clone ID: PAT_MRT4530_96789C.1.pep
MKVILVAVPKVVSTTNRERATIPADFDKVHIDRELRQCRDECNLGPPSACSPLDKPATKKPTPRPQAMKPTPPQEASSNRQFIHRSTDLTPPPPPTAAAAYHTGAHGAR

SEQ ID NO: 201411 - protein, 99 aa, Oryza sativa
  unsure (1)..(99): unsure at all Xaa locations
  Clone ID: PAT_MRT4530_9678C.1.pep
IFLIKFYXKKLYLCVIIQNKHLIQGVALHSXKISXSFXYTYPSYFSKRRVRTHNIKKVFYKNDQPWIHLIHTLSSFIPKNKYDTTSTGYRIHTFTQAET

SEQ ID NO: 201412 - protein, 112 aa, Oryza sativa
  Clone ID: PAT_MRT4530_96790C.1.pep
MEGTRRHLEKDLESWRIIEDVQVKVEVQTKSTSSATRSSGPVYTKTGAQVAYVLGLGRSLYGWKAKILMLLFPCPNSFRVNGNRPNKLTSRICPGVASPYLGLWAMYRVGGH

SEQ ID NO: 201413 - protein, 720 aa, Oryza sativa
  Clone ID: PAT_MRT4530_96791C.1.pep
MDDIVGILKGAAGLAADANAFREFFNWAAPRVLAAVRSQQQQHLLQVDPGGVGSASARDNRTAPLHQIEDDLQNLENDLWLIQSTTSTMYDLIDRLEWHSHKDTEDWHLRQIKDVAYDAEDLLDEYNYYALKVKVDTSKNLGQDHSHEPFLEFLNSVNFSKVMKIKNRLKQVFDQSKGLGFHKTPKKFDRLVRPETCRVLDEPDEIFGREKELKELKQNLGVRGRKRGRPVACSTTAEARRTELPVLPIVGMGGIGKTTMAQQICEDRVVRNHFDCILWICVSDEFEVNRLTRDVLKSLGVKSQDSDTRDTLMGSMILVTTRSSKVANLVSNSDPYELNGLQNDVFWDFFKLCAFGSNSSRNSPELEHIRPELERIGRAILPKLKGSPLAAKTLGRLLKSNLSVEHWEDILRSELWKLEQEETDILPALRLSYVYLPRHMKRCFSICALYPKDHKFDKEFLADIWVAQGNIQSLSFFDPLFSDLEESNSIYHLEVLDVHQCPNIDWQEYIDNSHLASAMKLKGLSLQLMRCPDLISIVGAISVSEIVQGRIEDCPKLMEITQPFKVMTDANSTEHANRSDRRAHGGQTGGGDRERQTISAVRPEFDLGQTNVHQAESSQQGYLGVPVREELVKVLKDQCGAINRDMTVVIERMVQTSTERFQRMLNANLTTINNCLDRLERQQSTKYRFGNAISTRTVSPLARSGTHEKLLVSGFYGAKN

SEQ ID NO: 201414 - protein, 51 aa, Oryza sativa
  unsure (1)..(51): unsure at all Xaa locations
  Clone ID: PAT_MRT4530_96792C.1.pep
VDHGPWDGGSQWWSMAHRXFGIGSGTMAPMLLAGWKEEMTNDGWQRGRGPN

SEQ ID NO: 201415 - protein, 936 aa, Oryza sativa
  Clone ID: PAT_MRT4530_96793C.1.pep
MDDIVGILKGAAGLAADANAFREFFNWAAPRVWDAVRSQQQQHLLQVDPRGVGSASARDNRIASLHQIEADLQKLENDLWLIQSTTSTMYDLIDRLKWHSHKDTEAWHLRQIKYVVYDAEDLLDEYNYYALKVKVDASKNLGQDHSHETFLEFLDSVNFSKVMEIQNRLKQVFDQSKGLGFHKTPKKFDRLVRPETCRVLDKPDKIFGREKELKELKQKLGVCGRKRSRPVACSTIAEARRTELPVLPIVGMGGVGKTTMAQQICEDGVVRKHFDCIIWICVSDEFEVNRLTKDVLKSLGVKSQHSDTRDTLMVNLRDSVNAKKFLLVLDDMWDDVLKDERGWRIFHRTLSNGLQGSMILVTTRSSKVANLVSNSDPYELNGLQNDVFWDFFKLCAFRSNSSSNSPELEHIRPELERIGKAILPKLKGSPLAAKTLGRLLKSNLSIEHWEDILRSELWKLEQEETDILPALRLSYVYLPRHMKRCLSICALYPKDHRFEKEFLADIWVAQGYVEAEDASSCFNDLVNRSFFQKAAGQNNIYVIHDLIHDTAQLVSKDECFIIQHVSDLPKIPSKVRHLSIFTNGNISCTELVTICTQNKKLRSLVCNESYKSIKQFAPVIDCWFKELPSIHVLIFKISTVRKLPKSIGNSKHLRYLGLLGSSTFETLPSSVSCLYHVQTINAKGCVFKRYPKGFSDLISLKKIESKGFLYNKDKDKQLLEWSTKGITDEQLQMTKEQIELLPHWNLEHLEIVSYLGVSEASSRHTVGVFSSLSNVIIMNCDALLSLDEFLMPAYMPVVKTIHVKRCEQLALVPVDELHRFSHLEDLCIAYCPKLNMQRRMTLPSSLQMLSLARCPSIKYIDNSHLGSSMTLKGLNLILIRCPDLISILGAISVSEIESGYIDGCPKLMEIKQPFNYKRPRLIIGDVQAMNNDERSR

SEQ ID NO: 201416 - protein, 1076 aa, Oryza sativa
  Clone ID: PAT_MRT4530_96794C.1.pep
MDDIVGILKGAAGLAADANAFREFFNWAAPRVLAAVRSQQQQHLLQVDPGGVGSASARDNRTAPLHQIEDDLQNLENDLWLIQSTTSTMYDLIDRLEWHSHKDTEDWHLRQIKDVAYDAEDLLDEYNYYALKVKVDTSKNLGQDHSHEPFLEFLNSVNFSKVMKIKNRLKQVFDQSKGLGFHKTPKKFDRLVRPETCRVLDEPDEIFGREKELKELKQKLGVRGRKRGRPVACSTTAEARRTELPVLPIVGMGGIGKTTMAQQICEDRVVRNHFDCILWICVSDEFEVNRLTRDVLKSLGVKSQDSDTRDTLMVNLRDSVKSKKFLLVLDDMWDDVLKDERGWRTFHRTLSNGLQGSMILVTTRSSKVANLVSNSDPYELNGLQNDVFWDFFKLCAFGSNSSRNSPELEHIRPELERIGRAILPKLKGSPLAAKTLGRLLKSNLSVEHWEDILRSELWKLEQEETDILPALRLSYVYLPRHMKRCFSICALYPKDHKFDKEFLADIWVAQGYVEAEDASSCFNDLVNRSFFQKAAGYSDMYVIHDLIHDTAQLVSKDECFIIQHVSDLAKIPSKVRHLSIFTKGNISCTEIVTICTQNKKLRSLICNESYRSIKQFAPVIDCWFKELPSIRVLIFKFSTVRKLPESIGNSKHLRYLGLLGSSTFETLPSSVSCLYHVQTINAKGCVFKRYPQGFSDLISLNKIESKGFQFNKVKDKQFLEWSTTEIADEQLQMTEEQIELLPHWNLEHLIIKNYLGQSCPSWLQPDCLKVLTSLELYGCRNIQSLSFFDPLFSDLEESNSIYHLEVLDVHQCPNIDWQGLVALPSSLRRVTLGNFGHSTDHFVSCFRGLSLLTHLEIHCWFLTSIPLQVWMSNLPSLENLRIDNCGSLTSICVSEASNIHTVGVFSSLSTVTISFCNALLSLDEFFMPAYMPFVKTIDVLFCKELALLPVHELHLFSRLEKLCIRNCPKLNMQRRMTLPSSLRMLSLLLCPSIEYIDNSHLASAMKLKGLSLQLMRCPDLISIVGAISVSEIVQGRIEDCPKLMEITQPFKVMTESQKKVQPDQTMGRLGDENLKN

SEQ ID NO: 201417 - protein, 40 aa, Oryza sativa
  Clone ID: PAT_MRT4530_96795C.1.pep
SGPTKSRPAVRASTIFRSNLLWGVTLAQDTNNWSYTTEYY

SEQ ID NO: 201418 - protein, 56 aa, Oryza sativa
  Clone ID: PAT_MRT4530_96796C.1.pep
TRYGESCRPAVPVPELKDNTKPAWSPGNDEYGEGFVDSSDQDQYDVCDKNDDKYRY

SEQ ID NO: 201419 - protein, 510 aa, Oryza sativa
  unsure (1)..(510): unsure at all Xaa locations
  Clone ID: PAT_MRT4530_96797C.1.pep
VSGDSNREINAIPAENLXGDSHELKDSVVDDKDPRHLTEGSLPDKAASNFKNGIKPSASSKQKQQNDSQSEISDHTTGASIFYEKAKKHLADMLKNTSQSASYPTAQVSKSLEGMLSQPHYNVSPPRSDHRGKCHNAFSPEEPEVCLVKAVDVEEPAQERSQLHDNSESNAYSTSVAVDDQVAVLEECGIKEDTQEGIIYATDEVDTVPVEGVGKLDCSKTICNIQCIPAEQYTDSPLPEILEGTXENXEPVQMFMSSPESMVENLEQQDPKTPEPKSSPKLPDGCPEQSNEKKEQPSPVSVLDSFDEDDSSPECKTMKKYELHEVSCGTLYFPDNESGVKVFWEDKNARLDYIMLVLELSELCAEQXNLEVWYLEDELISPCMFEELQNQGDRIDDMKILFDXSLLVLHRCNQTEIQERYFRLSSWLSFVKHDIRTPPVGEKLISEVDKYVDGYLKCSFPSTLXEQIIKRDLEVQAWMDIRSKTEGIVVEIWEFVLDELIDEAVFDLWI

SEQ ID NO: 201420 - protein, 424 aa, Oryza sativa
  Clone ID: PAT_MRT4530_96798C.1.pep
MAIRARSSSYAAAAVALALALASVAAVAGEVFFQEKFEDGWESRWVKSEWKKDENMAGEWNHTSGKWNGDPEDKGIQTSEDYRFYAISAEYPEFSNKDKTLVLQFSVKHEQKLDCGGGYVKLLGGDVDQKKFGGDTPYSIMFGPDICGYSTKKVHTIFTKNDKNHLIKKDVPCETDQLSHVYTLIIHPDATYTILIDNVEKQSGSIYEHWDILPPKQIKDPEAKKPEDWDDKEYIPDPEDKKPEGYDDIPKEIPDPDAKKPEDWDDEEDGEWTAPTIPNPEYKGPWKQKKIKNPNYQGKWKAPMIDNPDFKDDPYIYAFDSLKYIGIELWQVKSGTLFDNFLITDDPELAKTFAEETWGKHKDAEKAAFDEAEKKKEEEEAAKAGEDDDDLDDEDAEDEDKADEKADSDAEDGKDSDDEKHDEL

SEQ ID NO: 201421 - protein, 71 aa, Oryza sativa
  unsure (1)..(71): unsure at all Xaa locations
  Clone ID: PAT_MRT4530_96799C.1.pep
GEKLKPPIWDLKTKLGPPRAPKKARGGGGQPFLKTPEPQKRPVISGKQXTGGRKEFPAGRKKNCGAKNPGG

SEQ ID NO: 201422 - protein, 56 aa, Oryza sativa
  Clone ID: PAT_MRT4530_9679C.1.pep
PSYFNTCRPPMYFSIVGKHVSSLVASNSTNRVNHDVSVKDGTQYPPYRDPHSQLKQ

SEQ ID NO: 201423 - protein, 191 aa, Oryza sativa
  Clone ID: PAT_MRT4530_967C.1.pep
DKLALYFEASGGISYEPAFKVELTGSEIGKQVKTTSTGPFGAPLFDKGIEFELPEPLVLEFPEMTSSTRRNMWLTLIREVIFLHRFISMYSIDSPIHKWEVHSRIILGVIRLHAAREMLRMSPPPPSSFLVFSLYDELPKGDFVLEQLANNLKETLTITPLSASHVFKGLSKSHRVALSAEIAKEHDKDSN

SEQ ID NO: 201424 - protein, 976 aa, Oryza sativa
  Clone ID: PAT_MRT4530_96800C.1.pep
MAKTKPMAAAAAAAAADKKKGKGKKKKQGKNGPAAVAMKARGAAAAAAAAAASGSNNPFEAIWSRRKFDVLGKKRKGEERRIGRARSEAIHKRENTLLKEFEQSAKSSVFQDRRIGERDETLPEFDKVILRQQREHMAKLKRESKYNLSDDEEDEVDVHLPHSLSGKDDFDEEVPLDDYSDEEGHMILSKNRIPLQSGDVPSEIGLPEGTNVHKSKKEVMSEIILKSKFYKAQKAKEREEDEHLVDKLDSDFAMLAQTQAMLSLTRSARMDANKYNSSTVQKDSFGLTAKEIFNKLLIYFLNVSFTLRTWICLISICCQEKPDAYDKLVKEMVMDQRARPSDRTKTPEEIAQEEKERLEKLEKERQKRMLGTAESSDEDDDDDEEGDRSTKLDSSKPISGDDLGDSFSTDEPARKEKGWVDEIYEREGKKIGEDAEGSDNEESDDDGDDDDDDAEDGDDDAEDEDEEEDLSDNDFGNMSARDWEQSDDDEVTVEEDEMEGLKQKEQKISGKVVKKDLQNSKKESNAESQVKDDNLPFVIEAPSNLKDLCSLLDGWSETEIIEIISRIRTCNSIRLAAENRKKMQVFYGVLLQYFAVLATQSPVRFKLIDTLVKPLIEMSGETPYFAAICARQRLIHTRTRLCEDIKVSGKSCWPSLKTLLLLRLWSLIFPCSDFRHVVATPMLLLMCEYLMRCPIQSGRDVAVGSFLCSMVLVATKESKKFCPEAVVFLQSLLVTSLGGNLGSDLRKKINDQFLELKTMEPWLHIHEKVHEVNPANILEVICMDSDAPYFSSDNFKASVLLSVAECLRGFVIIHEELCSFPEIFLPISSLMQEIMDKSDLPGLLQYILHEVIELIKNRSDEVHASRQPLQMRKQKPEPIRQLNPKFEENYIKGLDYDPDRERAQMKKMKKRLKSEKKGAMRELRKDNYFLSAVKEKERIKQEQERAEKYGKAMAFLQEQEHAFKSGQLGKGRKRRR

SEQ ID NO: 201425 - protein, 62 aa, Oryza sativa
  Clone ID: PAT_MRT4530_96801C.1.pep
MDISRANEDYTSYGPVVEMSWHRAGVLLLGAQPWLPVSGIPAVARVGSALGYGRFMRVHGLD

SEQ ID NO: 201426 - protein, 132 aa, Oryza sativa
  Clone ID: PAT_MRT4530_96802C.1.pep
QLLASARDGSDAGGSTAAPLPPASTAGASAASATVAEEGGGKQVMVVLVGPPGSGKSTFAEAVLGGSAAGRTWARVCQDTIGNGKAGTKIQCLKAAADALKEGKSVLLDRCNLEREQRADFMKLGSHVHVDV

SEQ ID NO: 201427 - protein, 424 aa, Oryza sativa
  Clone ID: PAT_MRT4530_96803C.1.pep
MAIRARSSSYAAAAVALALALASVAAVAGEVFFQEKFEDGWESRWVKSEWKKDENMAGEWNHTSGKWNGDPEDKGIQTSEDYRFYAISAEYPEFSNKDKTLVLQFSVKHEQKLDCGGGYVKLLGGDVDQKKFGGDTPYSIMFGPDICGYSTKKVHTIFTKNDKNHLIKKDVPCETDQLSHVYTLIIHPDATYSILIDNVEKQSGSIYEHWDILPPKQIKDPEAKKPEDWDDKEYIPDPEDKKPEGYDDIPKEIPDPDAKKPEAGADEEDGEWTAPTIRNPEYKGPWKQKKIKNPNYQGKWKPPMIATPDFQDDPYIYAFDSLKSIGIELWQVKSGTLFDNILITDDAALAKTFAEETWAKHKDAEKAAFDEAEKKKEEEEAAKAGEDDDDLDDEDAEDEDKADEKADSDAEDGKDSDDEKHDEL

SEQ ID NO: 201428 - protein, 137 aa, Oryza sativa
  Clone ID: PAT_MRT4530_96804C.1.pep
GGQVDLGVSKGTPTQQQKLAESILTPPEHQKKSTRAEESLALSPRSETVLNSSATTHTDPYSEGLAIPRAPDDIGTPSIDLFTSEFPDIAALLDGGADPETGLYLDSPIFPDATQEDHVDSHLPENNEACTEANPDT

SEQ ID NO: 201429 - protein, 181 aa, Oryza sativa
  unsure (1)..(181): unsure at all Xaa locations
  Clone ID: PAT_MRT4530_96805C.1.pep
ARGADKDARAGCRCCAXRCAAWLGHTPALRELGHCLQDGYGARRDAPAGRRLLLHADAREHLSWKKHNHGHHDGSAAEDAVSRFMAAWWDSHRAKAAARGXSLANTGTGSTTVAXDLRLCSHARCGRRETRQHEFRACSVCGAASYCSRACQALDWKRAHRAQCAAARWLAAAAAADGVAH

SEQ ID NO: 201430 - protein, 46 aa, Oryza sativa
  Clone ID: PAT_MRT4530_96806C.1.pep
LISILSPSSCILSTLLGHMKYAFSPCWLLLKIQYRHSMSYYCKLNV

SEQ ID NO: 201431 - protein, 118 aa, Oryza sativa
  Clone ID: PAT_MRT4530_96807C.1.pep
HMLLWGSLLSIVAYDYQDIGTLVILFCIFHACVGFILPSLARLRTMYLPNELRGGMMSFSLGLANAAIFIFLMQGSYHQNIANSTILGFAACGLLMAGGCIHMLRRRRKHPRQDTPSL

SEQ ID NO: 201432 - protein, 212 aa, Oryza sativa
  Clone ID: PAT_MRT4530_96808C.1.pep
ISGQIEINVWSQDTQSWKQVYAQPADPCTAYATCGPFTICNGIAHPFCDYFGMAAFVGRNFSRVLTTFRGTVGYLAPEWISGVAITPKVDVYSFGMVLLEILSGRRNSYKVHTDDNSDQVAFFPVQAISKLHEGDVQSLVDPQLNGDFSLVEVERVCKVACWCIQENEIDRPTMNEVVRVLEGLQELDMPPMPRLLAALAECTVVAHCDDDS

SEQ ID NO: 201433 - protein, 192 aa, Oryza sativa
  unsure (1)..(192): unsure at all Xaa locations
  Clone ID: PAT_MRT4530_96809C.1.pep
MSSAAVNGLAGAGGGIIAQIITYPLQTVNTRQQTERSAKKKKANGAAIANTSTLFQMLQLFQTEGWGGLYSGLKPSLIGTAASQGIYYYFYQILKNKVEDLAVARGKKGLGDGTVGMFSWLGIAAVAGSINVLLTNPIWVLXTRMQTHTQAEKKIMESKKELLLKDVARANSIEVSILNDRLYKLDSEKPRT

SEQ ID NO: 201434 - protein, 1316 aa, Oryza sativa
  unsure (1)..(1316): unsure at all Xaa locations
  Clone ID: PAT_MRT4530_9680C.1.pep
MVNTRSNGNGPNNPNNNNGENPTLAQVLAQQTQLMNMMMQQFQNQQNXGNNHAPPQNKXKLDLLQCTDQEKVSFASHQLHGPASEWWDHFRLNRTTAEPITWLEFTAAFRKTHIPSGVVSLKKKEFRSLTQGSRSVTEYLHEFNRLARYAPEDVRNDEERQEKFLGGLNDELSYPLMVGDYPDFQKLVDKAIRQEDKYNRMEQKKRRIAQFKTQQGNNQKPRLTLGPQSMPQGGSSSVVRPQRQFFNNNAGNNIRNQAPRPVAAPAQQQPAKREQGSKPVVCFNCGDPGHYADKCPKPRRVKVVPTQNNSAVPASKARVNHVAAAEAQDAPDVILGMDWLARHKGVIDCANRKVTLNSYDGRVVTVHALSSESLRSRLNQITLEEIPIVREYPDVFPDDLPGMPPKRDIEFRIDLVPGTTPIHKRPYRMAANELAEVKRQVDDLLQKGYIRPSSSPWGAPVPLFFSKIDLRSGYHQLRIKEEDIPKTAFTTRYGLFECTVMSFGLTNAPAFFMNLMNKVFMEYLDKFVVVFIDDILIYSRTKEEHEEHLRLALEKLREHQLYAKFSKCEFWLSEVKFLGHVISAGGVAVDPSNVESVTNWKQPKTVSEIRSFLGLAGYYRRFIENFSKIAKPMTRLLQKDVKYKWSEECEQSFQELKNRLVSAPILTLPDPKKGFQVYCDASKLGLGCVLMQDGKVVAYASRQLRPHEKNYPTHDIELAAVVHALKIWRHYLFGTRTEVYTDHKSLKYIFTQPDLNMRQRRWLELIKDYDMGIHYHPGKANVVADALSRKGYCNATEGRQLPLELCKEFERLNLGIVGRGFVAALEAKPTLIDQVREAQINDPDIQEIKKNMRRGKAIGFLEDEQGTVWLGERICVPDNKDLKDAILKEAHDTLYSIHPGSTKMYQDLKERFWWASMKREIAEYVAVCDVCQRVKAEHQKPAGLLQPLKIPEWKWEEIGMDFITGLPRTSSGHDSIWVIVDRLTKVAHFIPVKTTYSGSRLAELYMARIVCLHGVPKKIVSDRGSQFTSNFWKKLQEEMGSKLNFSTAYHPQTDGQTERVNQILEDMLRACALDFGGSWDKNLPYAEFSYNNSYQASLQMAPYEALYGRKCRTPLLWDQTGERQVFGMDILREAEEKVKIIQERLRVAQSRHKSYADNRRRDLSFEEGDYVYLRVTPFRGVHRFHTKGKLAPRFVGPYKIVSRRGEVAYQLELPQSLAGVHNVFHVSQLKKCLRVPTEEANLDQIEVQEDLTYVEKPIRILETSERRTRNRVIRFCKVQWSNHSEEESTWEREDELKSAHPHLFASSSESRGRDSV

SEQ ID NO: 201435 - protein, 617 aa, Oryza sativa
  Clone ID: PAT_MRT4530_96810C.1.pep
MATTKEEMCLLISAEEKGKNEGNLLITAKPHESTSQNVIRTSRKASNGVAGRGKKKGDRSPSSRRRWSVAAATGRSCESVAAGSSSSSPPPRQHPSARRGRDGEGEERGAELAVRATEATSVVKWWGVAGGRHRGRRRGTRGGGRRGGWRWGSAMSAILFRVSPLLRMQYPDFRRALTHNIASGRTLFGRAFSQKTHPHRPPLLRRIIFCRYLPSRCLLRSSRTSRGLAAADLHLARRGEQIRAGWRMSSAAVNGLAGAGGGIIAQIITYPLQTVNTRQQTERSAKKKKANGAAIANTSTLFQMLQCVIELLQLFQTEGWGGLYSGLKPSLIGTAASQGIYYYFYQILKNKVEDLAVARGKKGLGDGTVGMFSWLGIAAVAGSINVLLTNPIWVLVTRMQTHTQAEKKIMESKKELLLKDVARANSIEVSILKDRLYKLDSEKPRPYGTIQAVREVYRESGIRGFWKGLIPTLIMVCNPSIQFMIYETLAKRLRSKRSGKELPKKNLTAMEVFLLGAIAKLGATVVTYPLLVVKSRLQAKQEIGRNVMSRYTGTIDAIIKMIRYEGLHGFYKGMGTKIVQSVFAASVLFMVKEELVKFVVMLIARSRTVLGPSSKKR

SEQ ID NO: 201436 - protein, 161 aa, Oryza sativa
  Clone ID: PAT_MRT4530_96811C.1.pep
MSPTASPMSAPAGSSSFYSPFGLHVQPDHWSFFHDHEPVFFMPDFKFAAAAAASAQPKPTSAADMPHKIVKQVEYQFSDINLVANEFLLKIMNKDSEGYVPLSVIASWKKIKSLGATNQMLVKALRTSTKLIVSDDGKKVRRRQPFTEKHKEELQSRMIIA

SEQ ID NO: 201437 - protein, 219 aa, Oryza sativa
  Clone ID: PAT_MRT4530_96812C.1.pep
MAIKDRAKFLGVTRRLLAAAGQRARSGAVAVALDVLLWLQAAGNKGMLGYDDDDESAAADLSEIIELYSQDDMHAGALHPSFNFSKDDISHDMLHAGHKECVMLEDLLKRCRRRRAKLKLYNLLSLKLLPIYRKLSGNHNCNLLLAVLKVSAEDGKGNKSSVTVHLYGPNTDLVVDRKRELQQAQRTSLFFQIFKGFLTMKDGDISVLFHKNMLMRMYY

SEQ ID NO: 201438 - protein, 51 aa, Oryza sativa
  Clone ID: PAT_MRT4530_96813C.1.pep
LLIRVDSHAGREEELLPRRIAARRALADDTDSINQYDQVSIPSAGRRPTRP

SEQ ID NO: 201439 - protein, 74 aa, Oryza sativa
  Clone ID: PAT_MRT4530_96814C.1.pep
TRKPQERAYKHAPSKNIPACTVHTETTTTGRNHYSNLHGTIVRNYTQIHTELLLKAQRIKFFLMTNLLLELARL

SEQ ID NO: 201440 - protein, 92 aa, Oryza sativa
  Clone ID: PAT_MRT4530_96815C.1.pep
MEMELGLGRYWGVGRRRCGACAVAPAAVYCRTCDGDGGGGGYLCAGCDAEHGRAGHERVWVCEVCELAPAAVTCKADAAALCAACDSDIHDA

SEQ ID NO: 201441 - protein, 51 aa, Oryza sativa
  unsure (1)..(51): unsure at all Xaa locations
  Clone ID: PAT_MRT4530_96816C.1.pep
XXSSDAMRGSENGVMKYRRNVXLIVACDXVRCDGGPTXPPTRPPTSPPTSP

SEQ ID NO: 201442 - protein, 480 aa, Oryza sativa
  Clone ID: PAT_MRT4530_96817C.1.pep
MAVTRIGLAGLAVMGQNLALNIAEKGFPISVYNRTTSKVDETVQRAKVEGNLPVYGFHDPASFVNSIQKPRVVIMLVKAGAPVDQTIATLAAHLEQGDCIIDGGNEWYENTERREKAMEERGLLYLGMGVSGGEEGARNGPSLMPGGSFEAYKYIEDILLKVAAQVPDSGPCVTYIGKGGSGNFVKMVHNGIEYGDMQLISEAYDVLKSVGKLTNSELQQVFSEWNKGELLSFLIEITADIFSIKDDQGSGHLVDKVLDKTGMKGTGKWTVQQAAELSVAAPTIEASLDSRFLSGLKDERVEAAKVFQGDFSSNLPVDKAQLIEDVRQALYASKICSYAQGMNIIKAKSMEKGWSLNLGELARIWKGGCIIRAIFLDRIKKAYDRNSDLANLLVDPEFAQEIMDRQAAWRRVVCLAINNGVSTPGMSASLAYFDSYRRDRLPANLVQAQRDYFGAHTYERVDMPGSFHTEWFKIARAAKM

SEQ ID NO: 201443 - protein, 72 aa, Oryza sativa
  Clone ID: PAT_MRT4530_96818C.1.pep
GGYTSSGSPPGAPPGFFLTPALRGFWPVLLGGPLFPPLSLFGAPSGPPWTKRGEKPFKGFPRGEINPPFFPD

SEQ ID NO: 201444 - protein, 72 aa, Oryza sativa
  Clone ID: PAT_MRT4530_96819C.1.pep
NRPPLIFLSLFFFYFYFFYFLFFFYYFFYFFLERKFNLVYYFFTPPPLQINLYYVHKNKLSSREKTKLEVQS

SEQ ID NO: 201445 - protein, 824 aa, Oryza sativa
  Clone ID: PAT_MRT4530_9681C.1.pep
MAPPIVGNGRAFPGHQPWPPAAIPVAVPPSPVAGSLFSHIKWDPHPPFSRFSPLPSLPVRRSRLLFPGATSDLWGNRRNGAPAGNQWHWCHCTPSSRLLYVAGAPIDAAVSSFDTAASPPSPASPPPRPKLAGVASSSASSTSRSPVGSCTSPPRHHHLRHRSGKVALGLASPSTEPLRGPSSLSPFVLVVDVPSVARLVVSRCRLRHRHRSGVFHVVPSPCSHCWLSLIAPSPAPVVVVLVLSSFPIVVAPVLVFVLGSASSSLVPAASRLRPRIAAEAVPSPFVSVVPVCLRRARSSLSFPRLVAWWANEGYTSCGPVVEMSWQRVGALLLGAQSCLPVPGVPAVGGIGSVLLSMARMGWKLCHVFRLYTVVMNNTGNKGYGNDGSDDSRTQANGNERSINETSPELIQVVVNQTNMLATAFQLLQNWNNPARATNVQVPTVQQQCKLSEFLKTGPPTFAMAVDPMEASDWLRTVEKKLGLIQCTDQERVGFATHQLVGPASEWWDSYEASRPEGHTITWNEFSSVFKRSHVPAGMITLRKREFRYLKQGDLTVTEYLHEFYRLAHYAPEDVETDEDKQEKFLQGLKDELAVQLLLEDYEDFEKLVDKAMQLKSEHNRMTNCKRRIVNIPVFPGGSQRQRTEPLQITGSSVVHQEFLPQEDERNADNNTSNTNDDDTTNNHGSCPISDHSNKACNVSSIHQDVNDSINVGTQNDNLSNFDTEKDSNGDSNYGTTDANVSKDFQPPIPTPSQNDRPQTDSSAKKTLICYNCKEPGHYSRDCLQPRQNRPPHYRQFTRSRHPNRIVVTGANAVPVKPSASQKQP

SEQ ID NO: 201446 - protein, 58 aa, Oryza sativa
  Clone ID: PAT_MRT4530_96820C.1.pep
ARARAQFGASLKEFIEGKDFLTYSYKEQTVDCLCENQMHCRKGYLSHSHHLVRYYPIF

SEQ ID NO: 201447 - protein, 326 aa, Oryza sativa
  Clone ID: PAT_MRT4530_96821C.1.pep
MAHFQGQQHGHPAARVDEYGNPVAAGHGITGTQEAGAGGYGAAGNVAQPQHAFGGATDAGGYGRQAGYGATGTGTHDAAGYGGSGQPAYGATGTGVHDAGGLMPGHTAGHGTTGTGVHHGAGAGLPAGQTAGYGTTGVTGAQHGAGGLGTGHTAGYGTTGAHHGAGGLGTRHMAGHGATTTPDTMAYGTTGTGAPHGATAGTGAYPHAGGQFQPAREEHKTGGILRRSGSSSSSSSSEDDGMGGRRKKGIKEKIKEKLPGGNKGGQQQPTATAATGGYGAGTGHTAAAGTTTDAGGTAYTPTTQPTHEKKGMMEKIKEKLPGGGHH

SEQ ID NO: 201448 - protein, 208 aa, Oryza sativa
  Clone ID: PAT_MRT4530_96822C.1.pep
MAMQVAAPSRRRPSLGRQKIEIRRIESEEARQVCFSKRRAGFFKKASELSILCSADVAAVVFSPAGKAYSFGHPSVECLLERFLPDSSSGAAARVRRGANNNGGGGMVGELNRQYGELRAMVEAHKARRERADEKIEMERAAGRWLPMDADVRRMSPEELMAFGTGLMAVQAAVSARADQMLRDALLIGRRPPTTTTAGFGFFHMPHY

SEQ ID NO: 201449 - protein, 124 aa, Oryza sativa
  Clone ID: PAT_MRT4530_96823C.1.pep
MDHLQISNNHSCRLRARATTAMPSVARARRWQHDYPCGGRRLPLTTTRNDCSVHLQSPIVRGNKFDHPLISSTCPATDTGEQPNVTRPHQDHLRRVAVSPEEATGRCGGQTAKKAKMPPTGGHS

SEQ ID NO: 201450 - protein, 410 aa, Oryza sativa
  Clone ID: PAT_MRT4530_96824C.1.pep
MCCPCRCPAFEVVYEEARFCGLITRGAMRYHSELAIRSGVVWEVCHVEQASLGGGPTCTCLSAYCFVESCVVVEAESCLKREIDPETESETAGCRLPTTTYEAPIRRQCKTHRMGAATSVRYVSLPGCLDLFVPSGCFGTPDRSHRWIGQSMQIIVRTAGLVTNELIDRVAVQKQQVLYTLTTQQERPVSILSITAPIRTPNLSDGSDFLVMGLHLLSPKPIHFLSPSSSPMEIIGEKEKMNRLEQRSTVARSLILFGNAIFQIVNANDQAHKKDATDLSSSFMIYRLLYVFFSVEVFFFFRKIPPLILQCLHRIASQCAMGSRRHQVAPLYYYSWCGGPFLLTGQDPASDDELDPMRPVSSSQLLGRLHQHTRARSLRTSPPDFFKPRYILRLPLTRGVMVVNPIHELA

SEQ ID NO: 201451 - protein, 154 aa, Oryza sativa
  unsure (1)..(154): unsure at all Xaa locations
  Clone ID: PAT_MRT4530_96825C.1.pep
MCCPCRCPAFEVVYEEARFCGLITRGAMRYHSELAIRSGVVWEVCHVEQASLGGGPTCTCLSAYCFVDKCVCKRXDSTPCRREQPSTCAACATCATHERSDSPGSVRQXKTHRMGAATSVRYVSLPGCLDLFVPSGCFGTPDRSHRWIGQSMQI

SEQ ID NO: 201452 - protein, 123 aa, Oryza sativa
  unsure (1)..(123): unsure at all Xaa locations
  Clone ID: PAT_MRT4530_96826C.1.pep
KWYKTTIFNPILLFLCGYKYGIHCNLISPNRGASGKTPRGGAPGTQIPPIVSSLFTIHLAVLFYNFLXLGKNPXXFTPTLIPLCNKFPPFPHLALXTQKKAPPXSPLPQQFPXPLNXXNGQIX

SEQ ID NO: 201453 - protein, 126 aa, Oryza sativa
  unsure (1)..(126): unsure at all Xaa locations
  Clone ID: PAT_MRT4530_96827C.1.pep
HPGTTRAAETTAGAEEDGGAARVDEDGGAPAVGGRNGGADEVDGGTAKPKEVTPRREEVRDDDGGEPELGVDGGEEWXRRERASDGESERRVAETEERSTGRDYIAPGEGKSGRRGRNRPRRSRPP

SEQ ID NO: 201454 - protein, 266 aa, Oryza sativa
  Clone ID: PAT_MRT4530_96828C.1.pep
MADHQRMRIHPVDLEAGGRHRPTAPLVPGGSFRSDKGDPAAQPQQPPSHGHLPPPPPRRVAPPVPPLPPPKRRRGCCCRLICCVLVTVVLLAVLAAAAVGALYLVFDPKAPRYSVDRLSVSAFQVDPTLTATARFDVTVTATNPNARIGIYYEAGSSLSVWYDAHRLARGALPAFYQGHRNTTVLAVVMAGQAQLGGAVMSALQDAQRTGAVPLVFRADVPVRVELGSLRLWKVTSRVRCDLVVDSLGVNNPVNIKASNCKFSLKL

SEQ ID NO: 201455 - protein, 644 aa, Oryza sativa
  Clone ID: PAT_MRT4530_96829C.1.pep
MEKKGHRAFAKAIKSFGSSERHKRSKSDLEDMCAKDALYASDKTCVQPKPDAVKVKVKSDINAEVQPGRGAQSFLRKEILQLEKHLKDQQVMRGALEKALGPNATAAPVNVSNENPMPKDAKELIREIATLELEVKNMEQYLLTLYRKAFEQQVPTFSPPDHRGAPKPPVPAMAAVSSQPVQLQKSPSVKASRKNNRADAMLRSSYPPPSRRTLNDPVMTDCSTSGCSSRLGESDVLRCQSAVSYRGICSSRISPSEDSLARALRSCHSQPFSFLEEGESTAAGVISLAEYLGTNVADHIPETPNNLSEEMVRCMAGVYCKLADPPLVHHGSSSSPTSSFSSTSAISPQYLGDIWSPNYKRESTLDSRLINPFHVEGLKEFSGPYNTMVEVPLICRDSRRLKEVEDLLQTYKLILYRLETVDLRRMTNEEKIAFWVNIHNAQLMHAYLKYGVPQNNLKKTSLLVKAACKIAGRSINVAVIQSMVLGCNTYCPGQWLRTLLHPRIKSKVGKVGHVWQAFAVAQSEPLLRFALCSGSHSDPAVRVYTPKRLFHQLEAAKEEFIRATVGIWKEQKILLPKLVEAYAKDVKLSSQGLVDMVQRYLPESLRMAMQKCQQSRSSKIIEWVPHNLNFRYLLSRDLAFPHLN

SEQ ID NO: 201456 - protein, 191 aa, Oryza sativa
  unsure (1)..(191): unsure at all Xaa locations
  Clone ID: PAT_MRT4530_9682C.1.pep
PPPPEPLLSGPACRRPFLPXRATDWWGPLAGAAPRLDDVSPGIYCAINDLSSLIACLQCLLCMSLDSDSSDAPVYFEIVAEVPPAAEQGKSCLSLEHVDPILQMLYCKGGRDGXGWALRRPMRLPDSPRHERGLPAALRGVGVKPEVWCAWLEGVMRKVLSWPLSDVDLNVNIVVCVPRPVLDGDFNAHSA

SEQ ID NO: 201457 - protein, 230 aa, Oryza sativa
  Clone ID: PAT_MRT4530_96830C.1.pep
MREIWSSFGLWMLLLMLEAVSPAKIHGNPANDLVALVNANRTATKLPHLRTSAGLGCMALQYISDCIGIGIGCAGDNTVACQPPEAHITEVYAANCGVELPTVDVITGRLLGCHRQRSDAEAALEAVLSGSGNSTAARAVIRGKEHTQVGAGFDRAHRRGPFFWCLLFSSGSANSTFLLEAAGKGVHQSHGCFSVPDNTSLSLSCSSAAAAAVPLLFFILLLLPVLQVYY

SEQ ID NO: 201458 - protein, 55 aa, Oryza sativa
  Clone ID: PAT_MRT4530_96831C.1.pep
DVVSTDFVGDNRSSIFDAKAGIALSDKFVKLVSWYDNEWGYSSRVVDLIVHMSKA

SEQ ID NO: 201459 - protein, 540 aa, Oryza sativa
  Clone ID: PAT_MRT4530_96832C.1.pep
FRTEKGKGIVAPIESVAPKWPPESADLDHARHRWSRMSEEERQAFLTFMSHIDSFHIAGCKKELRSSMPERVTGCEMELLKSWRWEPMPSDGDDLAERALILSKLKSIVSWLIDKDAVSLSLLYIMYKFIMSRVRPVKPSVDPYYKQENQKDSLGLATWMEESGTLFFDYRKNASRKTDDSSQPDEFFDWLFCESLLEDRCESWLGMREKCVNLGPAIFKKITEELDKLKLKCSSCEELKQKGGVYFLPKAILESDIDIEPYFYDGIGSVQTEMLLIDAEVDYQKKRLLEACKVDYLAAILPIAKSYLWAKLNNNPPEKVLPLPPPNGLQLQAPLNVILRSLWHIRRFHDTLQKIPRECRDVTVGDFQIEKELLEIFDSWDLVKDGKPCEPSGSTRFADFTSSLIKKSGKMTASKIVKSLFQRLHSSHTPLHFEFRGETSELQTPTEPSLVGCICLVHDLFGLHLYENKFNCLNMVHTKFAYSIELGAGGETKFKSFSELLVARESRNGSVGQKVAQYSLLCPPRLFMTGEKVRSVDEII

SEQ ID NO: 201460 - protein, 127 aa, Oryza sativa
  Clone ID: PAT_MRT4530_96833C.1.pep
MASRLPLAVLLLAACSSTAAATSYTVGDGSGWTTGVDYTSWAASKDFKVGDSLVFNYAKGLHTVVEVRAADYMACTAVSPVSSDSSGATTVALKTPGSHYFVCSITGHCGAGMKLAVTVGGSSSPSS

SEQ ID NO: 201461 - protein, 862 aa, Oryza sativa
  Clone ID: PAT_MRT4530_96834C.1.pep
MAGVGEPRRSPRKSNRDWLDCDRRFAQQADGVILQVLRRSPDAVERATQLMCRYKKSPLAYAILAEAWLASGNLVMAKTHLRSATVLAPRCPYISLALAAVLVRMGSWEEAALPLAGRQHQRHRQLPKGQQQRIAVERERIRLLRFRAEKGKGIVAPIASVAPKWPPESADLDHARHRWSRMSEEERQAFLTVSFQDMKSHFLSRSGTSRWQTRRALSGAEELVNGCGSFSYRLCPFCFVIFVDATEFMSHIDSFHIAGCKKELRSSMPERVTGCEMELLKSWRWEPMPSDGDDLAERALILSKLKSIVSWLIDKDAVSLSLLYIMYKFIMSRVRPVKPSVISMCGSCGIGQLSSAHLKELLDLLKWLPHTHTDYKQENQKDSLGLATWMEESGTLFFDYRKNASRKTDDSSQPDEFFDWLFCESLLEDRCESWLGMREKCVNLGPAIFKKITEELDKLKLKCSSCEELKQKGGVYFLPKAILESDIDIEPYFYDGIGSVQTEMLLIDAEVDYQKKRLLEACKVDYLAAILPIAKSYLWAKLNNNPPEKVLPLPPPNGLQLQAPLNVILRSLWHIRRFHDTLQKIPRECRDVTVGDFQIEKELLEIFDSWDLVKDGKPCEPSGSTRFADFTSSLIKKSGKMTASKIVKSLFQRLHSSHTPLHFEFRGETSELQTPTEPSLVGCICLVHDLFGLHLYENKFNCLNMVHTKFAYSIELGAGGETKFKSFSELLVARESRNGSVGQKVAQYSLLCPPRLFMTVFDWEDINGSYNNMHEVLISLATELDISHIYRGLHSGCMYTLVSAHCYDWWHPASNILDWMEIILIWVIPILSCQPAGSWQESIERYRQSKLRPEILFFERVE

SEQ ID NO: 201462 - protein, 131 aa, Oryza sativa
  Clone ID: PAT_MRT4530_96835C.1.pep
ASHRQHQCISRRGSPAVGQATETSHTTRTSSREVMGGSQFLSIPLLMTCIIWFVASLRVFSICHRHVAVCCVAARSDYTGSWIHLLGMRLFPFHVELLILIFPRSSLIQHFSELNRQQVISHRSQDFRDWR

SEQ ID NO: 201463 - protein, 58 aa, Oryza sativa
  Clone ID: PAT_MRT4530_96836C.1.pep
MAYCAKPHPTERSATGWEGRRRWSGDGLAAVDPRGDGGSSGGSGRRSSLSVISVIDDG

SEQ ID NO: 201464 - protein, 993 aa, Oryza sativa
  unsure (1)..(993): unsure at all Xaa locations
  Clone ID: PAT_MRT4530_96837C.1.pep
GARPRGRLCLPQASGHDTPRGIYIYIYIYIYIYIYIYIVSLTEFARHPNLHVVNKRRIRXHSQVQDRFSLCLTSREGDGXVVCASHGAVGSLLWKLSALLSDEYNLLTGVKSNIMFLKAELESIDVFLKKMYEFEDPDEQSLFWMKEFRELSYDIEDIIDASMFSLGHESNRRPRGFKGFAGRCMDFLTNVKTRHWIAKKIHCLKCCVIEASNRRARYKVDGSVSKLSRTSLDPRLPAFYTETTRLVGIDGPRDKLIKMLVEGDDALVHQLKVVSIVGFGGLGKTTLANEVCRKLEGQFKYQAFVSVSQKPDIKKILRHILSQICWRECISDEAWDEQQLIHTIRQFLKDKSRILTTTRIIAVAKYCCSPHHDNVYEIKPLGAIHSKSLFFKRTFGSEDKCPLHLKEVSNAILRKCGGLPLGIITVASLLANKASTKEEWESIHNSIGSALEKDTDMEEMKRILLLSYDDLPYHLKTCLLYLSIIPEDYEIKRDRLIRRWIAEGFIPTEGVHDMEEVGECYFNDLINRSMILPVNIQYDGRADACRVHDMILDLIISISVKENFVTLHGDQNYKIVQQNKVRRLSLNYHAREDIMIPSSMIVSHVRSLTIFGYAEHMPALSKLQFMRVLDVENKMVLDHSFLKHIHRLSQLKYLRLNVRRITALPEQLGELQNLQTLDLRWTQIKKLPSSIVRLQKLVCLRVNSLELPEGIGNLQALQELSEIEINHNTSVYSLQELGNLKKLRILGLNWSISDSNCDIKIYADNLVTSLCKLGMFNLRSIQIQGYHIISLDFLLDSWFPPPHLLQKFEMSISYFFPRIPKWIESLEYLSYLDIYINPVDEETFQILAGLPSLIFLWISSRAATPKKGLIISYNGFQCLRELYFTCWESKTGMMFEAGAMPKLEKLRVPYNACDICSLNGGMDFGIQHLCSLKHLHVEIICRGAKLQEVEALENAIKSAAGLLSDELTFEVSRWDEEEIIDSSSLLSFSPSSL

SEQ ID NO: 201465 - protein, 182 aa, Oryza sativa
  Clone ID: PAT_MRT4530_96838C.1.pep
MASAAAAAAALVVVVLAVVVSPASGQVATSCTASLITTFTPCLNFVTGSTNGGGSPTQQCCGSLAEMVRSSADCACLILTGNVPFSLPINRNLAISLTKLCNSMSVPLQCRDTASQIPPPAPSPPETSVQPNSAVDPTAMSPSPPIIQGQRPLLLPSSAWRRAHVSMASVSVVLLIAASVLA

SEQ ID NO: 201466 - protein, 1513 aa, Oryza sativa
  Clone ID: PAT_MRT4530_96839C.1.pep
MAATTGDWDGGGVGSKRRRSSLGQPVAEAEAEGALRRGRRGWGGNASFLSSHHNRRADHTYSLSSSMRTMVAGALAIASSFQAALLICSALAAAGVRSRRPSRLDRALAPPLGAGGDNVLGAMLSAGVFNPVLRDALCVAHHFAHSLADLLQRPRRRRPAHNWAPSLLGPGDALDASSRRTHLAALATICQRDESDINVAPEPANALGSLLLKLHPGGLLRWLVSSLKRAGSSSTTIAGVTLESSAKTQIFRHYDEVDHDNAACSVCFVALAPWLLPPRRRSGAAALADDLLLDLPPPPPATSAARGLLPLPVRSAPPLLPLIRREDDWTRESREEEEGEPRRTCGAHRILALRPPSRHEGGNPKPENATSPRGRDKKGRTPCLAGSHARASSGHTAPGPHMAVTAPRVHLRVWIGGSTVWDSLGFSGISRNKAGVDDNVENILRMIGEENESAKTEPSDDSGNAFKKSKLSSLVKGFHEEYEYLHKHYQQLIGKLENVGHSSSDSDSSDSDDEGDSSDNNNLKTKVEDALSEENGWKQKLVEDREAKEESLEAEIEKLKQNTEEQAKEISDLKHLLDKAIKDKEATRVELSSDVANLSSENENLKLLVETTEREAGESHKTITLMENEIRTLSVEKQVTEKERDDLKISIVDLENMNGDLSNQLQETNEKCTFLSSQLEKAQLAEKEVQTLLSEIEKIKNENLMLSRENDNLKACEQNLGTECSQLKATIAETKAENSTLTEEKHLLESKLKLLGVEIDDLIAEKEELMNSMNIERGAAAEEKEMLVSKHSKCLTELEKAQSKLQQLEASFENLGNDLEQELERISIMHKNNEDLELVNSNLQNDLATVQGQKNEAVASTLELGNKLEEKNQQISNLQEAVENLEAAKTNMYNEVTVHQEKCTFLSSQLEKAQLAEKEVQTLLSEIEKMKNENLMLSRENDNLKACEQNLGTECSQLKATIAKTKAENSTLTEEKHLLESKLKLLGVEIDGLIAEKEELMNSMNIERGAAAEEKEMLVSEHSKCLTELEKAQSSVKELESTNGDLNDKIAVLQKEGSSLASELQQLEASFKNLGNDLEQKFEQISVMQKNNEELELANSNLQNELAMVQEQKNEAVASTVELGNKLEEQNQQISNLQEAVENLEAAKTDMYNELTVCQEEKNAALLQLANDDLHKSIANLEKELEDTKVSSHAEILALQEQKNKALSDLQQSEISIENFRMELEQGREKISILDLSNEEMKDNNYRLNQQLEEIRTSLHAEIAALHEEKDAAQLELQQSLASARNLETVLEKQTENLSTLQHANDNLKKNNCTLTEQFEVIKIELQEEVKMAHEEKDATLTQLEKSEDSIKNLESELAQLKEELSVQMESNSSLNKQLEEAILKVSNLTEELETVQAETANREIAIACLQQSLRGIIGSCQRLQYAYGELARGRRRACRGGETAALGGGERRRLRAPNERCSALLLVLSLAAEKATLNELDGDGYYVDDLIIGVSSMPMEDYRETLPASFTS

SEQ ID NO: 201467 - protein, 150 aa, Oryza sativa
  Clone ID: PAT_MRT4530_9683C.1.pep
RRGAEDEDDEGAARRCDAGGGGGAADGARVEEGPTGEIPVRRMERPAWHDGVPAKFRRCRGLVGEDDGVPVPGEVVATSAGAQETRQRRPKAEQWRQCHCCRWGCTSGGLRGKRRAGRCRRGDCDAGGGDGTAGRRADAAAGAAGVGRRH

SEQ ID NO: 201468 - protein, 43 aa, Oryza sativa
  Clone ID: PAT_MRT4530_96840C.1.pep
QLLIVPIVLLAFVAGILGGGGPSICSDNLAVQHSCPAIPGRGH

SEQ ID NO: 201469 - protein, 176 aa, Oryza sativa
  Clone ID: PAT_MRT4530_96841C.1.pep
LSQLKEELSVPSESNSSLNKQLEEAILKVSNLTEELETVQAETASKINDMETNTKDLVNTIVLLSSQKNKVEEHMKIITEACMEKMSFMKDFEDQVKQKITDREIAIACLQQSLRGIIGSCQRLQYAYGEVSTKASHLEVLRREYLVQIDTLENKHTEIMEKHRQLGEENTFANKE

SEQ ID NO: 201470 - protein, 75 aa, Oryza sativa
  Clone ID: PAT_MRT4530_96842C.1.pep
TSENEPRLLPGGCRICPPWRQRWSIECYIHDHIHRAISIVQQLAASCRRERANECCETPAPATYMCNTRVDVVGG

SEQ ID NO: 201471 - protein, 260 aa, Oryza sativa
  Clone ID: PAT_MRT4530_96843C.1.pep
MADNKNGKKIGSYDNSASSSQANESPGVGYMAVAQHLIRQNKQLITLLQQDSLQYQNWSQNQHQAQMNPTQPFASQVSITPPPQKARNAKPPGDLQDTAELWSGFGGLTGGSPAVRPVASRRSDRRRQESAADHLGGSTGVRSLSDQRSLGGQTGAFTSSPFWVLPSRVSRTFGIGVAFTLTISTVTALTMANTIENHGKMNANAGGICMLAHASLSVQTCEAYVLPSVQQNAGKLQSDGESPAAETAASVPEQPLLRTQ

SEQ ID NO: 201472 - protein, 747 aa, Oryza sativa
  Clone ID: PAT_MRT4530_96844C.1.pep
METISNIFHNDPLPPLGARANQSIKLRKFIISPYDSRYRTWETFLLVLVVYSAWICPFELAYLRNLSWKVSLVDNIIDSFFAIDIILTFFLAYLDQKSYLLVDDPKRIVARLLSMLRLWRLRRLSELFARLEKDIRLNYYWIRCTKLISVTLFAVHCSGCFNYLIADRYPNPARTWIGAAIPNYRSQNLWVRYVTAIYWSITTLTTTGYGDLHAENQREMLFSICYMLFNLGLTAYLIGNMTNLVVQGSCRTRNFRDTIHAASQFAARNQLPGHIKDEMLSHICLRYKTEGLKQKETLDSLPKGIRSSIACNLFLPVIEKVYLFHGVSFTCMIQLVTEMEAEYYPPREVVILQNEAPRDVYILVSGAVEERVEIDGTEKVQEVLCNGEIFGEIGVICSIPQPCAFHTIKVSQLLRLNTAVLKNIIKENSDDRRVILNNLSQKMNQDHRFSTEVMEKSLQMMHQHFGEYNRCSALNQDNEKNELKANNGHSMALEWKRVTIHMYSQRNKRPEAPLAKVINLPGSLDKLFAIACQKFNNYRLTKLVNPEFAEIDDITVIRDGLGEFRLVNIYTRKSQQQFILNVSKLYQFDIGTRQGHGAMWHAAAGGGDDEGDGGARRPMHGVPNKETTASRGSLKVEEKGMDVVVVEGIQEAIVRTRTTPRPQGQGRLYRSWSQGEDDSTSHRALQSPPPSRIFRDFDRNQINFPIETQFQEGFCGGLSVTKLYNMLNFQLGLELCRIKRNITDLIP

SEQ ID NO: 201473 - protein, 133 aa, Oryza sativa
  unsure (1)..(133): unsure at all Xaa locations
  Clone ID: PAT_MRT4530_96845C.1.pep
HLKGNYYQEQTGHHRRSGPARLLLGGVGPALLAESDDGGDEAAVVLHPLVGAAAGLLLLVLLRHLGRLAAHLPGASERSVHLTHVDGGEPAAAAAAPRPRGGRRGGNPXQFLHPGIXILNAXRXEPPCPLXVI

SEQ ID NO: 201474 - protein, 498 aa, Oryza sativa
  Clone ID: PAT_MRT4530_96846C.1.pep
MDPRARYPPGIGNGRGGNPNYYGRGPPPSQHQQHQHQHQQPPHPHHHQYVQRQPQPQQTPHNSQHQQWLRRNQIAAEAAGASEQKAPPVADGIDSSSQDWKAQLKLPPQDTRYRTEDVTATKGNEFEDYFLKRELLMGIYEKGFERPSPIQEESIPIALTGSDILARAKNGTGKTAAFCIPALEKIDQDKNAIQVVILVPTRELALQTSQVCKELGKHLKIQVMVTTGGTSLKDDIVRLYQPVHLLVGTPGRILDLTKKGVCVLKNCSMLVMDEADKLLSPEFQPSIQELIRYLPSNRQILMFSATFPVTVKEFKDKYLPKPYVINLMDELTLKGITQFYAFVEERQKVHCLNTLFSKLQINQSIIFCNSVNRVELLAKKITELGYSCFYIHAKMLQDHRNRVFHDFRNGACRNLVCTDLFTRGIDIQAVNVVINFDFPKSAETYLHRVGRSGRFGHLGLAVNLITYEDRFNLYRIEQELGTEIKPIPPQIDRAIYCQ

SEQ ID NO: 201475 - protein, 272 aa, Oryza sativa
  Clone ID: PAT_MRT4530_96847C.1.pep
MEALDPATMASTGRGCKRATVDNDKAVDGGGLGSVGQCEEEFGQLDSHASLLDASVAHRLTSLPLCLIAPSVCHGATMKYGTYDGRAAPNTDTRIEPSSAGVTNYHRPQNGGSASAWAASGADGNVGEDRGHPPPHERLSSTPCREASPPSEPTSIAPMVVLCLRAAAASPLQTSRRRPRIGSGSGAGACLRRSPTCVPMPTSLLEEGANRVRRGVSAASATAAGSFSFGQIDGTLAAGLRWDQDYGSKDLAGTSNIFSQLSEDVITKDANN

SEQ ID NO: 201476 - protein, 326 aa, Oryza sativa
  unsure (1)..(326): unsure at all Xaa locations
  Clone ID: PAT_MRT4530_96848C.1.pep
MHLLQTMVPPSISLIFVCSLFILEWQMSMIAAATEGLVLMTRKVATTRPTLEIMAAAVTTTVVTLASSTSPATTTMRVATRTPTLMNMAALVATTSPTPTTXLAASTNPAQMTTVVAAATTNLAPTTTAAAVATANPALTTTAAAAATTNPATMTTVAVVVATTSPALATMAASTRTPAPATMVVVTNTRNQAQTTMMVATRSQAATMMAMAEAATASRAPATTTVVRTPPTLMDMVAVATTNQAQTTLRVATTSPAPVNMAAAAATTNQARTTMRAATTSPAPATMAAVVATTSLTPVTTLVATTSRALMSTQPEEARPVLTTTR

SEQ ID NO: 201477 - protein, 124 aa, Oryza sativa
  unsure (1)..(124): unsure at all Xaa locations
  Clone ID: PAT_MRT4530_96849C.1.pep
GALTMTNVXAPWMTTXLGAGIFYRDFPAYVKLGNGKMIPGARDIXGPALDPDRTYPARSTGNKXLGMKTDLLALEVVGSSTPECWRETTVLWESGXNPRATKGEIVPQHGCFCMIICSAVICCA

SEQ ID NO: 201478 - protein, 119 aa, Oryza sativa
  Clone ID: PAT_MRT4530_9684C.1.pep
GNINFPIHRLNYNLETYIKPSFWKVKVANFRIQSCSRNRRNRQELLRCCDDFIHRALLTCTDKPAILLLPPQTRTHRVIPADQSRICGWRSTRTAKSTWLQLQSIVTEETPTNNIPFSR

SEQ ID NO: 201479 - protein, 668 aa, Oryza sativa
  Clone ID: PAT_MRT4530_96850C.1.pep
MEETAVANGGAADDVAAPDKDNDIKEKAGKGNEVAVENKNAEEQNKGGSENGTKGPSDGDVEMAEAETAKESDVKQLDTEDAKKDGAQDADANEEKNTKDTEGEDVKMAEAEAEAGNADVKDTAEKEDKDENTNTEKQELKDAKESGSEKQEELKEQDKSGSEKQEELKEQDKSGLAEYEEKKAEEESGAEKQGEEEAEEKGSADNDNEEGDKNANISDEHLKKDGGKDGNKDEAEEEEVSEADKKVEENKEETPKNKKARSARDRSQGKDKKQDGSKSREAKSLLNTASPYGTDRPQRERKTVERLVEVIEKEPNRNFVVEKGRGTPLKDIPSVAHRISRKKPADLKFLHNVLFGRKGKTVDFKGHILQFSGFVWHESDEKQRAKAKEKLDKCVKDMLLELCWILAIPTPKANIRKGSNSRKRKRGSTPKSSSKKFDDDDDITPSKKRNKALEYDTDEDEDDADPMKSDSEEDDYDSEKEKAKKNSSDAKDTASKKKAATGSSHKTGTPRTVSKSSSKTPSSKVSKEKESPEDSAKVFSRKKKSVTPKRPSSSEKEIKDKKSSGKKVTKGKGESAEVGLPSKDELRKTITEILKKVDFNTATFSDILKKLEDRYKIDLTPRKSAIKIMIQEELTRLSKEDDDEDEDEDGNEDAEKKKPQHQAKEVVA

SEQ ID NO: 201480 - protein, 106 aa, Oryza sativa
  Clone ID: PAT_MRT4530_96851C.1.pep
CSDRNHLFLPHAGKRGEDRTPLNWETRVRIALGAARGIAHIHTENNGKFVHGNIKASNVFLNNQQYGCVSDLGLASLMNPITARSRSLGYCAPEVTDSRKASQCSD

SEQ ID NO: 201481 - protein, 703 aa, Oryza sativa
  Clone ID: PAT_MRT4530_96852C.1.pep
MPEEDPASAMEETAVANGGAADDVAAPDKDNDIKEKAGKGNEVAVENKNAEEQNKGGSENGTKGPSDGDVEMAEAETAKESDVKQLDTEDAKKDGAQDADANEEKNTKDTEGEDVKMAEAEAEAGNADVKDTAEKEDKDENTNTEKQELKDAKESGSEKQEELKEQDKSGSEKQEELKEQDKSGLAEYEEKKAEEESGAEKQGEEEAEEKGSADNDNEEGDKNANISDEHLKKDGGKDGNKDEAEEEEVSEADKKVEENKEETPKNKKARSARDRSQGKDKKQDGSKSREAKSLLNTASPYGTDRPQRERKTVERLVEVIEKEPNRNFVVEKGRGTPLKDIPSVAHRISRKKPADLKFLHNVLFGRKGKTVDFKGHILQFSGFVWHESDEKQRAKAKEKLDKCVKDMLLELCWILAIPTPKANIRKEDIVAKLLDFIAEPHAMADSGHSDDQGSNSRKRKRGSTPKSSSKKFDDDDDITPSKKRNKALEYDTDEDEDDADPMKSDSEEDDYDSEKEKAKKNSSDAKDTASKKKAATGSSHKTGTPRTVSKSSSKTPSSKVSKEKESPEDSAKVFSRKKKSVTPKRPSSSEKEIKDKKSSGKKVTKGKGESAEVGLPSKDELRKTITEILKKVDFNTATFSDILKKLEDRYKIDLTPRKSAIKIMIQEELTRLSKEDDDEDEDEDGNEDAEKKKPQHQAKEVVA

SEQ ID NO: 201482 - protein, 82 aa, Oryza sativa
  Clone ID: PAT_MRT4530_96853C.1.pep
MAAGAGAGGLSGDYYRRSCPQLELVVDMALAPVFAVDQTSPAALLRLFFHDCQVQIMEYNPGLYSKRLQPIITLTQQKLTPE

SEQ ID NO: 201483 - protein, 69 aa, Oryza sativa
  Clone ID: PAT_MRT4530_96854C.1.pep
SLHFLALGRRCSPLFKLKWGFPFVLGTFPMPSCQCIQRVGVLIKPSSYLAALPVRPLFRGKPLSLDVPR

SEQ ID NO: 201484 - protein, 182 aa, Oryza sativa
  unsure (1)..(182): unsure at all Xaa locations
  Clone ID: PAT_MRT4530_96855C.1.pep
PTRPPTRPAKVVKDRRRKNPVSSIILLSDGQDTHSFLSGEADINYSILVPPSILPGTSHHVQIHTFGFGTDHDSAAMHAIAETSNGTFSFIDAEGSIQDAFAQCMGGLLSVVVKDMRLCIECIDEGVSLTSIKSGSYASQVAGNERSGLLIXDLYADEERGFLALYCDMDRLDKPNAHPRCI

SEQ ID NO: 201485 - protein, 137 aa, Oryza sativa
  unsure (1)..(137): unsure at all Xaa locations
  Clone ID: PAT_MRT4530_96856C.1.pep
SILLSGLSFYDILCGSLTPGMVSGAMSIYAPIYPLFSTGYAVRSSSSLGLGYIVISXIFLALSLLFDFSRLIFNPSSNIASSCFSLFFFCLLFSFSSSPYVSYCSSLLVFINSPPFPLSPSFLPFFFPPSFFSFSSS

SEQ ID NO: 201486 - protein, 86 aa, Oryza sativa
  Clone ID: PAT_MRT4530_96857C.1.pep
MAAVAATTTMVMVAATTTTPTAAATKTTSDRPHRRRHQLLRPHTSDPPASSSNAHPTAAAGSGLHGVLFVKMQIITSVMYIVTQIV

SEQ ID NO: 201487 - protein, 79 aa, Oryza sativa
  Clone ID: PAT_MRT4530_96858C.1.pep
MAAVAATTTTTMLTAAAMKTMSDRPHRRRHQLLRPQTSDPPASSSNAHPTAAAGSGLHGVLFVKMQIITSVMYIVTQDV

SEQ ID NO: 201488 - protein, 85 aa, Oryza sativa
  Clone ID: PAT_MRT4530_96859C.1.pep
MGGGNGQKSKMARERNMEKNKGAKGSQLEANKKAMNIQVSTRSISSPLPIRSLHLTLFYYSSSSSFPQLLVFWDHDLWWDLGRIF

SEQ ID NO: 201489 - protein, 657 aa, Oryza sativa
  unsure (1)..(657): unsure at all Xaa locations
  Clone ID: PAT_MRT4530_9685C.1.pep
MDEVGRRWTFSRANEGYTSCGPVVEMSYGGGLVPNARGSFLPACPGXIPAVGRIGSVLLFTARMGEGLCHMFTMGFKAMECGVKMCFVGWPGLAWDELGPRXSGCQFGPNHRRPWVKAVLGGQLCEEEDVVSCLPKLRKTAGSASEAKEAVKPAVKQDKRLRSVKVLSLVSNLALPFVFPLSLSKPLQQMADNEKGNKVRSQDIGTSSSRVNEAPDTSRVTLVQHLINQNRLLIEILQQHQTPMLNLNQIQPQVQLEAVQALTPQVSMPPASRRTHDDVPPVDPKEASNICFTCDEQVHYARERPQQKRKTPMRTEDEVRKMIITSTEWPPPGMTRRQRRNTFRGAPQLTEHLLANGGRVSDSEDSDQVSSDDEDEMERKACSRCGEIGHVASSCATICVHCEEDHPPDRCPTSRITCFFCEGTDHVPKDCQFSFLLTKKMANQPASSNGEKHQGNTNPRQDYSFSLTPVPGQRNRNEKRKCRVREDICCFNCQGMGHFADKCPKPRNIAAGTSVHATPCNQKLAPQRIVIHASXRSSPIARVATAPIPMNALPQGVNAQFQPQPPADKTEASICVVPLEIPIQQLRNQVQDEEPECKKVIVCYNCSEEGHYSENCPQPRQNRPPHYRQFTRSRHSNRIVVTGANAVPVRPRDNQNP

SEQ ID NO: 201490 - protein, 146 aa, Oryza sativa
  Clone ID: PAT_MRT4530_96860C.1.pep
RPRNAAFLAPLRTSSAVCTKAVSNSDGTPGTSSSPHVVCFGELLIDFVPTVNGVSLAEASAFKKAPGGAPANVAVGIARLGGSSAFIGKVGDDEFGYMLADILKENNVNNQGLLFDAHARTALAFVTLRNDGEREFMFYRNPSADM

SEQ ID NO: 201491 - protein, 408 aa, Oryza sativa
  Clone ID: PAT_MRT4530_96861C.1.pep
MALHAAPPPPPPFTAGRLPTTSRRPCFSAGRIFRCSLPAAAARPRNAAFLAPLRTSSAVCTKAVSNSDGTPGTSSSPHVVCFGELLIDFVPTVNGVSLAEASAFKKAPGGAPANVAVGIARLGGSSAFIGKPQFELGRNIEKVGDDEFGYMLADILKENNVNNQGLLFDAHARTALAFVTLRNDGEREFMFYRNPSADMLLEEKELDLDLIRKAKIFHHGSISLITEPCKTAHIAAAKAAKDAGVLISYDPNLRLPLWSSADDARDGILSIWETADVIKISEEEVSFLTKGEDPYDDSVIKKLMHPNLKLLLVTEGPEGCRYYSKEFNGRVGGLKVNAVDTTGAGDAFVAGILSQLSVDFSLLQDEGRLKEALKFANVCGALTVTERGAIPALPTRQQVVDALTKVVA

SEQ ID NO: 201492 - protein, 48 aa, Oryza sativa
  Clone ID: PAT_MRT4530_96862C.1.pep
KFRHSFESTILILPGQTTNPIYSECSEHHQSLAESTCRAARVRTQEDA

SEQ ID NO: 201493 - protein, 591 aa, Oryza sativa
  Clone ID: PAT_MRT4530_96863C.1.pep
MADGEASSGAYREFKALTEAADRKFARARDVPLYGGGVDHHSRKAFKAYTRLWRLQQERRRELVAGGLRRWEIGEVASRIGQLYYARYLRTAEPRSLVGAYVFYEAIYSRGYFAAAAQVVVGGGYRHQGLLIRYKELRFIARFLVVAMLMRRAEAVDHLASRLRSLVEETKSAYPKTNFKEWKQVLQELGRFLKADGAYKGSRSLRYDNLFDSFPSNLAPIARFHSKRVLKLKEAVLTSYHRNEVKFTELTLDTFRMLQCLEWEPTGSYQIAAKELTENGTISDQSGPSGLIDIHLSSEISDGNLPANPQKAIIYHPTVSHLLAVLATVCEELSQDSILLVYLSASGFSEQNITSQKYASSSSYARATSVYPIDKPNSNGNSDNHLWLGPRGSGGPNNLYPEDLIPFTRYPLFLVIDSENSHAFKAEKGEPAALLLSPRIASAMPGVESTSNGSQFTYFLTAPMQAFCQLAGITSDIDSDTYANAEIILFSALEQYEGILCTSVGLNNVWGQILPDPFLRRLIVRFIFCRAVIFYFHPEENGEHIPICLPSLPESVAPNAEAIMAPILEFAENLVVSDRFHFRHSVHNNKK

SEQ ID NO: 201494 - protein, 135 aa, Oryza sativa
  unsure (1)..(135): unsure at all Xaa locations
  Clone ID: PAT_MRT4530_96864C.1.pep
CVDDLLTDVDDSKPVXRAQGSYTLACLRAPVFVVSITLVLTDGPYKGSTILIAXRDDISEEVRELXVVGGTAKLRRATGHVLWTTARRESPVHMVLELDVYAWVPASSSPARRWSSLLRGTNVVTADVDDADSYF

SEQ ID NO: 201495 - protein, 184 aa, Oryza sativa
  unsure (1)..(184): unsure at all Xaa locations
  Clone ID: PAT_MRT4530_96865C.1.pep
ENVRXYKEEEKNDPEFANDAFGTAHRAHASTEGXFLLQKELDYLVGAVSSPKRPFAAIVGGSKVSSKIGVIESLLEKCDILLLGGGMIFTFYKAQGLSVGSSLVEEDKLELATSLLAKAKEKGVSLLLXSDVIIADKFAPDANSRLXSICYSDXWMGLDIGPDSVAYSLTLEQHRQHLDGLWVL

SEQ ID NO: 201496 - protein, 82 aa, Oryza sativa
  Clone ID: PAT_MRT4530_96866C.1.pep
MAPLFDEQGNLIYSHLVIGDRRLPLRDFVAEEKLRMMPCSHTFHQRCIFDWLRLSCICPLCRRALPTQHYSRRMTTSLGARS

SEQ ID NO: 201497 - protein, 64 aa, Oryza sativa
  Clone ID: PAT_MRT4530_96867C.1.pep
SMSYQLITACNLWKNNLYLLISVVIRVTEGTVHTHAIHSNSCLATSPARSIGNKRCMCLGGRRR

SEQ ID NO: 201498 - protein, 115 aa, Oryza sativa
  unsure (1)..(115): unsure at all Xaa locations
  Clone ID: PAT_MRT4530_96868C.1.pep
MARLVLSECCGLTPLRLRGRGAIALPAPPSLAAGPRRPVSAAAAGGAIHREWALRVSAPTRLTSVVEEDNRGEEVVEEEARGSXAAAEAAAGEVGGDGDGYEPGAPPPFGLAEIR

SEQ ID NO: 201499 - protein, 66 aa, Oryza sativa
  unsure (1)..(66): unsure at all Xaa locations
  Clone ID: PAT_MRT4530_96869C.1.pep
YIYYXHEFGLPRLAQTLLNFDQIGMICMGKWFLFNVLYPEYHFIXQNPPPRGAAQEGLAYVRVRRR

SEQ ID NO: 201500 - protein, 756 aa, Oryza sativa
  unsure (1)..(756): unsure at all Xaa locations
  Clone ID: PAT_MRT4530_9686C.1.pep
MAEQAKAHNLSPSVSGDDGEPNPRRRARTPPPPPRQSPKQGEALERVEKSAASPVAGGAGERRDGERRLLVYGDGSTPQGALQAAGALLRHPPVVPDPESPAQRWLDDVANLVMTAQQRLGAGGRSVTTKTSGAATTGSVSSRRRARRAAAAARHSAATPSSTPSTREDQHGEPDARLNIERNSRRTPRATEGASSSRVSPRHGREDQPSVPPAGGVGCRAFVASLRNVRWPPRFRPTITEKYDGSVNPTEFLQVYTTGIEAAGGDDRVMANFFPMALKGQARGWLMNLPPASVHSWEDLCQQFTMNFQGTYPRPGEEADLHAVQRRDDESLRSYIQRFCQVRNTIPCIPAHAVIYAFRGXCGTTACSKRLPPKSPRLPRSFFSLRIEWLVRRRHGPGTPPVPEWQLRPPPDPLLRQGGGTGGGRRGWPIPTTRVMSSPSRAFRWPPERGXLYKKGARRPRKKKEKAIQDWRGPGGSLRRARVTSLVVVIVRTTVAALLVGVEGEREPRGRTLEAVDDVVGGVPDLRACAVLGSGRELFQRYPRGEVRVREAPKPNGGPRPPTAGVGPPPACPTVSGAPDPQDSLGATAGRPRLSPSYPEDIGAEAEGAPRCLSDEERPGDAAPSEEDRPRRKVQRPIYFVSEALRDAKTRYPRAQKMLYAILMAPRKAPSPYLQAKQIGSPRFVRCSGNVAVLKRPPIMDSQVTITNVHGLRPLGILPNYGDRSHLSPGFRGGVTPDRFPWEGKLLWHNAGGYCR

SEQ ID NO: 201501 - protein, 227 aa, Oryza sativa
  unsure (1)..(227): unsure at all Xaa locations
  Clone ID: PAT_MRT4530_96870C.1.pep
FKKQSNFFKKQSNSTDMEAYHAIDVMHITKNMFDRTISLLLDIRSKTKYSLKSSTNLXEYGKIMKEFNPKHGDNGKVYVPPANCTLAXTLERRRHFARGFHGVGAPIYFLSNIRRLVSMKNLSMSINYSHGYHVMLTVFLAPYFSPLLLDLXTKHVKVATTNMCYLFNTISXRSSTLEELXGLLVHSHETMCQLEMYFPPSYSSGFMIFSSFMINLINISHPAHRMH

SEQ ID NO: 201502 - protein, 298 aa, Oryza sativa
  Clone ID: PAT_MRT4530_96871C.1.pep
MAAPRRPRLLPLLLLLALSLSLAAASAFQSDELLLHDDDEFEGAGARPTPGPPAPAAAAVSSSRRRPGDSSAAAAESSAVQFSLEHDLGAGFVPAGSFSARLKSSAHGSQTLTKLRFTRNELTGDEKDAFKKLLDEDGFYSIRLLSNVLDPARKDYVVSSIKARCIPRESLDEHIVIHMDGVNILAVNYGSVGGCTYPRPVKMPSKWVFNSYTVLKTSEQAPRTPSFVDQLIEAENGLGEVVKSPEKSFWAKYWMYIIPLGLIVMNAVTAAANMPEEQAGGQGQPGAQRAPNAAPRRR

SEQ ID NO: 201503 - protein, 569 aa, Oryza sativa
  Clone ID: PAT_MRT4530_96872C.1.pep
TLDLNMAQTAVLEVDASWNLSRKIPDTLFGLFFEEINHAGAGGIWAELVSNRGFEAGGPHTPSNIDPWSIIGDESSIYVTTDCSSCFRQNIVALRMEILCDNCPAGGVGIYNPGFWGMNIEEGKAYNLVMYIRSLESVELTASLTCSDGMQNLASVSIQGIDLSNWTKIELQLLAEGTCRTSRLELTSMKKGIIWFDQVSLMPSDTYKGHGFRKELLYMLLELKPQFLRFPGISHHDEVDTTIIEPFVKDVLDSLEFARGRAESTWGSVRAAMGHPERFPLKYVAIGNEDCDKGFYRGNYLKFYDAIRKAYPDIQMISNCDGSSRPLDHPADLYDFHVYTSAANLFIMKNKFDRTSRIGSKVFVSEYAVNEQRDAGKGSLLASLAEAAFLTGVEKNSDLVQMASYAPLFVNDNDRTWNPDAIVFNSWQQYGTPSYWMQTYFRESSGSVIHPITIGSSYSDSLAASAITWKDTHDIFLRIKIVNFGPNAVNLAISSRGLQAGVNTAKSTVTVLTSGNLLDENSFAEPNKVVPVKSELPDASEEMEAALSPYSFTSFDLALDQYSKLVAEM

SEQ ID NO: 201504 - protein, 360 aa, Oryza sativa
  Clone ID: PAT_MRT4530_96873C.1.pep
WIRSDFAAAVANIIHHNRRLLDDDDNDDYNGGNDDDDNSNNSGENTVVITVAKDGSGNYRTVGEAVAAAPNNSAARTVIRVRAGTYEENVEVPPYKTNIALVGDGRGATVITGSRSAADGWTTFRSATFGVSGEGFMARDVTFRNTAGAAKGQAVALRVSADMAAAYRCGVEGHQDSLYAHSFRQFYRECAVSGTVDLVFGDAAAVLQACELVAGAPVAGQSNVLTAQARGDPNEDTGFSVHNCTVVASPELLASGVSTRTFLGRPWRPYARAVVMDSYLGPLVDRAGWVEWPGAEPGRAETVYFGEYGNGGPGAAMDGRVGWAGFHDMGYDEAAQFSVDNLISGDQWLAATSFPYDDDV

SEQ ID NO: 201505 - protein, 280 aa, Oryza sativa
  unsure (1)..(280): unsure at all Xaa locations
  Clone ID: PAT_MRT4530_96874C.1.pep
PILNLSPDRPSPPQPHPSGSPLPPYHPPSPXPFPALAPPPPPETPPPTSPLAANLEPPPALLIPPPGLLNRRPPSAPLPPTTLAFIGLXPPYQEPPPHRLIPFSSSPPPLFSFVIPLPPPPLSLVPXPLAGQQPPLKPPTPPPFPLSSTPPLHTSAPRPRRPPTNPLLPLVRAPVRGRIQFESPPLSLPHLPTSPAKSGPFPAVSASPKPLYSFPASSSPFFPFPPPSPVTSIAPAPSHXAQPPPPLINHAPPLLQPLPHRHFYSRCHTTQSQPLASPPQ

SEQ ID NO: 201506 - protein, 629 aa, Oryza sativa
  Clone ID: PAT_MRT4530_96875C.1.pep
MELDLPQTALVEVDASWEVSRKIPDTLFGLFFEEINHAGAGGIWAELVSNRSNSQFDKHSSWKLKNSVALRMEILCENCPAGGVGIYNPGFWGMNIEEGKTYNLVMYIRSLESVELTASLTCSDGMQNLASVSIQEIDPSNWTKIEMQLLAQGTCRTSRLELTSMKRGVIWFDQVSLMPSDTYKGHGFRKELIYMLLELRPQFLRFPGISHHDEVDTIIIEPFVKDVLDSLEFARGSAESTWGSVRSAMGHPERFPLKYVAIGNEDCGKEFYRGNYLKFYDAIRKAYPDIQMISNCDGSSRPLDHPADLYDFHTFHCAFIKMHSDIFFQVYTSAANLFIMKNKFDRTSRIGPKCHNTSAGFVSLYHYSSLASRRPRILDTQKVLINYYAMILFQVFVSEYAVNEQRDAGKGSLLASLAEAAFLTGLEKNSDVVQMASYAPLFVNDNDSTLVPPALLLFISNVLVGHNWNPDAIVFNSWQQYGTPSYWVQTYFRESSGSVIHPITISSRYSDSLAASAITWQDSEDIFLRVKIVNFGPNAVNLTISSRGLQDGVNTAKSTVTVLTSGNFLDENSFSEPNKARQPLFPSQVVPVESELPNAAEVMEAVLPPFSFTSFDLALDQYSKLVAEM

SEQ ID NO: 201507 - protein, 158 aa, Oryza sativa
  unsure (1)..(158): unsure at all Xaa locations
  Clone ID: PAT_MRT4530_96876C.1.pep
GEFELGTRGSSRVDLQACKLANPAASTRRGSDGELGRARPRKEKERGRCGRXLNRRGAASRGRERRNFAGVVEEXGGGERERGGIQIESRPCGAWAREGRGVRESGRRGPGRGXAGGGGGRWVVVSAAVGAGVGAQRLGKGLTGGPHLSAPEREKEAG

SEQ ID NO: 201508 - protein, 59 aa, Oryza sativa
  Clone ID: PAT_MRT4530_96877C.1.pep
MEMWMAKRGLRPLEAYDHCFLVPPPGCRLRPLLLRPPRRLRHLVTGTNRRFSAGSAQRM

SEQ ID NO: 201509 - protein, 126 aa, Oryza sativa
  Clone ID: PAT_MRT4530_96878C.1.pep
MANSNLPRRIIKETQRLLSEPAPGISASPSEENMRYFNVMILGPAQSPYEGGVFKLELFLPEEYPMAAPKVRFLTKIYHPNIDKALLSAPNPDDPLSDNIAKHWKANEAEAVETAKEWTRLYASGA

SEQ ID NO: 201510 - protein, 233 aa, Oryza sativa
  unsure (1)..(233): unsure at all Xaa locations
  Clone ID: PAT_MRT4530_96879C.1.pep
XXXKXXGGSXPXXNXXGGXPXGNXXXXVXXXXPXGGRQPKXXXAGWGALXXXXIXGXGPKVFXPTQEFFXKINQRGEGXKNKEGGQSPEGGKVIFXGGGXFFFXXFSSPKXXGKGFXESXQRRRAQKKRXXGRQFKFXNKGGXGESPGFXXXXRNSXFSXXXXXLKFXLNGWEGPNGGFGGMPKNKPWGXNNFLGVLXPNXFFFPREGGLFFPKEIGKXAKMVXFRRPQWPQX

SEQ ID NO: 201511 - protein, 246 aa, Oryza sativa
  Clone ID: PAT_MRT4530_9687C.1.pep
VAFVASGIGGDLAVQLHLQLRSTTLLKRGNNSKAEYNHRTQQATPTMQTCKGIQGWFVAICIKAVRQSPPWTESTAPAGHVGAHPTLRIGRGRSDGRGRPSGTTRQARPQAAATAEPRPPATTPAASGDGARGGERVEREAVLTERMGRRDEDEKGDGRGATGGTKVAVARVHRGAGGSGVEWRSGVVAGLAGGAAKLVVVAARLEVDGNGGKRLQKAAKRRRCSGISSRDSGMARKKAGADGRSD

SEQ ID NO: 201512 - protein, 153 aa, Oryza sativa
  Clone ID: PAT_MRT4530_96880C.1.pep
MANSNLPRRIIKETQRLLSEPAPGISASPSEENMRYFNVMILGPAQSPYEGGVFKLELFLPEEYPMAAPKVRFLTKIYHPNIDKLGRICLDILKDKWSPALQIRTVLLSIQALLSAPNPDDPLSDNIAKHWKANEAEAVETAKEWTRLYASGA

SEQ ID NO: 201513 - protein, 59 aa, Oryza sativa
  Clone ID: PAT_MRT4530_96881C.1.pep
AHLTILLNTHANYGRKIPYMGILCSFFDSAKGYRALLTLICCIMHVYPNILNLHDRFQL

SEQ ID NO: 201514 - protein, 603 aa, Oryza sativa
  Clone ID: PAT_MRT4530_96882C.1.pep
MDTLFRLVSLHHHHHHQHAASPSPPDQPHKSYPSSRGSTSSPSSHHTHNHTYYHHSHSHYNNNSNTNYYYQGGGGGGGGYYYAEEQQPAAYLEECGNGHQFYMDEDFSSSSSSRQFHSGTGAPSSAPVPPPPSATTSSAGGHGLFEAADFSFPQVDISLDFGGSPAVPSSSGAGAGAGAAPSSSGRWAAQLLMECARAVAGRDSQRVQQLMWMLNELASPYGDVDQKLASYFLQGLFARLTTSGPRTLRTLATASDRNASFDSTRRTALKFQELSPWTPFGHVAANGAILESFLEAAAAGAAASSSSSSSSSTPPTRLHILDLSNTFCTQWPTLLEALATRSSDDTPHLSITTVVPTAAPSAAAQRVMREIGQRLEKFARLMGVPFSFRAVHHSGDLADLDLAALDLREGGATAALAVNCVNALRGVARGRDAFVASLRRLEPRVVTVVEEEADLAAPEADASSEADTDAAFVKVFGEGLRFFSAYMDSLEESFPKTSNERLSLERAVGRAIVDLVSCPASQSAERRETAASWARRMRSAGFSPAAFSEDVADDVRSLLRRYKEGWSMRDAGGATDDAAGAAAAGAFLAWKEQPVVWASAWKP

SEQ ID NO: 201515 - protein, 34 aa, Oryza sativa
  Clone ID: PAT_MRT4530_96883C.1.pep
CPLIRLRSAVFGVLALYRRPYYNAPVSLASPPIL

SEQ ID NO: 201516 - protein, 71 aa, Oryza sativa
  Clone ID: PAT_MRT4530_96884C.1.pep
GWSCPLQAILHVQLGVESKGNPKHAFPSKETSKPDETGSNSDLPVRPATYRRSDRPTIGGLTAQHMAVRPA

SEQ ID NO: 201517 - protein, 119 aa, Oryza sativa
  unsure (1)..(119): unsure at all Xaa locations
  Clone ID: PAT_MRT4530_96885C.1.pep
QMLRAIMEXPGKMSRKLYQRGELWQMHFDEVGNFFSQERDKVLGKTTVRTLAAIKPTRDLRTRLLAASAGMTDTEAKELNLFHDLLDRCLHVNPDKRITPADALKHPFFTARLQTTGRR

SEQ ID NO: 201518 - protein, 722 aa, Oryza sativa
  Clone ID: PAT_MRT4530_96886C.1.pep
MGGRYLHSPPAVNLICEESTFVRSTSCCLHSCLCLRCKTSNLKPCRTLVFNMPSRRFNRRLAALPDVDDFFWEKDPTPILDTIDAPIHLKNLSSKELKQLAGEVRSEISFIMSRKCQPCNTGHSVVELAIAIHYVFNAPMDKILWDAGQHTYAHKILTGRRSLFHTIKQRKGLSGFTSRFESEYDPFGAGHGCNSLSAGLGMAVARDLGGRKNRIVTVISNWTTMAGQVYEAMGHAGFLDSNMVVILNDSRHTLLPKADSQSKMSINALSSALSKVQSSKGFRKFREAAKGLSKWFGKGMHEFAAKIDEYARGMIGPHGATLFEELGLYYIGPIDGNNIDDLICVLKEVSTLDSTGPVLVHVITENEKDSGGEFNSEITPDEEGPPDSSQDILKFLENGLSRTYNDCFVESLIAEAENDKRIVVVHGGMGIDRSIQLFQSRFPDRFFDLGIAEQHAVTFSAGLACGGLKPFCIIPSTFLQRAYDQIVEDVDMQKIPVRFAITSAGLVGSEGPTNSGPFDITFMSCLPNMIVMSPSNEDELIDMVATAAMVEDRPICFRYPKGAIVGTSGTLAYGNPLEIGKGEILAEGKEIAFLGYGDVVQRCLIARSLLFNFGIQATVANARFCKPLDIDLIRMLCQQHDFLITVEEGTVGGFGSHVSQFISLDGLLDGKIKWRPIVLPDRYIEHASLTEQLDMAGLTAHHIAATALTLLGRHRDALLLMK

SEQ ID NO: 201519 - protein, 64 aa, Oryza sativa
  Clone ID: PAT_MRT4530_96887C.1.pep
GERLNRQPHHLVGDGRKHVKRRPPWSVLTVTGLDWDSVTFLRDILGDIEITDMWVQAHVGPTCQ

SEQ ID NO: 201520 - protein, 49 aa, Oryza sativa
  Clone ID: PAT_MRT4530_96888C.1.pep
MSIPRVSYLYFRRDVMRGNGILPTLTSYLDVEEYNGWRGLPPSTAYLTF

SEQ ID NO: 201521 - protein, 61 aa, Oryza sativa
  Clone ID: PAT_MRT4530_96889C.1.pep
KGKGTRDKVLIRIMVSRSEVDMLKIRSEFKRKYGKSLYYYIQQDTKGDYQKALLYLCGGDD

SEQ ID NO: 201522 - protein, 272 aa, Oryza sativa
  unsure (1)..(272): unsure at all Xaa locations
  Clone ID: PAT_MRT4530_9688C.1.pep
GEQGRGEERADRVHGSGAHAAGSRSTVDRVHAAYAGRRRGSHASAAPEGAGGXRPGPTWQPRGAPEGGLAGTADGRRRARAPMVAGGGPRHRGAAGRQSPRQGGNKLRGPRLTPGSTTNPGNRHPHLQQPGGAAQVHGDGGVPAVGGRNGGVDEVGEDAAEPKEATPRREKVRGDDGGGPELGGDGGENERRRELDSGGERERRVAETVEGGTGSVYIALGGGENGRMRGNRPRKIRPPLMRRRGLGGNVSEQIRGRERGKSGEKEGGNHGE

SEQ ID NO: 201523 - protein, 575 aa, Oryza sativa
  Clone ID: PAT_MRT4530_96890C.1.pep
MALLRRRGYSAAVPSACCFLLLLLVLSASHLLPTRRGHGGVLEGLALRGSASRSRSGSSSSSSAGEEQGSCQELQSIEGGEARCLYLRTHPPCAPAGYVDYLRLFYCGFAHAPAAGYAAAVLWLAVLFYLLGDTASEYFCASLEGLSAELRLPPAIAGVTLLSLGNGAPDVFASVVSFAAGDGGGVGLNSALGGALFVSTVVAGVVALAAASRAGRGGVVVELRGFVRDICFLLLALCSLLAILVTGTVTVWVSASFVSLYVAYVLLVWTSHCCSEPGKPPQADLAAPLLLDDDGGVTPLPSYSKNSAPSKKRAYLHCLLSAILIPLYLPRRLTIPDIAGHRWSRPCAVASLALAPVLLAATWASSCRHALAVLLGGALLGLLLAALAAATTEAASPPRGRWRRVPWLAAGFLMSVLWAYTLARELVALLVAIGYMVGVRASVLGVTVLAWGDSLGDLVSNVAMALHGGAGGAQTAVSGCYAGPLFNTVVGLGLSLTLAAGSQYPAPFAIPAGGAVYEAVGFLGAGLAWALLVVPARGMRLDRVYGMGLIAIYLAFVTIRVFDSLGLWTHSWWPA

SEQ ID NO: 201524 - protein, 42 aa, Oryza sativa
  Clone ID: PAT_MRT4530_96891C.1.pep
MGYATTITCTRRQLVTPSGIPASSRDSEGESERSGDYWQRQA

SEQ ID NO: 201525 - protein, 135 aa, Oryza sativa
  Clone ID: PAT_MRT4530_96892C.1.pep
MQYGAAAEQAWYMPAAAPAPMVESAVARVERLASESAVVVFSVSSCCMCHAVKRLFCGMGVHPTVHELDLDPRGRELERALARLVGYGGPAAASPPVVPVVFIGGKLVGAMDRVMAAHINGSLVPLLKEAGALWL

SEQ ID NO: 201526 - protein, 57 aa, Oryza sativa
  unsure (1)..(57): unsure at all Xaa locations
  Clone ID: PAT_MRT4530_96893C.1.pep
QNMPPFVPEMKYLPFPFVXTPSNESMATLLQNDAPQDGATNEGIWTLDELLMAAGPF

SEQ ID NO: 201527 - protein, 534 aa, Oryza sativa
  Clone ID: PAT_MRT4530_96894C.1.pep
MGVKNLWDILESCKKKLPLHHLQNKKVCVDLSCWLVQMYSANRSPAFAKDKVYLKNLFHRIRALLALNCTLLFVTGNPILLFYFSFLAAKESDQPNSHPSISLRRNKGSEFSCMIKEAKRLGMALGIPCLDGLEEAEAQCASLDLESLCDGCFTSDSDAFLFGARTVYRDVFIGEGGYVICYEMEDIEKTLGFGRNSLISLAVLLGSDYSNGVNGFGPETACRLVKSVGDNLILDQILSNGVKATRKCKGKNSGNKVDDMCPKASSCEVGMTQDSDGQFRDVINAYLEPKCHSPDSEAVQRVCGQHPFLRPQLQKICEEYFDWSPEKTDQYILPKIAERELRRFSDLRSASSALGIKPLLSEIPVPCPVLAIVKQRKVHGNECYEVSWRNIEGLQVSVVPGDLVKSACPEKITEFLEKKGEEKKQKRRARPKKSGQAAVKDVDEQLQELLLGIEADSGGILGATASVCQTLTAAYTVAVEDVVDLSSPSPPLRKLSKSQKKMMAEDVNVAGMNMNKMEWKKSPGRHKQCWFTQH

SEQ ID NO: 201528 - protein, 97 aa, Oryza sativa
  unsure (1)..(97): unsure at all Xaa locations
  Clone ID: PAT_MRT4530_96895C.1.pep
WNKGKTVEFLLESLGLCGKENVFPIYVGDGKTYEDAFKVFKANSIGFGNLVSSVPKETDAFYSVRGPTXVMEFLKKLASWKEESPLAEGRDITESFF

SEQ ID NO: 201529 - protein, 641 aa, Oryza sativa
  Clone ID: PAT_MRT4530_96896C.1.pep
MGVKNLWDILESCKKKLPLHHLQNKKVCVDLSCWLVQMYSANRSPAFAKDKVYLKNLFHRIRALLALNCTLLFVTDGAIPSLKLATYRRRLGSISHAAKESDQPNSHPSISLRRNKGSEFSCMIKEAKRLGMALGIPCLDGLEEAEAQCASLDLESLCDGCFTSDSDAFLFGARTVYRDVFIGEGGYVICYEMEDIEKTLGFGRNSLISLAVLLGSDYSNGVNGFGPETACRLVKSVGDNLILDQILSNGVKATRKCKGKNSGNKVDDMCPKASSCEVGMTQDSDGQFRDVINAYLEPKCHSPDSEAVQRVCGQHPFLRPQLQKICEEYFDWSPEKTDQYILPKIAERELRRFSDLRSASSALGIKPLLSEIPVPCPVLAIVKQRKVHGNECYEVSWRNIEGLQVSVVPGDLVKSACPEKITEFLEKKGEEKKQKRRARPKKSGQAAVKDVDEQLQELLLGIEADSGGILGATASVCQTLTAAYTVAVEDVVDLSSPSPPLRKLSKSQKKMMAEDVNVAGMNMNKMESESSFSTQSSTSDVDNQLIDLSSPLAGGDNGMKGGRRALADISNVGSHSTETDGGGGGGGGVASVGHGTTIDLSSPSPAIGDRSRVHHDDDDVIHERKARDLRMFLDSIRNELY

SEQ ID NO: 201530 - protein, 56 aa, Oryza sativa
  Clone ID: PAT_MRT4530_96897C.1.pep
LASSPRLLSHSLKQDGLGEFSIKNKPFSDAQSNKGELVQSWVSPGCAPKLSGLFLW

SEQ ID NO: 201531 - protein, 283 aa, Oryza sativa
  Clone ID: PAT_MRT4530_96898C.1.pep
MAMAAAARHQRHPLSRCGEGRRWRRGEVRCSSPAQEFAALAAVFRRRLVVGATTAAAAAVGANFGGVTSFLLGLSPQLGRSLRLDVLYPVGGFTRCLDSDNGFEFIYPASWVGDQTLLYRGAKRAELQRSLDPPPLANGRSPSRPRNISEPVAAFGPPGSSGELNVSVIVSPVPQDFSIEAFGGPKDVGEVVLRRIAKTKRGADINATLLDAALREDPANNVKYYKLEFRVESPSFRRRNVAVCCAKDGKLYTLNAQAPESAWKAVRKEFLAMADSFSLVADV

SEQ ID NO: 201532 - protein, 92 aa, Oryza sativa
  Clone ID: PAT_MRT4530_96899C.1.pep
EISYPLRSINFIYFLTSYPPSPPTLYYLLYPLTLIIEQYRCQSKDHIIIFSAMCILICSFYFTILKSSFYTNYIIEYKHYSIQTPTLQELTL

SEQ ID NO: 201533 - protein, 859 aa, Oryza sativa
  Clone ID: PAT_MRT4530_9689C.1.pep
MDYFTKWAEAVPLENITCTEIPSFPESPFSRKKSLKSSKASKATPGLEWYIPGLEIELCSRGGCSEWLGLYNRMPCYKPEYLFGVEGFVQELRTMSFVIGFGNAPFYAQIRHDRHEEKCRVKVTLNSNSEDIPSVMFEAGGRNYIHACQEVARIAIGELRDRYSDQLVDTEYRYHPRQPQGSDRGSYLETEGIENDVTTRHLVEMLWAMDESRAETVLAAQDREDRNRGKICKLEDKVDRLEKELAALKGEAPPQKARIRLTARKRALFVPRYQLAPKVRVVEKEVAPANPPVIIISSDEEEEPKRNNSKFEWVAIKDEEDEPNEPSIDLLCSEELDTTNPVEAGDWLHAIEKKLDLLQCTNQEKVSFASHQLHGPASEWWDHFRLNRITAEPITWLEFTAAFRKTHIPSGVVSLKKKEFRSLTQGSRSVTEYLHEFNRLARYAPEDVRNDEERQEKFLGGLNDELSYPLMVGDYPDFQKLVDKAIRQEDKYNRMEQKKRRIAQFKTQQGNNQKPRLTLGPQPMPQGGSSSVVRPQRQFFNNNAGNNIRNQAPRPVAAPAQQQPAKREQGSKPVVCFNCGDPGHYADKCPKPRRVKVVPVQNNSAVPASKARVNHVAAAEAQDAPDVILVREYPDVFPDDLPERIHQTEFITMGSSGYYRRFIENFSKIAKPMTRLLQKDVKYKWSEESLEAKPTLIDQVREAQINDPDIQEIKKNRRRGKAIGFLEDEHGTPCSAVAPAVAAAREDRRRHRQVAAVLVRPFAAVGTRRSIVAVVNPKVAAASFSSPSPSVPFPPPFWSPVCSPRCPLRAGALRWCRGAAVRRRVSAARAVFFAEPPPSSVTSSLTSSGSYPVSRSWTD

SEQ ID NO: 201534 - protein, 45 aa, Oryza sativa
  Clone ID: PAT_MRT4530_968C.1.pep
KKPNGKTPKKFFFFPPKKKKKKKKKKKKKKKKKKKKKKKKKKQRR

SEQ ID NO: 201535 - protein, 302 aa, Oryza sativa
  Clone ID: PAT_MRT4530_96900C.1.pep
MFTAMHRILSRGRRTPAASSSSVTAFATASDSQRLAGKVAVITGGASGIGRATAEEFVRNGAKVILADVQDDLGHAVAAELGADAASYARCDVTDEAQVAAAVDLAVARHGRLDVVFNNAGIPGDLTPTPVGALDLADFDRVMAVNTRAVVAGVKHAARVMVPRRRGSIICTASTAGVIGGVAVPHYSVSKAAVLGLVRAVAGEMARSGVRVNAISPNYIWTPMAAVAFARWYPSRSADDHRRIVENDINEMDGVTLEAEDVARAAVFLASDEAKYVNGHNLVVDGGYTVGKVPNMPVPDGH

SEQ ID NO: 201536 - protein, 1346 aa, Oryza sativa
  Clone ID: PAT_MRT4530_96901C.1.pep
MEEVEKKREESEKHRELSEEKSRSEFLALKVAVESRMPVVEKRVDDLHVSVVGLQDQVDKLQSLVQQPPRPSPSSPGSPDGMQTPPQFTSLPSALEQSAFASALLGASGIGGNVPPMSCPQFNGDSRQLWKSNCEEYFEVYGVHPKNWVCVAGLNFTGNAAFWLQSVRSKLVGVTWQEFFDQVCLRFTKDRQKVLIRQWFHIVQDSSVSDYVEKFDGIMHQLLAYDSSLPLNYFVTKFVEGLRKDIRSGVLMQKPQDLDTACSLAFLQEEILEGSHPAVYRKPEPILLSKNFARQPAPVSPVSNHPQGSVLEDRKQSEFSQSRSDKFSALKSYKRAKGLCFTCGEHWSREHKCGSSVQLHVVQELLAALQDDQLNHESVDTVSEPVEPVFMAISYQAVTGTESLTSFRLNGWVQGYELLMLVDSGSSHSFIDITVAQKLQGIQCLQHVVSVKVADGGVISCSQYIPGCDWWTQGQIFKTDFKVLPLGCYDIILGMDWLVTLGSMNIDWAAKCMEFARADSLVTIKGIQSQTTHCSCISGDQLQGMFKLGSIMHVLHLQEVSTAKLGHIPPEIQSLLTEFSALFDDPQGLPPKRACDHSIPLKSDAKPVFLKPYRHNPAQKDEIEKQVKEMLLSGVIQPSNSAFSSPALLVKKKDGTWRLCIDYRQLNSITVKGKFPMPVIDELLDELSGSKVFSKLDLRASYHQIRLVEGEEHKTAFQTHSGHYEYRVMSFGLTGAPATFQGAMNDTLAPVLRKFALVFFDDILVILSVIKESLLILLRLRKWPLTNLLKKDVPFVWSVEADQAFKALKQALVSAPVLSLPDFSLPFTVETDASDEGKVWIGNNPSVQDKIISALHSSPLGGHSGFPVTYSKIKSLFAWPKMKKQIHTTVKTCGICMQAKPDRSKYPGLLQPLPVPDGAWQIITMDFIEEFWFNTSYHSAILQSPFEALYGYPPGHFGIRDDACSVPDLHEWLNERKVMTQLLKQHLNRAQQQMKLYADKKRSFREFSDGDWVYLKLQPYIQSSVAKRANHKLSFRYFGPFQVLHRVGKVAYKLSLPAESSIHPVFHVSQLKHAVGFRHSVQPCLPACSDLKVSVVILASRQIRKGQETWEDQVELCQRFPNALAWGQATSQGEGVVSSTAIPDELQNTVKTKEVKQTKEGRPVRHRVCNPRLTLLYIKARALIQHRWKMESILDHMLREGRDRMLKEAGIVIQQQQAEEKNSSGGTAMAPPPPCPGSSVTCYVCFEKVSPDADQLQHGQPRRCGNAERRQLLRLAARRQDAAAEDHSGRADPRAKDGRPAAVFAPLAGQRLFPSPRTLAGRRGKMLGGERGGVGRSLSHRPLVRG

SEQ ID NO: 201537 - protein, 177 aa, Oryza sativa
  Clone ID: PAT_MRT4530_96902C.1.pep
ASHTSPSHTPSHTSNSSKQPNPRTREGGGDLGGNLADQWGRRPDQEIISRVFTGRGQIGGGASGSMQMSSGGVGVGGGGGSKVMSPKQVLTVVLVVFCALSFVKLLLLTGSSSPAAAARRGRASAWGNGTDVGDGGLAPKEAALLRSVVAERAPCRLLVFGLSPQLAALAAVNAGEG

SEQ ID NO: 201538 - protein, 1412 aa, Oryza sativa
  Clone ID: PAT_MRT4530_96903C.1.pep
MEEVEKKREESEKRRELSEEKSRSEFLALKVAVESRMPVVEKRVDDLHVSVVGLQDQVDKLQSLVQQPPRPSPSSPGSPDGMQTPPQFTSLPSALEQSAFASALLGASGIGGNVPPMSCPQFNGDRPQLWKSNCEEYFEVYGVHPKNWVRVAGLNFTGNAAFWSQSVRSKLVGVTWQEFSDQVCLRFTKDRQEVLIRQWFHIVQDSSVSDYVEKFDGIMHQLLAYDSSLSLNYFVTKFVEGLRKDIRSGVLMQKPQDLDTACSLAFLQEEILEGSHPAVYRKPEPILLSKNFARQPAPVSPMSNHPQGSVLEDRKQSEFSQSRSDKFSALKSYKRAKGLCFTCGECWSREHKCGSSVQLHVVQELLSALQDDQLNHESVDTVSEPAEPVLMAISYQAVTGTESLTSFRLNGWVQGYESLMLVDSGSSHSFIDITVAQKLQGIQCLQHAASVKVADGGVISCSQYIPGCDWWTQGQIFKTDFKEVSTAKLGHIPPEIQSLLTEFSALFDDPQGLPPKRACDHSIPLKSHAKPVFLRPYRHNPARKDEIEKQVKEMLLSGVIQPSNSAFSSPALLVKKKDGTWRLCIDYRQLNSITMKGKFPMPVIDELLDELSGSKVFSKLDLRAGYHQIRLVEGEEHKTTFQTHSGHYEYRVMSFGLTGAPATFQGAMNDTLAPVLRKFALVFFDDILVYSPDLVSHVHHLRQVLQLLTEHQWKVKLSKCSFAQHQLSYLGHIISDQRVTTDPAKIEEVVNWAVPKFVKKLRGFLGLAGYYRKFVKQFGILCRPLTNLLKKDVPFVWSVEADQAFKALKQALVSAPVLSLPDFSLPFTIETDASDEGIGAVLSQCGHPIAFLSKALGVKTKGLSTYEKEYLAILLAVDHWRSYLQQQEFVILTDHHSLMHLNEQRLHTPWQHKAFTKLLGLQFKICYRKGSSNAAANALSRKYPEELSELHVVSSCSPVWLQEVSDGYLQDVFSAQLLTDLTLNAESRPNFSLCNGVLRFKGRVWIDNNPSVQDKIISALHSSPLGGHSGFPVTYSKIKSLFAWPKMKKQIHTAVKTCGICMQAKPDHSKYPGLLQPLPVPDGAWQIITMDFIEGLPKSGQFNCILVVVDKFSKYSHFFPLSHPFSAIDVAQSFMVNVYKLHGLPKFIISDRDKILTSHFWEQLFLRTGTQLQLSTAYHLQTDEQTERVNQCLEIYLRCFVHAVPHKWSSWLYLAEFWFNTSYHSAILQSPFEALYGYPPGHFGIRDDACSVPDLHEWLNERKVMTQLLKQHLNRAQQQMKLYADKKCSFREFSNVDWVYLKLQPYIQSSVAKRANHKLSFRYFGPFQVLYRVGKVAYKLSLSAESSIHPVFHVSQLKHAVGFRHSVQPCLPACSDLKVPVAVLASRQIRKGNSVKAQVLIRWSGDVTGQET

SEQ ID NO: 201539 - protein, 62 aa, Oryza sativa
  Clone ID: PAT_MRT4530_96904C.1.pep
MSILIDKGGIRHINSRSDSSRKGRGMHILYKDVKSCQDEDVHVLWSILVDSHRHPALMKLKL

SEQ ID NO: 201540 - protein, 408 aa, Oryza sativa
  Clone ID: PAT_MRT4530_96905C.1.pep
VILSVIKESLLILLRLRKWPLTNLLKKDVPFVWSVEADQAFKALKQALVSAPVLSLPDFSLPFTVETDASDEGKVWIGNNPSVQDKIISALHSSPLGGHSGFPVTYSKIKSLFAWPKMKKQIHTTVKTCGICMQAKPDRSKYPGLLQPLPVPDGAWQIITMDFIEEFWFNTSYHSAILQSPFEALYGYPPGHFGIRDDACSVPDLHEWLNERKVMTQLLKQHLNRAQQQMKLYADKKRSFREFSDGDWVYLKLQPYIQSSVAKRANHKLSFRYFGPFQVLHRVGKVAYKLSLPAESSIHPVFHVSQLKHAVGFRHSVQPCLPACSDLKVSVVILASRQIRKGQETWEDQVELCQRFPNALAWGQATSQGEGVVSSTAIPDELQNTVKTKEVKQTKEGRPVRHRVCNPR

SEQ ID NO: 201541 - protein, 554 aa, Oryza sativa
  unsure (1)..(554): unsure at all Xaa locations
  Clone ID: PAT_MRT4530_96906C.1.pep
RHCSCRWELYLQGKRNSLGFLFHFFSSITACYDKPRYVTKQAAKIMDXESKLDLLLRKMEEVEKKREESEKHRELSEEKSRSEFLALKVAVESRMPVVEKRVDDLHVSVVGLQDQVDKLQSLVQQPPRPSPSSPGSPDGMQTPPQFTSLPSALEQSAFASALLGASGIGGNVPPMSCPQFNGDSRQLWKSNCEEYFEVYGVHPKNWVCVAGLNFTGNAAFWLQSVRSKLVGVTWQEFFDQVCLRFTKDRQKVLIRQWFHIVQDSSVSDYVEKFDGIMHQLLAYDSSLPLNYFVTKFVEGLRKDIRSGVLMQKPQDLDTACSLAFLQEEILEGSHPAVYRKPEPILLSKNFARQPAPVSPVSNHPQGSVLEDRKQSEFSQSRSDKFSALKSYKRAKGLCFTCGEHWSREHKCGSSVQLHVVQELLAALQDDQLNHESVDTVXRTCRPVFMAISYQAVTGTESLTSFRLNGWVQGYELLMLVDSGSSHSFIDITVAQKLQGIQCLQHVVSVKVADGGVISCSQYISGCDWWTQGQIFKTDFKVLPLGCYDIILGMD

SEQ ID NO: 201542 - protein, 480 aa, Oryza sativa
  Clone ID: PAT_MRT4530_96907C.1.pep
MPVRDLVACSAAIYRHAKSGLFGEAVRLFVGMMRVGVSPNSFTLVGALIAAAGMGNLVLAECIHGWAMKSLLESNPFVRTALLDSYAKCGRPTKAWALFGEMRDPGIVTWNALISGLVHNDLFEEALLVFKRLLFSFGPVHNVVTMISIAQASAGCGDLGLCESAHAYSVKIGLDSDVSVTNSILGMYLSFGSLAIGREIFKKIAVNDVVSWTMMMGFLLEEAQAIEVIHMFVQMRLSGIVPDRVALVTVAQACAHLGDGRIGKLVHNEIVICGFSGELPAVNSLITIHSGLVDDGMLVFRRMVNDKGIIPCPEHVGCIVDMLARAGRLEEAAGVASLTHNKLGANAWKALMGGGHLHGDMKFTKVAAKKVLTTESFDYGHVVLLSNAYASSGKYRAAESVRSLRIMYDKNSGRSRGFGFVHFSNEYEAKCAKDAMDGKVMLGRPLRISFALDKVRGAPVVVPRLSTVSLTIDMFITFLE

SEQ ID NO: 201543 - protein, 597 aa, Oryza sativa
  Clone ID: PAT_MRT4530_96908C.1.pep
MPVRDLVACSAAIYRHAKSGLFGEAVRLFVGMMRVGVSPNSFTLVGALIAAAGMGNLVLAECIHGWAMKSLLESNPFVRTALLDSYAKCGRPTKAWALFGEMRDPGIVTWNALISGLVHNDLFEEALLVFKRLLFSFGPVHNVVTMISIAQASAGCGDLGLCESAHAYSVKIGLDSDVSVTNSILGMYLSFGSLAIGREIFKKIAVNDVVSWTMMMGFLLEEAQAIEVIHMFVQMRLSGIVPDRVALVTVAQACAHLGDGRIGKLVHNEIVICGFSGELPAVNSLITMYSKCEDLSSARLLFDGTMEKSLVSWTAMVSAYIENGYALEGMYLFAKMRHEGSFMIDSVTLVTLLLACYEVAKFELCIQLHAYCYKSGLCLYKPVLNTLIAVYGKCGYATLAHKVFDEMISRNAVSWNTMILSYGVNGQGEKAVSLFNEMEKSSEDQDSVTYLNTLLACSHSGLVDDGMLVFRRMVNDKGIIPCPEHVGCIVDMLARAGRLEEAAGVASLTHNKLGANAWKALMGGGHLHGDMKFTKVAAKKVLTTESFDYGHVVLLSNAYASSGKYRAAESVRSCYAKRITRKTLGLSSIEIVPYSRR

SEQ ID NO: 201544 - protein, 42 aa, Oryza sativa
  Clone ID: PAT_MRT4530_96909C.1.pep
MHGRGATAFAASSKFGRHTFSLADYREHGENLFHRYNIVYSL

SEQ ID NO: 201545 - protein, 373 aa, Oryza sativa
  unsure (1)..(373): unsure at all Xaa locations
  Clone ID: PAT_MRT4530_9690C.1.pep
KSDYCVSRGAGARTGSTGXVGPTRQPLGPRWTGRTRLAAVSAVGPARHRTRGAAADGRAHLAAARARPRAASPARDXGGRAPAPRWSPPXQNGAAEWHPRERREGGSEXTVFGSPRDNDDDENGGRSGRRRRRGSGXDGXRRSDGRRAKXSGGRGRRQHGERMEGXAESGGSPERRRRRNGARRRRRRERSTARXRFRRRERAASSGNGRAEXGSEQLYSTERGRTRPERKETGAGISAAIDCAGDECGXIRTNPRERERGKRGKRERESRGVIPLSLMRAGTAGXGGIRGGGGARARARRRARREEGDDRWAPPVSESGGRARLSAARARAGSRWAAGEEREREGEVGRAGPRGKGGEKRTSFRXFLFIKPF

SEQ ID NO: 201546 - protein, 69 aa, Oryza sativa
  Clone ID: PAT_MRT4530_96910C.1.pep
MRAVGALLAAASCLPAPRAPTCPTTCCMLRLPRATVTHRLAQQRSSRCVRTSDVAAACRCSRQSHRSVA

SEQ ID NO: 201547 - protein, 1160 aa, Oryza sativa
  Clone ID: PAT_MRT4530_96911C.1.pep
MAALLECFLLAVAVVLVAHAAAPAPAASSRLPLPPPPAAAAGDVSGSDSDRRALMAFKKLVSGDPSQALESWGDGSTPLCRWHGVSCGVAAGRRRGRVVALDLAGAGIAGEVSPALGNLTHLRRLHLPENRLHGALPWQLGRLGELRHLNLSHNSIAGRIPPPLISGCRRLKNVLLHGNRLHGELPGELLSSLRRLEVLDLGKNTLTGSIPPDIGNLVSLKQLVLEFNNLTGQIPSQIGKLGNLTMLSLSSNQLSGSIPESIGNLSALTAIAAFSNNLTGRIPPLERLSSLSYLGLASNNLGGTIPSWLGNLSSLTALDLQSNGFVGCIPESLGDLQFLEAISLADNKLRCRIPDSFGNLHELVELYLDNNELEGSLPISLFNLSSLEMLNIQDNNLTGVFPPDMGYKLPNLQQFLVSRNQFHGLIPPSLCNLSMIQVIQTVDNFLSGTIPQCLGRNQNMLSVVNFDGNQLEATNDADWGFMTSLTNCSNMILIDVSINKLQGVLPKAIGNMSTQLEYFGITNNNITGTIPESIGNLVNLDELDMENNLLMGSLPASLGNLKKLNRLSLSNNNFSGSIPVTLGNLTKLTILLLSTNALSGAIPSTLSNCPLEMVDLSYNNLSGPIPKELFLISTISSFLYLAHNKLTGNLPSEVGNLKNLDELDLSDNTISGKIPTTIGECQSLQYLNLSRNFIEDTIPPSLEQLRGLLVLDLSQNNLSGTIPRFLGSMTGLSTLNLSSNDFEGEVPKYGIFLNATATSVMGNNDLCGGAPQLKLPKCSNQTKHGLSSKIIIIIIAGSTILFLILFTCFALRLRTKLRRANPKIPLSDKQHMRVSYAQLSKATNSFASENLIGVGSFGAVYQGRIGISDQQLVVAVKVLNLQQAGAYRSFDAECEALRCIRHRNLVKILTVCSGIDFQGSDFKALVFEFLPNGNLDQWLHKHLEEEGEPKVLNLVERLQIAIDVASALEYLHQHKPCPIVHCDLKPSNILLDNDMVAHVGDFGLARFLHQEHSNSSDKSTGWNAIRGTIGYVAPEYGLGNEVSIHGDVYSYGILLLEMFTGKRPTNSEFGDVLTLHEYVETALPDQTTSVIDQSLLDATWNSEGTAQKYHDIEEIRTECIVSILKVGILCSKEIPTDRMQIGDALRELQAIRDRFDTHQL

SEQ ID NO: 201548 - protein, 102 aa, Oryza sativa
  unsure (1)..(102): unsure at all Xaa locations
  Clone ID: PAT_MRT4530_96912C.1.pep
FDPRRPNPTSPRAPDGVLLVGGGALDGGAPXPRQLHQDPRHLPPASPAEGEEAGRRRLVGEXAAXREPXGGHGAGGRGVEEDXGGGGRLRGRAATALVEEAT

SEQ ID NO: 201549 - protein, 45 aa, Oryza sativa
  Clone ID: PAT_MRT4530_96913C.1.pep
GKNAKGLGGESIPINFSNVARGELIKKGGFRGRYRDRKGVGGVGR

SEQ ID NO: 201550 - protein, 131 aa, Oryza sativa
  Clone ID: PAT_MRT4530_96914C.1.pep
MATPLNLLIALLFIVVSVQGTNGADRCAASSSIDVQTINTGEAAAGGGDTVFEVQVKNLCGCSVRDVRLDGGGFATTVEVDPAVFRAADDGGDYYLVNGGGPIASMATVSFRYTWDHFFQITPRSMEEDQC

SEQ ID NO: 201551 - protein, 139 aa, Oryza sativa
  Clone ID: PAT_MRT4530_96915C.1.pep
GCLGIAFACGGCHAPGAQPRPVTMIISMSHNFAYTIILHFIPPSIDRMQRNAKAGYLFSLSLDRLKLTCASCLPAKECFSLSTLILERERERDREKENERDECVYGPVRAAAILSLLHKADRPSLQMHAFPGPASAYPF

SEQ ID NO: 201552 - protein, 180 aa, Oryza sativa
  Clone ID: PAT_MRT4530_96916C.1.pep
MTLSGGTLSSGITSGSSHGTRSSGSEGDIQLQVQMDLKRKRRKESNRESAKRSRLRKQQHLDDLTSQVNQLKMENQQLTTTLNMVTQSCAFAESQNSVLRTQMMELDSRLSALREIIFYMNNGNQSPSNPTIAATTYPSTTTMTAATTGHYDYYDVFTANAWGSGMQMMQQPIDQFLYQC

SEQ ID NO: 201553 - protein, 100 aa, Oryza sativa
  Clone ID: PAT_MRT4530_96917C.1.pep
GPGLVSPKKGAPLFFFSPKEKTPRGGVNFCQSQIHGFFPGGVAPPVLVPSPSPENPTCFPFWGLCRPLGPFSPLFRPNLLKGVYPFFFFPKLNPNVFPRV

SEQ ID NO: 201554 - protein, 111 aa, Oryza sativa
  Clone ID: PAT_MRT4530_96918C.1.pep
MDRQVRGDHEGINVVGFEVPTSPDSSYNNPVPGNEDEAREPPLVPPHLQHTLLSFPPSQDDSSSLPPPQNVVLNHLYIEKENSRSVVALGITHRFRAKFVTVVLYKPVQRR

SEQ ID NO: 201555 - protein, 568 aa, Oryza sativa
  unsure (1)..(568): unsure at all Xaa locations
  Clone ID: PAT_MRT4530_96919C.1.pep
MAAADGLLPGLKFDPSDHDLVGRYLLRRLQGQPLPLDGVILEADPLSAPPWKLLADHGRGDEAFFFAEAHAKNGKGKRQKRTVEGGGFWQGQPTCVDGERLCVPDDGVGSGGGGGGLQIAWRKYVLSFFANGERGXSSGWVMHEYPVTAPDGLASSQLRLYRVRFSGYGKKRKREPQCPGAHGDDDGELQCAPPPRPMAETALLEERGPLPHPVLGPASVVDQCTDQGSSGVIDDSSLVFRDLPDLIDLPVAEEADASHGAETALLNEHLPLPPPQLFVPPTAVPLDLADDSNGADQNSYGMMGDDQLLLPDLPGTINDDMPDLFVSQAEEASAVPAISYHSSGFMGNEVAALSDFELPESYSSSDAMDGEALALSNYEFPESFEEDLSCIDFATANASSLGFPMDGYPMDELFDDMPDQGSSGAMDDSSVVFRDLPGLINLPAAEEADAIGDAETALLRDLADDSNGTDRNSYGVMGDDQDRLLLPEIPRRIDMPDLFVSQAEEAGLGGGAALDSSSGAMDGEALALSDFEFPESVEEVLSCMDFSTVDMSFLDVPIDELLDDLPAD

SEQ ID NO: 201556 - protein, 89 aa, Oryza sativa
  Clone ID: PAT_MRT4530_9691C.1.pep
FVFFFFWVFFFFFFFFFFFFLENIHILPPGSNLGVPSVVNPIDGQKRHPEPPWPKTVYTKNAWLGFGGNNYQIQLPNQNSCFHWGQQPF

SEQ ID NO: 201557 - protein, 770 aa, Oryza sativa
  Clone ID: PAT_MRT4530_96920C.1.pep
MVQEFTGIPSPPFVAGVGAPAASLRTRFDHLFPSPASALRSAAAGDPASSLPPYLLRPIAQKLPTASAQNSTMQQTRDPSALPHSSSFVTWTPDEFHSPGFNSSKQDERFVLENTLRGMYELIKLAECWVRKDYSIANLLQEAKDTVYCAEDLLDELNYYELQDGVGFSANRSSCPEFSDIKMTEIHGKLNSLKEQMGHLGLHDMQPQHFIFESVSQKYGNLMYDRTNFGYQEELQVLIDSFILDKNSLTSEQVSEVPSSGRAGQKNLSVLTIVGDGGIGKTALAHCSFNDQKVQDHFDLLVWICVSDGFDDKKLIKSDLESLHKYKTLRSVVCISIDSDVITTSVLETWFCHLTNIRMLRFISCRLKELLGNVGNLILLRYLDISSCDFEALPDSFWRLRNLEILDAQNCRFDSVPKDIVKLVKLRKARLRSDLNNQLGHVPGVGNLIYLQDMPYYAVDDTPGRGIQELKNLNNLRGALEISGLHNVTSKEQAVEADLDKKTHLNTLTLSWHDSIRPDKHNGEQEMEVLESLRPSPSIKNLEVRFYMGSGFHPSWLLDDEPISSRLESLSISSCPNIASLFITVTGSSSRGSSPVVFRSLTKLSVTWCRKLMSLDNLLQPELLPEIKVIRISNCEELASLPTNQLIKFTHLEDLEVSHCWSLSWEQGLTLPRSLKSLKLEACGELTDSVLRCGLRELPVLVSLELQFCSGVECIGGEIWSEMPSLQRLKIFCCQELSSIGGEESIARVESVDIRHCPKLRELEQPFQRG

SEQ ID NO: 201558 - protein, 142 aa, Oryza sativa
  Clone ID: PAT_MRT4530_96921C.1.pep
MDAEDIVDCLMWGIIFFFLLACIGVALCFLALTIATVVGLIRRRNDDANNKYDMLIERLLLLRPKDDQDNEQCVICLSENEDDVDGGGGERGRGRMLPGCAHAFHKDCVVKWLRNRTTCPLCRSDVAVAAADDIISTADNMV

SEQ ID NO: 201559 - protein, 124 aa, Oryza sativa
  unsure (1)..(124): unsure at all Xaa locations
  Clone ID: PAT_MRT4530_96922C.1.pep
LRVDLFGGGTEEEKKGAXERGGCGKGFGQKKGFGKALMVVGGKPWDHXTCLAQLEKAXRMVKLEGLFGGPSNLARVVSGFRNWQFLWTLANILVSVVSLLEDYFYTDPAIESFQSCNFVASTRI

SEQ ID NO: 201560 - protein, 72 aa, Oryza sativa
  Clone ID: PAT_MRT4530_96923C.1.pep
KKRKSIPATDPLSCPCSGEGKCPAPNPVWWPCPFPVSLFWGQPQAAPLWSPNGLVELHPRFLGIFASFGLNC

SEQ ID NO: 201561 - protein, 64 aa, Oryza sativa
  unsure (1)..(64): unsure at all Xaa locations
  Clone ID: PAT_MRT4530_96924C.1.pep
MFRLTWQLMLMVLSSVVLLIIPAFMYGCIIVGFARRFRXQYTHTSAITEHAVLFVHTVYSIVVE

SEQ ID NO: 201562 - protein, 997 aa, Oryza sativa
  Clone ID: PAT_MRT4530_96925C.1.pep
MEAARVGAQSRHLYGGGLGEPDMDRRDKRLFGWDLNDWRWDSDRFVATPVPAAEASGLALNSSPSSSEEAGAASVRNVNARGDSDKRKRVVVIDDDDVEDDELVENGGGSLSLRIGGDAVAHGAGVGGGADEEDRNGKKIRVQGGSPSGPACQVEGCTADLTGVRDYHRRHKVCEMHAKATTAVVGNTVQRFCQQCSRKSYIVKRRDYYGSNDFGSYLLILKNNFRFHPLQEFDEGKRSCRRRLAGHNRRRRKTRPEVAVGGSAFTEDKISSYLLLGLLGVCANLNADNAEHLRGQELISGLLRNLGAVAKSLDPKELCKLLEACQSMQDGSNAGTSETANALVNTAVAEAAGPSNSKMPFVNGDQCGLASSSVVPVQSKSPTVATPDPPACKFKDFDLNDTYGGMEGFEDGYEGSPTPAFKTTDSPNCPSWMHQDSTQSPPQTSGNSDSTSAQSLSSSNGDAQCRTDKIVFKLFEKVPSDLPPVLRSQILGWLSSSPTDIESYIRPGCIILTVYLRLVESAWKELSDNMSSYLDKLLNSSTGNFWASGLVFVMVRHQIAFMHNGQLMLDRPLANSAHHYCKILCVRPIAAPFSTKVNFRVEGLNLVSDSSRLICSFEGSCIFQEDTDNIVDDVEHDDIEYLNFCCPLPSSRGRGFVEVEDGGFSNGFFPFIIAEQDICSEVCELESIFESSSHEQADDDNARNQALEFLNELGWLLHRANIISKQDKVPLASFNIWRFRNLGIFAMEREWCAVTKLLLDFLFTGLVDIGSQSPEEVVLSENLLHAAVRMKSAQMVRFLLGYKPNESLKRTAETFLFRPDAQGPSKFTPLHIAAATDDAEDVLDALTNDPGLVGINTWRNARDGAGFTPEDYARQRGNDAYLNMVEKKINKHLGKGHVVLGVPSSIHPVITDGVKPGEVSLEIGMTVPPPAPSCNACSRQALMYPNSTARTFLYRPAMLTVMGIAVICVCVGLLLHTCPKVYAAPTFRWELLERGPM

SEQ ID NO: 201563 - protein, 82 aa, Oryza sativa
  Clone ID: PAT_MRT4530_96926C.1.pep
GPLQCKIWQKIRCKNLIPDSIFYQAGSFPPWCKNNKKIGFFPSGFYFALQTKTICYVCNQKTMNGCQGYFWGWRNKPRTCKF

SEQ ID NO: 201564 - protein, 171 aa, Oryza sativa
  unsure (1)..(171): unsure at all Xaa locations
  Clone ID: PAT_MRT4530_96927C.1.pep
RLPAGFGGFRVGLALTFTTTTKMDSTQVPGHTPRFPHAFAPRVRGHGVWVGTGAIPDRYLQGCXPAFPSSVASPSFSSLAVTSIGPSAXFPVCKFVHPRPHISHXXHHEPGKPSHSCQQPWLPSIAVAAQLHHSHLRLPLXLXRFPSPGKPVXCPALPLQFAHSWHTXGHR

SEQ ID NO: 201565 - protein, 267 aa, Oryza sativa
  Clone ID: PAT_MRT4530_96928C.1.pep
MASLLSLPRLTLTPTPRANPGRRSARPTPASITCGPRDNRGPLQRGRSLSTEAILAVQSLKRLTSSDRSPAAAAAAASTSLGRLLKGDLLAAMAELQRQGHWSLALAALHVARAEPWYRPDPALYATFVSSSPATEDGAAAVDALVEAFLEEKERGGGFVDGEEDVYKLTRLVRALVAKGRARAAWRVYEAAVRMGGCEVDEYMYRVMARGMKRLGFEAEAAEVEADLREWEARISPPARDVLDEMRAREEQHNCGLTVNLIIVLET

SEQ ID NO: 201566 - protein, 98 aa, Oryza sativa
  Clone ID: PAT_MRT4530_96929C.1.pep
EQSATSLNGLTLGFGDTAATRENLSAGFGDTKPPERFEMFDKAVGCCSRLTDCCCCMCFINTCSKMNDRCAIVMVQLCGALSCLACFECCSLCCGGSD

SEQ ID NO: 201567 - protein, 139 aa, Oryza sativa
  unsure (1)..(139): unsure at all Xaa locations
  Clone ID: PAT_MRT4530_9692C.1.pep
AELFIHESEHRTAVAAGVLICRGHSPAYSKRVFYLIAMNLINVENAFAQKHYCDLSSKPFFRGLVEHIVFGPGGAMDWEGKHGVSTDRKLVGATNHLAVERGTIRGDFXAVYIRQDGIHGSDSIENAMKEIALCVPEGI

SEQ ID NO: 201568 - protein, 53 aa, Oryza sativa
  Clone ID: PAT_MRT4530_96930C.1.pep
DCVIDRMQFANTCHPNKIQNSNQRESVLMQDNMHQCSRSSLDGSFSCQAATCF

SEQ ID NO: 201569 - protein, 57 aa, Oryza sativa
  Clone ID: PAT_MRT4530_96931C.1.pep
TIISLYLKHLFGLIPLKDIFARYNYQQVSCIVTSKVIQVLKILSICGVSDIAECCCF

SEQ ID NO: 201570 - protein, 1132 aa, Oryza sativa
  Clone ID: PAT_MRT4530_96932C.1.pep
MNFTRRYDVARLQVLVLDPSLIPDVVDVVIGDHLYELSFIVEPDNGSDEPVPMDMENLDDGTLEKEEGNLNQDLGKGSGGDPGNDSLIGSGGQVSERGGPSIPAAHLSLIPESDGLTVSDEEFDGLDEDSVMVKKAKGNFHDNVSFLQFTNEQISAALDNLGVITLGTNFILDDVKNDLKSIEEKRLSKYVSSSVNQRLLRKILVRLFLKIYVLAKNFCGIANLLEGDFYIKFHLCNKVDKFKWALVLVYGPAQSEFKDQFLAELVNMCSHETLPILIGGDFNILRSSDEKNNDNYDDIWPFLFNAIIDGLCLWELQMSGRKFTWANNLVNPTYEKLDRVLMSTEWEHKFPLSSVVALNRDISDHTPLLLNTNTSSLSNAQHSFKFELGWLLRDDFVDMVKEIWSSVDEGNSAMERWQAKIRRLRQHLRGWSKHTSGLYKKEKKKEILDKLDLLDKKAETMLLSQEELDFRWFCRNRLSTILREEEVKWYQRAKSKDILEGDSNTKYFHLVANGKHRKTRIFQLHDGDQLINGDANLKSHITTYYKGLFGPPYDSTLQFDENKFADIPQVSQLENEALTQVFTEKEIKEAIFQMEHNKAPGPDGFPAEFYQVFWNVIKCDLLDLFKEFHNGTLPLYSLNFGTIILLPKCVEAMTIQQYRPICLLNVSFKIFTKVATNRVMTVAQKIDFEKAYDKGVINKKSKLILVGVSALCWALWLSRNDRVFDKSPTITYMQVIFKATYWLRLWAQLQKCDEDADFLIVACQDFDDDGLNDDDDNAGDDDYTSHRMLMRSACHSCPMRLRRRSPLHTTYVPLSKGKRDCFYVVLACFCDLFARIGLICTGKINNPRRGVSITKPYDKCLPRHRYIQPPFGCLVESVYVTFPLALEVHNHEMEDRDMKEPPVPLFTLKVKAPPSYEEGIKGKLNGAEIIQEELCDNASLISMPQLVNEHAISNVVLNRPRNEHHMEKPRTIFHEEGEDDVTLAATDTTIAHIIDEQEDIKIKSSKCCNPIRPPATLLTSNGRRICIRPPFSAHEYLMESSRSPLSNRSSLIAKFLVVWLQSHKQGATSRVLGLWACNFVWDPGPSGPMWGAPQPGGEQPLASLGRPPTPINRNRVDLHRQDQQPTERCIDH

SEQ ID NO: 201571 - protein, 448 aa, Oryza sativa
  Clone ID: PAT_MRT4530_96933C.1.pep
MSAAAEEAAAAAAAEEVEGVEAGKKGVADAKGKGKEKVVVAEEDSAVAAGSGGSGGGRRTLVAYPARVAGYKDVVADAAVFRRALEGLHAQMGTKLKVPIIGGKDLDLHQLFKEVTSRGGIDKKYYMSLLYHFERLYLFEAQGWYQETADSRSISCIEMKAEGQASRKRKRGSNSCSSDPPINLEWTLSASLDNDVQVIIDGKFEHGYIVTVIMGSKSTKAVLYNCTEEPAVPTAVPHVAIDSAEGIRPRRRRRRKKLSTTDPNHPKPNRSGYNFFFQDQHRKLKPEYPGQDRLISKMIGERWNNLGPEDKAVYQEKGVEDKARYQRQLALYREQRTGQPISNAVPIQQRLPQKEVTIDEVDSKVSEGDILLSNQGYSSSTSSSDETADSGEKNVEDDEEFNTETSPEPSMETTDSHGQPDPSADGERFELRRRENPKIDEKRDMPPN

SEQ ID NO: 201572 - protein, 109 aa, Oryza sativa
  unsure (1)..(109): unsure at all Xaa locations
  Clone ID: PAT_MRT4530_96934C.1.pep
MGGRVVIFIQRIVLAATRRKHEAMGMVMRRERYLEAELNLPPGFRLHPTDDXLVEHYLCRMAAVHRLPQPIMGXVDLYXFDSWNLTNRSLYGPREWLFFISRDRKYTTG

SEQ ID NO: 201573 - protein, 271 aa, Oryza sativa
  Clone ID: PAT_MRT4530_96935C.1.pep
MTVAQKAISPTQTAFIPGRNIMEGVVILHETLHELHRKNKSAVIFKIDFEKAYDKVKWSFVQQTLRMKGFSTKWCEWIASFIQGGHVGIKVNDQTDDTIIFLEYDLQQAKNLKLIMSIFEKLSGLKINFHKRDDHKKNYRLTRWDIICQPKEQGSLGVHNLDIQNRCLLSKWLFKLINENGVWQDLLKRKWNYHQNDQFSVRSMYLALINNGYIDRNKLIWKLKMPLKIKIFMWYLLKGVVLTKDNLARRNWNGHFQGNILASSVVTVTKV

SEQ ID NO: 201574 - protein, 708 aa, Oryza sativa
  Clone ID: PAT_MRT4530_96936C.1.pep
MWRLNYRSAVADRSADLATVISRARTILWMDRVPTRMGPKYPGECQCPVSNFQQEEYCERSSHRATGERTMMPRIEFRDKAAAAAAGQFIPDVVDVVIGDHLYELSFIVEPDNGSDEPVPMDMENLDDGTLEKEEGNLNQDLGKESGGDPGNNSLIGSGGQVSERGGPSIPAAHLSLIPESDGLNVSDEEFDGLDEDSVMVKKVNTQQSLGEKLAAIPEAVISLSRKSKRRASDSDQLVLQRAEKLKADKNLDNLQAKETIKKDFSPAILKNLCAGKEFLWHCKPPRGRSGGLLLGINLINVDIGLIDEGDFYIKFHLCNKVDKFKWALVLVYGPAQSEFKDQFLAELVNMCSHETLPILIGGDFNILRSPDEKNNDNYDDRWPFLFNAIIDGLCLRELQMSGRKFTWANNLANPTYEKLDRVLMSTEWEHKFPLSSVVALNRDISDHTPLLLNTNTSSLSNAQHSFKFELGWLLRDGFVDMFDENKFADIPQVSQLENEALTQVFTEKEIKEAIFQMEHNKAPDPDGFPAEFYQVFWNVIKCDLLDLFKEFHNGTLPLYSLNFGTIILLHKCVEAMTIQQYRPICLLNVSFKIFTKVATNRVMTVAQKIDFEKAYDKVKWSFVQQTLRMKGFSPKWCEWIASFIQGGHVGIKVNDQTDDTIIFLEHDLQQAKNLKLILSIFEKLSGLKINFHKKSYVIMIGKLSIKE

SEQ ID NO: 201575 - protein, 1035 aa, Oryza sativa
  unsure (1)..(1035): unsure at all Xaa locations
  Clone ID: PAT_MRT4530_96937C.1.pep
FLWHCKPHRGRSGGLLLGINLINVDIGLIDEGDFYIKFHLCNKVDKFKWALVLVYGPAQSEFKDQFLAELVNMCSYETLPILIGGDFNILRXSPDEKNNDNYDDRWPFLFNAIIDGLCLRELQMSGRKFTWANNLVNPTYEKLDRVLMFTEWEHKFPLSSVVALNRDISDHTPLLLNTNTSSLSNAQHSFKFEFGWLLRDGFVDMVKEIWSSVDERNSAMERWQAKIRRLRQHLRGWSKHTKGDSNTKYFHLVTNGKHRKTRIFQLHDGDQLINGDANLKSHITTYYKGLFGPPDDSTLQFDENKFADIPQVSQLENEALTHVFTEKQINEAIFQMEHNKAPGPDGFPAEFYQVFWNVIKCDLLDLFKEFHNGTLPLYSLNFGTIILLPKYVEAMKIQQYRPICLLNVSFKIFTKVATNRVMTVAQKVISPTQTAFIPGRNIMEGVVILHETLHELHRKNKSAVIFKIDFEKAYDKVKWSFVQQTLRMKGFSTKWCEWIASFIQGGHVGIKVNDQIGNNFQTHKGLRQGDPLSPILFNLVADMLALLIKRAKDNGSLHGVVPHLVDDGLSILQYADDTIIFLEHDLQQAKNLKLIMSIFEKLSGLKINFHKSELFCFGQAKECYEQYSNIFGCKLGSFPVKYLGIPIHFRKLCNNDWKVIEQRIEKKLSSWKGKHMSVGGRLVLINSVLSSLAMFMISFFEIPKGVLQKIDYYRSXFFWQGDDHKKNYRLTRWDIICQPKEQGSLGVHNLDIQNRCLLSKWFSKLINENGVWQDLLKRKYLYNKSITQVDRKQGDSHFWSGLMNVKNTFLTMGSWIVNNGEQIRFWEDRWLGNMAFREKYPSLYAIVRRRSSSVASVIASVPLNVSFRRALVGQNLTLWHELCASIVHIQLNNTSDCFRWNYHQNGQFSVRSMYLALINNGYIDRNKLIWKLKMPLKIKIFMWYLLKGVVLTKDNLARRNWNGNLRCCFCTKNESIQHLFIDCHFAKFIWRAVQFSFGLYIPTSISHIFYDWLQGVINKKSKLILAGASALCWAL

SEQ ID NO: 201576 - protein, 135 aa, Oryza sativa
  Clone ID: PAT_MRT4530_96938C.1.pep
RRHRQTATRRRSPSPSPPPPSPSPAARHSVSLSAPVATTTAVVGSCTSPGWWPSGPTTAVGTSTMPWSSTSGASSSELHPPSRSPTSAPWTPPPPAPSSPSVQPPPPTAASSSSSRTPPRRAAMRPHPCRRRTRR

SEQ ID NO: 201577 - protein, 72 aa, Oryza sativa
  Clone ID: PAT_MRT4530_96939C.1.pep
MEKLRVHRCGGGAVSWTPSPIVALVGCPCKAQVAAERADGSLEHWLGSPGCVGRHHQLTIQGDAESRGTSLV

SEQ ID NO: 201578 - protein, 103 aa, Oryza sativa
  unsure (1)..(103): unsure at all Xaa locations
  Clone ID: PAT_MRT4530_9693C.1.pep
STILFGSTGYIQDMQVGMXGDIWKSASLKRKSEGYRGNSSSXFKETVNFLNLSKNPISLGKTTEMIGEKVEHCCRWSXEEEITGIAEYLEGGGSGADSPGSLR

SEQ ID NO: 201579 - protein, 413 aa, Oryza sativa
  Clone ID: PAT_MRT4530_96940C.1.pep
MGSPRGRRRGDNGRLLLLAAAAVVIASLVGGGAAQPTTSGPGPNYFNPKSFNPSMAVVIVVLVTAFFFLGFFSIYIRRCAGGPLGGPGGYGVGGGGGGRVGGGFTFAAARSRRVRGLDPAVLGAFPTMAYADVKAHKAGKGALECAVCLSEFDDDETLRLLPRCSHAFHADCIDAWLASHVTCPVCRANLAFDAGVPPPPLAPPHALTTGQDVAAAPPQPAAPEQVTVDVVVADAEETEERIRREEAAELMRIGSVKRALRSKSGRRPPQFPRSHTTGHSLAAAAAVPATADDAAERYTLRLPDHVLREIVTSARLRRTTSLQSFRTTAAAGGGARAGRSVRLGQSGRWSNVSSLMRTFSARLPAWGSARRGAEADSPGKDGAKVAGDCTASVEQHCDGGGGGACPRPLGDHV

SEQ ID NO: 201580 - protein, 108 aa, Oryza sativa
  Clone ID: PAT_MRT4530_96941C.1.pep
VWQFGYSKVLGKGLLPPHRPIVVQANYLFRGHRKKNQALFWRRPPHRYGLWELGVVASGYLFKVSASGLIPPCGGIRNQEIPLLCCCQFFCVKQPICGRAAHLRGGFS

SEQ ID NO: 201581 - protein, 428 aa, Oryza sativa
  Clone ID: PAT_MRT4530_96942C.1.pep
MARSAVLLHAVLLVLAVAVSSWRGVVSGDAAVVLGRKAAGMSSAAASSSADDDLPALQISARKDGAGNDKYAVIFDAGSTGSRVHVFRFDKQMDLVKIGDDMELFAKVKPGLSSYAGKPQEAANSIAPLLEKAKGVVPKQLQKRTPLKLGATAGLRLIGDEKSEQILEAVRDLVHSKSNFQYKPEWISVLGGSQEGSNLWVALNYLLGKLGGDYSKTVGVIDLGGGSVQMAYAISSDAAENAPPVPVGKDPYVTKEYLKGKDYNLYVHSYLHYGLQASRVEILKTKNGQFSSCMLRGFNGTYKYNGEEYDAAASPEGADHGKCGEEAAAALGLDAPCESRNCSFNGVWNGGGGAGMADLYVASYFYDRAVHGGFVVDDAPSAVTTPAAFAEAASKACSLSSGEAAALEDPSYVPRACDVIALHSVTYH

SEQ ID NO: 201582 - protein, 57 aa, Oryza sativa
  Clone ID: PAT_MRT4530_96943C.1.pep
VTKRTMELVGSSEILVESGGLQVELGGKFIALEAWTRSSFYEPVMNWITGRPKQLEL

SEQ ID NO: 201583 - protein, 77 aa, Oryza sativa
  Clone ID: PAT_MRT4530_96944C.1.pep
VPALPGVRGAVRTGPSGTVPFPHDRGQVLKREWHRLVYWRWGKAELVFNLPPGGALAPSMDTSRRGWSRRLRRGTPR

SEQ ID NO: 201584 - protein, 131 aa, Oryza sativa
  Clone ID: PAT_MRT4530_96945C.1.pep
MFSNAPAVLAHRYSNTVHNNEVRDHDMAFLHLTKHSSTIRSGLIPRIKYHSTPRRFSIPPRHLRIRSPDRGSPTGGISTLIPRALLARAPTSHTMAPKPPSNQTRVAPCRARHMAPRVAWSSSSPKRTKRQ

SEQ ID NO: 201585 - protein, 121 aa, Oryza sativa
  Clone ID: PAT_MRT4530_96946C.1.pep
MPNPRINGDHQDLAEPVLGPPGLGFGLGFGPRQGGGRSPRAPGLGHPDPHHVAANVPRQTGAPSTHLTAFKAAGGFENRHHYRARARHVLTVTYTLEKEQDKPKSKTAQNEEDVALLHGYT

SEQ ID NO: 201586 - protein, 338 aa, Oryza sativa
  Clone ID: PAT_MRT4530_96947C.1.pep
MVLPASALDNGGGGAAAVVVVLLPPLPGAAVAAAADAVWCCYGVVSVFDVIFFLKASLRSACSTPFVSAPSSPAARDAPFPGGFFSAPASPAHHHHHHGGEGGGDGEEYEFEFDFSSRFPSPAPAAMSSADELFHNGQIRPMRLLPLVGGGETPREELEVGAGDERGGRLRCRSVRRRSRSHSPFRTWLSPPPPPPPPPSAAPVANAAAPSASRSSSSSSTASSASASSSSSSSSRSSRRWRFLKDLLHRSGSDGGKDQRPPPPIAPPRSPAPAAARGGRRRSAHERMYAARRAEVEEMRRRTFLPYQQGLLFGCLGLTSRLSGAAAAAAAAAGKSRS

SEQ ID NO: 201587 - protein, 98 aa, Oryza sativa
  unsure (1)..(98): unsure at all Xaa locations
  Clone ID: PAT_MRT4530_96948C.1.pep
WRGGANGGHLRVKLGSANSPAVWMTTDGDDXXRRRGRGGGGLRVVDGGSAPVVFGGNGGRDKDDGDLANLATAFLSDGDDWSSGGAWLDLRRQWRRKG

SEQ ID NO: 201588 - protein, 255 aa, Oryza sativa
  unsure (1)..(255): unsure at all Xaa locations
  Clone ID: PAT_MRT4530_96949C.1.pep
MRPPKPLDTFRHTHTLRHSTREGLRAKRFRPPTPFAMVPIRYGAKGCGRRGFATPTPFAIVPIRYGVKGCGRRGFATPTPFAIVPIRHGVKGYGRRGFATCQALRHSTNKGQRAKRFXPTHALRHSANEARRKGLRAKWFRHTHALRHNANKCSEXFITGNNKRFDSEKSNEMCEGLKLEIEFASVAHPQTNGAAKRDERQNPSSTKEMTVSRKNGDNAASTLGNGKLTLSHIKFMGVFAIFVYDISWKNPKANI

SEQ ID NO: 201589 - protein, 153 aa, Oryza sativa
  Clone ID: PAT_MRT4530_9694C.1.pep
MVRTGTMLREEQRSSAVGIPCEKVTRVWILEGQLRSTVGIGTKLREELRSRRSRILGEEVGYEMAHGGWTPCGRDLRNRLHVYVQVSVFVKEIRRKDVLKYTRQASVPRLGCARGLACVVDRPAQVAAARWFNRRCVSGLTGGDRTTSRFPSI

SEQ ID NO: 201590 - protein, 177 aa, Oryza sativa
  Clone ID: PAT_MRT4530_96950C.1.pep
ELGSVFSEQTLQSFTVEKLRILLKERGLSPKGKKQLEFRSLVTGSLAVGHQVEQFVICLGEGVWLHQKHAQCTVGDCCCGADHYGVGIKGKEPSDCGGFLAESVICFVIRLRLILQMYIRISDVTTKPENIPQLNKALDGLERGGFCLEGIQKGNDYLNRHGGEDVGLGALTIEDIY

SEQ ID NO: 201591 - protein, 232 aa, Oryza sativa
  Clone ID: PAT_MRT4530_96951C.1.pep
MAGVMEDSSHRRGSLFGVGLRGIFLLLSFGDAVGRGRESCPCAGDGPTGERRTRTRTRLIMARWQMTKVATQVATEELFVIARARPRGARALTALLLLLTLITRTAVAQDVRLGDVAPEETTVVAALAVELGQLRAKMKGVRRLKVEKKEKGGPAIPVYGLRRGLPRQQFRLPSLGLYLVDAHATSIDGFPRMESLGSLAASLIGCLLGLRGPSVITLESASTGRRHARPRR

SEQ ID NO: 201592 - protein, 98 aa, Oryza sativa
  Clone ID: PAT_MRT4530_96952C.1.pep
VLPYRISRAARGLRDELALAQKTNEAAITQQDSMVLTRNLLRIAIYNIRYMIGLLPAKYSNDESVPALQMNIKKLLPLDTEARKLIDWLAKGVYDSLH

SEQ ID NO: 201593 - protein, 186 aa, Oryza sativa
  Clone ID: PAT_MRT4530_96953C.1.pep
KQRLFFRGKEKSDNEFLHTAGVKDGAKLLLLEKPAPANVEQRAEPVIMDESMMKACEAVGRVRAEVDRLSAKVCDLEKSVFAGRKIEDKDFVVLTELLMMELLKLDGIEAEGEARAQRKAEVRRVQGLVETLDKLKARNANPFSDQNKSVSVTTQWETFDNGMGSLNAPPPRVSSTQINTDWEQFD

SEQ ID NO: 201594 - protein, 145 aa, Oryza sativa
  unsure (1)..(145): unsure at all Xaa locations
  Clone ID: PAT_MRT4530_96954C.1.pep
RGRVGLSGNSSSCNVSNGGRIRSMRVWPIDDIKKCKTFXTCHTISVEERLKQIEYLLRSKWVPWLTINTVGSTYRENHTCGRYYXGRDWTMWKLSMFWCTDTTHALKELEEAKKANPDALGRIIGLYNTRQVPVMSLMAYKPPCC

SEQ ID NO: 201595 - protein, 116 aa, Oryza sativa
  Clone ID: PAT_MRT4530_96955C.1.pep
TLLPPRISRHAGLPSPPAVPPASPRLPAPPRPPHHLVLLGGAEPGHPAPPPREHAMVSSAGAMISSTDTMTSSAGPECGAAGVLPLDPVARGPILPPSAPDRPCPAQTASEPVVDT

SEQ ID NO: 201596 - protein, 160 aa, Oryza sativa
  Clone ID: PAT_MRT4530_96956C.1.pep
MATGGAAGEDVPGGGEFYLRYYVGHKGKFGHEFLEFEFRPDGKLRYANNSNYKNDTMIRKEVFVSPSVLREARRIIQESEIMKEDDNNWPEPDRVGRQELEIVMGNEHISFTTSKIGSLVDVQTSKDPEGLRIFYYLVQDLKCFVFSLINLHFKIKPIQS

SEQ ID NO: 201597 - protein, 194 aa, Oryza sativa
  unsure (1)..(194): unsure at all Xaa locations
  Clone ID: PAT_MRT4530_96957C.1.pep
TITVATTEPRRPQPPPPRRRCCRAPATSTASTTLLPXPRRPPPPPPRXTAVDPPPCAFPSPDPPPRTSPSPDPPPRASPSPDPPPRASLSPXPPPGPPTPDLTPSSPPSPVPXAPPPTPDLTTRAPSSPPHSPPSPAPERYRPHPSTPPAPXSPPPPSPPIARGAAACGSEGGGVGSGGTRKKERAERVAERVA

SEQ ID NO: 201598 - protein, 35 aa, Oryza sativa
  Clone ID: PAT_MRT4530_96958C.1.pep
TSMSMTGIFSMAAVETGWIVYHSTTTEHRMNFSLV

SEQ ID NO: 201599 - protein, 57 aa, Oryza sativa
  unsure (1)..(57): unsure at all Xaa locations
  Clone ID: PAT_MRT4530_96959C.1.pep
PRIKHCSLKDQETSCLTDLALMTHLSEFLLIESRSLKIYLSFLSGGTSXKQSAYIYV

SEQ ID NO: 201600 - protein, 116 aa, Oryza sativa
  Clone ID: PAT_MRT4530_9695C.1.pep
SLCRSDHYPIMASSSLHCHSTTILFVLIFLASSSSLQARMLPSDVHDDDNNVHVKELSAVSSNPTASTTVDSLALMAPPPPPPPAAGKPEMMPAVDGKRWGTAQLQGSVPSPGIGN

SEQ ID NO: 201601 - protein, 187 aa, Oryza sativa
  unsure (1)..(187): unsure at all Xaa locations
  Clone ID: PAT_MRT4530_96960C.1.pep
FFFFSXFFFFLQLKISILPSIQASKISTHLTKNLNTKHQSKYNASQISSQILQASQIQRTAVAGVVVLEVPCTITVATTEPRRPQPPPPRRRCCRAPATSTASTTLLPSPGDLHRSAGHHRAKPRNARFERGRGGGGGGGRGGVRSGGERPVDPPPCAFPSRIRTSHLPIAGSAPRASRRRIRRLAL

SEQ ID NO: 201602 - protein, 153 aa, Oryza sativa
  unsure (1)..(153): unsure at all Xaa locations
  Clone ID: PAT_MRT4530_96961C.1.pep
AVDSPPCAVPSRDPPPRTSPSPDPPPRASPSPDQPPRASLSQXPPPGTPTPXPPAVLSSVTRARAPPPTPDLTTRAPSSPPHSRPSPAAERYRPHPSTPPXAPSPPPPSPPIARGAPACGSEGGGVGSAGTSKEERAGYARSREEGAGEQTRG

SEQ ID NO: 201603 - protein, 68 aa, Oryza sativa
  Clone ID: PAT_MRT4530_96962C.1.pep
MDTDLWEMVHNKNMPFVAAATSPPPDPTGREAAAAACGGRLPTPDGCGSGALHDVGPFLVFLVFLDVL

SEQ ID NO: 201604 - protein, 58 aa, Oryza sativa
  Clone ID: PAT_MRT4530_96963C.1.pep
SENCLQPVTISGSPDSYESKLTGQRLDPGVVGRRAKRKQDPLCIFGITGRSSCYPDMS

SEQ ID NO: 201605 - protein, 87 aa, Oryza sativa
  Clone ID: PAT_MRT4530_96964C.1.pep
RNKFGHYKIIVLPCFPVFFLGCPGFKPGERVWMMFFLLYFPSPFVSPELEYYPSGFPGFMPPPFSPFKDFFRPPLEWGTIPFLPFGG

SEQ ID NO: 201606 - protein, 154 aa, Oryza sativa
  Clone ID: PAT_MRT4530_96965C.1.pep
MTATGEPATGIPAQPAAEPSKPQLQEQEKDYADIVPVATRYDGLEFLKIKDLRSSLQARDSPFVVDNNAGGGFVGDSDLVAISIMQYDSPESSGATCSQGLFDSSSTICMPLPPFALRSGPRRTVYFDPKQVTAAVVTCGGLCPGLNDVVQNIV

SEQ ID NO: 201607 - protein, 85 aa, Oryza sativa
  Clone ID: PAT_MRT4530_96966C.1.pep
MTQGRKTTAQEYTCFAGQGPRQEATQAESVRRKPQPEGIGFAKAPNPTVRKPSGPLRPRRGILQINGPSHLAQLGPIHVKDVVYP

SEQ ID NO: 201608 - protein, 450 aa, Oryza sativa
  Clone ID: PAT_MRT4530_96967C.1.pep
MGRGVRQTACRHLTHDLIVTDVAKDLPFLSLVIVWVQWNCSESRALQVSMDLDTTRKRPRESGVAVDRLSALPDCLLHVIMSFMKARQVVQTCMLSKRWEHLWRTVPCLDVDHREFQSTGEAAQGDNEVWQNFEDFADNLMLHHQIAHLDTFQLHVNNVYRWGQHASRWIRRSIKYNTKVPGIPRPGLSCSSWSLKRLHLSNICVDDLFAKHISSMCCSLEDLNLKGCRFAFNEITSHSLKSLVIDSCDSKLCPSKLVVTAPAIASLCLIVKLWFFPGGLIVNEMPFLSKASILVSATYDGKNFQHNQSKFLGSLCNVTTLELSGFQTMHYIFQIIPEEPVELPEFKNLKILSLDKCDLSDNFQLLKHFLQNSPNLEKLTLRLCELPKDSKKRKGKAKAKKTRLVDIRCENLKLTEIIYDADDVLQLVGLLLNDSANLPKNNIKLSKVDR

SEQ ID NO: 201609 - protein, 34 aa, Oryza sativa
  Clone ID: PAT_MRT4530_96968C.1.pep
PSSLPATTPPRCAILGNTLGQRRRGRSTTGAPTP

SEQ ID NO: 201610 - protein, 31 aa, Oryza sativa
  unsure (1)..(31): unsure at all Xaa locations
  Clone ID: PAT_MRT4530_96969C.1.pep
MPTWWKRSKXXFQRSSAXSSAPASPXRXSTS

SEQ ID NO: 201611 - protein, 1193 aa, Oryza sativa
  Clone ID: PAT_MRT4530_9696C.1.pep
MDPRLLLALLCLAAFSAAAYASDEIHGCGGFVEASSGLAKSRKASDSKLDYSDITVELCTIDGLVKESTQCAPNGYYFIPVYDKGSFMVRVKGPKGWSWKPETVPVVIDQNGCNGNADINFQFTGFMISGKVVGAVGGKSCSKHGGPSGVKVELSTNSDELVASALTSSTGEYSFANIIPGRYKLRASHPNYEIETRGSSEVDLRFGNAVADDVFFLSGYNIYGSVVAQGNPILGVHLYLYSNDVTEVPCPQSISDAPREGALCHAVSGADGKFTFSSLPCGSYELLPYYKGENTVFDVSPPSLLVSVEHSHMTIPQKFQVTGFSVGGRVVDGYGAGVEGANVIVDGQLRAVTDNLGYYRLDQVTSKKYTIVAEKDHYKFNRLENFMILPNMASIDDITSVRYDVCGIVRTVTPNSKSMVTLTHGPENVKPQRKLVSENGRFCFEVLAGEYRLSALPVDTEGSSSLMFSPGFIDVNVNSPLLDIEFSQSQVNLHGKVLCKEQCNQNILLSLVRLAGGIEQEKKTVTLEQDNVNFAFKKIFPGKYRLEVKHSSSEAAAQDDWCWDQNAMDINVGSDDVTDIVFVQKGYWVELVSTHETKAYIQHPDSSKLDLLIKKGSQRICIETPGQHELHLINSCISFGSSPVVFDTKNPMPVHISAKKYLVRGELHVEMGSLQEIDLSKNIGVDVFKSDGSFIEKISATPVLGKSYQNDISAFEYSIWAEFGEDFIFVPRDDSTGRKNILFYPSSQQFSVAVNGCQYTVPSITAKTGLYLEGSVSPAISDVDIKILAAGKSKYASLKERDIAMETKTNSEGSFFAGPLYDDIGYTVEASKAGYHLKQTGPYTFSCQKLGQILVRIYGEQDAELLPSVLLSLSGEEGYRNNSISGSGGTFSFGNLFPGSFYLRPLLKEYKFTPSAVAIDLNSGESREVEFRATRVAYSAMGSVTLLTGQPKEGVFVEARSESRGYYEEATTDSFGRFRLRGLVPGSIYSVRVVAKDDHRFAAVERASPEYVSIDVGQDDISGIDFVVFERPESTILSGHVEGDDLDMLQPQLSVEIRSAADPSRIESVLPVPLSYYFEVQNLPKGKHLVQLRSGLPSHTHRFESEIVEVDLDKQPQIHVGPLKYKTEERHHKQELTPAPVFPLIVGVSVIALVISMPRLKDLYQSAVGMTTLGSAAAPIKKEPRKTIMRKRA

SEQ ID NO: 201612 - protein, 81 aa, Oryza sativa
  Clone ID: PAT_MRT4530_96970C.1.pep
MDSAVGTSTQYFRQGKKEASIMLISVGWAQRGTHLTAGTNQGRFQGLAMEMVAMMARPECMLPRQQDCFKNAGVLKALSVE

SEQ ID NO: 201613 - protein, 122 aa, Oryza sativa
  Clone ID: PAT_MRT4530_96971C.1.pep
WRALTSMAIRPARYGPAQALLGTAHQRSGHFVQGRASPKAQKTALFIAPKVFDVVSLALAPPLPTASRPARRVPLCLLSAVAVAIDVPSPRARAPLRLPFAVTVAISRPAPRRAIRLPRRPE

SEQ ID NO: 201614 - protein, 74 aa, Oryza sativa
  unsure (1)..(74): unsure at all Xaa locations
  Clone ID: PAT_MRT4530_96972C.1.pep
VRVLPLGVLPLPRIDDLCDEHRGATEVTIXKQIDLRSGYHXQLRIREEDIPKTAFTTRYGLYEFTVMSFGLTKA

SEQ ID NO: 201615 - protein, 368 aa, Oryza sativa
  Clone ID: PAT_MRT4530_96973C.1.pep
MAMWRSCLYMPHLNYLPKDRLRKRKKGGGGTAYWRQRQWRQRTVAATAAVHGGGERGTAKARRGAAASWRRRGGSMRRRGGVEAAAWVLHKMGHLSLRAGTALHEVPRSLRPAISSKTFCLYLLFLSRENQAPRQAIALRPSVIARGAYTISRHSALSAVHKVSMASARPYRFPVPAEGGEPTRRRSAAQSCGTCGASAVASCVALCCCPCAVVGCLTLALVKAPYAAGRRCVARLAAGKRRRMIRPGVATTPRKTNRVWDLDDGQLQEWRPAGADGAVRAERKQDRREPGRTGGAASAAPPGDASVDAISAVGEGSGRARPRVDTAEKTWVEIYQLGHWGFGRLSFSQPQVIRGDTCGNDGVAASRQ

SEQ ID NO: 201616 - protein, 87 aa, Oryza sativa
  Clone ID: PAT_MRT4530_96974C.1.pep
MELGAVRCGRADAAPVSRHLVAARRTRKVEQGTAHDIGDEDALKPPGGFGRNFRAPFICKIFPKCCPEVSGTFARNLLLAIPLLFIH

SEQ ID NO: 201617 - protein, 96 aa, Oryza sativa
  unsure (1)..(96): unsure at all Xaa locations
  Clone ID: PAT_MRT4530_96975C.1.pep
RHAXLSAGAPMGFXNRRGXGCHRTRWCGSGGGRPXAPLRXLXTPPSSXLFLXLVGAALSXTDSTTSVGAWTRXGFGFXGELLCPPLSGFLATERCM

SEQ ID NO: 201618 - protein, 70 aa, Oryza sativa
  unsure (1)..(70): unsure at all Xaa locations
  Clone ID: PAT_MRT4530_96976C.1.pep
IXXPNKSINPFFLXXPILFTNKKPLPPYYFSFFLXFLLLXISLLSXKKSFFHFLXSXXPXTPFFFKLIFP

SEQ ID NO: 201619 - protein, 190 aa, Oryza sativa
  Clone ID: PAT_MRT4530_96977C.1.pep
HEGVRLFPPRFLSFPAAAAAPRVEPRGRPYLREHSCLIFPPSPRGRRPLAVVKFLGGAFIGAVPEVTYSHFLKLLAQEGFLVVSVPYNVTFDHEAAAREVYERFHGFYGALLSSGLPAAGLSAMDIAELPLYSVGHSNGALLQLLVGSYFSEKIPKANAIVSFNNRPASEAVPYFEQIGPLFSQVMPMME

SEQ ID NO: 201620 - protein, 63 aa, Oryza sativa
  Clone ID: PAT_MRT4530_96978C.1.pep
MAATSPTKVAMEHEIGCDGAASVIAKRLLVTGPVLPPVNRQRHRRRRSETRMGRVKMRVERDL

SEQ ID NO: 201621 - protein, 50 aa, Oryza sativa
  Clone ID: PAT_MRT4530_96979C.1.pep
MVRKHKCDWFGLPRSSNVLAQQGATGRPGSSTESSTEQGVVAELAELPAR

SEQ ID NO: 201622 - protein, 120 aa, Oryza sativa
  unsure (1)..(120): unsure at all Xaa locations
  Clone ID: PAT_MRT4530_9697C.1.pep
CHDGAGYPPSSARPAPPAAPCCCGGLAVAHRLGAVPAGEASVXVAASAASVPIWKKEVYDDGEVWKENRELLNRTTTDGAAAAPARGALAAAARPKRKMVIDLKDPEQGKGNLNQCGSFF

SEQ ID NO: 201623 - protein, 47 aa, Oryza sativa
  Clone ID: PAT_MRT4530_96980C.1.pep
STRKHQFGRSDIRLYLPYLSKRGNRQRKKKERKSVHGLVTRNILLVF

SEQ ID NO: 201624 - protein, 107 aa, Oryza sativa
  unsure (1)..(107): unsure at all Xaa locations
  Clone ID: PAT_MRT4530_96981C.1.pep
QVEGPSEYFFLFYFAYMGFRLGLRRGLLGRRVSPEVQNPNEVAVAVLLPRQAAVDSSRSLVILGRRRLEAAEXXEREGEMPTLTKLYSLGDAXRHTPPTTAGSSSTA

SEQ ID NO: 201625 - protein, 184 aa, Oryza sativa
  unsure (1)..(184): unsure at all Xaa locations
  Clone ID: PAT_MRT4530_96982C.1.pep
IAIRXXXRGPRGARRRPCXSSXWTAPXXXNPQXFHIRTLAPXLRSQRKSXRSGAXPLPXXXKRFLCQTYSXXVXXLQKQXXVLXVVXXXIXXXXXPXWAWXNKTLILFFFRXTXKVCYXXVSGXXFXRHGCYTIWLYXXNXTPVLPXGYXNLLXXPHLFXXXKKRGLPXXFXRXFDSIXXXFDP

SEQ ID NO: 201626 - protein, 102 aa, Oryza sativa
  Clone ID: PAT_MRT4530_96983C.1.pep
VAARVPRTRVSARAPPWRSPASPAQQCSPTPPPGAPGTLAAPVPSPRSPVAAASAVGDGGARGGARRRRVLSRRPPAAPCLPSPSRARSSPVERGVERARAS

SEQ ID NO: 201627 - protein, 111 aa, Oryza sativa
  Clone ID: PAT_MRT4530_96984C.1.pep
LSLQASCCQASSASATGMHLPVQFPAACAFKHASFSCMFPRHAHGACSPSMCIFTFLLVQCAHRCTLAVPSICTQLLVLSTCHVCPRHNTSFHHGHPGHSSRSSSLLLYVI

SEQ ID NO: 201628 - protein, 87 aa, Oryza sativa
  unsure (1)..(87): unsure at all Xaa locations
  Clone ID: PAT_MRT4530_96985C.1.pep
RIYLKKLKLDKEPSFYSQRLAALTPGFAGADIANVCNEAALIAARSEGTLXTMQHFESAIDRVIGGLEKKNKVFFTLDVKYYMGHEQ

SEQ ID NO: 201629 - protein, 123 aa, Oryza sativa
  Clone ID: PAT_MRT4530_96986C.1.pep
CYAVITCAHHMCVSVITCQMFVSVGAQQFSWLMLFGLYRILDYVVASLKFKVPPLFAPIATWVMINFSCQSLAPCGFWITVPFLFGSFCFLQVVPQVNVCDLGRVISMVVTCYIKRITPPFLF

SEQ ID NO: 201630 - protein, 96 aa, Oryza sativa
  unsure (1)..(96): unsure at all Xaa locations
  Clone ID: PAT_MRT4530_96987C.1.pep
XXRYIIXGXRRIIWYIFILGXYMLAHIIHIVHLDNSPMGAHHYRRSRXAFRANSYHGTWAXXLRXRXTFXTLXDXTTEGXYXXLGRXSXXXTXLSP

SEQ ID NO: 201631 - protein, 103 aa, Oryza sativa
  unsure (1)..(103): unsure at all Xaa locations
  Clone ID: PAT_MRT4530_96988C.1.pep
PPPTLPPPPEREKRRRREPPLPDPPTVAAIINXPTRTTPTPPPPPCRGLPPDLPSAXPPXPIHPRPPPXIYSWLWLTLLDPPPPLPDPLVAAANPPPPQPYPP

SEQ ID NO: 201632 - protein, 426 aa, Oryza sativa
  unsure (1)..(426): unsure at all Xaa locations
  Clone ID: PAT_MRT4530_96989C.1.pep
RWQPCLLLLLQRHASSLPRRASIRCRAFSTPIIKNVRCVVADPLKLLLRPGNPQPPPLAQPRPPPAPNDAREPPAPHPTPPPPPHPTAPPTPSSPPPSXPPLLEPPTGGPHLSGPSPTSSRPQPRHAAPLPPHVAPNSGLSRSRPRAQTRGIGSPPPPPPXSPTFPQFLAPNRAPTLPTLSSTSPAVAAPNSPLPXPPPRPPPSASSSRGQARPPPHFPLPPPKPCPPNXLPPSPGCGHPCPQLRVCRLPPDRRRHRQPARAPPPPIVPRPXALSENSLPLLFPPLPLPPRPSPPHPXSRPPPSIRXPPPTLPPPPEREKRRRREPPLPDPPTVAAXLTDPTRTTPTPPPPLDQPREESGMGWREPLPLDPPAXPPAPPDPPVPRTATGSALSSCHRRPIHPRPPPLDLLVAVADAARSATGGRQE

SEQ ID NO: 201633 - protein, 100 aa, Oryza sativa
  unsure (1)..(100): unsure at all Xaa locations
  Clone ID: PAT_MRT4530_9698C.1.pep
SSGRQVWLRVMTPPGLPSLXPRGSWLQDWXSSSRVCLPKHLRSGFDSLVLLVSWQLXKERNFRVFDSALASVAMVLESIRLEGQLWSLAGVXFFGDLLGV

SEQ ID NO: 201634 - protein, 202 aa, Oryza sativa
  unsure (1)..(202): unsure at all Xaa locations
  Clone ID: PAT_MRT4530_96990C.1.pep
SHRRATRPPPSASSSRGQARPPPHFPLPPPKPCLHRKTEQPSPLSLRAARCRQWTPRLASTSPPPASQGLDDARPPPTLANRSLPPSPGCGHPCPQLRVCRLPPXPSPSPPTMARPSRLESRPCPGRPLMRVDESRPSMWPHWCRPASAPPXATPLPPQPVVRRGRHVASIRXPPPTLPPPPEREERRRREPPLPDPPTVAA

SEQ ID NO: 201635 - protein, 60 aa, Oryza sativa
  Clone ID: PAT_MRT4530_96991C.1.pep
PSPTSFRAPPPPSPSPRKKRPPSRSKAFLGNGPWFPLPMVPLIFLPKHLPSCFPIAPPAP

SEQ ID NO: 201636 - protein, 125 aa, Oryza sativa
  unsure (1)..(125): unsure at all Xaa locations
  Clone ID: PAT_MRT4530_96992C.1.pep
TRTPPPPLDQPREKGGMGWREPLPLDPPAAAAGATRSTPAAAGSGAGGIRRPIYPPPPLPDPLVAAANPPPPQPYPPWEGGERERRRGRGRRDGMXGATAGEGGETGQIEGEVGRVRVLWGEGRS

SEQ ID NO: 201637 - protein, 153 aa, Oryza sativa
  unsure (1)..(153): unsure at all Xaa locations
  Clone ID: PAT_MRT4530_96993C.1.pep
DCFNCLPVAAVIDDKIXCMHGGLSPDLDSLDRIREIARPVDVPDQGLLCDLLWSDPDRESSGWGENDRGVSFTFGADKVTEFLNKHDLDLICRAHQVVEDGYEFFADRQLVTIFSAPNYCGEFNNAGALMNVDASLLCSFQILKPFRGKSQAE

SEQ ID NO: 201638 - protein, 352 aa, Oryza sativa
  Clone ID: PAT_MRT4530_96994C.1.pep
PLPPPPARPVTACLVVAGADRFRPPDRGGDRGMMDGNAVDELIRRLLDGKKVKPSSSAKKVQLSEAEIRQLCVTGKDIFLSQPNLLELEAPINVCGDIHGQFSDLLRLFEFGGLPPTANYLFLGDYVDRGKQSIETICLLLAYKIKYPDNFFLLRGNHECASINRIYGFYDECKRRFSVRLWKLFTDCFNCLPVAAVIDDKILCMHGGLSPDLDSLDRIREIARPVDVPDQGLLCDLLWSDPDRESSGWGENDRGVSFTFGADKVTEFLNKHDLDLICRAHQASRHRHRHLLLPCVVEDGYEFFADRQLVTIFSAPNYCGEFNNAGALMNVDASLLCSFQILKPFRGKSQAE

SEQ ID NO: 201639 - protein, 96 aa, Oryza sativa
  unsure (1)..(96): unsure at all Xaa locations
  Clone ID: PAT_MRT4530_96995C.1.pep
MRSVTVLVLLLACAAERAAVGAVTDGLLPYENFQEGPRNWDLVNVTAVRXGAIAIRPWDXTVFVQRIESGDKQELMVLMVSYCVTSVRLPTHARIR

SEQ ID NO: 201640 - protein, 129 aa, Oryza sativa
  unsure (1)..(129): unsure at all Xaa locations
  Clone ID: PAT_MRT4530_96996C.1.pep
QQAKAASNNNEDVATPPPAKVNLXXVAQPSPARPPAGGLPPPPNSNTTEQRRXAAGGQRXTATAPXPXXGVHXXTTAKRKFFXSQGAGRAPXTXXXXTHAGPAAXRXQXVSPXGTPXWPPXXCTXPACT

SEQ ID NO: 201641 - protein, 542 aa, Oryza sativa
  Clone ID: PAT_MRT4530_96997C.1.pep
MDVLDTLVVRFHMNGVFLLDGSEKKYCGGSEALSYVDRDKISLSELFGHLKEHCNMLSGTMLHWLFPGRDLQTGLRALCDDKACKLMCDCTGELEVADILMMRVIYEVEMELEVESEEDGEKGDVHVDASKGKEVDKGKAIAEEETDRRIVLYQSESAPLVSHQPFSSAPKASHEPSDSSPIPNQPTYDTEPIANDPPSDSDEDSDYIPGDEAQSDDDEEAAEIEKHYKKVKRKVKAGQLENLDDFFLERGQPSVHGGVEDAGNETPYANSDEEDSVDEIGSDGEVRTKRSKEPRYKKSEGVPKFELGMKFNCKKQFKKAITKYALAEKKVINFIKDDGQRVRAKCDWHNCPWVCLLSKNSRSNSWQIVTFENLHACPPRRDSRLVTSVRIAEKYGNFIAANPSWLLAHMKAIVQEEMFADASVAKLKRAKWLVQKKKFEATKGQYQQLYRYQLELLRSNPGSTVVINREIGMVPPVFKRIYICLDALKKGFIAGCRKVVGLDGCFFKRATNGELLCAMGRDANNQMYPIAWAVVAKENNEE

SEQ ID NO: 201642 - protein, 58 aa, Oryza sativa
  Clone ID: PAT_MRT4530_96998C.1.pep
LSKANHPRLTINKLVNIINNQKAERTPAAVSTVTQEPDSSMHAVPGVRACHAAGDINR

SEQ ID NO: 201643 - protein, 153 aa, Oryza sativa
  unsure (1)..(153): unsure at all Xaa locations
  Clone ID: PAT_MRT4530_96999C.1.pep
GVSDAAASCHASGYVYLHGNETRTTPAILTLKVFDHGEDDGGVPTSCDMRFHRNTELVVALSSGWLRLGGGRRRCHRRIRVFAVAGAASGRSSVVARVVDDCDSVNGCREEDGFAPPCRNNAVGGSPVVWEKXLGLNASVGEFEVVWSCLKNA

SEQ ID NO: 201644 - protein, 88 aa, Oryza sativa
  Clone ID: PAT_MRT4530_9699C.1.pep
GSQYDSWFLSNCQNHCKYYSLGWSILSCVHACLFYCPLKSYPPVDYRVSSFYPCVDVWFDVPFLLLMACVHFSSVLYCLCCFSLRLFM

SEQ ID NO: 201645 - protein, 64 aa, Oryza sativa
  Clone ID: PAT_MRT4530_969C.1.pep
PVPFKFSKGAPLNSSPSRISSSPRWSGRAGPPPGGCGPPSKGQGPTGFCDPSPPPCFVKSPRMG

SEQ ID NO: 201646 - protein, 108 aa, Oryza sativa
  Clone ID: PAT_MRT4530_96C.1.pep
MAGDEIGSGDGVLINDGDGFPAIFGEEERSNQGNNQRVHGDGNLPAGFGAKELAAMVEINLAERREVASLIENGRRDGKRRLKMAAGVGERKRRRIGKNRGSGRLAGG

SEQ ID NO: 201647 - protein, 370 aa, Oryza sativa
  Clone ID: PAT_MRT4530_97000C.1.pep
MGRPPSTGGPAFRFTQAEVAEMEARLQQLNNAIPHRSVIQALADKFTSSPARSGKVAVQPKQVWNWFQNRRYSHRSRSSRGPPTLMQTKMLPTGSDEHKSPPFRAMPSASAHSGSPSGKGSLESGQVEFEAKSARDGAWYDVAAFLSHRLFESGDPEVRVRFSGFGAEEDEWINVRKCVRQRSLPCESTECVAVLPGDLILCFQEGKEQALYFDACVLDAQRRRHDVRGCRCRFLVRYDHDHSEEIVPLRKVCRRPETDYRLQILHAARAAGMAKEAVVDLVSHNDKSSAEQKPPKQHKMMDVNTDEVTMVSNQDQEEPTGKPAATLPAAPVKTLNDSASASASDVQMGEAQAAPKVESSDEVEDKMKEG

SEQ ID NO: 201648 - protein, 557 aa, Oryza sativa
  Clone ID: PAT_MRT4530_97001C.1.pep
MKIRSPRFQDESLTAPFILDKKARSKAPTVVLGFECLESTAFNGIATNLVVYLETLLHGSNLASASNVTTWFGTSYLTPVFGAIIADTFWGNYNTILVSLVFYLLGMMLVTFSAFLPTTALCTVVGSSCQQPLLGAQTIAFLGLYLVAFGSGGVRAALLPFGADQFDDDNTADRERKMSFFSWFYICVDFGMIVSGLFIVWIQQNVSWGLGFGIATACIALAFGGFVLATPMYKRRMPTGTPIKSLAQVVVAACRKARLRVPADTTLLYEVHDKINQSKIAHTDQFGFLDKAAVVMESDLEEESNDVAADASWRICTVTQVEELKILLRLLPIWATSIVLSAAYAQLNTTFVQQGAAMNMRIMSFTIPPASMVSFEVLCVLAWVLMYSSVIVPMLNSLSLANGEPSQLQRMGAGRLLMAFAMAVAALVEMMRLDAAGRGESLSIAWQMPQYFALAGAEVFCYIAQLEFFYSEAPESMKSMCTSLALLTVALGSYMSSFIYAVVNAFTAVDGRPGWISDNLNEGHMDYFFWVMAALCTLNFVVYSAFARTYRVKLVVS

SEQ ID NO: 201649 - protein, 95 aa, Oryza sativa
  Clone ID: PAT_MRT4530_97002C.1.pep
TWGQQSFPTADVYNRRPLTLTSSASPENLVLPRVGTEPLQHPIRHPAQAAPAPTHHLHPGTPPPPSSPPPPLHAAAASSSGTVKARLTLDPLPFP

SEQ ID NO: 201650 - protein, 304 aa, Oryza sativa
  Clone ID: PAT_MRT4530_97003C.1.pep
MATHFTLNTGARIPSVGLGTYKAGTGVVADVVSAAVKAGYRHIDCAPLYKNEQEIGGALKKLFDDGVVKREDLFITSKIWCSDLAPEDVPLAMDSTLKDLQLDYVDLYLIHWPFQIKKGTELSPENFVKPDIPSTWRAMEQLYDSGKARAIGVSNFSSKKLGDLLCVARVPPAVDQVECHPGWQQAKLRAFCHTSGVHLSAYAPLGRMKGIAVDSVLPSVAEMLGRTPAQVALRWGLQQGQSVLPKSVSEARLKENMDLFGWSIPEELCAKLSEIEQVKQIRGDGFAHPESVYKTYEELFDGEI

SEQ ID NO: 201651 - protein, 97 aa, Oryza sativa
  Clone ID: PAT_MRT4530_97004C.1.pep
PLIKALFGCHYFHCGAANKHSVLFLPAVAVQRRYKAAEQAQNVPTLHLKVLPVYSPLRGIIDTTICCISSGSHKLSSQICDGIQILTRLYSVILPLS

SEQ ID NO: 201652 - protein, 97 aa, Oryza sativa
  Clone ID: PAT_MRT4530_97005C.1.pep
PPLVHSKIFFTPICKNSPPLAREPRNQPNPARDEGVISGQASSQTPLPPAAGLLGRHWIKSNGDKLLARFESGGGREDRRGGWEKKRGGDASVLPAG

SEQ ID NO: 201653 - protein, 75 aa, Oryza sativa
  Clone ID: PAT_MRT4530_97006C.1.pep
TLVNKVRSRFGVNILWGRERTGYYKYLTAQVHNDITGHGHTYRHTRGQGMTHMNARDRGHIRSTKHYLACMHAYA

SEQ ID NO: 201654 - protein, 80 aa, Oryza sativa
  Clone ID: PAT_MRT4530_97007C.1.pep
IEKHGLVMIFIYEEAGLAGLHKSSHGLLLCLIQYITSYGTARTGPGLDSASYKRCSFCTSFATCHTNEQHQTDARRRRLE

SEQ ID NO: 201655 - protein, 101 aa, Oryza sativa
  Clone ID: PAT_MRT4530_97008C.1.pep
VPTPHRPKPPPNPLLLIPISNPLTPSKEASSSVRFATSTSPFLHLSSSASSIPSHPPAPSVRFATTTAKGTRRRQQTSSGHGDGGSSKAEAGVGVDRWRAA

SEQ ID NO: 201656 - protein, 55 aa, Oryza sativa
  Clone ID: PAT_MRT4530_97009C.1.pep
MAAMVANANHQSSTLEGGYVLLLRKWICRVNGLDNIHHYRCKPSPPFVVTRISPI

SEQ ID NO: 201657 - protein, 53 aa, Oryza sativa
  Clone ID: PAT_MRT4530_9700C.1.pep
IEMRERHYWVTHRTGRSVDMLLHGKKPLVEVRKRDNKFQVVIERWATYDGDGL

SEQ ID NO: 201658 - protein, 100 aa, Oryza sativa
  Clone ID: PAT_MRT4530_97010C.1.pep
MALPEGGRARGLRRLGGGGDWVMVNLFPMALRGQARGWPMNLLPHRFTPGRTLAVLSSGVGAQVHGSLTSFVKWSQASLKGSKPRVGSPLRAKGLKARDV

SEQ ID NO: 201659 - protein, 42 aa, Oryza sativa
  Clone ID: PAT_MRT4530_97011C.1.pep
VSAVNCSAGSMYAPFSSYRSCKVAGVPGRRGGVLDRVPAPVA

SEQ ID NO: 201660 - protein, 446 aa, Oryza sativa
  Clone ID: PAT_MRT4530_97012C.1.pep
MVTGRSEQMVCVTGAGGFIGSWLVKELLHRGYFVRGAMREPADIKNAHLHVLDGAREGLSLYRADVLDRNSLRAAFALCDGVFHVASPVSNDPELLPAAIEGTKNVINAAADMGVKRVNWYCYAKMLAERTAMEEASKRGVNLLVVVPAVTVGEMLQPTLNASVHRVATYMRGTKSAYPNAVAAYVDVRDVARAHALVYEHPDARGRYLCIGSVLHRSEFVRLLRELFPQYPITSSEDNGRRASADHPRVRLRRHHRLDRRPPLPPRSPSGSTSPPSGEDDNRRASADRPRARLPATAALTSALPRLRAPLPILPHGLAARTTAVEPPSTAPASPPDSPIWMLGHKPSSSPDIYLIKRTLKLPVTRPPRSKQPPPTAPAPVPLLPLHPASSKMKTKAKAKKPKRKGRHVHCGSMETPQWREGPMGRDIEGRRVAEADIWALFVIDL

SEQ ID NO: 201661 - protein, 161 aa, Oryza sativa
  unsure (1)..(161): unsure at all Xaa locations
  Clone ID: PAT_MRT4530_97013C.1.pep
MDSAVPSSAAEPSSLPXPTPAPSPSPAAPAPPTSSPTPXSILLDDLLLECLAGVPYATLPRLPTTSXPRSLPPSRPRRAPPLIPHPLRQAVGEPPVAAPGVVMRTRSQRPPTMPFFYXSYAPSPPPPPPLRSTTGDWMGIDPLSPFSCKVNKIAMGTYVRA

SEQ ID NO: 201662 - protein, 112 aa, Oryza sativa
  Clone ID: PAT_MRT4530_97014C.1.pep
MGRYPAAWNSSEEFWPEQFLASREAVDFQGNNYQLILFITDRRIFPDINFAVPVLETALVGLLHPTNELLGGGGGLMWLQRSCSRARRPRSTAHRRHRSGTHPAAIAAAAAT

SEQ ID NO: 201663 - protein, 495 aa, Oryza sativa
  Clone ID: PAT_MRT4530_97015C.1.pep
MEGIHAGTVTMACSWLVLTAAMAVLASWLIRLVSLKWNSSHPCKADEGSRLPPGSRGLPLLGESLEFFTSSTSLELPVFFKRRLNRYGPVFRTNMVGQDLIVCLDPEVNSFVFQQEERLFQCWYPDSFMRIIGADNIITTLGSSHKYIRNLILRLFGPENLRRAMLQDVHRTAQASLLSWLDRPSIELKDAVSSMIFSVTAKKLISYDSLASDGKMWKQFDAFIRGLLAFPIGIPGTAFYKCMQGRKNIMKMLKELIDERKEASGRRGSIDFIDVLLEELNEEKPLISENVALDLIFLLLFASFETTASAITAVVRFLTDNPEALQELAEEHDNIQKRRVDLNSEITWEEYKSMKFTSHVIHEALRLANIAPVMFRKATEDVHIKGFFIPKGSKIMICPSTVHLNPMIYKDPNIFNPWRWKDTAEPTGGASKDFMAFGGGLRLCVGADFAKLQTAIFLHCLVTKYRWKAIKGGTMVLGPGLRFPEGFHIQLFPKP

SEQ ID NO: 201664 - protein, 53 aa, Oryza sativa
  Clone ID: PAT_MRT4530_97016C.1.pep
LFFTVNGMQFLQVQLTDHLKMIMPPCLGPCNLRFGMSILFFFFFFFHAIMLLV

SEQ ID NO: 201665 - protein, 134 aa, Oryza sativa
  unsure (1)..(134): unsure at all Xaa locations
  Clone ID: PAT_MRT4530_97017C.1.pep
IWHDRWLEGQSPKELTPSLFQLVTRKNRTVAXGQELQDNCWLRLMKRMNTTTQVREFILLWHLIQQVHLEEQTDTIVTWRWIPIGIYSANSAYRIQFLGSIQEERFNYIWKAKMENQVKIFRLANGPKENPNLR

SEQ ID NO: 201666 - protein, 72 aa, Oryza sativa
  Clone ID: PAT_MRT4530_97018C.1.pep
LVPTTDFYVPKGDVRVASDLDRVAAGTVGATRQPHPRARAADGRAPLGGHMATSARSAGGGARAPMVAGGGH

SEQ ID NO: 201667 - protein, 71 aa, Oryza sativa
  Clone ID: PAT_MRT4530_97019C.1.pep
MFVKIGTYMYRAMSYSLVQMQITSGGELIISSREQRKKQKLIMKTINSPDENCITRDTHCRLPIISPCIQI

SEQ ID NO: 201668 - protein, 207 aa, Oryza sativa
  Clone ID: PAT_MRT4530_9701C.1.pep
MGAAGAVVEISSDDEAIPVAAKRPNVPPVSSSHPLPEDCNGVEEGLGDPAALVEFVASMLDDKRSARDVAAADDGDDDDCVMLDGDPDKAVLVVNEQRPGQGGPEEELQIVSEKGELHFRPYIVFVVIACRDFPHPRHLCVSMPFTSSHADHCAMCHCYVCDSPAPCAFWGKGTEPTDHCHATDKNAKWTKMRQSLKRKNLPSSNRR

SEQ ID NO: 201669 - protein, 433 aa, Oryza sativa
  Clone ID: PAT_MRT4530_97020C.1.pep
MSEEEVNAKIMVTVENLTEKQRQQMEKSMPRSWSQSLQARVHPAFDFMGDLDVTRISSRALPNDVVTQRVKDVLISSTSAVDEPPVPLCDKPAADKAAAINVLPLMDVIGSLADHHTSPSLKEKATQEVAAVAVGPAAAWGNGFKRKGWRTRVAAPRTPTIPTCSKMEAAEGGRGQATIPQHLDETSVTTVLHELVGATEVIPSKHSAKVCEEMANGIHTGACHVLACMKIALPDVDLKEVLAKGAADDGREDIMSSIADLGETVPPFYEGCLDAEDVQHPDVATTALALSSEAPASDVVGDIVGFEDMNVVSDPSSLGAVSLLQENLDLKSMIAGRDCQVLYWKKKFEVAELERSVVVVKKDQAIEALRGREVWLHSYLKSCCSAMAEVCHQLKIDHAEPEETTAGYLSWIRGVCRQLEDIGQRIDNCLKEE

SEQ ID NO: 201670 - protein, 71 aa, Oryza sativa
  unsure (1)..(71): unsure at all Xaa locations
  Clone ID: PAT_MRT4530_97021C.1.pep
REAEKGPTSSPVGGLXSRSSTHGWGNRHQHHRLNLTPTRXPGGNXTGQLQXWVXSGRKQXRQLEDRKGQEG

SEQ ID NO: 201671 - protein, 107 aa, Oryza sativa
  Clone ID: PAT_MRT4530_97022C.1.pep
GKKDLGSKNIFAHKNRTRFGRNTINQQQFGCKGPRCITRNSLTPPQTGHVQIRPGAKFYGSTTNIPNNGTGGILQGGAKQNKTLSLGQGRNQTWRALKRGEGPFIIP

SEQ ID NO: 201672 - protein, 186 aa, Oryza sativa
  Clone ID: PAT_MRT4530_97023C.1.pep
MWCAAIVCFAFSLLLIAAGAVILVVFLAVRPRAPSFDAAGATLNAVYVGSTSPAPYVNGDMTVAANVSNPNQKMDVVFRSAAVELFFGGRRMAAQALPAPFVQRRGQSQIISVHMVSSQVALPPELAVAMVNQVRSNRVVYTIRGTFKVQAKLWFWHYTYSMSALCDLELTAPPCGVLVARRCITR

SEQ ID NO: 201673 - protein, 145 aa, Oryza sativa
  unsure (1)..(145): unsure at all Xaa locations
  Clone ID: PAT_MRT4530_97024C.1.pep
MDHVDVDGDVLVSGTARAQVSDGEVSPTKRVKLSSTSGGDDDDAVIGGGGEDXLSSLPDDVLLLILLRLSTAAAAARTSLISRRWRGLWDKHALVTFADHDGPAAARGRAAAGRHPARLPIGPAARRRHADERCARRHVHLPPSR

SEQ ID NO: 201674 - protein, 196 aa, Oryza sativa
  unsure (1)..(196): unsure at all Xaa locations
  Clone ID: PAT_MRT4530_97025C.1.pep
MDHVDVDGDVLVSGTARAQVSDGEVSPTKRVKLSSTSGGDDDDAVIGGGGEDXLSSLPDDVLLLILLRLSTAAAAARTSLISRRWRGLWDKHALVTFADHDGPAAARGRAAAVVGCCCCGQHLLAAAASPDNVAAAQDAALLPPPSFAATAAAAQAEVACSSDRQNTHCLPVAARRHQNPLALSLPWMRGFEIYDS

SEQ ID NO: 201675 - protein, 133 aa, Oryza sativa
  Clone ID: PAT_MRT4530_97026C.1.pep
MWLDETKLPLLTQLLLLRHHSDRDIPTELLATLACSVRDQLRSALLYLCRLGFHDGRALCLQDPILDCSTARRHPQPTPTCAVPKNGPVLACSDSLGARDGGSEPALTLKDKQIKQRKTTEQQQPQALDGGAN

SEQ ID NO: 201676 - protein, 100 aa, Oryza sativa
  Clone ID: PAT_MRT4530_97027C.1.pep
RCRPMRSPTLSFCFTLLIFFFFFFFFFLLFFLPTKKGEVRKPPTRRRRPTQQKKGRPYCEKNPPPTLFREKPTPPLKETTGKGTPPQKKKKNPPEKPPRG

SEQ ID NO: 201677 - protein, 58 aa, Oryza sativa
  Clone ID: PAT_MRT4530_97028C.1.pep
SKRGINPCGNLTGSIHEKVDELPEKMFMILDLENLLLAVIIIPTPSTVVFADKSSCRI

SEQ ID NO: 201678 - protein, 94 aa, Oryza sativa
  unsure (1)..(94): unsure at all Xaa locations
  Clone ID: PAT_MRT4530_97029C.1.pep
TRXPXCXATAAATPDRRRTSXSPARAGECRDKGGVVEYRVKXREISPRLVVSXAPXAAAKTSRGXVAAIXQSSGXXGILGGXTGGNARPXWYAT

SEQ ID NO: 201679 - protein, 105 aa, Oryza sativa
  Clone ID: PAT_MRT4530_9702C.1.pep
MPPLVAPVEHKDEPCRQRHAAAAAAAMTAAAVAKPRQRSASFHGRGAAEQRHSLLKQRPRTQPDLLAEHVAAARDGARRVARGRPGRCRHGALRPGGAPAAAAVR

SEQ ID NO: 201680 - protein, 732 aa, Oryza sativa
  Clone ID: PAT_MRT4530_97030C.1.pep
MAGEPEMVAKRCPRADSDFLGQKSVGRDVEISSDAILLEALNQYWDVRKLTVQVTVSEGGMPCTQIVSCVEEASTVVPLSVVLPTQESQAKNVPTKKLSKAKDKGSDHAIPNPDPWGEFDEVEYVGMSDEKENYNDLVSDDEANDPKYTPEDDGDEENDEPVDDLEVNDNRGCEPLIHIADVENPRIEVGVTFEDGLCFKRCMRQYAVLKEVELAVPYYEATRYRAYCKAKRCRWRIHASRLPDGRTWQIKKMPYKHRCASTSKLENNCMASNSWVKDRVINKLREDPTIGVAPLKKTLEEKYCIKLSYYVDWDGRQMALDEILGGWEQSFEAVYSFKAEIEKRSPSSIVEIEYDVVNDKHRFSTMFIAMKPCIHGFLNGCRPYLGIDSTVLTGKWRVQLASAIGIDGHNWMFPMAYAVFGSETKENWEWFMKRFHGEVFERNMWPASRYRLSLRLEGNKLGNVMKQLHDKSRNLNYNRHKSQPFVGEVSGVNRDLTTWRHTVDLTKQECSCMEWQLTGLPCRHAISFIGSLREVQLENYVSPYYSVEMFKTAYAKTVPPMPDKSLWEKVDTRFKMWPPILKRSAGRPRTRRFIGVEEGGSGKKRRRYNRCHGFGHLQKTCNEPVYDPDAPPPAPPKPKRVRKKKNNPEHVPNDDNTTIPAAVKLGDLGVAASDQAAVGAVEAVAGAVQALASDQPSGSPRPVTRSKSALLHSSLVHSSPLKANKKKIAKKL

SEQ ID NO: 201681 - protein, 425 aa, Oryza sativa
  Clone ID: PAT_MRT4530_97031C.1.pep
MLNLLLLLVLATTSWSPAASGQDTSSATVSPLNTHCNATAGNHTAVGSAYLSNLRALGGALSRRALATGFASGSYGAAPDEVHGLVLCRGDFTGGNCTDGLASAFRDAAAQFCPGAADATVYYDQYMIRYTNDGRLLSDPGDNEPLWSGKNMNEVAGADAAARFMAKATELMNRTADLAAFGSSSSPSRYATGETWFDEQGVSVVYGLVQCTPDLTGEQCRSCLAGIIAQMPKLFGDASSRPVGGRILGVRCNLRYEKDVFFKETSTTIKLNMPKKLLLQRDLVILEREIVSESDERFSLFKFSKIKDATDNFSRENKLGEGGFGHVYKGRLTTNQDIAVKRLAPNSAQGFKEFKNEIKLIACLQHRNLVRLLGCCIKSKERILVYEYMPNGSLDGLIFDFGIARICLSSVTESNTTTAIGTFYF

SEQ ID NO: 201682 - protein, 84 aa, Oryza sativa
  unsure (1)..(84): unsure at all Xaa locations
  Clone ID: PAT_MRT4530_97032C.1.pep
REVTFPSGHVAARLAFPRSLEGRSGNAEVARGXRGAMSRSLXPQHALPRGPRSARXAAXRSAAQRFQCAASQSFHAAFNXAVGG

SEQ ID NO: 201683 - protein, 842 aa, Oryza sativa
  Clone ID: PAT_MRT4530_97033C.1.pep
MDSTFRKLKLVLALVGIITWIIGTCNAKFTPADNYLVNCGSTVDATVGQRVFVADNSQSIVLTTPQSQSIAARTTLNSVSGFDNAELFQTARIFTAPSSYSFKMRSSGRHFVRLYFFPFLYQSYDLASSKFKVSTEDVVLIDNFPQPSNSISVVMEYSLNITRDRLILTFVPEGNSTSFVNAIEVVSVPDDLITDSAQLLGVGQYLGLAAQPLQTFHRINVGGPKVTAENDTLARTWFADQSFFRNPTVAQAVTYQERLNYKDGSATQDDAPDSVYNTARRLVGQRNASSTPNMTWEFNVDGRSSYLIRFHFCDIVSKAAFQLYFDVYVYNFSAAKDLDLSAREFGTLAAPFYMDIVLPSSDPSGNLTVSIGPSSLPNATPDGILNGLEIMKMNFSSGSVYVVKPPSAAKQQLPIILGSVLGGIGAAIIVVVLCVVFRRKKKMKKPQTPLTSRPSSSWTPLSLNALSFLSTGTRTTSRTTYTSGTNSDTSYRIPFVVLQEATNHFDEQMVIGVGGFGKVYKAVLQDSTKVAVKRGNQKSHQGIREFRTEIELLSGLRHRHLVSLIGYCDERNEMILVYEYMEKGTLKGHLYGGDQPPLSWKKRLEICIGAARGLHYLHTGFAKSIIHRDVKSANILLDENLMAKVSDFGLSKTGPEFDQTHVSTAVKGSFGYLDPEYYRRQKLTDKSDVYSFGVVLLEVICARPVIDPTLPRDMINLAEWAIKWQKRGELDQIIDKRIAGTIRPESLRKYGETVEKCLAEYGVERPTMGDVLWNLEFVLQLQEAGPDMSNIDSMNQISELPSNAQRISSLEISTADESRTAMDYSQMSTSNAFSQLINTEGR

SEQ ID NO: 201684 - protein, 83 aa, Oryza sativa
  Clone ID: PAT_MRT4530_97034C.1.pep
FAPSLLLHQLHSSPELYRSSQSLHVHVTIERSKQEVRMRTPHPRLRSMFFFSFKQTGIESSMKIPIIGERDCRINPIDSSKQT

SEQ ID NO: 201685 - protein, 92 aa, Oryza sativa
  Clone ID: PAT_MRT4530_97035C.1.pep
LGFSFFFIFFFVVKVLEVGAGAAEKPRTEELKRLWAYIKKHTLQEPGDKKEIVSDEKLKVLVEGQERPEKTEGDKMMNTDYGKRPAPKEETS

SEQ ID NO: 201686 - protein, 618 aa, Oryza sativa
  Clone ID: PAT_MRT4530_97036C.1.pep
MERYRFVRSENEGKPVGLACHEAYSCSIALYNFALLTWIPLPLITPRFVTEQEVKYSIIAFVEHKIKDLEKGWSSNFDYLYEAEKECKCLVHALPGGLQICPALDSITSFKTNGGHNLFSLLEIRMVHGWLANPEDNIYETVRSFSCDDLESHISDALNDNSEAAQRNRDASKRTTIHFYLMNTAIHSFNTLSSGLHRYQSLCQGLLKDEYAILYRGSDTFNLIREADEEPIYLNCKYIPLKNQPHIAKAKLWYYEKLNSRNEYAPRNVTKDEASIQKPTGSEGKLSNQEAILQTKQASDETLHYRVVQFKHENLLTSIICHKGYSLWTALYNHLVLNRALAVKPSEVKLQFLPEREVKDAIIAHLKLVLGEIEKSEKSKHEKLYNCEFIWKCFIRSTADTHQIYPVLDSFTSFKDSFGRSLICVLGIELVHGWVANPEDNIYETVKSFSSDDLESHISSLDARSDNSEAAQRDRDASKNLLAARNQFTSYGYQSLCQGLGKDEYAILYRGDDIFNLIREKDGSILILETDTDILDAYPKARWRILEEVDEEPIYLNCNYIPLKNQPHIAKVKRWYLEMKSKKKINEASSNEGAGQKQCYRDTRVSVSTRVRRGKTQL

SEQ ID NO: 201687 - protein, 165 aa, Oryza sativa
  Clone ID: PAT_MRT4530_97037C.1.pep
RYGRGGARNTARGDGGGNGKKLCVTAAYRPVRELLKREREKEMERRANEAKEKAATAENSESPESKKEKENSENPESKEKEKERKENSENKEEKTENKQDNSKAEGGTEGTIDLRPLTMEDLRQAKNQVAASFATEGAVMNELKQWNDLYGEGGSRKKQQLTYFL

SEQ ID NO: 201688 - protein, 97 aa, Oryza sativa
  unsure (1)..(97): unsure at all Xaa locations
  Clone ID: PAT_MRT4530_97038C.1.pep
CLYSKPQLIVCIHSCLQFRLLYLVLACFFDLLVGIRLICTGKISNPRRGVSIAKAQHNVLYGCSRIVNISLKLXLSTTHRKIGPKNYLKCLVELRVH

SEQ ID NO: 201689 - protein, 67 aa, Oryza sativa
  Clone ID: PAT_MRT4530_97039C.1.pep
RGGIATTRKRLKSHNPPVWDFKDQLGSLGLKHVLFLDHSRFVGSLRSENPIVIGPPPRHRKHQVHSN

SEQ ID NO: 201690 - protein, 426 aa, Oryza sativa
  Clone ID: PAT_MRT4530_9703C.1.pep
MAAPTSSQPVARVLPRGGGGGFRAFPESAPASLRFSVGRRRAARLEVKASANVFGNYFQVATYGESHGGGVGCVISGCPPRIPLTEADMQVELDRRRPGQSRITTPRKETDTCKILSGTHEGMTTGTPIHVFVPNTDQRGGDYSEMAKAYRPSHADATYDFKYGVRAVQGGGRSSARETIGRVAAGALAKKILKLKSGVEILAFVSKVHQVVLPEDAVDYDTVTMEQIESNIVRCPDPEYAQKMIDAIDKVRVRGDSIGGVVTCIARNVPRGIGSPVFDKLEAELAKAMLSLPASKGFEIGSGFAGTDYTGSEHNDEFYMDEAGNGGISNGEIIYFKVAFKPTATIGKKQHTVSREHEDVELLARGRHDPCVVPRAVPMVESMAALVLMDQLMAHIAQCEMFPLNLALQEPVGSASSVPAFAPDLS

SEQ ID NO: 201691 - protein, 144 aa, Oryza sativa
  unsure (1)..(144): unsure at all Xaa locations
  Clone ID: PAT_MRT4530_97040C.1.pep
YLLLYSIVCWRNYSIANVMGSVPFNVSFRITLVGQILVNWHNLCALIVQIQIXEKDIFKWNFHQNGQLIVPFMYLALINNVYVERNKIIWKLKIPLKIKIFMWYLFKDVVLIKDNLVRRNWHGSMRCSFFMKNETIHHLFVDCH

SEQ ID NO: 201692 - protein, 81 aa, Oryza sativa
  Clone ID: PAT_MRT4530_97041C.1.pep
SNPGAAAGATAGAVSLDALRQPAQVQALVALVQANSQILPPMLEELGKHNPEILRLIEENQDEFLRLVNESPDSGAIGGNI

SEQ ID NO: 201693 - protein, 151 aa, Oryza sativa
  Clone ID: PAT_MRT4530_97042C.1.pep
MVKKNWDDDPHCDICPAIETAGHIIPRCKAATTLWEKLGLRDLANSSQSAAIFLETIWDSYNSIQGIQEICRLPALWEGDSEGGENDVADGRSLSGDGRQRNLQADPLPPSAEGDFVLGRGARLQMGFEGGHGFFAGGIHVPLGLGRVASF

SEQ ID NO: 201694 - protein, 384 aa, Oryza sativa
  Clone ID: PAT_MRT4530_97043C.1.pep
MASSSSSSSDDLAASTIDLALEEKIAANALGGGNGGAEEEAAAWEIDLSKLSIRSVVAQGYHGTLFRADYGGHDVAVKVLDWREDGYSTPEQIAHLRASLADLAAVWHSFEHPNVARFFGASMGTTDLNIPAAASAAGGGEQRNTGEKPPADRACCVVVEFLGGGTLKKYLIEHYRSKLPYGEVVRLALSMARGLSFLHANNIVHRDVKTENMLFLGGGGGGDLKIADFGVARVEARDPREMTGATGTVGYMAPEVLVGKPYNRKCDVYSFGICLWETYCCEMPFTFGLSVAEASAAVAQRGMRPPIPPCCPPAMARVMARCWDADPAARPEMEEVVRMLEALDTSNGGGMVAPGKMKKKKKTTKKKKNEEEKMPGCFCFFGRS

SEQ ID NO: 201695 - protein, 482 aa, Oryza sativa
  Clone ID: PAT_MRT4530_97044C.1.pep
MANAANQHTCDGPQPSAPTHFLIVAYGIQSHINPAQNLAHRLASIDASSVMCTLSIHASAHRRMFSSLIASPDEETTDGIISYVPFSDGFDDISKLSILSGDERARSRCTSFESLSAIVSQLAARGRPVTCIVCTMAMPPVLDVARKNGIPLVVFWNQPATVLAAYYHYYHGYRELFASHASDPSYEVVLPGMQPLCIRSLPSFLVDVTNDKLSSFVVEGFQELFEFMDREKPKVLVNTLNVLEAATLTAVQPYFQEVFTIGHLVAGSAKERIHMFQRDKKNYMEWLDTHSERSVVYISFGSILTYSKRQVDEILHGMQECEWPFLWVVRKDGREEDLSYLVDNIDDHHNGMVIEWCDQLDVLSHPSVGCFVTQCGWNSTLEALELGVPMVAVPNWSDQPTIAYLVEKEWMVGTRVYRNDEGVIVGTELAKSVKIVMGDNEVATKIRERVNSFKHKIHEEAIRGETGQRSLQIFAKTIIESD

SEQ ID NO: 201696 - protein, 864 aa, Oryza sativa
  Clone ID: PAT_MRT4530_97045C.1.pep
SLTKTNNFKNNNCFCSGHVVLDTRLVFVSYEFELDDSEFTQQSGHSSDVNVIKVINNTASQNVEFLDHAGFYKVDPSGELDDTFKLQDSDDLPLNEFFKRPIQIAGFGWGVGTPFALTFDPWSSYFNNPRVVNRISNYKLLRAKLHVKFILNGNAFYYGRIMASYHPAKSLDSFGNSPLVSEDAVIESQRPHVFLDPTNSQGGDMILPFYWRHNYMDIVNADWGSMGQIDMRSLPILRSVNGSNETISIIAYAWCEDIEFSGITQFEPATIVPQSGSEIDEANAKGFISKPATAIASFAGKLENVPVIGKYATATATIAGATADVARNFGYCRPPVTENAAPRRPTVVSNMALTNTPDNVEKLTTDDKQELSIDPSIMNLPGVDCFNIKEIAKKESYLTTFQWSDGGFGFLWNSRVSPMLWRAVAGPPAQAWFPACAYAVMPFENWSGSMKFRFQVVCSSFHKGRLRIVFDPTGAQTNPELNVAYSHVIDISDTQDFTIEVPHMQTRTLLTRAEPPFTLVTTQYGTTLLPPLSTGNGTIAVYGETILATPNSTVDAPVDINVFISMGDDFEVYNPGNGFQYYGFVPQSGTELHPVSNTTEELNAPLKDESLMIGGKHVVNDKIPLVYMGESIKSFRTLLKRYNMHRRDMFSNTVGVKAYHGIRPQFPPLRGQYGGAEDLTAASDPYMYVNQLLLHWVRHAFQGHRGSIRYKLLVGQYDASYNHMTGVVMRRRFDQDNSWSDTRLDVALNTSQSVMARTWIAEGPLDYPDGPNGAVYFNSRVNPTVEFEVPWENDARCYFARNTNYNSTNGTARSQPGYKFALQGNSSDYDHLETWVAAGEDFQCYFFIGLPRCFQYLSPPAAAP

SEQ ID NO: 201697 - protein, 207 aa, Oryza sativa
  unsure (1)..(207): unsure at all Xaa locations
  Clone ID: PAT_MRT4530_97046C.1.pep
VSNICGALTVSLISQFLFIXDAVLHVQLSXGVEDRLVWRWMSDQRCSAHSAYQAFFYGLHSFACTNLLXHTKDPAKCRFFLXFAFQQCCWTADLLQKRGIDSHSACPFCTQDLETVNHILLDCVFARQVWLWFQDWWPSSRACLPEHLCAGFDPLVLLVSXQLWKERNSRVFDSVLSSVTVVLXSIRSEGHLWSLAGVAAFGDLLRV

SEQ ID NO: 201698 - protein, 60 aa, Oryza sativa
  Clone ID: PAT_MRT4530_97047C.1.pep
MTMLGSGRVMTFLSPSLVTKHVRHPASIFAGGQDGSHTYFNSNAPKCHINATWNEDQVTS

SEQ ID NO: 201699 - protein, 63 aa, Oryza sativa
  Clone ID: PAT_MRT4530_97048C.1.pep
HKSEFTMCLEKWKVNPKLCVLNESLIYERYRHGIRFSGLFGPSVICLVLMAILLSLKNIIIVN

SEQ ID NO: 201700 - protein, 284 aa, Oryza sativa
  Clone ID: PAT_MRT4530_97049C.1.pep
ARTRRVHLSSPVRHRATMRIDAAILAAVVAFLLPLRLLSLLARLSLTGSAGDLRRPCAAFALSAALLAAIFALPRDHARECAAASVVVPDDGEGAFRGEVRSDIEQLKLQLARLESMWDNNSKPLDGKSGPLEEDGEVVRAMGLDIQSLINEHENIKIQILMDESRKMNSNIHNIWSMAKDTDNRVSALHSDVNMVLMDESRQMNSNVRELWSLAKDTERRVEGLHSDMRKVQILIDESRKMESSIYKMWSFAKQTEKRVEDLYSDVKKKCCIKGIKVPSWMDW

SEQ ID NO: 201701 - protein, 143 aa, Oryza sativa
  Clone ID: PAT_MRT4530_9704C.1.pep
KGFEIGSGFAGRGYTGSEHNDEFYMDEAGNVRTRTNRSGGVQGGISNGEIIYFKVAFKPTATIGKKQHTVSREHEDVELLARGRHDPCVVPRAVPMVESMAALVLMDQLMAHIAQCEMFPLNLALQEPVGSASSVPAFAPDLS

SEQ ID NO: 201702 - protein, 54 aa, Oryza sativa
  Clone ID: PAT_MRT4530_97050C.1.pep
VFNFCFPLPTGKFLGIILPGFGSLPSEEMMVIGSHSRKCFRFYRSILFIAEYIF

SEQ ID NO: 201703 - protein, 204 aa, Oryza sativa
  Clone ID: PAT_MRT4530_97051C.1.pep
IFTRHGLEEDNNKVLGHVFHGIPSVSAVEVLNLLVDICTKQSVWSSQVHTLTARPAVMFMNLKHLTYEILIFTKDPNSHSGVLQLAQYLAFAPQLETLELHMLYHSTHCRCWHEGAGVSYGHMPHHHLKMVYMSGFRCYRAQVELLFAILEMGDELEHVTIDPMTRVPYSPDLMNLGIPEDEICQWANRTSQRFGKAISVVKPP

SEQ ID NO: 201704 - protein, 150 aa, Oryza sativa
  unsure (1)..(150): unsure at all Xaa locations
  Clone ID: PAT_MRT4530_97052C.1.pep
MNQKDMIDRGRNRMAWKLPAQNTLKINTDGAFXCNTNQGGWGYVIRDXWTGAVVQAGAGGAEHFLDAFHAQVLACAAALNAASERGMMRVELETDSLMLRYCPRECNKVAHASXLAAMGCNVISKTRPTXANCPPGLXRLVANDLAGLLR

SEQ ID NO: 201705 - protein, 496 aa, Oryza sativa
  Clone ID: PAT_MRT4530_97053C.1.pep
MAIGGAAPPHPPRGGGGGSPEDSSTARRPDFEQPLLQAHAAVPARGKQEPVERDHEAQCSPEADGDGATFVRTCFNGLNALSGEYKKHSIFGRRSCSSGVGLLSIPYALSEGGWLSLVLLLAVAMVCCYTGLLLRRCMAASPAVRGYPDIGALAFGAKGRLAVSAFLYAELYLVAIGFLILEGDNLDKLFPGTSLAVGGLVVSGKQLFVVVVAVVILPTTWLRSLAVLAYVSASGVLASVVVVFCVLWAAVFDGVGFHGKGRMLNVSGLPTALGLYTFCYCGHAIFPTLCNSMQEKDKFSRVLVICFVACTVNYGSMAILGYLMYGDDVKSQVTLNLPEGKISSKLAIYTTLINPFSKYALMVTPVATAIEEKLLAGNKRSVNVLIRTLIVVSTVVIALTVPFFGHLMALVGSLLSVMASMLLPCICYLKMFGLRRCRRGEHLLIAEIIVLGSLVPQTQIVQSVQMPSDLGGIPALHLNLFCFHKRYIITEAENLQ

SEQ ID NO: 201706 - protein, 108 aa, Oryza sativa
  Clone ID: PAT_MRT4530_97054C.1.pep
GIGAPKGPKQSRAARTNSSANIFPESRQLSDNGFAEIFWYVNWHKSWSWFNIPPRTMPSVCCPPRVCLFCSGSFRSACAPCYSSSVKCMLAIRSPYCSARAPMPLDQL

SEQ ID NO: 201707 - protein, 327 aa, Oryza sativa
  Clone ID: PAT_MRT4530_97055C.1.pep
MAPAAEPYVVEDCRGAVQLMSDGTVRRSAEPAFHVDLPDDADAAVEWKDVTYDAEHDLNARLYRPRHLGAANDARVPVVAYFHGGGFCIGSGRWPNFHAWCLRLAAELPAVVLSFDYRLAPEHRLPAAQEDGATAMAWVRDSAARDPWLADAADFSRVFVAGDSAGGNITHHMAVRFGKAGLGPQVRLRGHVLLMPAMAGETRTRAELECRPGAFLTAEMSDRYARLILPGGATRDYPVLNPAGPEAPGLEAVAMAPSLVVAAEHDILRDRNEHYARRMREEWGKEVAFVEFAGEQHGFFEVDPWSERADELVRLIRSFVVEHMDSE

SEQ ID NO: 201708 - protein, 435 aa, Oryza sativa
  unsure (1)..(435): unsure at all Xaa locations
  Clone ID: PAT_MRT4530_97056C.1.pep
GHPTDPSGTYHCRPIPAGYSKVEVELVEAAYEDLELDYPGGDXAPTPIPPQAPHLAPSKSRAPQAPPPASTRATKKAKVDAAKNKDPGYDCTQEELDAYVASKDRRQLKPRSPEKKIPIDPSVRNFFRGMSAPAKEAIKLSDYERTLKKASSGKSKPVPQLGEQPNQEIEPLVTGEEFGIQDFINDTGLTTYQLLRGAPIEKAGVKYMYELGKPLVKPEQLQSLPTQMYKFHQLYMEMSATGREMIGARIRDTDFLQGEDILWINFKGIYELYQLDALDVSIMSCWTLMEIQRSRRRGVFDTGFIDPWKVNVEMITKYPQATEDNLVHLLKAQHYKTFILLPYNTELVFTVFLPNFILAYVVNVYDSMDKKESTFDMVFELIDRAWYQFRHLVRGKWRERLRQKFKFHVICMRDNLTHKKFIAAVQEQLMGFINE

SEQ ID NO: 201709 - protein, 246 aa, Oryza sativa
  Clone ID: PAT_MRT4530_97057C.1.pep
MPPLRCRHCRKVIPERRLNVNEREGANKMRTNMADCDEEQILYDTIAEGSGQYWNEEEGNEDPNQYLNEEGNVERDAEGNEEGNVERDAEGNEEEEASGSQPTTRQKRARGQRVDGSLVFSDQIREAASRLTDVVEASSQGTFRPDREKDELSLALQTPEHLGRTRGKGVIPWKIGFKEDIHMYRSRIRSKRDIEAKIADLEYRVSSYELSMQEEVARKVDERMAAHRSQDPQPYIPPAMVIYICT

SEQ ID NO: 201710 - protein, 977 aa, Oryza sativa
  Clone ID: PAT_MRT4530_97058C.1.pep
MADRDEEQILYDTIAKGNSQYWNEEEGNEDPNQYLNEEGNVERDAERNEEGNVERDAEGNEEEEASGNIHPSRGYREHSEKVDSKENGRQFQNFKGDLYQKYILKGQTPNFNTFPKLRDHWDEFVAYKTSQQGEAMMERNKENAAKKKYHHHLGSGGYSVTMPKWEEMEASLLERVDGSLVFSDQIREGASRLTDAVEASSQGTFRPDREKDELSLALQTPEHPGRTRGKGVIPWKIGFKEDIHTYRSQMRSKRDIEAKIADLEYRVSSYELSMQEEVARKVDERMAAHRSQDPQPYIPPAMVSPSGNRSSCASTGQVASGMTIPTEPSGTSTAGRFQQDTPRSKLSLWKPRMRTSSWTTLEETHHLHLRLLHRLLLRLLHRLLLKLLVWYLPKSRAPQAPPPAPTRATKKAKVDATKNKDPGYDCTQEELDAYVASEVRRQLKPRSPEKKIPIDLSVRNFFKSMSAPAKEAIKLSDYGRTLKKAYSAKSKPVPQLGEQPNQEVEPLVTGEEIGIKEFISDTGLTTDQLLRGAPIPKAEVKYKGIFYRMLDRRRLRGVAAALAAAACGQRLAAVAELGCGGESAGFGRGGRGREVAGFFANDVGRVLILLTLGFLEAIAEKPAAQQPTELQGCPAPDMCGNITIPHPFGIKPGCYLAGFEVICDRTFNPPRAFLAGDPPLFGDKLPPNVNSSKPFTVTANFYYSGTDAGMPSEMVNYTRGPLELLDISVNQSKLRVYAAINSDCSTNETHHILFEQSIKLQPSGPFTLSANDNSLVGVGQNVIAMFADSYAGEEYSTICLSFLSSVSKARNGPCENATGLGCCQQTLPPGVNTTLVRFQHRNNSKWRTYPCSYAMLVEKSWYNFSTEDLFEYPAFPNKYPRGVLPDKYPTGVPLVLDFAIRNGSCPQENRGPPGKDYACVSGNSSCLDAGKGRGYKCECKEGYNGNPYMPNGCQGRCGHTAVYLLWPLLATATVVAG

SEQ ID NO: 201711 - protein, 63 aa, Oryza sativa
  unsure (1)..(63): unsure at all Xaa locations
  Clone ID: PAT_MRT4530_97059C.1.pep
GRLSSCRASTAVNHACACLPPLPIFPPRMRISYPVPXEFCFSAAFIIHSSLICPLLSSPPPPP

SEQ ID NO: 201712 - protein, 252 aa, Oryza sativa
  Clone ID: PAT_MRT4530_9705C.1.pep
MGSDASSAADAMGVLRAAVPLQADADLVLATGGGGERGQVVGLVLVDVSNGFCTVGAGNLAPVTPNKQIEKMVDEAARLAKVLCERNWPVFAFLDTHYPDKPEPPFPPHCIIGSGEENFVPALEWLEKDPNVTIRRKDCIDGYLGAFEKDGSNVFSDWVAKFQIKTVLVLGICTDFCVLDFASSALAARNIGRVPPLEDVVIYSEGCATYNLPVEVARSMQGTLAHPQDLMHHMGLYMAKSRGAKVVDRIII

SEQ ID NO: 201713 - protein, 136 aa, Oryza sativa
  Clone ID: PAT_MRT4530_97060C.1.pep
MMLDLSGMTFRLQAQPEMNGIDWPMPMPATLARSLGRSGVSALHSGDQINQPTNETKSRGCTCRAADISSRSPALARRTLAIEAGNGRMRVVGDISIDSETSVVTSSISKYASPCTCDDFVDLKICRPSLSEVFIG

SEQ ID NO: 201714 - protein, 44 aa, Oryza sativa
  unsure (1)..(44): unsure at all Xaa locations
  Clone ID: PAT_MRT4530_97061C.1.pep
XRQEDMSEESGGGXXXKXWEDDDGGRGGRERAQLLRAAVDAWPL

SEQ ID NO: 201715 - protein, 74 aa, Oryza sativa
  unsure (1)..(74): unsure at all Xaa locations
  Clone ID: PAT_MRT4530_97062C.1.pep
DXXGPLXDXGPXADAGDSEASTAAXGRRHGEQHGAXDLLHLHPGRXXXSAGLCGVGEXTGDVVDRRLLGLQARG

SEQ ID NO: 201716 - protein, 41 aa, Oryza sativa
  unsure (1)..(41): unsure at all Xaa locations
  Clone ID: PAT_MRT4530_97063C.1.pep
NPFRVGLNQRVKKPPGLFPARGFMECEAQNSLYKSFLNFKX

SEQ ID NO: 201717 - protein, 102 aa, Oryza sativa
  Clone ID: PAT_MRT4530_97064C.1.pep
WSTELVLLVKLPFISRSMPAKEPAVAGVSAVRRLEEGFFRVSSCGPVASVAVTASPPLFVVSKNLFHIAGGAPGDGGRSSCWRRRGSQMWLPPPRRNEGGEY

SEQ ID NO: 201718 - protein, 89 aa, Oryza sativa
  Clone ID: PAT_MRT4530_97065C.1.pep
PVAWVRKRRAASSTRLLKCARLYIHCRSQRHLVGNVHTASLDNNKNKAPSDFFSTGRGDALRDSARLVLAKALRSGWSSVGSTSKALRE

SEQ ID NO: 201719 - protein, 90 aa, Oryza sativa
  Clone ID: PAT_MRT4530_97066C.1.pep
NPGGFSMWLGFPKDWPFSPPYSPPKPLNGNSLKLEGLAPPLFFRPGYTPRLVRFFFCYPVGVAQNFFPRECFAFVLTPFWFGKTPAPGFF

SEQ ID NO: 201720 - protein, 161 aa, Oryza sativa
  unsure (1)..(161): unsure at all Xaa locations
  Clone ID: PAT_MRT4530_97067C.1.pep
TAEAAEEKISILEENETLLKDNERLNAENDSLMKSREGANSQVAALRKSLEAAHKDIKDKEKMIQDLRQSLDVQRKELNDCRAEITALKMYIEGTQSIKQLFVGTSDGVKSHSFANSVGASSLNNEDEDSKGSEAITYKLASAVNITDDTQKDRXVLESSA

SEQ ID NO: 201721 - protein, 85 aa, Oryza sativa
  Clone ID: PAT_MRT4530_97068C.1.pep
HTHPFLLVLNILVLFVYWLLQFILYPFCRLDGLLFPLRSFPPEYLEEQINYGCVRRGHFTAAAAAAAVQNCCGSDAAEQSRCVLY

SEQ ID NO: 201722 - protein, 60 aa, Oryza sativa
  Clone ID: PAT_MRT4530_97069C.1.pep
ASLRRCVSEKKKKKKKKKKKKKKKKKKKKKKKKKKKKKKKKKKKKKKKKKKKKKKKGGPF

SEQ ID NO: 201723 - protein, 106 aa, Oryza sativa
  Clone ID: PAT_MRT4530_9706C.1.pep
QSRGWIHDDEHDSTHQARMITGPGNKNTQGTPEQALQSIGHRRKPTGNSRGKRSTKHTSKRNIHRRRNWKPKEETKTMAAYSTLQGGGGPKYILTPLLIVLQDLHP

SEQ ID NO: 201724 - protein, 200 aa, Oryza sativa
  Clone ID: PAT_MRT4530_97070C.1.pep
MARKRKTDAAPRLDEADRTLYSTFCGAANSLSQLYTQAMAQQKLSFQAGERHSLEKLHQWILRKHEEESRLTAADIMSHIQHELDYGGNDPHVSPRVHQHSANPFANSSIQPSAGSYGQATVGFAPRPSISDQSKNTIFSNALSSPVRRSLQSYHLTQGSGNGGRNAETNSAGQNRETNSGGSNDTSMDMVSDSAGNEYY

SEQ ID NO: 201725 - protein, 225 aa, Oryza sativa
  Clone ID: PAT_MRT4530_97071C.1.pep
MARKRKTDAAPRLDEADRTLYSTFCGAANSLSQLYTQAMAQQKLSFQAGERHSLVDGEDIYKIDKQKLHIELGNNLLGLEKLHQWILRKHEEESRLTAADIMSHIQHELDYGGNDPHVSPRVHQHSANPFANSSIQPSAGSYGQATVGFAPRPSISDQSKNTIFSNALSSPVRRSLQSYHLTQGSGNGGRNAETNSAGQNRETNSGGSNDTSMDMVSDSAGNEYY

SEQ ID NO: 201726 - protein, 276 aa, Oryza sativa
  Clone ID: PAT_MRT4530_97072C.1.pep
SNGDERPPPPPAAAQVLDDTAGAGGAAAVLHAADDGGGAARGPGRWRGDGGAGGGGGGERKRRFTEEQVRSLETTFHARRAKLEPREKAELARELGLQPRQVAIWFQNKRARWRSKQIEHDYAALRSKYDALHARVESLRQEKLALADQVRAPLPTNHQLRERLREREERSGNGGAATTAASSSSCNGSGSEEVDDDKRNSVMNASSSGLVEEDYVSCLAVPVVDVSEDGSAACGGSSYEYDHHLDYLGGGQLPDPFCGMPDLWEIWPMVEWNAVA

SEQ ID NO: 201727 - protein, 35 aa, Oryza sativa
  Clone ID: PAT_MRT4530_97073C.1.pep
IRLHPINRNSRGKSIDMCDRANHIDERRGRILLVT

SEQ ID NO: 201728 - protein, 75 aa, Oryza sativa
  Clone ID: PAT_MRT4530_97074C.1.pep
ASADAWGENFTGKHGSLSFSFDRACARVCVCGQHTAAHFDASFWKPEKKKKGRESALRREREREGGGGDQGERRE

SEQ ID NO: 201729 - protein, 54 aa, Oryza sativa
  Clone ID: PAT_MRT4530_97075C.1.pep
ENFYPLVKRGFWQTRVLGLSRRVLKPPLGIIGAQLIIDGDCGKLRGATCNPWFP

SEQ ID NO: 201730 - protein, 622 aa, Oryza sativa
  Clone ID: PAT_MRT4530_97076C.1.pep
MAAAASRKEEERNERVVRGLLKLPPNRRCINCNGLGPQYVCTSFWTFVCISCSGIHREFTHRVKSVSMSTFTTQEVEALQNGGNQRARESFLKEFDAQKMRLPDSSNVDSLREFIKAVYVERRYAGGRFSERPPRDKQNQKTNEQEHRRASSYHSFSQSPPYDYQYEERRNGKQSVMLTRKPGSDRGHDGKMSGFAYSPQSLHERMSEDRFANENSGPRISDCSGSSISNTFRTTPHSPNFLDKGCSSPSMQQNQSNIQASSGITQSEVRTISTGNIDSSSTKSSKSSLADMFFESDIAHRTQQTKDCITPSFTAFSDVANIAQKDLLNEPVAQQQPVTGLDQPVDFFASMPPATPSTDRMLTAAPSMDNAGWATFDTPPEEKQPGVIGLSGISVMDKHALSGDLFSFEPNNDQPTTQQASPDLSLMSSIEPKEPIDENKLQLWHSFDDASETMTLNLSNAQLQTNEHKNVDNNSLTTSNPFTCSITSKESRGNDSQEIFMGGLAPSEPFAPFPEPSLFATTSVGEASVQQMPLNPFDLPFDADSDSPDMFMDVTALQAVLPNADLSTSFVDGLPETWFSNNASAYVPPGSHGGPPCLVEQIPNSALRNITLSAVSTGNPFA

SEQ ID NO: 201731 - protein, 71 aa, Oryza sativa
  Clone ID: PAT_MRT4530_97077C.1.pep
LLFHQEFPERLLLTYKPEESEEIPEPGSAEEEKPQIEEPAVAVPSTEGVPPPPAKPEVVDTRDLLGLSDPT

SEQ ID NO: 201732 - protein, 75 aa, Oryza sativa
  Clone ID: PAT_MRT4530_97078C.1.pep
PRVRPRVRDYLGNPNLVHVQSIQAISAVMSFLTENSYLLHPYFFLISIYVWLGLCCYSLGCNPYFEELFSCFYDF

SEQ ID NO: 201733 - protein, 473 aa, Oryza sativa
  unsure (1)..(473): unsure at all Xaa locations
  Clone ID: PAT_MRT4530_97079C.1.pep
MSDPFYPHGHGGAAGGEGAAAAGYSSYEVDLIAARYGGRPLANPSSAAADLDARLAGARRSMGVLYHQPIMGSHSTVEQIEALYSSNTMTKRPRLESSLPIYPQRPGEKDCAFYMMTRTCKFGGSCKFDHPQWVPEGGIPNWKEAANVEESYPEQEGEPDCPFFMKTGKCKFGSKCKFNHPKLXDDAVPLENTSDFYVQTGXSKFLALCTSNHSNHIDIPSSHDAPVSXATPVSETDTGSAADSVSAKMQTPVAAAQEFNSKGLPMRTGKVDCPFYIXDRQXKFGSTCLYNHPDRGEVNFPLPWGHTILPSQGSMFLITSADFLQGLYFHAVHMPVGPGPVTYPQRPGATVCDFYMKTGFCKFADRCKFHHPIDRSAPDPSANWEPAEESVQLTLAGLPRREDAVVCAFYMKTGVCKFGGYRQGVEFRELRRETNILTQGRIKSMPYSFLAYELNMKPHYLGRYVVFVDLCGI

SEQ ID NO: 201734 - protein, 87 aa, Oryza sativa
  Clone ID: PAT_MRT4530_9707C.1.pep
MGGDATDLDANALNEEEEELHRGVPVAAAAAMVAGEEGDAKRKRSRSRWKYVQPIKPKKSPSFLSARRVVRRTQIKEELAQVMTPSR

SEQ ID NO: 201735 - protein, 228 aa, Oryza sativa
  Clone ID: PAT_MRT4530_97080C.1.pep
LANPSSAAADLDARLAGARRSMGVLYHQPIMGSHSTVEQIEALYSSNTMTKRPRLESSLPIYPQRPGEKDCAFYMMTRTCKFGGSCKFDHPQWVPEGGIPNWKEQAANVEESYPEQEGEPDWPFFMKTGKCKFGSKCKFNHPKEKGNALSSGNTNDKHLIADRSILPVRPSEPLCSFYAKTGKCKFRAMCKFNHPKDIEIPSSQNEPQSAVTVEGETDIGSAADSVSA

SEQ ID NO: 201736 - protein, 536 aa, Oryza sativa
  Clone ID: PAT_MRT4530_97081C.1.pep
MSLSKKVCQQSRILERIAQLNWPIMPRGASTRDVCIDINHGLSNISTTLSLNRKCSVYRIPAHVRELDKAYYEPRMVSIGPYHRKEKHLQAMEEHKWRYLRDFLSRGLVNETADHRMRRYTDMIRRLEPEVRECYFESTDLDSTEFVAMLLLDASFIIEFFVKWFSGEDDPLFSVSWSLPLLLNDMLMLENQIPFFVIERLYDISTFDPDRPEDAQPKPSLIGIITDYLRGIEDAEVRHDRENVHHMLHLYHCCFVQPLELPRNANEEGGNANNIGNPFLFLPKMIPCATQLREFGVHIKKNKHARSMFDISFRNGTLEIPRVAIEEMTRSRYMNLIAFEQCHDNGKYLTSYAVFMAYLINTAQDAILLQRYDVIDNKLANEEEAAKFFSQLHACSYINYDEHYLAPVFRDINTYCRRWWPKRRARLCHDYFASPWAVISFLAALIFMGFSIFKIVVMILSVFFHFHERNRTMKWVSNRLVVYLDALSVISNGLGVFSGEVDVQTIRRSYRMLRLKSNTCGGEDFIWHTRVIVCRS

SEQ ID NO: 201737 - protein, 75 aa, Oryza sativa
  Clone ID: PAT_MRT4530_97082C.1.pep
PSSDPITAKRTLTRQVETGAGANSPRTARGSRREGGREDQRMRAAGGREWPEPEAEPKPSSPLVRRKKGKGKVQK

SEQ ID NO: 201738 - protein, 126 aa, Oryza sativa
  unsure (1)..(126): unsure at all Xaa locations
  Clone ID: PAT_MRT4530_97083C.1.pep
SIPSSSSNRSSILHLPYKRGKISSSRYANRPSKSGGCAKLGERRGKNGVSLSSRHFATAASPAPIRTXPRRDLTSSATSPPSPSSPAGEGESADGGEGGWSESGDREVYQIWSRATAVCSRRPARG

SEQ ID NO: 201739 - protein, 35 aa, Oryza sativa
  Clone ID: PAT_MRT4530_97084C.1.pep
SNINEFTVMHLNNDYKSTLFTSKCTVVNNPCCFCI

SEQ ID NO: 201740 - protein, 131 aa, Oryza sativa
  Clone ID: PAT_MRT4530_97085C.1.pep
METAAAEWDHLLCSLLEEGRSGVEREPPPTTITAAEVVAAVAQPKHGRVDTENRWKPTHALACMRVAVWFFNTVSLVLFGIVVVKVVPHCKTMEEVFACILAILTVLGILIMGYCMIKNTKEDIKAMEGSP

SEQ ID NO: 201741 - protein, 47 aa, Oryza sativa
  Clone ID: PAT_MRT4530_97086C.1.pep
MAAKSAYDLRFWPKQGVASLILGQWACNFIWGSGPRGAHDGNKNPRG

SEQ ID NO: 201742 - protein, 48 aa, Oryza sativa
  Clone ID: PAT_MRT4530_97087C.1.pep
FSHNVDIGLPGLYVILSIGVGSHVRSGFLINGLEIITASQSGLGVVVK

SEQ ID NO: 201743 - protein, 47 aa, Oryza sativa
  Clone ID: PAT_MRT4530_97088C.1.pep
CKRPIRTIGAGSHQEGSHPGALKAAPDEIICTLIFVFASQGSTMACS

SEQ ID NO: 201744 - protein, 239 aa, Oryza sativa
  unsure (1)..(239): unsure at all Xaa locations
  Clone ID: PAT_MRT4530_97089C.1.pep
MDKLRGSELLTTHDVRAIMDLLLARQCLPANMDFLCCPNGDACAHRATNHGTLQVATCIGGGAFARISTEIVTPDHIRPQQLQYISNLTFDDSSAMEMKLSKCSSGGCQLDYDFSSPCEYILSLKMCLLDAIHGFYIRALAVLPTGDDSMRLGRLLRALLVSGHCYGPLDPVSNIILNAVLYDAAYPPQPHEGDGKAELPHDIFDTRAMRDMASCSLDGLVALLCTXHHHHHWHPALKA

SEQ ID NO: 201745 - protein, 41 aa, Oryza sativa
  Clone ID: PAT_MRT4530_9708C.1.pep
IPCYYCNLAFTGDHNIDDRARPLSIHFCDAEDAPSPTNMRV

SEQ ID NO: 201746 - protein, 102 aa, Oryza sativa
  Clone ID: PAT_MRT4530_97090C.1.pep
MVRMAGVDREWSHSIRCVRLTDAPRALDLLPPLGPGYRWHGTGPTGATRSACNIEQLFLSLGSTTPEGYWYMHAEKPVPAIEDAGEELYMHKKLDGRGPQTA

SEQ ID NO: 201747 - protein, 41 aa, Oryza sativa
  Clone ID: PAT_MRT4530_97091C.1.pep
VICSVTYLLYCISSSGPIHMLGRKNDIGYIRYFSRPCKAQV

SEQ ID NO: 201748 - protein, 69 aa, Oryza sativa
  Clone ID: PAT_MRT4530_97092C.1.pep
PVCGRVQNNVPRIPYPQSLTKGLAVPGKQFPQPVRLVILGNLATIVTKLLVSYKEEPKKSQCQVQCPCC

SEQ ID NO: 201749 - protein, 156 aa, Oryza sativa
  Clone ID: PAT_MRT4530_97093C.1.pep
MASYHFDLRDDDDVFSATLPEKSFVHVRSRSFTFRSRSFTFDNVGARGSGGSGAVAWRRGGVRARVAASWRVPVVSGGPATWGRGGGMAQWRRGVAAAWRARGGVARRWRRRRGGRVDVTSSAVATVSKSGSASAGGGVGVRVGRASTSAAASAMS

SEQ ID NO: 201750 - protein, 55 aa, Oryza sativa
  unsure (1)..(55): unsure at all Xaa locations
  Clone ID: PAT_MRT4530_97094C.1.pep
AAKGRSGIAALAAAPRGTADDPGLAVYWGRHKEEGSLREXCDTGRYTTVIITFYD

SEQ ID NO: 201751 - protein, 148 aa, Oryza sativa
  Clone ID: PAT_MRT4530_97095C.1.pep
MVPPSDEALLHGAIPERGTNVNQVGVVVDADAANRIEEPANGIEKPGIGVDVANTKATNVDADVAGGKEHGTTIHDISQWQAMFWTDAFNGDPDRLNEEDEPIGVDEEHLYGVDDTVCIKEATIPSMIVTQMFPMSLIHFLCVNMMDH

SEQ ID NO: 201752 - protein, 92 aa, Oryza sativa
  Clone ID: PAT_MRT4530_97096C.1.pep
CSSASFIQRTLFRNASSPTIPPLKNSWSSWGQHDSCFCRVNVQLCRTTNVRSSQDSREGCRDCAYHATSIASFSDFTICSKFIIFTGFPSLD

SEQ ID NO: 201753 - protein, 50 aa, Oryza sativa
  Clone ID: PAT_MRT4530_97097C.1.pep
MTVLSTIHCDPKDSFPPLNRYGFLRTLTFPLLRKWLQQHKNSSCNNPSHT

SEQ ID NO: 201754 - protein, 49 aa, Oryza sativa
  Clone ID: PAT_MRT4530_97098C.1.pep
PPKVVHLPNAPCIMPSSKFRVKNGLQGNFKCQKIDFYLFIIYSQLQLPS

SEQ ID NO: 201755 - protein, 49 aa, Oryza sativa
  unsure (1)..(49): unsure at all Xaa locations
  Clone ID: PAT_MRT4530_97099C.1.pep
SITHGFNLAIISAHTNHTYMXGVYCGLIKVGDLIAAREQLLRDFTRQTC

SEQ ID NO: 201756 - protein, 155 aa, Oryza sativa
  unsure (1)..(155): unsure at all Xaa locations
  Clone ID: PAT_MRT4530_9709C.1.pep
PKNQQKKKGVCWGSFFPLPHQKGTPPKKNPFPPPFPPGGESPQPISPGLPEPLGPFSWDAXPFPGTSLGGAPRMGPFPARGLPPGLGLVLLAFLAPPSLXGPFSHPLGGGAPKGLPPPTLSLGPPLAPRVPPGFPAPAPLGPPLSPFGPPPPPVT

SEQ ID NO: 201757 - protein, 100 aa, Oryza sativa
  unsure (1)..(100): unsure at all Xaa locations
  Clone ID: PAT_MRT4530_970C.1.pep
RGAASAADEQDRQDXGRKHAAANNGRARSGAHEHKXXGNNREXGATEAGHPMAEGFPGXRRGDXERAAASPPAFCNVDIPNGXGGVXNXLGEPRTPRTGH

SEQ ID NO: 201758 - protein, 75 aa, Oryza sativa
  unsure (1)..(75): unsure at all Xaa locations
  Clone ID: PAT_MRT4530_97100C.1.pep
FLSYEADLGKYNLTKPICPQLLXLSGLHQFPPSTKNQKQQHTWXWAHPGYTLLSYYLTLTKQVXGKEVPKGGTRA

SEQ ID NO: 201759 - protein, 46 aa, Oryza sativa
  Clone ID: PAT_MRT4530_97101C.1.pep
MAAASPCSGCCFSRRRLLPLPNNKRTPFLTVPFTNRPLCAINYSPL

SEQ ID NO: 201760 - protein, 224 aa, Oryza sativa
  Clone ID: PAT_MRT4530_97102C.1.pep
MAPPMMATAARPRDDQPRRRQALLLAASALLFLLCGGGAPGAGGVVVAVAATASATATPGLVFHVGGPRGWRVPDANTSYTWWAMNNRFHVGDSLYFRYGGGDSVLVVDREAFDGCNATEPVARFAGGATTVPLGRPGFFCFISGAPGHCDGGQRLIVRVMVHPAPGAPAPAPSAAAAATSHPGASASGPGASSGAAAVAAGGAGAAVAAAAMGVLAGLVLLLQ

SEQ ID NO: 201761 - protein, 301 aa, Oryza sativa
  Clone ID: PAT_MRT4530_97103C.1.pep
MEDLYSIHPGISRVGGAASEASGVGVVVGGGGGSSSSDLTELMKAQIAGHPRYPTLLSAYIECRKVGAPPEVASLLKEIGRERRAGGGGGGAGQIGVDPELDEFMEAYCRVLVRYKEELSRPFDEAASFLSSIQTQLSNLCSGATSPPATTATHSDEMVGSSDEDQCSGETDMLDIGQEQSSRLADHELKEMLLKKYSGCLSRLRSEFLKKRKKGKLPKDARSALLEWWNTHYRWPYPTEEDKLRLAARTGLDPKQINNWFINQRKRHWKPSDGMRFALMEGVAGGSSGTTLYFDTGTIGP

SEQ ID NO: 201762 - protein, 209 aa, Oryza sativa
  Clone ID: PAT_MRT4530_97104C.1.pep
MAFAMRLSPVRFPSRFSPLASGLSLSLKSSVSAGRAEGPSWYTSNKPLTGKVRTLEDAEAEASKMVEGLTTAEFGCLLQRQADGRANRVHAGELACWSIPSRVADDDVWTSRKHKRAVAKGRQVRTQHVTKDAADTDADEEDNDEREAGSDEDGGSRGYTPSPTWLNAGTGSHASPTGPQDVAGANVLLEISSSVVKPGVIDRKKNKGW

SEQ ID NO: 201763 - protein, 103 aa, Oryza sativa
  Clone ID: PAT_MRT4530_97105C.1.pep
GSSPVLPPVNSRFFPFLSPVPPGPPLFFWGPGPVGPLLLGFPKFVFFGGVPCSVRAQSHLFSVFFSGGPASPSKKKKKKKKKKKKKKKKKKKKKNTKKKKKTK

SEQ ID NO: 201764 - protein, 80 aa, Oryza sativa
  Clone ID: PAT_MRT4530_97106C.1.pep
MEDEAARGGETFDPDLIRAIFKLVWSRRGERGGGGGDAGDEVIEVEPAPETSRRNRSATGKSPSATVKHAIYAFCFVTSD

SEQ ID NO: 201765 - protein, 113 aa, Oryza sativa
  Clone ID: PAT_MRT4530_97107C.1.pep
ELGEEWAAAECGRRGSRRWSRKKARGHHRRGGGGGGGGGLCRSREEAPAGRKRVMVVVDQSSGAKHAMMWALTHVASKGDFLTLLHVLPHGGGDASALANSLGSLCKACKPEE

SEQ ID NO: 201766 - protein, 581 aa, Oryza sativa
  Clone ID: PAT_MRT4530_97108C.1.pep
MARERCTEVEERTSCTKVIMSIIVKSLSFQDTRDYYHIIFRAPDWSGGALIEVGNKQPRSWSGGVVKRGLASYEMIAPIVSSGLEPRMRSDPNRAARGYTTTTYNTREGSSSSNGRDNTCDKPGRGDRAQLARGAMDPCAFVRLTVDQLLLKLPSVPRPSSGAAGVHPSTSPCFCTLHLQDHPSAGSHSRTAQLPLASSESPGPVAAGEPVVISLDAAAVQRLSARPAAELVVSVHAGQKGNAGCGMSAGRALGRVRVPVDVARAAAGETVVARDGWVDVGKPAAAAASHGHARAQIHMVVRAEPDPRYVFQFGGEPECGPVVYQVPGGAAGGGQRQPVFTCRFSAGRRATRTRSLTSESSMTRSTSRKLRSWLSTLHGDRDAQARREQRKGWTVTIHDLSGSPVAMASMVTPFVPSPAGSGRVSRANPGAWLILQPTGAGPASWKPWARLEAWRERGPVDALGYRLELVFDSGPTECAVPIAESSISTKRGGQFVIDPATFPVGAAGAAWPFAGGFVMGSTAEGEGRASRPTVQVGVQHATCMGDVALFVALAAAVDLCMDACKLFSQRLRKELCHDQED

SEQ ID NO: 201767 - protein, 123 aa, Oryza sativa
  unsure (1)..(123): unsure at all Xaa locations
  Clone ID: PAT_MRT4530_9710C.1.pep
GMGYPMYSLPXFRGVVKRQCVGQGAPGGAVDKQFGQDCCRQLFAVDDNWCRCSGVNHMVGGIYREIGATDVGDPMAEVFPGFRKGDLEGAGANLPGFWKVEIPNGKGGVCYWLGYPCLKKTGK

SEQ ID NO: 201768 - protein, 106 aa, Oryza sativa
  unsure (1)..(106): unsure at all Xaa locations
  Clone ID: PAT_MRT4530_97110C.1.pep
PRPPTHRSMXARPDSXAEARALHRHPFSELLDSAGDVXIYLPMRISXSXIXXXCLXLFRSHXSXXVAXLSLCRACSASGYPGFPVHSRIRQALLILYSGPSWMLPI

SEQ ID NO: 201769 - protein, 785 aa, Oryza sativa
  unsure (1)..(785): unsure at all Xaa locations
  Clone ID: PAT_MRT4530_97111C.1.pep
PPVHTTFNCLISKHLPEQNQNLYREKFEGVPREDQNHVGRAKKVMKXLKAIGEATQRRVINXLTGGSFFWSSIQKGREKAYLRQINHVGTSYQSIPPAYSNTVISFGPXEDAEGILFPHQDPLVISVEITQCEVQRVLVDGGSSADVLFYDAFKKMQIPEDRLTHAGIPLQGFGGQQVHAIGKISLQVVFGGGENKRREEVVFDVVDMPYQYNAILGRSTINIFEAIIHHNYICMKLPGPKGVISVRGGQLAARKFELQGTPNMKGVHIVEQKQGEYNKNQKPVPEGKTKKVVLDKNELEKYILIGENLEKEVEEEILKVVKANTDVFAWSPEELEGVERSLIEHNLAIKPEHKPKKQKLRRISIDRQQAAKAELEKLLKAKVIREVMHLEWLANPVLVKKXANGKWRMCIDFTDLNKACPKDDFPLPRIDQLVDATAGCKLMSFLDAYSGYHQVFMVKEDEEKTSFITPFGTYCYIRMPFGLKNAGATFARLICKVLANQLGRNVEAYVDDIVVKSKKAFTHGKDLQETFENLRKFSVKLNPEKCVFGVRAGKLLGFLVSKRGIVQNXMEPPKNTREMQRLTGRMASLSRFLSKSAERGLPFFKTLRGVNNFEWNEECQKDFDDLKDYLHNMPTLSSPQKGEPLLLYVAATLVTVSAVLVQEQGNKQMPVYFMSEALQGPKTRYTEVEKMIYSIVMASRKLRHYFLSHDITVPSTYPIGEVLSNKEIAGRIAKWAMELLPFDLKYTSRTAIKSQVLAKFVAEWTPAELEKKKEEEKPWAVPSRA

SEQ ID NO: 201770 - protein, 788 aa, Oryza sativa
  unsure (1)..(788): unsure at all Xaa locations
  Clone ID: PAT_MRT4530_97112C.1.pep
VGKTALAKQVFCELRGRFECRAFVQVSRMPDTKRLLRSMLSQFRRHNRLPADRCTVQDLIDNIRDHIQDKRYFIVIDDLWETTSWDIINSAFPKGQDCSRILMTTTIEDVALECCDYQSDDICKMKPLSRDDSLNLFLNSAFGSEQNCSERLREVSTEIVRNCGGLPLGIINIARLGEXVDNLELWHHVQKHLSSSMATNHTSEDKLRNIVRLCYRCLPCRLKTCLQYLTMYPEGCIIWKADLVKQWTAEDFIRETEREDANAVADSYFDELVSRGMMQPNNRTYSDMVLSCTVHHMVFDVVKDMSVEENFTTALDYSQPITRLNFKVRRLSLHVSNTKYATKPVHISLSQARSLNFYGLAECLPSTLQFKQLRVLILEFWDDQEEFDLRGIFRLLQLRYVQVTTDMIVKLPATVQSLQYLETLQLNARVANVPSDIVHLPKLLHLRLRDVANLPDNIGCMASLCTLESLDLSNNSEQNVWGLGEMTNLQELYLNCSTELSGRLKRNLTALASSLGKLRKLRTLILAPSSGTSMYMDCSSIVSSPPLCLQRLELLPTICIFSRLPKWIGQLKRLRILKIVVRELLCSDVHSLTMLQELTVLSLDVQQSTEETIVFNDKAFPVLKYFKFRCGVLRLAFQAEAMPNLRKLKIEFNVHRGEQYGDILTGIEHLLNLQEIIGQIGAAAGAEESDKRAAEFALSDATKKHSRISRFNIRWINCVEEDVRVSKISDLQGISSSSDEEKQKANEPSGTDITIEDESPFSHEPNYDVPRAYKFLTLIINASTAMVK

SEQ ID NO: 201771 - protein, 714 aa, Oryza sativa
  Clone ID: PAT_MRT4530_97113C.1.pep
MAKKGAPRRQQPAPAARQLAVAKKGKAPPKAAKRAPKKKQELLEPSSDDSELEQQQERLQEVEEDESGSDLDAPSDSGAEELSDSDDASLEGGDSGDEEDDDEEEEEDDDDPLADDFLAGSSDDESAEGDDSGVDSDESDDLEAKSRAIDEAKGKAEEEAEEELKLNIRSESDEFRLPTKEELEEEALRPPNLPHLKRRISEIVRVLSNFSKLRQKDVPRKDYVDQLKTDVMSYYGYNDFLVEAFIEMFPAVELVELLESFEKRPPECLRTNTLKTRRRDLAAALIPRGFNLDPIGKWSKVGLVVYDSTISAGATVEYMAGHYMKQGASSFLPVMALAPQEKERIVDMAAAPGGKTTYIGALMKNTGQCALPVFSTFCSYRRIIYANEFNEKRLHGLLGNIHRMGVTNTIVCNYDGKELPKVLGMNSVDRVLLDAPCTGTGTIWKDPQIKTSKGIEDIRDCAFVQKQLLLAAIDLVDANSKTGGYIVYSTCSLMIPENEAVIDYALKKRNVKLVPCGLDFGRPGFIRFREHRFHTSLDKTRRFYPHVNNMDGFFVAKLKKLSNTIPVTSESSKVPEEAIEKTDPSSDDLQEQPIQSKIHKDVKKMNEETTILDGVTEDKQQTHDRPEKTLKNHKKGEKKRNGPGSGKKETHNEKEEPTSEKKQPVSAKIKKTVPKRTSGTKEKKPDTDQGGKRKRNWMVRREWEAYKKSRSKKV

SEQ ID NO: 201772 - protein, 106 aa, Oryza sativa
  Clone ID: PAT_MRT4530_97114C.1.pep
GLVTISLVDTGRCDPTNYEGRQLGLILGRGRRCLRLGGAQTGTSTGACAAYLARPGQLTRVIPRVAVACYAVVGLLREPSPSNPGPTTNPRRRSTPTTTTNSLVQG

SEQ ID NO: 201773 - protein, 713 aa, Oryza sativa
  Clone ID: PAT_MRT4530_97115C.1.pep
MAKKGAPRRQPPPPPPRQLAAGKKGKASPKAAKRAAPKKQRLLESSSDDSELEQQQGQLQEVESGSDLDVPSDSGAEELSDSDDASFEGGDSGDEEEEEDDEDGDDDPLADDFLAGSDDESDGGDDSGVDSDESDDLEAKSRAIDEEKEKAEEEAEEELKLNIRSESDEFRLPTKEELEEEALRPPNLPNLKRRISEIVRVLSNFSKLRQKDVPRKDYVNQLKTDIMSYYGYNDFLVEAFIEMFPAVELVELLESFEKRPPECLRTNTLKTRRRDLAAALIPRGFNLDPIGKWSKVGLVVYDSTISAGATVEYMAGHYMKQGASSFLPVMALAPQEKERIVDMAAAPGGKTTYIGALMKNTGIIYANEFNEKRLHGLLGNIHRMGVTNTIVCNYDGKELPKVLGMNSVDRVLLDAPCTGTGTIWKDPQIKTSKGIEDIRDCAFVQKFFLNRAVILYWLSTSITLKLQLLLAAIDLVDANSKTGGYIVYSTCSLMIPENEAVVDYALKKRNVKLVPCGLDFGRPGFIRFREHRFHTSLDKTRRFYPHVNNMDGFFVAKLKKLSNTIPVASESSNVPEEAIEKADPSSDDPQKQPIQSKKHKDVKTTNEETSILDGVTKDKRQTHETLKNHKKGKKRNGPESTKIKGDQKETHNEEEPTSEKKQPVSAKIKKSVPKRISGNKGKKLDTGKGEKRKRNWMVRRDWEAYKKSRSKQV

SEQ ID NO: 201774 - protein, 203 aa, Oryza sativa
  Clone ID: PAT_MRT4530_97116C.1.pep
MTAPRSALAATTPVRRLRDDDEDDNDGRDWNCHRLRRRLDPPSGGLRHADPSPCGIERMDLPPIVLGCLDLPWVCSQAVTALIDRCVDKLASFMPTLTKSTHEFYADSAAAQHPAAAPSVLGAALSAFADPLPPGPALLAGIYFASPRHPRSTPDGAGGGGALQGGVQPYTLVFRPHAPACDDDLHVAVTPSFSASADVSVSE

SEQ ID NO: 201775 - protein, 64 aa, Oryza sativa
  Clone ID: PAT_MRT4530_97117C.1.pep
VTRIHSTYRFAGFLNTLLALFRKAEILKPSQVLTTSVGPVLLQHREVVIVFMSFVASSVAPFYI

SEQ ID NO: 201776 - protein, 329 aa, Oryza sativa
  Clone ID: PAT_MRT4530_97118C.1.pep
MAAIANNDTSVEEAEQRTIQSILKQDETAAGIICQLKIRHYQHASKLPLMKDVLGVVATLGKINNDNLSRVLSEYLGLDNMLGVVCKTYDGVEGLETYDKEGMVDKTSGIHGLGRTIGKFLDGRFTVFCLENIRPFSGDFMIDDPQRKLLLHKPRLPSGEFPPGFLGFAVNMIHLDQANLSCLTAGGHGLRETLFYSLFSQLQVYKTRAELRNAIPLINDGAVSLDGSILRPNGSFCLGNRASLGIQFPVTANLGVSNLPVTITELEEQVKHKNWEKERLLEDIKRQEDLLNQVKDLFSKKKEQFMAYITQPGMLQSIDDRLFDQIVAD

SEQ ID NO: 201777 - protein, 527 aa, Oryza sativa
  Clone ID: PAT_MRT4530_97119C.1.pep
MGETGVAVASSPRAAASSPRAAASSASVASSPRAGGVGGRHHHRRWGGAAAISPSYRAVLLALWLVGFALVFLWQSTSVGRARLYTRPPLLPKRAPSAQGMGQWVAAPPVYDLREFGGVGDGRTLNTEAFVAAVASIAERGGGRLVVPAGRWLTAPFNLTSRMTLFLAAGAEILGVQDERYWPLMSPLPSYGYGREHRGPRYGSLIHGQDLKDVTITGGQNGTINGQGQSWWSKFRKKVLNHTRGPLVQLMRSSNITISNITLRDSPFWTLHIYDCKDVTISDTTILAPIVGAPNTDGIDPDSCENVVIKNCYISVGDDGIAIKSGWDQYGIAYGRPSTNIIIHNVTIRSMVSAGVSIGSEMSGGVSNVLVENVHIWDSRRGVRIKTAPGRGAYVSNITYRNITLEHIRVGIVIKTDYNEHPDEGFDPKAVPIIENISYSSIHGHGVRVPVRIQGSAEIPVKNVTFHDMSVGLVDRKNHVFQCSFVQGQVIGYVFPVPCKNLDLYNERRELVKQSALQNISDIDYSF

SEQ ID NO: 201778 - protein, 493 aa, Oryza sativa
  Clone ID: PAT_MRT4530_9711C.1.pep
MSISVNGQSVVPPGFRFHPTEEELLTYYLKKKVASERIDLDVIRDVDLNKLEPWDIQERCRIGSGPQNDWYFFSHKDKKYPTGTRTNRATAAGFWKATGRDKAIYSSSNRIGMRKTLVFYKGRAPHGQKSDWIMHEYRLDDPSSASASVSVNLPSYYSSSSSSSSPMHGVAGDQGAQEEGWVICRVFKKKNLVHHGGGAAAASHHAAAKLAAAAMEGSPSNCSTVTVSDHVKAQMLHSSASDDALDHILQYMGRSGCKQETKPAAMSASSAAAAAALEQHLSTPQYGKFMKLPPLEHVAGGVGLLAAAGGGGEYCSAADASGIADWDTLDRLAASYELNGALSDVASGKNMAGFFDVVDQPAGAAAFSSGDGDLWSLARLHIREVAIKIGVHGDGGERRVQGKGCDDPRGRFVACGNAEKRLRVRRRKRTSHKTGYNAASIRRDDRGVRMLYTSWRCSHDGRNTFTGTSSSGTSDDGGGSFTSGSNNRGGSRA

SEQ ID NO: 201779 - protein, 162 aa, Oryza sativa
  Clone ID: PAT_MRT4530_97120C.1.pep
PAGNLWITDLPSSHSFNNATRLQHSLRPTYNTVLHRQTKVFRKYPKSNVFSRKTIKMKFSSSAVLLAAAIGASAHPSGHAHQRAHAKRDFIVANKPVTVYETHVVTAPAAPDTAVPEAPADPAPVTSQTKAEQAVPKSWDTGLWTSDVSKLNKGPQDQIRPR

SEQ ID NO: 201780 - protein, 74 aa, Oryza sativa
  Clone ID: PAT_MRT4530_97121C.1.pep
ALPFGGETASDVFAAVLRGNLRFPPRLFSGVSPAAKDLMRRMMCRDVYRRFSAEPVLRHPWIVSGGGARDVQPT

SEQ ID NO: 201781 - protein, 405 aa, Oryza sativa
  Clone ID: PAT_MRT4530_97122C.1.pep
MELHLTSRGALPLSPPLAGQRRPHLSLSTPSLPIKNHTYSVPPPFSKAHCAIGCQASLATNYMETSAVADLDWENLGFGLVQTDFMYIAKCGPDGNFSKGEMVPFGPIELSPSAGVLNYGQGLFEGLKAYRKTDGYILLFRPEENAIRMRNGAERMCMPAPTLEQFVDAVKQTVLANKRWVPPTGKGSLYIRPLLMGSGAVLGLAPAPEYTFMIFVSPVGNYFKEGLAPINLIIEENFHRAAPGGTGGVKTIGNYASVLKAQRIAKQKGYSDVLYLDAVHKKYLEEVSSCNIFIVKGNVISTPAIKGTILPGITRKSILEVAQRKGFMVEERLVSVDELLEADEVFCTGTAVVVSPVGSITYLGQRVEYGNQGVGVVCQQLYTSLTSLQMGHVDDCMGWTVELNQ

SEQ ID NO: 201782 - protein, 428 aa, Oryza sativa
  Clone ID: PAT_MRT4530_97123C.1.pep
MALMWHKKKIKDNTKPHMWRRRSRVDDEANHTGSVDVDMAGDGDAQAEARSSSCFTYIWVTGQWSQLAGEEDKLVVVAGRLAIIRQRRPMLVQPPNAVAVRATAAGKEPLFSFGVIADVQYADIPDGRSFLGVPRYYRHSLTILQRAVRSWNAHNHKHPVAGGGVRFCVNFGDIVDGFCPKDRSLAAVQAVVAEFDRFHGPAYHMLGNHCLYNLPRSKLVSLLRMPSGRAYYDFSPFPGYRFVVLDAYDFSAVGWPRGHPVAAAARRFLDERNPNADKNSPSGLAGVDRRFVMFNGAVGEAQLRWLDGVLRGAARRREAAVVCSHLPLHPGAASPSGLMWNYEEVMRVVHRHGCVAACLAGHDHRGGYGVDARGVHHRTLEAALECPPGTDAFGRVDVYPDGLTLVGAGRMGSTDMRLQLHSPVTELS

SEQ ID NO: 201783 - protein, 61 aa, Oryza sativa
  Clone ID: PAT_MRT4530_97124C.1.pep
NVLLPLSLHRIIHSCKTLPYTQPGPHNQKTNNKLRTQLNKGLVIIRSKLNPITWLYNTITA

SEQ ID NO: 201784 - protein, 67 aa, Oryza sativa
  Clone ID: PAT_MRT4530_97125C.1.pep
IPVRHAVPQCEQRVVGAGVGAGRHRRRPALTLYIWAARSLSLTHTTSRSSAAHASAHASAHASAHAS

SEQ ID NO: 201785 - protein, 188 aa, Oryza sativa
  Clone ID: PAT_MRT4530_97126C.1.pep
SSVRSTRNSHNNSPVQRRQSTKWTLVRIDRIQECNIKCRCDTLAQSSPLQHARRRGPPPPPGSLVQGGVGHVSCSSPSPRCLRSSAGRGASSGGAPHVDGARGRARYRVPCQATRASSAAAGCQSPECTLFRAVRHPSFSICKHGGVIDVKYLIERVRLTSRPAGTTASIHSASGISRRAGRRPGSAV

SEQ ID NO: 201786 - protein, 82 aa, Oryza sativa
  Clone ID: PAT_MRT4530_97127C.1.pep
MGEVVGGNVWVRGEAERGMHWIGGRVSVRTAVIHLGAASGYAAPVNACYFPSVLERKLELELYQTSPTALQLHSRLNSWRYI

SEQ ID NO: 201787 - protein, 320 aa, Oryza sativa
  Clone ID: PAT_MRT4530_97128C.1.pep
MANRPNTHSDQDMGGFVAELACMAFVIGFTQEPEYTRIHPLSGEFPHQVRLEVHGIPSYLPNMTVTASGGTFDHACEEATLMMMARLRDLHDNDLRSTAYRYYPRRGANDDTSTFRSCRGEVDTTFGHMRGVMCSYDRVYAELHKASKALNNQKLVRIASLQDEVARLKRENARLQGRPAVVGARIRTMPSKSTTAPVRIQLVPRNPPSGNPPPPPSAPPIAPAAPTPAPASAPASSSAPAPEFVFTDAPASAYRGPASGSGGWLPATPSGSRDHSSSSSSSEPGSGETYVQDSRSRSEGPGDEQEDAFDSIDRRSRSEH

SEQ ID NO: 201788 - protein, 813 aa, Oryza sativa
  Clone ID: PAT_MRT4530_97129C.1.pep
MRHRSLAAAASASAPPPQMPPSFHFHWRHHAARRLSSTTACLHPPPLQPPRASASASASLLLQLQDHIASGHLSRAHHLFDQIPSPDVRTYNDLIRAYSSSSPTAAADGLHLYRRMLRHRVAPNNYTFPFALKACSALADHHCGRAIHRHAIHAGLQADLFVSTALLDMYVKCACLPDAAHIFATMPARDLVAWNAMLAGYAHHGMYHHAVAHLLSMQMQMHRLRPNASTLVALLPLLAQQGALAQGTSVHAYCIRACLHPNRNSKSKLTDGVLLGTALLDMYAKCGSLLYARRVFDAMPARNEVTWSALIGGFVLCSRMTQAFLLFKAMLAQGLCFLSPTSIASALRACASLDHLRMGEQLHALLAKSGVHADLTAGNSLLSMYAKAGLIDQAIALFDEMAVKDTVSYSALVSGYVQNGRAEEAFLVFKKMQACNVEPDAATMVSLIPACSHLAALQHGRCSHGSVIIRGLASETSICNALIDMYAKCGRIDLSRQVFNMMPSRDIVSWNTMIAGYGIHGLGKEATALFLEMNNLGFPPDGVTFICLLSACSHSGLVIEGKHWFHVMGHGYGLTPRMEHYICMVDLLSRGGFLDEAYEFIQSMPLRADVRVWVALLGACRVYKNIDLGKKVSRMIQELGPEGTGNFVLLSNIYSAAGRFDEAAEVRIIQKVQGFKKSPGCSWIEINGSLHAFVGGDQSHPQSPEIYRELDNILVGIKKLGYQPDTSFVLQDLEEEEKEKALICHSEKLAIAYGILSLSEDKTIFVTKNLRVCGDCHTVIKHISLVKRRAIIVRDANRFHHFKNGQCSCGDFW

SEQ ID NO: 201789 - protein, 325 aa, Oryza sativa
  unsure (1)..(325): unsure at all Xaa locations
  Clone ID: PAT_MRT4530_9712C.1.pep
YTGTGVDNRTTGTARHQKDEDGEARGRXSLPPRDEAWERQRRTGAAETAXGDDGGERRGNDFGGDPWTRLXRRGVEDEDEDGAAAACLADADDGRERLDGGTNATTTGNDERTTMMTTGAGEEATRAASSGCTEKRTALNTPLRXMTRPARATAFRRNRGAAGGEDNAATSTEETATSIGVPATYRSRPXREVLDADEEATPASFGRGGGDAGDDGGIAEPREVVATSAGAQARRQRRLEVVQWQQRHCCRRGRTSSGLRAKRRAGRGRGGCCDAREDGGTAGRRSGDAAGAAGDGRRYRREGQVMGRWLGARERAKWTKGRRRA

SEQ ID NO: 201790 - protein, 109 aa, Oryza sativa
  Clone ID: PAT_MRT4530_97130C.1.pep
PHYSFYFTGGFSFSFFFFSYRFKRVPNTRTKSTQKKVYRLCKKGASATRKSPASQGTKRKKPETSANRTTPPPTPKARGCRADQVSQAAPMQPERRQTPPKPRWKGNRA

SEQ ID NO: 201791 - protein, 78 aa, Oryza sativa
  Clone ID: PAT_MRT4530_97131C.1.pep
LQESARGWCLVYLRDMLFGGHLIGEPFVIHMCLMFCNSYMITAVLLNDFRIFFFFYGYHLQIRADLLENLLYFDMTIC

SEQ ID NO: 201792 - protein, 365 aa, Oryza sativa
  Clone ID: PAT_MRT4530_97132C.1.pep
MGRRRRYFRCGTTMLTMLLFVVTNSASVLLSSGAGAFLLRRYKPATARLWAWDDSAALLDDLNATQSALADTHAQLADLHARLGTANSLLETLLAKMAAGRRNISTPWARELSGEAKACRRAPPEGHRQGDGVPGAGTRVRPLPGRPGGVHEPSPLTKSLWAIPPDTTVVWDAYRCKNYSCLVRGGGGGEFDLLGREKRRWMRDDGALAYSIDSVLAARPNGTVRIGLDIGGVSGTFAARMRERGVAVATTAMNSGGPSGSLIASRGLVPVHVGPAHRLPFFDGTLDIVHWTSPEHVAGVMLEFALFDIYRVLRPGGLLWLDHFVFPGEQLNATFAPMVDRVGFRRLRWNTGKKLVSALLEKPMT

SEQ ID NO: 201793 - protein, 405 aa, Oryza sativa
  Clone ID: PAT_MRT4530_97133C.1.pep
MGRRRRYFRCGTTMLTMLLFVVTNSASVLLSSGAGAFLLRRYKPATARLWAWDDSAALLDDLNATQSALADTHAQLADLHARLGTANSLLETLLAAMAAERRDGGTPWARELSGELELAVAPHRNVTGKATVFPALGHACARFQDDLEAYMRYTPGGECPSDEQLARRLMLNGCDPLPRRRCRPRSPAGYVQPSPLTKSLWAIPPDTTVVWDAYRCKNYSCLVRGGGGGEFDLLGREKRRWMRDDGALAYSIDSVLAARPNGTVRIGLDIGGVSGTFAARMRERGVAVATTAMNSGGPSGSLIASRGLVPVHVGPAHRLPFFDGTLDIVHWTSPEHVAGVMLEFALFDIYRVLRPGGLLWLDHFVFPGEQLNATFAPMVDRVGFRRLRWNTGKKLVSALLEKPMT

SEQ ID NO: 201794 - protein, 126 aa, Oryza sativa
  unsure (1)..(126): unsure at all Xaa locations
  Clone ID: PAT_MRT4530_97134C.1.pep
XPKSIPPVAXLKNSVVSTLWYFVSXPGSPVHCATGEARKRMCVLQICESPSQLVAPANLQGQVKYPEATDRTVSCPHGSLXHCTRIVIGESHLCTILGQPVYIVMHXCMDHMASESSDNIIETFSS

SEQ ID NO: 201795 - protein, 515 aa, Oryza sativa
  Clone ID: PAT_MRT4530_97135C.1.pep
MRDAILVVVVGVLFLMVAVVVMTRLGDGGAAPSPPAMPVLGHLHLIKKPLHRSLAEVAARVGAAPVVSLRLGARRALLVSTHAAAEECFTACDAAVAGRPRLLAGDVLGYGHTTVVWASHGDHWRALRRLLGVELFSNARLAALAADRRAEVASLVDAVLRDAAAGGGGGGTVTLRPRLFELVLNVMLRAVTARRHAGDETRRFQEIVEETFAASGSPTVGDFFPALRWVDRLRGVVATLQSLQKRRDAFVAGLVDDHRRTRRAAAAAADKDQKKNGIIDALLTLQETDPDHYTDNVVKGIVLVLLTAGTDTSALTTEWAMAQLVAHPEAMTKVRAEIDANVGAARLVEEADMASLPYLQCVVKETLRLRPVGPVIPAHEAMEDCKVGGYHVRRGTMILVNAWAIHRDGDVWGSPEEFRPERFMDDGAGAGAVTAVTAPMLPFGLGRRRCPGEGLAVRLVGLTVAALVQCFDWEIGEGGAVDMAEGGGLTMPMATPLAAVCRPREFVKTVVSDCF

SEQ ID NO: 201796 - protein, 53 aa, Oryza sativa
  Clone ID: PAT_MRT4530_97136C.1.pep
MKIQAVLELDVCAKAARALDAANPARSRSHEHGHRSMKSAEDAGLSLTSMVAN

SEQ ID NO: 201797 - protein, 176 aa, Oryza sativa
  unsure (1)..(176): unsure at all Xaa locations
  Clone ID: PAT_MRT4530_97137C.1.pep
GVRGSLSLSLAKDQGRSMPQPDPIAINPCFVKGHSQWADVAFSLNPKKRRLVFLCLVVQPRALLSSVGPTPPLEERGEGAKQPNSRGGGRRPXASQSRPVAVFPLQVXLPAADMPPPPCCSEQPRRSGGRGGGGAPASASRRSALSPRRRSTTPWSGAVAVSARQALCGGGKEPRA

SEQ ID NO: 201798 - protein, 51 aa, Oryza sativa
  Clone ID: PAT_MRT4530_97138C.1.pep
LEVLYMKYPAFESAQKHFQTCISYFLKKKKEGRPTKEDTKTYVAACMERDS

SEQ ID NO: 201799 - protein, 135 aa, Oryza sativa
  unsure (1)..(135): unsure at all Xaa locations
  Clone ID: PAT_MRT4530_97139C.1.pep
PRVRKNLKNKRIKAQRIISVAVVLDMVVCSAIVQVDLTGEGDGEYYGGYGDLLQYWRLRKDEDFNRDPSGLNYIPWWRAVACELINYQKXPQLELLEQHCHYLDIKIMQGICHELQVQQLGELNYDGNLVQAIIL

SEQ ID NO: 201800 - protein, 113 aa, Oryza sativa
  Clone ID: PAT_MRT4530_97140C.1.pep
MEDAIFFVAPFLAAAKEAAMEGSGDVEEDSKEEDDEVLHGVRRAWRVPRAEVCRKRMHVVLTEEVRLRKLLPGDSDGVDVKNKDQARWKEAMATWFTRVDGEVDGTEEADTGE

SEQ ID NO: 201801 - protein, 110 aa, Oryza sativa
  unsure (1)..(110): unsure at all Xaa locations
  Clone ID: PAT_MRT4530_97141C.1.pep
GKHGHPKCPFVALAIFNGKKLXNIVPPPPNCDVPPVTRFDFHLIALFXNGFFTPLPESGGPKDALRLPSYKALLSQIKDGSPQGKDFIVPLMFPLGEEQICPFKDFGPKN

SEQ ID NO: 201802 - protein, 72 aa, Oryza sativa
  Clone ID: PAT_MRT4530_97142C.1.pep
MKQEKDNTIIVQALAAPGSNFRPPQTRKRNRTSSSNGAKSKVASTTGSSGPANPEDMNDVFEFALNNSILDL

SEQ ID NO: 201803 - protein, 752 aa, Oryza sativa
  unsure (1)..(752): unsure at all Xaa locations
  Clone ID: PAT_MRT4530_97143C.1.pep
MAEQAKAHDLSPSVSGDDGEPNPRRRARTPPPPPRQSPKRGEALERVEKSAASPVAGGAGERRDGERRLLVYGDGSTPQGALQAVGALLRHPPVVPDPESPAQRWLDDVANLVMTAQQRLGAGGRSATTKTFGAATSGSVSSRRRARRAAAAARHSATTPSSAPPTREDQHEEPDARLDIERRRSDRRAPRATEGASSSRVSPRHGREDQPSVPPVGGVGCRAFVASLRNVRWPPRFRPTITEKYDGSVNPTEFLQVYTTGIEAAGGDDRVMANFFPMALKGQARGWLMNLPPASVHSWEDLCQQFTMNFQGTYPRPGGVCGTTACSKRSPPKSPRLPQSFFSSRTEWLARRRPGPGTPPVPEWQLRPPPDPPLRQGGVTGGGRRGQPIPTTRVMSSLSKALRWPPERGGLRATKRRRPALPDLDYLEERRRRAALRAARYQQSLRRYHQRHVRARSLCVDDLVLRRVQTRAGLSKLSPMWEEGGPKASEEEGKAIKIGGGLGAHSDAPGSPXLVATVAHSAVIVLLVGVEGEREPRILXKREQGGEAPEPNGGPRPPTAGAGPPLACPTVPGAPDPQDGPEATAGRPRLSPSNPEVVGTEAECAPRCLSDEERPGDAASSEEDRPRRKVQRPVYFVSEALRDAKTRYPQAQKMLYAILMAPKKAPSPYLQAKQIGSPRFVRRSSDMAVLKRPPIMDSKVTITNVRDLRPLGILPNYGNRSHLSPGFRGGVTPDRFPGEGKLLWHNAGGYCR

SEQ ID NO: 201804 - protein, 50 aa, Oryza sativa
  Clone ID: PAT_MRT4530_97144C.1.pep
MEEFYVNQAYVRTGFPTAGEKRNPRMPINLQNKCSIATGAELQMKSILSS

SEQ ID NO: 201805 - protein, 1683 aa, Oryza sativa
  unsure (1)..(1683): unsure at all Xaa locations
  Clone ID: PAT_MRT4530_97145C.1.pep
MAEQAKAHDLSPSVSGDDGEPNPRHRARTPPPPPRQSPKRGEALERVEKSAASPVAGGAGERRDGERRLLGDGSMPQGVLQAAGALLRHPPVVPDPESPAQRWLDDVANLVMTAQQRLGAGGRSATTRTSGAATTGSVSSRRRARRAAAAARHSATTPSSAPPTREDQHEEPDARLDIERRRSDRRAPRATEGASSSRVSPRHGREDQPSVPPVGGVGCRAFVASLRNVRWPPRFRPTITEKYDESVNPTEFLQVYTTGIDAAGGDDRVMANFFPMALKGQARGWLMNLPPASVHSWEDLCQQFTMNFQGTYPRPGEEADLHAVQRGDDESLRSYIQRFCQVRNTIPCIPAHAVIYAFRGGVRHNRMLEKIASKEPQTTAELFQLADRVARKEEAWTWNPSGSGVAASAAPGSAAQTGRRDRRRKKRSVHSGDEGHVLAVEGAPRATRKGRPASDKKKEAGTPSRERPASKWCSVHNTSLHDLADCRAVKNLAERTRKWEEDRRQERREGKSAAVPSGKRRSEARQKAPAVDIDDGDDDLGFQEPGATIATVDGGACAHVSRRSFKAMRRELLAAAPTHEATRRSRWSEVALTFDQTDHPPXFRTERVNFDVADLSLPYNAVLGRPALVKFMAAVHYAYLQMKMSGPGGPISVRGDLKVALACMEQRADHLAAATKPEGGDERLGTSAPTAPRQRIATCDEVPEDALVSFLRANADVFAWRPADMPGVPREVIEHRLAVRPGARPVRQNVRRQAPERQAFIREEVARLLEAGFIREVIHPEWLANPVVVPKANGKLRMCIDYTDLNKACPKDPYPLPRIDQIVDSTAGCDLLCFLDAYSGYHQIRMAREDEEKTAFITPVGTYCYTSMPFGLKNAGPTFQRTTRISLGSQIGRNVEAYVDDLVVKTRNQETLLSDLVETFENLRSARIKLNPDKCVFGVPAGKLLGFLVSARGIEANPEKIRAIERMRPPSKLRDVQCVTGCMAALSRFISRLGEKALPLFKLLKRSGPFTWTEEAEHALTQLKAYLSSPPVLVAPEPNEPLLLYLAATPQVVSAALVVERDEDNPHFVHPHSVLTWPGSERGGEAPESDGGLRPLTTGAGPLPACQTVLGAPDPQEGPKATAGRPHLTPFDPEANPVLTRPGKEQGEEAPEPNGGQRPLTTGVGPLPACPTMPGAPDPQDGPEATEGRPPLSSSDPEVIGTEDKCAPKGHLNEERPGDTAPSREDRPHRRVQRPVYFVSEALRDAKTRYPQAQKMLYAILMASRKLRHYFQAHRVTVVTSYPLGQILHNREGTGRVVKWAIELSEFDLHFEPRHAIKSQALADFVAEWTPAPETVSIPEASTNPSQLPHTTHWVMQFDGSLSLQGAVDLVRRCRACQFHAKQIHQPAQALQIIPLSWPFAVWGLDILGPFKRAPGGFEYLYVAIDKFTKWPEAYPVVKIDKHSALKFIKGITARFGVPNRIITDNGTQFTSELFGDYCEDMGIKLCFASPAHPRSNGQVERANAEILKGLKTKTFNILKKHGDSWIEELPAVLWANRTTPSRATGETPFFLVYGAEAVLPSELTLRSPRATMYCEADQDQLRRDDLDYLEERRRRAALRAARYQQSLRRYHQRHVRARSLCVDDLVLRRVQTRAGLSKLSPMWEGPYRVIGVPRPGSVRLATGDGTELPNPWNIEHLRRFYP

SEQ ID NO: 201806 - protein, 36 aa, Oryza sativa
  Clone ID: PAT_MRT4530_97146C.1.pep
PTRPSTHTLLPETGTCQLDCWLLSRASDNPKKCDCV

SEQ ID NO: 201807 - protein, 2017 aa, Oryza sativa
  unsure (1)..(2017): unsure at all Xaa locations
  Clone ID: PAT_MRT4530_97147C.1.pep
MAEQAKAHDLSPSVSGDDGEPNPRHRARTPPPPPRQSPKRGEALERVEKPTASPVAGDAGERRDGERRLLVYGDGSTPQGALQAAGALLRHPPVVPDPESPAQRWLDDVANLVMTAQQRLGAGGRSATTRTSGAATSGSVSSRRRARRAAAAARHSATTPSSAPPTREDQHEEPDARLDIERRRSDRRAPRATEGASSSRVSPRHGREDQPSVPPVGGVGCRAFVASLRNVRWPPRFRPTITEKYDGSVNPTEFLQVYTTGIEAAGGDDRVMANFFPMALKGQARGWLMNLPPASVHSWEDLCQQFTMNFQGTYPRPGEEADLHAVQRGDDESLRSYIQRFCQVRNTIPCIPAHAVIYAFRGGVRHNRMLEKIASKEPQTTAELFQLADRVARKEEAWTWNPSGSGVAASAAPGSAAQTGRRDRRRKKRSVHSGDEGHVLAVEGAPRATRKGRPASDKKKEAGTPSRERPASKWCSVHNTSLHDLADCRAVKNLAERTRKWEEDRRQERREGKSAAVPSGKRRSEAKQKAPAVDIDDGDDDLGFQEPGATIATVDGGACARVSRRSFKAMRRELLAAAPTHEATRRARWSEVALTFDQTDHPPCVARGGQIAMVVSPTICNVKLGRVLIDGGAALNILSPAAFDAIKAPGMVLQPSQPIIGVTPGHTWPLGHIDLPVTFGGSANFRTERVNFDVADLSLPYNAVLGRPALVKFMAAVHYAYLQMKMPGPGGPISVRGDLKVALACMEQCADHLAAATKPEGGDERLGTSAPTAPRQRIATCDEVPEDALVSFLRANADVFAWRPADMPGVPREVIEHRLAVRPGARPVRQKVRRQAPERQAFIREEVARLLEAGFIREVIHPEWLANPVVVPKANGKLRMCIDYTDLNKACPKDPYPLPRIDQIVDSTAGCDLLCFLDAYSGYHQIRMAREDEEKTAFITPVGTYCFTSMPFGLKNAGPTFQRTTRISLGSQIGRNVEAYVDDLVVKTRNQETLLSDLAETFENLRSARIKLNPDKCVFGVPAGKLLGFLVSARGIEANPEKIRAIERMRPPSKLRDVQCVTGCMAALSRFISRLGEKALPLFKLLKRTGPFTWTEEAEHALTQLKAYLSSPPVLVAPEPNEPLLLYLAATPQVVSAALVVERDEDNPHFVHPHSVLTWPGSERGGEAPESDGGLRPLTTGAGPLPACQTVLGAPDPQEGPKATAGRPHLTPFDPEANPVLTRPGKEQGEEAXPEPNGGQRPLTTGXAPDPQDGPEATEGRPPLSSSDPKVIGTEDKCAPKGHLNEERPGDTAPSREDRPHRRVQRPVYFVSEALRDAKTRYPQAQKMLYAILMASRKLRHYFQAHRVTVVTSYPLGQILHDREGTGRVVKWAIELSEFDLHFEPRHAIKSQALADFVAEWTPAPETVSIPEASTNPSQLPHTTHWVMQFDGSLSLQGAGAGVTLTSPTGDVLRYLVRLDFRATNNMAEYEGLLAGLRVAAGLGIRRLLVLGDSQLVVNQVCKEYRCSDPQMDAYVRQVRRMERHFDGIELRHVPRRDNMIADELSRLASSRAQTPPGAFEERLTQPSARPDPLGETDAPDRPPRPVGVQASGPEGSAPSSLRLIAWISEIQTYLTDKTLPEDREGSERVQRISKRYVLVEGTLYRRAANGILLKCIPQEQGVELLADIHEGECGAHSASRTLVGKAFRQGFYWPTALNDAVDLVRRCRACQFHAKQIHQPAQALQIIPLSWPFAVWGLDILGPFKRAPGRFEYLYVAIDKFTKWPEAYPVVKIDKHSALKFIKGITARFGVPNRIITDNGTQFTSELFGDYCEDMGIKLCFASPAHPRSNGQVERANAEILKGLKTKTFNILKKHGDSWIEELPAVLWANRTTPSRATGETPFFLVYGAEAVLPSELTLRSPRATMYCEADQDQLRRDDLDYLEERRRRAALRAARYQQSLRRYHQRHVRARSLCVDDLVLRRVQTRAGLSKLSPMWEGLYRVIGVPRPGSVRLATGDGTELPNPWNIEHLRRFYP

SEQ ID NO: 201808 - protein, 2047 aa, Oryza sativa
  Clone ID: PAT_MRT4530_97148C.1.pep
MRYGGAAVEVGPRGVPYIGVAIAEDLIKNAQVQAIIVTTEAHTAVVARLRRRHRVPILAFPISGGSPPPSHHPPHHATATAPPFGADHTSAKAALTGILTAIFSSARRAGGSPPHGRRYNAGAPTGRRLDRRRLAGRRSSSSSSSGEVLRIAVPRKTGFQAFVDMESPTWPGTFGDVGPEGEVSALLLISPRGGRVAPAPTPRAEVPRPPVGLMAEQAKAHDLSPSVSGDDGEPNPRHRARERRDGERRLLVYGDGSTPQGVLQAAGALLRHPPVVPDPESPAQRWLDDVANLVMTAQQRLGAGGRSATTRTSGAATTGSVSSRRRARRAAAAARHSATTPSSAPPTREDQHEEPDARLDIERRCSDRRAPRATEGASSSRVSPRHGREGQPSVPPVGGVGCRAFVASLRNVRWPPRFRPTITEKYDGSVNPTEFLQVYTTGIEAAGGDDRVMANFFPMALKGQARGWLMNLPPASVHSWEDLCQQFTMNFQGTYPRPGRRDRRRKKRSVHSGDEGHVLAVEGAPRATRKGRPASDKKKEAGTPSRERPASKWCSVHNTSLHDLADCRAVKNLAERTRKWEEDMRQERREGKSAAVPSGKRRSEARQKAPAVDIDDGDDDLGFQEPGATIATVDGGACAHVSRRSFKAMRRELLAAAPTHEATRRARWSEVALTFDQTDHPPCVARGGQIAMVVSPTICNVKLGRVLIDGGAALNILSPAAFDAIKAPGMVLQPSQPIIGVTPGHTWPLGHIDLPVTFGGSANFRTERVNFDVADLSLPYNAVLGRPALVKFMAAVHYAYLQMKMPGPGGPISVRGDLKVALACMEQRADHLAAATKPEGGDERLGTSAPTAPRQRIATCDEVPEDALVSFLRANADVFAWRPADMPGVPREVIEHRLAVRPGARPVRQKVRRQAPERQAFIREEVARLLEAGFIREVIHPEWLANPVVVPKANGKLRMCIDYTDLNKACPKDPYPLPRIDQIVDSTAGCDLLCFLDAYSGYHQIRMAREDEEKTAFITPVGTYCYTSMPFGLKNAGPTFQRTTRISLGSQIGRNVEAYVDDLVVKTRNQETLLSDLAETFENLRSARIKLNPDKCVFGVPAGKLLGFLVSARGIEANPEKIRAIERMRPPSKLRDVQCVTGCMAALSRFISRLGEKALPLFKLLKRSGPFTWTEEAEHALTQLKAYLSSPPVLVAPEPNEPLLLYLAATPQVVSAALVVERDENNPHFVHPHPVLTWPGSERGGEAPESDGGLRPLTTGVGPLPACQTVLGAPDPQEGPKATAGRPHLTPSDPEANPVLTRPEKEQGEEAPESNGGQRPLTTGVGPLPACPTMPGAPDPQDGPEATEGRPPLSSSDPEVIGTEDKCTPKGHLNEERPGDTAPSREDRPHRKVQWPVYFVSEALRDAKTRYPQAQKMLYAILMASRKLRHYFQAHRVTVVTSYPLGQILHNREGTGRVVKWAIELSEFDLHFEPRHAIKSQALADFVAEWTPAPETVSIPEASTNPSQLPHTTYWVMQFDGSLSLQGAEYEGLLAGLRVAAGLGIRRLLVLGDSQLVVNQVCKEYRCSDPQMDAYVRQVRRMERHFDGIELRHVPRRDNMIADELSRLASSRAQTPPGAFEERLTQPSARPDPLGETDAPDRPPRPVGVQASGPEGSAPSSLRLIAWISEIQTYLTDKTLPEDREGSEREQGVELLADIHEGECGAHSASRTLVGKAFRQGFYWPTALNDAVDLVRRCRACQFHAKQIHQPAQALQIIPLSWPFAVWGLDILGPFKRAPGGFEYLYVAIDKFTKWPEAYPVVKIDKHSALKFIKGITARFGVPNRIITDNGTQFTSELFGDYCEDMGIKLCFASPAHPRSNGQVERANAEILKGLKTKTFNILKKHGDSWIEELPAVLWANRTTPSQATGETPFFLVYGAEAVLPSELTLRSPRATMYCEADQDQLRRDDLDYLEERRRRAALRAARYQQSLRRYHQRHVRARSLCVDDLVLRRVQTRAGLSKLSPMWEGPYRVIGVPRPGSVRLATGDGTELPNPWNIEHLRRFYP

SEQ ID NO: 201809 - protein, 69 aa, Oryza sativa
  Clone ID: PAT_MRT4530_97149C.1.pep
WGKTVPARTGKANKSDGKASLYPARNGGDGVNAEVVLAPEHMAALELDGEFWAAVTPDHVLRACSSTKA

SEQ ID NO: 201810 - protein, 57 aa, Oryza sativa
  Clone ID: PAT_MRT4530_9714C.1.pep
GESGEQARCPGRGGRPPSRRRRRPGPRRRTCRRREAERRAWGVISGEDFRRDLSPRA

SEQ ID NO: 201811 - protein, 437 aa, Oryza sativa
  Clone ID: PAT_MRT4530_97150C.1.pep
MTPGAPDPQDGPEATVGRPLLSSSDPEVIGTEDECAPRGHLDEERPGGTAPSEEDRPRRKVQRPVYFVSEALRDAKTRYPQAQKMLYAILMASKILRHYFQAHRVTVVTSYPLGQILHNREVDLVRRCRACQFHARQIHQPAQALQIIPLSWPFAVWGLDILGPFKRAPGGFEYLYVAIDKFTKWPEAYPVIKIDKHSALKFIKGITARFGVPNRIITDNGTQFTSELFGDYCEDMGIKLCFASPAHPRSNGQVERANAEILKGLKTKTFNILKKHGDSWIEELPAVLWANRTTPSRATGETPFFLVYGAEAVLPSELTLRSPRATMYCEADQDQLRRDDLDYLEERRRRAALRAARYQQSLRRYHQRHVRARSLCVDDLVLRRVQTRAGLSKLSPMWEGPYRVIGVPRPGSVRLATGDGTELPNPWNIEHLRRFYP

SEQ ID NO: 201812 - protein, 124 aa, Oryza sativa
  Clone ID: PAT_MRT4530_97151C.1.pep
MTVCLQHKGGGDVELGNSPASSNMVAADLVPLRLDLVPLSQSWHPHPDLAGVEYLARRQWEEGVDVSMLRDGQREADRCGRRWKEVVVGRGQCDAELGKPDGDRRTAGRAVRRRYGGCESKECS

SEQ ID NO: 201813 - protein, 1831 aa, Oryza sativa
  Clone ID: PAT_MRT4530_97152C.1.pep
MAEQAKAHDLSPSVSGDDGEPNPRHRARTPPLPPRQSPKRGEALERVEKSAASPVAGGAGERRDGERRLLVYGDGSTPQGALQAVGALLRHPPVVPDPESPAQRWLDDVANLVMTAQQRLGAGGRSATTKTSGVATTGSVSSRRRARRAAAAARHSATTPSSAPPTREDQHEEPDARLDIERRRSDRRAPRATEGASSSRVSPRHGREDQPSVPPVGGVGCRAFVASLRNVRWPPRFRPTITEKYDGSVNPTEFLQVYTTGIEAARGDDRVMANFFPMALKGQARGWLMNLPPASVHSWEDLCQQFTMNFQGTYPRPGEEADLHAVQRGDDESLRSYIQRFCQVRNTIPCIPAHAVIYAFRGGVRHNRMLEKIASKEPQTTAELFQLADRVARKEEAWTWNPSGSGVAASAAPGSAAQTGRRDRRRKKRSVHSGDEGHVLAVEGAPRATRKGRPASDKKKEAGTPSRERPASKWCSVHNTSLHDLADCRAVKNLAERTRKWEEDRRQERREGKSAAVPSGKRRSEARQKAPAVDIDDGDDDLGFQEPGATIATVDGGACAHVSRRSFKAMRRELLAAAPTHEATRRARWSEVALTFDQTDHPPCVARGGQIAMVVSPTICNVKLGRVLIDGGAALNILSPAAFDAIKAPGMVLQPSQPIIGVTPGHTWPLGHIDLPVTFGGSANFRTERVNFDVADLSLPYNAVLGRPALVKFMAAVHYAYLQMKMPGPGGPISVRGDLKVALACMEQRADHLAAATKPEGGDERLGTSAPTAPRQRIATCDEVPEDALVSFLRANADVFAWRPADMPGVPREVIEHRLAVRPGARPVRQKVRRQAPERQAFIREEVARLLEAGFIREVIHPEWLANPVVVPKANGKLRMCIDYTDLNKACPKDPYPLPRIDQIVDSTAGCDLLCFLDAYSGYHQIRMAREDEEKTAFITPVGTYCYTSMPFGLKNAGPTFQRTTRISLGSQIGRNVEAYVDDLVVKTRNQETLLSDLAETFENLRSARIKLNPDNKLRDVQCVTGCMAALSRFISRLGEKALPLFKLLKRSGPFTWTEEAEHALTQLKAYLSSPPVLVAPEPNEPLLLYLAATPQVVSAALVVERDEDNPHFVHPHSVLTWPGSERGGEAPESDGGLRPLTTGVGPLPACQTVLGAPDPQEGPKATAGRPHLTPSDPEANPVLTRPGKEQGEEAPESNGGQRPLTTGVGPLPACPTMPGAPDPQDGPEATEGRPPLSSSDPEVIGTEDKCAPKGHLNEERPGDTAPSREDRPHRKVQWPVYFVSEALRDAKTRYPQAQKMLYAILMASRKLRHYFQAHRVTVVTSYPLGQILHNREGTGRVVKWAIELSEFDLHFEPRHAIKSQALADFVAEWTPAPETVSIPEASTNPSQLPHTTHWVMQFDGSLSLQGAGAGVTLTSPTGDVLRYLVRLDFRATNNMAEYEGLLAGLRVAAGLGIRRLLVLGDSQLVVNQEQGVELLADIHAGECGAHSASRTLVGKAFRQGFYWPTALNDAVDLVRRCRACQFHAKQIHQPAQALQIIPLSWPFAVWGLDILGPFKRAPGGFEYLYVAIDKFTKWPEAYPVVKIDKHSALKFIKGITARFGVPNRIITDNGTQFTSELFGDYCEDMGIKLCFASPAHPRSNGQVERANAEILKGLKTKTFNILKKHGDSWIEELPAVLWANRTTPSRATGETPFFLVYGAEAVLPSELTLRSPRATMYCEADQDQLRRDDLDYLEERRRRAALRAARYQQSLRRYHQRHVRARSLCVDDLVLRRVQTRAGLSKLSPMWEGPYRVIGVPRPGSVRLATGDSTKLPNPWNIEHLRRFYP

SEQ ID NO: 201814 - protein, 1947 aa, Oryza sativa
  unsure (1)..(1947): unsure at all Xaa locations
  Clone ID: PAT_MRT4530_97153C.1.pep
MAEQAKAHNLSPSVSGDDGEPNPHRRARTPPPPPRQSPRREEALERVEGSETSTSTGDGEGRRDGERRLLVYGDGSTPQGALQAAGALLRHPPVVLDPESPAQRWLDDVANLVMTARQRLGAGGRSSATKTSGAATTGSVSSRRRARRAAAVARHSAATPSSAPPTREDQRGGPDARIDIERRRNGRRTAHATEGASSSGVSPQLGRGDQPSVPPVGGVGCRAFVASLRNVRWPPRFRPTIAEKYDGSVNPAEFLQVYATRIEAAGGDDRVMANFFPMALKGQARGWLMNLPPASVHSWEDLCQQFTMNFQGTYPRPXFCQVRNTIPCIPAHAVIYAFXGGVRHNRMLEKIASKEPQTTAELFQLADRVARKEEAWTWNPSGSGVAASAAPGSAARTGRRDRRRKKRSAHSDDEGHVLAVEGASRVTRKGRSASDKKKEAGAPSRERPTGRWCTVYNTSLHDLADCRAVKSLAERTRKWEEERRQERRGGKSPAVPSGNRRSEAKQKAPAEDIDDGDDDLGFQEPGATIATVDGGACAHVSRRSLKAMKRELLAAAPTHEATRRARWSEVALTFDQTDHPPCVARGGQIAMVVSPTVCNVKLGRVLIDGRAALNILSPVAFDAIKAPGMVLRPSQPIIGVTPGHTWPLGHIDLPVTFGGSANFRTERVNFDVADLSLPYNAVLGRPALVKFMAAVHYAYLQMKMPGPGGPISVHGDLKVALACMEQHADHLAAASKPKGGDERLGTSVPAAPRQRMITCDEVPEDALVSFLRANADVFAWRPADMPGVPREVIEHRLAVRPGARPVWQKVRRQAPERQAFIREEVARLLEAGFIREVIHPEWLANPVVVPKANGKLRMCIDYTDLNKACPKDPYPLPRIDQIVDSTAGCDLLCFLDAYSGYHQIRMAREDEEKTAFITPIGTYCYTTMPFGLKNAGPTFQRTTRISLGSQIGRNVEAYVDDLVVKTRNQETLLSDLAKTFESLRSARIKLNPDKCVFGVPAGKLLGFLVSARGIEANPEKIRAIERMRPPSKLRDVQCVTGCMAALSRSPPVLVDPEPNEPLLLYLAATPQVVSAALVVERDEDNPHSAHPHPVLAWPGREQGGEAPEPNGGPRPPTTGAGPLPACQTVPGAPDPQDGPGATAGRPHLSPSDPEVNPVPTRPGREQGEEAPEPNGGLRLPTTGVGPLPACPTTPGAPDPQDGPEATVGRPHLSSSDPEVVGTEDKCAPRDRLDEERPRHAAPGEEDRPHRKVQRPVYFVSEALRDAKTRYPQAQKMLYAILMASRKLRHYFQAHRVTVVTSYPLGQILHNREGTGRVVKWAIELSEFDLHFEPRHAIKSQALADFVAEWTPAPEPVSIPEASSGPSQLHHTAYWVMQFDGSLSLQGAGAGVTLTSPSGDILRYLIRLDFRATNNMAEYEGLLAGLRVAAGLGIRRLLVLGDSQLVVNQVRRMERHFDGIELRHVPRRDNTIADELSRLASSRAQTPPGAFEERLAQPSARPDPLGETDAPDRPPRPVGVQASGPEGSAPSSLRLIAWIAEIQAYLTDKTLPEDREGSERVQRISKLYVLIEGTLYRRAANGVLLKCIPREQGVELLADIHEGECGAHSASRTLVGKAFRQGFYWPTALNDAVDLVRRCRACQFHARQIHQPAQALQIIPLSWPFAVWGLDILGPFRRAPGGFEYLYVAIDKFTKWPEAYPVVKIDKHSALKFIKGITARFGVPNRIITDNGTQFTSELFGDYCEDMGIKLCFASPAHPRSNGQVERANAEILRGLKTKTFNILKKHGDSWIEELPAVLWANRTTPSRATGETPFFLVYSAEAVLPSELTLRSPRPTMYCEADQDQLRRDDLDYLEERRRRAALRAARYQQSLRCYHQRHVRARSLCVDDLVLRRVQTRAGLSKFSPMWEGPYRVIGVPRPGSVRLATGDGTELPNPWNIEHLRRFYP

SEQ ID NO: 201815 - protein, 419 aa, Oryza sativa
  Clone ID: PAT_MRT4530_97154C.1.pep
MARAAASRLAAAATSTSTLEMFSRHLAAASSAWGIASSRAPYPGRERRSASWWCPTRSFHATRGMNARDYYDVLGVNKDASASDIKKAYYLLAKKFHPDTNKEDADAEKKFQEVQHAYEVLKDDDKRETYDQLGAEAYERQASGGGPDDFSGSHPFGDIFGDMFDNPFAMRGGRDVKVPIKLSFMEAVQGCRKTIAYEADVFCDTCNGSGVPPGTVPQTCKACRGAGVIFMQRGIMSIETTCSRCGGSGKIVKNFCKTCKGEQLVKGKKSVKLDIMAGIDDNDTMKVFGKGGADVERNKPGDLYVTIKIREDPVFRREGNHVHVDAIISIAQAVLGGTVTVPTLTGNVSVKVRQGTQPGEKVVLRGKGIKARNSPAYGNQYIHFNVRVPTYVTQRQRELMEEFDKEECNEGERVAAASG

SEQ ID NO: 201816 - protein, 1939 aa, Oryza sativa
  Clone ID: PAT_MRT4530_97155C.1.pep
MAEQAKAHDLSPSVSGDDGEPNPRRRARTPPSPPRRSPKQGEALEKVDKSMASPVAGGAGGRQDGERRLLVYGDGSTPQGALQAAGALLRHPPVVHDPESPAQRWLEDVANLVMTAQQRLGAGGRIATTNTSGAATTGSVSSRRRARRAAAAARHSAATPSSTPSTREDQRGEPDARLDIERRRNNRRTPRATEGASSSRVSPRHGREDQPSVPPAGGVGCRAFVASLRNVRWPPRFRPTITEKYDGSVNPTEFLQVYTTGIEAAGGDDRVMANFFPMALKGQARGWLMNLPPASVHSWEDLCQQFTMNFQGTYPRPGEEADLHAVQRGDDESLRSYIQRFCQVRNTIPCIPAHAVIYAFRGGVRHNRMLEKIASKEPQTTAELFQLADRVARKEEAWTWNSSGSGVAASAAPGSAAQTGRRDRRRKKRSDRSGDEGHVLAVEGAPRATRKGRPASDKKKEAGTPSRERPAGRWCSVHNTSLHDLADCRAVKNLAERTRKWEEDRRQERREGKSPAVPSGKRRSEAKQKAPAVDIDDGDDDLGFQEPGATIATVDGGACAHVSRRSFKAMKRELLAMAPTHEATRRARWSEVVLTFDQTDHPPCVARGGQIAMVVSPTICNVKLGRVLIDGGAALNILSPAAFDAIKAPGMVLQPSQPIIGVTPGHTWPLGHIDLPVTFGGPANFRTERVSFDVADLSLPYNAVLGRPALVKFMAAVHYAYLQMKMPGPGGPISVRGDLKVALACMEQRADRLAAASKPEGGDERLGPSAPTAPRQRMATCDEVPEDALVSFLRANADVFAWRPADMPGVPREVIEHRLAVRPGARPVRQKVRRQAPERQAFIREEVARLLEAGFIREVIHPEWLANPVVVPKANGKLRMCIDYTDLNKACPKDPYPLPRIDQIVDSTAGCDLLCFLDAYSGYHQIRMAREDEEKTAFITPVGTYCYTSMPFGLKNAGPTFQRTTRISLGSQIGRNVEAYVDDLVVKTRNQETLLSDLAETFENLRSARIKLNPDNKLRDVQCVTGCMAALSRFISRLGEKALPLFKLLKRSGPFTWTEEAEHALTQLKAYLSSPPVLVAPEPNESLLLYLAATPQVVSAALVVERDEDNPHSAHPHSVPTWPGSKQGGKVPESNGGLRPLTTGDGPLPACQTVLGAPDPQEGPEATAGRPHLTPFDPEANPVLTRPGKEQGEEAPEPNGGQRPLTTGVGPLPACPTMPGAPDPQDGPEATVGRPLLSSSDPEVIGTEDDCAPRGHLDEERPGGTAPSREERPHRRVQRPVYFVSEALRDAKTRYPQAQKMLYAILMASRKLRHYFQAHRVTVVTSYPLGQILHNREGTGRVVKWAIELSEFDLHFEPRHAIKSQALADFVAEWTPAPETVSMPEASTNPSQLPQTAHWVMQFDGSLSLQGAGAGVTLTSPNGDVLRYLVRLDFRATNNMAEYEGLLAGLRVAAGLGIRRLLVLGDSQLVVNQVCKEYRCSDPQMDAYVRQVRRMERHFDGIELRHVPRRDNMIADELSRLASSRAQTPPGAFEERLTQPSARPDPLGETDAPDRPPRPVGVQASGPEESVPSSLRLIAWISEIQTYLTDKTLPEDHEGSERVQRISKRYVLVEGTLYRRAANGILLKCIPQEQGVELLADIHEGECGAHSASRTLVGKAFRQGFYWPTALNDAVDLVRRCRACQFHAKQIHQPAQALQIIPLSWPFAVWGLDILGPFKRAPGGFEYLELFGDYCEDMGIKLCFASPAHPRSNGQVERANAEILKGLKTKTFNILKKHGDSWIEELPAVLWANRTTPSRATGETPFFLVYGAEAVLPSELTLRSPRATMYCEADQDQLRRDDLDYLEERRRRAALRAARYQQSLRRYHQRHVRARSLCVDDLVLRRVQTRAGLSKLSPMWEGPYRLIGVPRPGSVQLATGDGTELPNPWNIEHLRRFYP

SEQ ID NO: 201817 - protein, 67 aa, Oryza sativa
  Clone ID: PAT_MRT4530_97156C.1.pep
EIDQQYQHKWSYLLAIRSDRHSKLQKVQSTFCPLLLLIVKSIFKSVRLTLDKQSFSRKRNRFKTDIS

SEQ ID NO: 201818 - protein, 1358 aa, Oryza sativa
  Clone ID: PAT_MRT4530_97157C.1.pep
MTAQQRLGAGGRSATTRTSGAATTGSVSSRRRARRAAAAARHLATTPSSAPPTREDQHEEPDARLDIERRRSDRRAPRATEGASSSRVSPRHGRKDQPSVPPVGGVGCRAFVASLRNVRWPPRFRPTITEKYDGSVNPTEFLQVYTTGIEAAGGDDRVMANFFPMALKGQARGWLMNLPPASVHSWEDLCQQFTMNFQGTYPRPGEEADLHAVQRGDDESLRSYIQRFCQVRNTIPCIPAHAVIYAFRGGVRHNRMLEKIASKEPQTTAELFQLADRVARKEEAWTWNPSGSGVAASAAPGSAAQTGRRDRRRKKRSVHSGDEGHVLAVEGAPRATRKGRPASDKKKEAGTPSRERPASKWCSVHNTSLHDLADCRAVKNLAERTRKWEEDRRQERREGKSAAVPSGKRRSEAKQKAPAVDIDDGDDDLGFQEPGATIATVDGGACAHVSRRSFKAMRRELLAAAPTHEATRRARWSEVALTFDQTDHPPCVARGGQIAMVVSPTICNVKLGRVLIDGGAALNILSPAAFDAIKAPGMVLRPSQPIIGVTPGHTWPLGHIDLPVTFGGSANFRTERVNFDVADLSLPYNAVLGRPALVKFMAAVHYAYLQMKMPGPGGPISVRGDLKVALACMEQRADHLAAATKPEGGDERLGTSAPTAPRQRIATCDEVPEDALVSFLRANADVFAWRPADMPGVPREVIEHRLAVRPGARPVRQKVRRQAPERQAFIREEVARLLEAGFIREVIHPEWLANPVVVPKANGKLRMCIDYTDLNKACPKDPYPLPRIDQIVDSTAGCDLLCFLDAYSGYHQIRMAREDEEKTAFITPIGTYCYTSMPFGLKNAGPTFQRAPDPQDGPEATEGRPPLSSSDPEVIGTEDKCAPKGHLNEERPGDTAPSREDRPHRRVQRPVYFVSEALRDAKTRYPQAQKMLYAILMASRKLRHYFQAHRVTVVTSYPLGQILHNREGTGRVVKWAIELSEFDLHFEPRHAIKSQALADFVAEWTPAPETVSIPEASTNPSQLPHTTHWVMQFDGSLSLQGAVDLVRRCRACQFHAKQIHQPAQALQIIPLSWPFAVWGLDILGPFKRAPGGFEYLYVAIDKFTKWPEAYPVVKIDKHSALKFIKGITARFGVPNRIITDNGTQFTSELFGDYCEDMGIKLCFASPAHPRSNGQVERANAEILKGLKTKTFNILKKHGDSWIEELPAVLWANRTTPSRETGETPFFLVYGAEAVLPSELTLRSPRATMYCEADQDQLRRDDLDYLEERRRRAALRAARSQQSLRRYHQRHVRARSLCVDDLVLRRVQTRAGLSKLSPMWEGPYRVIGVPRPGSVRLATGDGTELPNPWNIEHLRRFYP

SEQ ID NO: 201819 - protein, 111 aa, Oryza sativa
  Clone ID: PAT_MRT4530_97158C.1.pep
ASAHGWGSFPAGGSWCCGSPRWWSPPPRRATSPSSTRATSRPGTPSRPCASRGRTPRRSLPAPPPPPPQPSPIQPRRRRAPPATMWQPRPLVPARAARRCGCSREFTRRRS

SEQ ID NO: 201820 - protein, 49 aa, Oryza sativa
  Clone ID: PAT_MRT4530_97159C.1.pep
HAYHALESLDPFRFFFFFFFWFRPNKYHHPTCQPYFTLGIPSYPAKKGR

SEQ ID NO: 201821 - protein, 1587 aa, Oryza sativa
  unsure (1)..(1587): unsure at all Xaa locations
  Clone ID: PAT_MRT4530_9715C.1.pep
EKELAALKGEAPPQKARIRLTARKRALFVPRYQLAPKIRVVEKEVAPAQADPPVIIISSDEEEEPKRNNSKFEWVAIKDEEDEPNEPSIDLLCSEELEXLFPRFLFLSCPCQMVNTRSNGNGPNLNNPNNNNNGENPTLAQVLAQQTQLMHMMMQQLQNQQNQGNNHAPPQNKLAEFLRVRPPIFSSTTNPVEAGDWLHAIEKKLDLLQCTDQEKVSFASHQLHGPASEWWDHFRLNRTTAEPITWLEFTAAFRKTHIPSGVVSLKKKEFRSLTQGSRSVTEYLHEFNRLARYAPEDVRNDEERQEKFLEGLNDELSYPLMTGDYYDFQKLVDKAIRQEDKYNRMEQKKRRIAQFKTQQGNNQKPRLTLGPQSMPQGGSSSVVRPQRQFFNNNAGNNIRNQALRPVAVSTQQQPAKKEQGSKPVVCFNCGDPGHYADKCPKPRRVKVVPAQSNSTAPASKARVNHVAAAEAQDAPDVILGTFLVNSVPATVLFDSGATHSLLSMSFAGNHGMEVEDLRRPLMVSTPSNQALSLQRSPSVRIEIQGVSFLANLILLESKDLDVILGMDWLARHKGVIDCANRKVTLTSNDGRVVTVHALSSESLRSRLNQITLEEIPIVREYPDVFPDDLPGMPPKRDIEFRIDLVPGTTLIHKRPYRMAANELAEVKRQVDDLLQKGYIRPSSSPWGAPVIFVEKKDHTQRMCVDYRALNDVTIKNKYPLPRIDDLFDQLKGATIFSKIDLRSGYHQLRIKEEDIPKTTFTTRYGLFECTVMSFGLTNAPAFFMNLMNKVFMEYLDKFVVVFIDDILIYSRTKEEHEEHLRLALEKLREHQLYAKFSKCEFWLSEVKFLGHVISAGGVAVDPSNVESVTNWKQPKTVSEIRSFLGLAGYYRRFIENFSKIAKPMTRLLQKDVKYKWSEECEQSFQELKNRLISAPILILPYPKKGFQVYCDASKLGLGCVLMQDGKVVAYASRQLRPHEKNYPTHDLELAAVVHALKIWRHYLFGTRTEVYTDHKSLKYIFTQSDLNMRQRRWLELIKDYDMGIHYHPGKANVVADALSRKGYCNATEGRQLPLELCKEFERLNLGIVSRGFIAALEAKPTLIDQVREAQINDPDIQEIKKNMRRGKAISFLEDEQGTVWLGERICVPDNKDLKDAILKEAHDTLYSIHPGSTKMYQDLKERFWWASMKREIAEYVAVCDVCQRVKAEHQKPAGLLQPLKIPEWKWEEIGMDFITGLPRTSSGHDSIWIIVDRLTKVAHFIPVKTTYSGSRLAELYMARIVCLHGVPKKIVSDRGSQFTSNFWKKLQEEMGSKLNFSTAYHPQTDGQTERVNQILEDMLRACALDFGGSWDKNLPYAEFLYNNSYQASLQMAPYEALYGRKCRTPLLWDQTGERQVFGTDILREAEEKVKIIQERLRVAQSRHKSYADNRRRDLSFEEGDYVYLRVTPLRGVHRFHTKGKLAPRFVGPYKIISRRGEVAYQLELPQSLAGVHNVFHVSQLKKCLRVPTEEANLEQIEVQEHLTYVEKPIRILEIDERRTRNRVIHFCKVQWSNHSEEESTWEREDELKSAHPHLFASSSESRGRDSV

SEQ ID NO: 201822 - protein, 39 aa, Oryza sativa
  Clone ID: PAT_MRT4530_97160C.1.pep
HDGGRCTNGPYPCRMIAETTLLLKQISRLRLNSTVHSFS

SEQ ID NO: 201823 - protein, 102 aa, Oryza sativa
  Clone ID: PAT_MRT4530_97161C.1.pep
SKPAAGGRSGCGPTADERTGAARRTAEKAGEAGGDLAPRCVQGAPGAVEFLLSVVKEQHATTVDKTTSTPLVRSFQKETTCGVQDLAKVSSPEEAALSILHA

SEQ ID NO: 201824 - protein, 71 aa, Oryza sativa
  Clone ID: PAT_MRT4530_97162C.1.pep
IIGKDNPKPVVDHAIASKECKKMMGKAYASNRLDDDKPDKGKSSNSSRRKLSAGSQVTPNSSKTKQLKKSS

SEQ ID NO: 201825 - protein, 85 aa, Oryza sativa
  unsure (1)..(85): unsure at all Xaa locations
  Clone ID: PAT_MRT4530_97163C.1.pep
RALATSGRGCERTFAAGYEGKFPDRIKQLPWDRXFDINNGKRTGLGGAGRDPSTRHAEAGWTAVINGRRDMRKDPSRLRVEEEHH

SEQ ID NO: 201826 - protein, 508 aa, Oryza sativa
  Clone ID: PAT_MRT4530_97164C.1.pep
MAVRSEAVGFGKPWPQEEQIRWSRPPGDWIRRSYGEKARRRRGNGEEESAPPGRELGGSKEERAPLWTKRGGAAMSPGETLEERSEEHLKNLTSIDLSYNNLTGDFPTVLYACSALELLDLSNNQLSGRLPDDIDKLSSDMQHLNLSNSIVPISVIAGGVVIFAVGCVVASCRCRARNDDMTPIVLSDKMEDHLVHNAVDVNRISSTGTTTGDPLYRLGVINDSSDTYRRLTVKKMQNETRSVDAELENRRQTEETTLGMIVHPNIIILLGYIRRNEMILILYEDMENGSLDKWIHHNTQAGERRLRPPLGWRKRLAIVIDVAGAILYMHHGCRRPIIHGDIKPANILLDGNFKAKISGFSYARINLAGRNTLLGNVRLHAGAFGYFAPEYADTEVSEKVDVYSFGVVLLEIVTGKVVNDQHGHLTTWAKAYLNTWARQGYDDKLFTDDVLDNDIASDAARYLKEMKAVFKLGVECTMMDPQRRPSMQTVLRRLRQCARWWRRFPCFV

SEQ ID NO: 201827 - protein, 559 aa, Oryza sativa
  unsure (1)..(559): unsure at all Xaa locations
  Clone ID: PAT_MRT4530_97165C.1.pep
MMDSMGLPFSSINFRASALNVNNQSKMDCFPLASREVICTDQSGRAFLVNADTXRVRSHDGYGSSLFVMERIPKPELGFNSDQFEAFVYRKSTLSSYRKAWHCHXLPPPPFVCEPKHCHSCCSSPDPEISSYAVLGGGSHICLSVNGIGTYCLETASHSWSXLAKWTLPFHGRIDYVPEFNLWFGLSAEARRLAAADLSAMDSQPQLVGPWKELNLPEEWRECKDPQLVNLGSGRFCIARFFRSNSDFGNEPIAVFTGVELALEEKRRKRPSKRFVNDDALGDHMVSSDEINQLEDGLADDSDLDTGASSNLGDDGAINIDSDANLDNDGAVDLDHDTDLDDDTGIDLDVVGAELNIDDAAIDLDDDAAINLDNFDPMDIYNMDDFLAELVFLDEYSEQIIIRMKDKITAEPSHCQRQSGTRPYIPRNQEDGNEDLVANYFSESPIYTDEMFHRRFRMRRPLVNGLLILLIEWMPLFTVNGNQYNTGYYLADGIYPEWKTFVKTIQLSQTDEDILYAARQEEERKDVERAFVEDEKEMTEIPLDLNENPGASIVLPPEI

SEQ ID NO: 201828 - protein, 53 aa, Oryza sativa
  Clone ID: PAT_MRT4530_97166C.1.pep
SCRLNGAEENGLFVVDIGMLGAAEPRMTVYADLPMTVDNGVNAPKVMLRHIGS

SEQ ID NO: 201829 - protein, 69 aa, Oryza sativa
  Clone ID: PAT_MRT4530_97167C.1.pep
MRCGVVMVIKRWRRLAGRPGRLGGWPHSLAPAALPGGGAEKARSRGLSWADSSSGLYAPVLSCVTAESA

SEQ ID NO: 201830 - protein, 350 aa, Oryza sativa
  Clone ID: PAT_MRT4530_97168C.1.pep
MSCEQQQKQHPPWEERCVGGGERKKKRLKIDYIAGQDAQSTLQVLFLPSSQLSPGSCFEDILSMSPSTIDFSRRFLNLIVGNRTPGVKSLWCFDLMRQQLFYPATPPPPHKVEEFWQKFRPPGTMMDSMGLPFSCFTFRASALNVNGQSRMDCFPLAGGEVICMDQSGRAFLVDADACQVGTMPSLHKPKSMPLAVFVPNAKADNDYDHDGYGSSLFVMERIPKPELGFNSDQFEAFIYRKPTISNYTKAWHCHQLPPPPFVREPKHWHSCSNPEISSYAVLGGGSHICLSVNGIGTYCLETASHTWSQVGKWTLPFHGRIDYVPEFNLWFGLSAEARRLAAADLSAMDS

SEQ ID NO: 201831 - protein, 918 aa, Oryza sativa
  Clone ID: PAT_MRT4530_97169C.1.pep
MEGSLVQSAIAPTIYRRSGTARFRVRARATMMRTMPTRTLTLGGFQGLRQTNFLDSRSVIKRDFGSIVASQISRPRGLGSRGVVRAMFERFTEKAIKVIMLAQEEARRLGHNFVGTEQILLGLIGEGTGIAAKVLKSMGINLKDARVEVEKIIGRGSGFVAVEIPFTPRAKRVLELSLEEARQLGHNYIGSEHLLLGLLREGEGVAARVLESLGADPNNIRTQVIRMVGESTEAVGAGVGGGSSGQKMPTLEEYGTNLTKLAEEGKLDPVVGRQDQIERVTQILGRRTKNNPCLIGEPGVGKTAIAEGLAQRISNGDVPETIEGKKVITLDMGLLVAGTKYRGEFEERLKKLMEEIKQNDDIILFIDEVHTLIGAGAAEGAIDAANILKPALARGELQCIGATTLDEYRKHIEKDPALERRFQPVKVPEPTVDETIQILRGLRERYELHHKLRYTDDSLIAAAQLSYQYISDRFLPDKAIDLIDEAGSRVRLRHAQLPDEAKELDKELRQVTKDKNEAVRGQDFEKAGELRDREMELKAQITAIIDKSKEMVKAETESGEVGPLVTEADIQHIVSSWTGIPVEKVSSDESDRLLKMEETLHTRIIGQDEAVKAISRAIRRARVGLKNPNRPIASFIFSGPTGVGKSELAKALAAYYFGSEEAMIRLDMSEFMERHTVSKLIGSPPGYVGYTEGGQLTEAVRRRPYTVVLFDEIEKAHPDVFNMMLQILEDGRLTDSKGRTVDFKNTLLIMTSNVGSSVIEKGGRKIGFDLDYDEKDTSYNRIKSLVTEELKQYFRPEFLNRLDEMIVFRQLTKLEVKEIADIMLKEVFDRLKAKDIDLQVTEKFRDRVVDEGYNPSYGARPLRRAIMRLLEDSLAEKMLAGEVKEGDSAIVDVDSEGKVIVLNGGSGVPEPLAPALSV

SEQ ID NO: 201832 - protein, 70 aa, Oryza sativa
  Clone ID: PAT_MRT4530_9716C.1.pep
TLPPEDSLKQYSTKIKFKHLQPKSNFSKFIFILHPELPFMLKIEFRILKLTIISYLSTENPCRCSTVVHL

SEQ ID NO: 201833 - protein, 62 aa, Oryza sativa
  Clone ID: PAT_MRT4530_97170C.1.pep
MAGSYDEHVGTVVVGQAEVGDCVGSMDVFDAVGEEERQGDDAAITFIGGFGARSRHVAGLAM

SEQ ID NO: 201834 - protein, 676 aa, Oryza sativa
  Clone ID: PAT_MRT4530_97171C.1.pep
MASTAGAGRPPWDPTVSLRLGHPALVLLERCGGGARPFKAILAHMLRLRLAFETFPMSRLLHFATVSFPHHARAAETLFEHFTPRPNLYIYNLMLSSAAAAAAAASSSPSRRPAALYMSMLASSIHPDEQTFLSLLKSVDAERRSVGKQVHAHVVVTGLHSRVYLRNSLIKMYLDAGDVEAAEAMFRCAPTADAVSCNIMLSGYVKGGCSGKALRFFRGMASRGIGVDQYTAVALLACCGRLKKAVLGRSVHGVVVRRIGVADRGLILSNALLDMYAKCGEMNTAMRVFDEAGERDGISWNTMVAGFANAGLLDLASKYFGEAPARDIISWNALLAGYARYEEFSATMILFHDMLASSVIPDKVTAVTLISAVAGKGTLNSARSVHGWVVKEHGTQDSFLASALVDMYCKCGSIKLAYAVFEKAVDKDVTLWTAMISGLAFHGHGDVALDLFWKMQAEGTEPNGVTLVAVLSACSHAGLFDEGCKIFDTLKQRFNIEPGVEHFGCMVDLLARSGRLSDAVDLARRMPMKPSRSIWGSILSASSACQNTEVAEIASKELLCLEPAEEGGYVLLSNMYAAEGQWNYSNEVRENMERKGVRKSADTETAKYKELSMVTNFPYFSSPPEHIKCISALTICIIMLASPLGKCIRAVEKTDVLLNFHSLHTTPSILDKYKHS

SEQ ID NO: 201835 - protein, 175 aa, Oryza sativa
  unsure (1)..(175): unsure at all Xaa locations
  Clone ID: PAT_MRT4530_97172C.1.pep
QLHNYTLSNSXFKYYNHLQNNXSNXPXXNTKKXNXPTNIYXPKSSLSQPSTKXQTNQKXNXXXXXKPXKTTFLXXHPXNQTXXXXXXXXXXHXXLPXPPPRSPVPRTRLGISVTGNRRVESRGSPAWCVRGCRRFYEGLHPAWGWIGLGLGAEAAAAARRRRGGRRRRREEEEEI

SEQ ID NO: 201836 - protein, 100 aa, Oryza sativa
  Clone ID: PAT_MRT4530_97173C.1.pep
FNTTHNFFKVAKPPHIFQKKKSRIDFLPLVPKGPLTPTPGVLKKTQTLMAFPPRKIFDHFFRPWFPSKFPTRKIFLGPCKILMWTVCFTLCFFSITLFLS

SEQ ID NO: 201837 - protein, 94 aa, Oryza sativa
  Clone ID: PAT_MRT4530_97174C.1.pep
QKNVSFWRLPYLSHLDLSNNKLSVVDGLVNDSAVSSPKVKFLSLASSLGHDTLLPLADDKSPPMQTSWEWDMDIPIVTALVVSWSPTPLGLPNP

SEQ ID NO: 201838 - protein, 78 aa, Oryza sativa
  unsure (1)..(78): unsure at all Xaa locations
  Clone ID: PAT_MRT4530_97175C.1.pep
XXXXFXXXFTRECIHASAXQINRYINNTXAIMLITDIVRGXSAALGLLQAAAAAPLXVXXAVPGXHRAEGRPXPXSPA

SEQ ID NO: 201839 - protein, 85 aa, Oryza sativa
  Clone ID: PAT_MRT4530_97176C.1.pep
LLPTQMRFTRSCVQWSNGGDHPISKRTNSQIFQRPKDPSWLPKYGGLLDHESDHLKLHVRRRPHILEVALAIMLLFPADALLGAV

SEQ ID NO: 201840 - protein, 127 aa, Oryza sativa
  Clone ID: PAT_MRT4530_97177C.1.pep
MGILLHIVPKDFHMVCQLRDRIRDRNMIHRRKIFIPRHDIRHLPMTQKDRNSPRSSNTPKSSSPFNHNSFRDLKGRRGLGEAQCKPQPYLHCALEDPLEDRDQRTQADDPRVHAVVWLEGGKEQGQG

SEQ ID NO: 201841 - protein, 89 aa, Oryza sativa
  Clone ID: PAT_MRT4530_97178C.1.pep
PLPSKWNPLKRIQSNRPAKYISVPSGSKGVSLDQPGVSVRLVIQFLVITQFFCIIHVNFGKIQTVDNGMLYACPVDEKCFLQINYDPGG

SEQ ID NO: 201842 - protein, 932 aa, Oryza sativa
  Clone ID: PAT_MRT4530_97179C.1.pep
MAIHAPMRRCGEISGVIHAAMRRWGETSGNLTPSMVKSTAPSLILNRSTPIQFPANPFKTFRGLLRIAQAIELIRLEDPQNSEWTLVSRKSKKQTAVRSKPVKSVSSPKMVNPPRVSSSLKPNITKSLDLSLVRSPKVADSKFQTKNVIPVKSVFARLRFPEITAGKTPVRVQGNCDPPLSADKKKNSILDRPKTPPFCDRCLSHGHREFECVNRVKCASYRKLDHRAAVFWNKKKAQVWRPRTVSKPDVGGAGFGKEIVCFMNQGNPSSSSHQRQSVPLLFLASSPSASPSASMAVVNPDPALFLPPTLQLYGPWDHQLEHVDLCLQEDPPRRNEGMAVACIEPPPTPDQFEGFRQLVMPDIMPGDEDLPPVNHIPIPDPVLQPASHVEVFGDNMQEDAPANQQISQNSALSVVAGSHNMFALLAAVLLVVGVEDTELVLLSAFLEEKQKEKRRSSRINKLTEGYMSPDPNLGIGKPRGKSAKRLKLLAEQSVLDGLLIPVWYLLVIYHFLILLVPVINEWGASGGLFVGWNSAHFNGQVVDQTDHAIIMQFSARVSPDTFNLVNVYGPSSGPQRDDFVHWMNGLDIYLNENWIFTDFEKAFDMIEHPAVLQIMTSMGFPPKWIELVQLLFSSASTSVLLNGVPGKFFPCKRGVRQGDPLSPLLFAIGADILQAIVNKGHQRGVFKLPIPVIGDQNFPIVQYADDTLLFMQASGKRLLALKALLNTVTLSTGLKVNYAKSCLIPLNLDEEKADCLAKTFGCVLGSLPFTYLGLPLSCSKHKLPVAVIENIDRVRRHFRWRGKDLTSTKKSLAAWGKVCRPKKKGGLGVIDLILPQNASVCGSFWWKDIVQFEVLFRGFARPTINSGSSVSFWYDLCNGKVFAQVYPTLFSFVRHKNDFVQQHLQRAVDDQFYLPLSVQAYDEYKLYLEDIA

SEQ ID NO: 201843 - protein, 1527 aa, Oryza sativa
  unsure (1)..(1527): unsure at all Xaa locations
  Clone ID: PAT_MRT4530_9717C.1.pep
MSSSFVDNNFNTNLNQGFPASTMLVWTQVGEIVFPVYTTMLISAGPSMTGNENAVATNQNDSMSKDPPAEAENGTSMTSELEKDSKAAKPCHSDKNHEPTRITSEATRDKDKERGATPTSDRFVGVIDIGPHEPSVLHLLEDYGSSTASAPREVLAINDVGTSARTNAEAENQVATPAQHIRAVDAILRETPYDPVLNDDLARWTERLRESVTNLSNAFEEAAAAAHPEQPPTGDANDRHPRRTHDRRQPTAPSAGCRAFSRSLRDVRWPERFRPGAIEKYDGSTDPKEFLQVYSTVLYAAGADDNALANYLPTALKGSARSWLMHLPPYSISSWADLRQQFVANFQGTYKRHAIEDDLHALTQNSGESLREYVWRFNECRNTISEITDASVIHAFKSGVRDCYTTQELATRRITTTQRLFKIVERCAHADDALRRKNDKPKTGGEKKPATDTPESSKKKNRKNGKRKAQAEVLAAEYTNPPKRPDPQSSDAKKTWCPIHKTDKHSLEDCLSFKKSLEKHIAFEKGKLPSSQDDIRSWSNPLFGTEQITFDVAKFDTAYNAIIGRTALAKFMAASHYAYQVLKMPGPKGTITIQGNAKLAVQCDKRSLDMVEQTPSPPATTEPPKKPSDMPGVPREVIEHKLMVRPDAKPVKQRLRRFASDRKQAIREELDKLLKAGFIREVLHPEWLANPVMVRKANGKWRMCVDFTDLNKACPKDHFSLPRIDQLLDSTAGCELLSFLDAYSGYHQINMAKENKEKTAFITPFGVFCYVKMPFGLITVGNTFQGTVQGALSDQLGNNVEAYVDDIVVKTKTSDSLIDDLRETFDNLRRYRLMLNPEKCTFGVPSGKLLGFLVSGRGIEANPEKIKAIENMKSPTRLKEVQKLTGYMAALSRFVARMGKRGQPFFALLKKQDKFVWTQEAEEAFVVLKRYLSNPPVLVTPQPNEELFLYIAAMPYSVSTVIVVEREKVQRPVYYVSEALHDAKTRYPHIQKLLYAVIMTSRKLRHYFQAHRVTVVSSFPLAIKSQVLADFVADWTMPDNKSDNQVDTETWTMAFDGALNSQGAGAGFILTSPFGDQFKHAIHLNFRVTNNTAEYEGLLAGIRAAAALGVKRLIVKGDSELVANQVHKDYKCSNPELSKYLAEVRKLEKRFDGIEVQHVYRKDNIEPDDLARRASRREPLEPGIFLDILTKPSVKVVSGEVSPAAPDISSEATKAERAVADIETTDDWRIPLIKFIDSEELPEDDTEAEKITLKAKIYCMVGNDLYKKAPNGVLLKCVSSDDGRHLLLDIHEGICGSHAAGRTLVGKAFRQWFFWPTALKDACDMVQQCEACQLHSXTHKATRASAPDYPSYLAILVLGARYTWAIPTWTGRLQVPIXVAIDKFTKWIEAVPTGEIKADNAIKFIKGIFCRYGLPHRIITDNGSQFISTDFQDYCIGLGVKICFASVSHPQSNGQVERANGIVLQGIKTRVYDRLMSHDKKWVEELSSVLWAVRTTPTMSNKETPFFLVYGSEAMLPSELRHQSTRV

SEQ ID NO: 201844 - protein, 145 aa, Oryza sativa
  unsure (1)..(145): unsure at all Xaa locations
  Clone ID: PAT_MRT4530_97180C.1.pep
FFRGKEDAANICARGHYTIGKEMVDLRLDRIRKLADNCTGLQGFLGFNAVAGGTVYRFVSLILERVSADYGRKSTLGFTVYPIAHVFTYEGEPYNSVLYTHSLVEHTDDTVLVDNEAIHDMXRRXLDIEQTTYTNLNRVVSQVIC

SEQ ID NO: 201845 - protein, 280 aa, Oryza sativa
  Clone ID: PAT_MRT4530_97181C.1.pep
MAVVNPDPALFLPPTIQLHEPWDHQLECVDLCLQEDPPRRNEGMAVACIEPPPTPDQFEGFQQLAVNYVQNVLGYHVLEVNHHPMEFLYVRVASALLRDTLIAGGPYEVDNQFMLCFVPHDLTSSCRNSPFTVEGWVMFLDFPLDFKTPTVIDKAVSLFGKVVKVQLDDNIRGSLLVKALYSSALEVPKRIVIKRAAAFGGVGRSWTVSVFLCHGEMPDIMPGDEDLPPVNHIPIPDPVPQLAHHVEVFGDNMQEDAHANQHISQNSALSVVAGSHNMVL

SEQ ID NO: 201846 - protein, 100 aa, Oryza sativa
  Clone ID: PAT_MRT4530_97182C.1.pep
AAELLMDGALCTVSFPKCPSSTDPFISMGKLWSVDAPVPQSSLYPSPVLKCPSAPDPPRSDEAGEEVEGTAEVNVDGSLVAGSGSHFHGRCTSCRSAMAS

SEQ ID NO: 201847 - protein, 518 aa, Oryza sativa
  Clone ID: PAT_MRT4530_97183C.1.pep
MGDFNFYRSINNRNRPCADMSDIYLFNELISNLGLIEVPLKGRSFTWSNMQDNPLLEQLDWVFITPNWSISYPNTMVLALSKHISDHVLLMIQVKTSIPKANLFRFENFWVQHDGFLQQVENAWLSIQNASSNALAISAKFKQLRRNLKCWRKFFPCKRGVRQGDPLSPLLFAIGVDILQTIVNKGHQRGVFKLPIPVIGDQNFPIVQYADDTLLFMQASGKQLLALKALFNTVTLSTGLKVNYAKSCLIPLNLDEEKADCLAKTFGCAQGSLPFTYLGLPLSCSKPKVVDFSPLTNRIERRLVATSSFLSYGDRLTLVNSVLSAMPTYYMCSLQLPVAVIENIDRARRHFLWRGKDLTSTKESLAAWGKVCRPKKKGGLGVIDLRVQNRALLLKQLGKFFNQHMQIPWVKLIWNSYYSRTLPQNASVCGSFWWKDIVQFEVLFRGFARPTINSGSSVSFWHDLCNGKVFAQVYPTLFSFVRHKNDSVQQHLQRAVDDQFYLPLSVQAYDEYKLDYLS

SEQ ID NO: 201848 - protein, 135 aa, Oryza sativa
  Clone ID: PAT_MRT4530_97184C.1.pep
HISTNYKKETFEEEKKQNQIFISGSRLAVSRIPLNTLLDHTTISTIMLPLKIQELGRCFNQEHKFHPLTTIHTKSTKVVSLTISEATFNPNLADYLSILTKSQLVNQKKELSKLTINPYPESTSSTNFPTRQEIK

SEQ ID NO: 201849 - protein, 124 aa, Oryza sativa
  Clone ID: PAT_MRT4530_97185C.1.pep
MASVGFGSRVAAAGVAPSASSSSAGRRRPSRVAMAVGATRGKPAPAEEERRRRGRRRRRLQPRRPLRQERLKNPFEFYVRIYSNAERQLAYTIDVLPSSSSNSLIQTPSLIWRMICVYVATCEV

SEQ ID NO: 201850 - protein, 119 aa, Oryza sativa
  Clone ID: PAT_MRT4530_97186C.1.pep
MASVGFGSRVAAAGVAPSASSSSAGRRRPSRVAMAVGATRGKPAPAEEEKSLADFIFGFIFKKDQLVETDPLLNKVDGAPPSGSTVSRKAPAKKPAASAADEEGGGGGFNLGALFAKKG

SEQ ID NO: 201851 - protein, 147 aa, Oryza sativa
  Clone ID: PAT_MRT4530_97187C.1.pep
MSTEEIVQNGKRWMSEEVMLAFEKYIEGRDEFRDVVYRLDELQHQCFSVDAYQKVFHHYNFTVKMKKPPLEDWLLTCYFAEVKPIYGKKSYLCRPLKPRDHGYCHGCVNQGMVALKHPDNDEVEFEVGYFNPGCPFIYLRDDDSDDP

SEQ ID NO: 201852 - protein, 644 aa, Oryza sativa
  Clone ID: PAT_MRT4530_97188C.1.pep
MAVGKNKRISKGKKGSKKKTVDPFAKKDWYDIKAPSVFNVRNVGKTLVSRTQGTKIASDGLKHRVFEVSLADLQNDEDQAYRKIRLRAEDVQGKNVLTNFWGMSFTTDKLRSLVKKWQTLIEAHVDVKTTDNYMLRLFCIGFTKRRPNQVKRTCYAQASQIRQIRRKMVEIMVNQASSCDLKELVSKFIPEVIGKEIEKSTSSIFPLQNVFIRKVKILKAPKFDLGKLMEVHGDYKEDVGMKLDRPAETDEAVAGELPFTSAKRREVALDLKSSQGSSKSLQSDASYTATAEDDIQAVARALIIIAAKFHEAILQLAELKAFLDSCMEEIEGCIITSSCPKAQGYMNLQNKMYEKGHEQAVAEELMGPLSPPFPNMDLAGMNGHRSGARSLHWLHPSAVKEKRIVTPVSVSSGSGKHICGDSTGDALNRLADLRVQSNESKERREEQRQAKSARACMELLKADGITKKVPLYHMALKLFRDGYLHEFFIDDCITPKEGGANGFGGWFDGGGGFGPRGYDAQCQAIFRMRADQIHALFGLLTNRYNLHGTIEIYPMEALGIFLYNMAGGYSNRSTNNRMVHSRSTVSKYFHRVLNVVYAITIDINKHVDPNFARVDNRVMQDEAFQPFASAAGSVDGTHSCYCGI

SEQ ID NO: 201853 - protein, 127 aa, Oryza sativa
  Clone ID: PAT_MRT4530_97189C.1.pep
EVRIIGRTGERGGGKGNRGNHPTNRTCTKHGPEAGVNGRGGHCGDRVTPARTRDSKGRGRRVSIEGIAAKIRQFPIKSAGLESWESFGGSAAAPAGAGLGPSARQARQGRPGANRAFRPRASARART

SEQ ID NO: 201854 - protein, 579 aa, Oryza sativa
  Clone ID: PAT_MRT4530_9718C.1.pep
MRRRRGRGRPAAIVVSDAVEVDFPVIYVNAAFEAATGYRADEVYLLTRKTIRFLQFRDPRAQRRHPLVDPMVVSEIRRCLNEGIEFQGELLNFRKDGAPLYNRLRLIPMHGDDGFVTHVIGIQLFSEANIDLSNVSYPVYKQQSNHRPNIQEINPASHEHIPKIQSSEYCCILQLSDEVLAHNILSRLSPRDVASIGSVCTRMHELTKNDHLRKMVCQNAWGRDVTVRLEMSTKMLGWGRLARELTTLEAASWRKFTVGGRVEPSRCNFSACAVGNRLVLFGGEGVNMQPMDDTFVLNLESAKPEWRRVKVSASPPGRWGHTLSWLNGSWLVVFGGCGQQGLLNDVFVLDLDAKQPTWREVASEGPPLPRSWHSSCTLDGSKLVVSGGCTESGVLLSDTFLLDLTKEKPAWKEIPTSWSPPSRLGHTLSVFGKTKLFMFGGLAKSGSLRLRSCDAYTMDAGEDSPQWRQLATTGFPSIGPPPRLDHVAVSLPCGRIIIFGGSIAGLHSPSQLFLLDPAEEKPTWRILNVPGQPPKFAWGHSTCVVGGTRVLVLGGHTGEEWILNELHELCLASRPDEDE

SEQ ID NO: 201855 - protein, 40 aa, Oryza sativa
  Clone ID: PAT_MRT4530_97190C.1.pep
YLRLSIGPYRHSGIGSPGRLIRTVSFEVDDRHHSELIRGS

SEQ ID NO: 201856 - protein, 70 aa, Oryza sativa
  Clone ID: PAT_MRT4530_97191C.1.pep
MASSCWGRLGLAALWHRLRQLSVARRRRRHGGGGGGRSILGAGGLNYDPLSYAQNFDDGCLEPDFTVTAR

SEQ ID NO: 201857 - protein, 29 aa, Oryza sativa
  Clone ID: PAT_MRT4530_97192C.1.pep
IISGYGICVTAGCEKVCLYMLVIYMLPTE

SEQ ID NO: 201858 - protein, 114 aa, Oryza sativa
  unsure (1)..(114): unsure at all Xaa locations
  Clone ID: PAT_MRT4530_97193C.1.pep
TVPGRTPSPGRRPRTRPPLAVSLISTALPPPRWPAGAQPGTAPPTAPRQSPPRAATSSFPPSPSSLAPXTPAVPPRQAPSAVVPPLATPPSPSSQRPSLPFPTGAAPLFHSLPP

SEQ ID NO: 201859 - protein, 43 aa, Oryza sativa
  Clone ID: PAT_MRT4530_97194C.1.pep
LIIMTDDSSPVLELFTCLLPGVYDIILLRVQLGCYSSITTCTM

SEQ ID NO: 201860 - protein, 1360 aa, Oryza sativa
  unsure (1)..(1360): unsure at all Xaa locations
  Clone ID: PAT_MRT4530_97195C.1.pep
MATATGGDGDVGAAAGDGATGRLSLTLSSMMYPNVEECKGWTRLSPPAAYLTFLGAHNKRRARFRAWTRDRALEEALMPRRRTSSPRCWSVSPSERTPGGSGGRASGSGGKDSGLVIHRVVKESGSSANYPVLTKTNYNDWALLMKIKLQARCLWDAVERGRAAVELHEDQMALDAIYSAVPPEMISILATKASAKEAWDCIKTMRVGDNRIRKASAQRVRTEYERIAFRDGESVEEFAMWLTSVVNQLATHGDPEPDDKVVEKYLHVARPRFSQLAAEDYQTPPSSQNTDGKLYLTEEEWLEHHKKEQEAKRSGAGSSGRNKRRGGKGCIGGGSDGSTSSPARRDDKCRNCGKLSHWAKECRSKPKHEDQAHVAQDDKPTLMLLTGGYVETAGSMLPPPPPRATPAPQRVCVELVEKKVFAGLDHEADRDQRSWIMDSGVSNHMAGCRAAFSDLDTGITGNVWLGDGSIIPIEGCGMVLFACKNGEHRTLANTYFLPRLAANIVSIGQLDETSFQVLVEDGIMRVRDKQRRLLARIPRSPGRLYVLDIILARPVCLTARAGEDAWHWHARFGHINFTVLKKMSRETLVRGLPLLTQVDQVCEACLAGKHRRAPFPRRALSRSSKPLQLLHGDLCGPISPVTPSGNRYFLLLIDDYSRFMWIKLLPSKDAEPATIKQIQAAAERKSGKRLRALRMHRGGEYTAGHFNEYWAELGLRRELTALYSPQQNGVVERRNQSVVGTARSMLKAKGLPGHHXEENRRKTPYELWNGGSPAVHHLRTFGCVGHVKXLDDRSKPMIFVGYEPGSKAYCAYNPVTRQVHISRNIVFDEEAQWRWDGQAETGVDTDFVIEYTTVQQSDAAPPSPAAAPPSPGSPFRTIDNVLGPATPQGQAVREFDEDLLMVSAEEPASFDEAEQHQCWRHAMIEEIKSIEANNTWRLADGPSRQCPIGLKWVFKTKKDVAGNITRYKAYLVAKGYVQRQGIDFDEVFALVARLESVRLLLAHAAPRAWYAKLDASLLALGFHQSSSEHAVYFRATGARRLVVGVYVDDLVITGGDSAELEQFKDEMKGTFQMSDLGLLKYYLGLEVNQTEDGITVCQRAYAEKILEMAGMSSTNPSLTPMESRLKLSKSSAAPAVDATDYRRIVGSLRYLVNSRSDLAFLVGYVSRFMEKPTTEHMAAVKRVLRYIAGTTNYGCQYRRKKDAVCLVGYSDSDLAGDVDSRKSTTGVLFFLGDNLITWQSQKQKVVALSSYEAEYIAATTVACQGVWLALLLAELRGEEGSAITLKVDNQSAILLSKNXVFHNRSKHIDTRYHFIRECVEEAHEPQRVEANWNRKPGYGNEIEYYRIQIQKEYETERIWQ

SEQ ID NO: 201861 - protein, 86 aa, Oryza sativa
  Clone ID: PAT_MRT4530_97196C.1.pep
PWSILRTETMLREEQRSSAIGIPCEKVSRVRILEGQIWSTVGIGIRLREELRSRRLRIPSDELGYKMAHGRVSRGTCASVGARDGS

SEQ ID NO: 201862 - protein, 667 aa, Oryza sativa
  Clone ID: PAT_MRT4530_97197C.1.pep
MDSSLVCWKLEIRPRRALVLPIGKHFKRNVVERLSQVLIAARHFNEYCAELGLRRELTAPYSPQQNGVVEHRNQSVVGTTRSMLKAKGLPGMFWGEAVNTAVYLLNRSSSKSIGGKTPYELWNGGAPAVHHLRTFGCVGHVKNTMPNVKKLDDRSKHMIFVGYKLGSKAYRAYDPVTRRAETGVDTDFVVEYATVQHPDAVPSTRRFVERETAPPSPAAAPPPPGSPFVSSPSQASPSTPPHAGTPTVEFVSPPSGLEDNLDVDHDDAPLKFRTVDNVLAPATPPGQAVREFDEDLLMVSAEEPASFDEAEQHQCWRQAMIEEIKSIEANNTWRLVNGPPCQRPIGLKWVFKTKKDAAGNVTRYKARLVAKGYVQRQGIDFDEVFAPVARLESVRVLLAHAASEGWAVHHMDVKSAFLNGELQEEVYVTQPAGFVDAGKEHMVLRLDKALYGLRQAPRVVCQARRIPAGSRSSSEHAVYFRGTGTRRLVVGIYVDDLIITGGESTELEQFKEEMKGTFQMSDLGLLKYYVGLEVNQTKDGITVCQRAYAEKILEMAGMSSSNPSLTLMESRLKLSKSSAAPAVDATDYRRIMGSLRYLVNSRPDLAFSVGYVSRFTKKPTTEHMAAVKRVLRYIASTTNYGCQYRRKKDAVCLIGYNDSDLAGDVDS

SEQ ID NO: 201863 - protein, 543 aa, Oryza sativa
  Clone ID: PAT_MRT4530_97198C.1.pep
MASAAEAVEELTRLYRELPPRPAVEEVEAAEAVLASADAEEAARLDEVAREEASASASSSAAAPGRADGELLAVLREARRNAVRLRALQQRKEAAYVVELERRFKVFDDLIQRASRVVSSSSDAAEAGGGTTGDGYVGVGADSVDLEMELRKKEAAVAAAAAVAEMERGSKGLAALGLESKPISSLRRDVSAGTDMEKLSLIQVASLIESSAKKGITELSLRGKLVDQIEWLPVSLGKLQDVTELDLSENRIMALPSTIGSLRYLTKLDLHSNQLINLPDAFGELSNLIDLDLHANQLKSLPSSFGNLTSLANLDLSSNMLKALPDCLGKLANLRRLIVETNELEELPYTIGSCTSLVELRLDFNQLKALPEAIGKLEKLEILTLHYNRIKGLPTTVGSLSRLRELDVSFNEVEVIPENICFATSLVKLNLSRNFADLRALPKSIGNLEMLEELDISSNQIRVLPDSFRCLSRLRVFHADETPLEFPPREVVKLGAQAVVKYMNDLNAARGTNQKKTDRGSFWTWLFSLFGCCKKNQEVGLPV

SEQ ID NO: 201864 - protein, 53 aa, Oryza sativa
  Clone ID: PAT_MRT4530_97199C.1.pep
QAQQHMKLTINSMTNRGNIQAPITMQCNRFVYESGISGGGDHPITRTGSTAPA

SEQ ID NO: 201865 - protein, 368 aa, Oryza sativa
  unsure (1)..(368): unsure at all Xaa locations
  Clone ID: PAT_MRT4530_9719C.1.pep
MSVPGVASRAADRFYCPPPRRHLLHHHHNQASKAAAAAVERQPRSAAAAAKEEEEETNLECFIASTAVRVPAHRLPRTSSSSRERGAAGAPPYYELADLWEAFAEWSAYGAGVPLLLNGTDGVVQYYVPFLSAIQLFAARPPSSTSGASGSGSSVICKSEMSRLGEDSDGESAQDMSSESDHEHLRCRCLVNSISADQDGFSSDDSESGNQELYPVFQYMEHDAPYGRQPLADMISLLANRFPDLRTYKSCDLLPSSWISVAXVVLPIGRWMQVSHIQDTDRTNIERFGCLLFNIPFTIYTSGSKIYDVPGKVTLPLIGLASHKFNGSMWTSNQEHEQQLTKSLLKAADDWLCQRRVNHPDYRFFLSH

SEQ ID NO: 201866 - protein, 139 aa, Oryza sativa
  Clone ID: PAT_MRT4530_971C.1.pep
MATSVGVPAMNSSRPKTEQWRQRHCCRRGCTSGGLRGQQRAGRRRGGGCDAGGGAGTADRRSGKADVTAHQPLGWTPPIRARSRPAFIFGSINERITYLLLSKLSKVFYIVTSPSPFIGFYITDAPVIVLILFRPVQPD

SEQ ID NO: 201867 - protein, 95 aa, Oryza sativa
  Clone ID: PAT_MRT4530_97200C.1.pep
MARRRDKGDGDGRGRWIWPVTAPCGAEASRREKAAVLAVEAAAARQGARRRRSEVAEVRELPMAVGSPWCPTAMDRRRAAWQRGASVDGSALAGD

SEQ ID NO: 201868 - protein, 306 aa, Oryza sativa
  Clone ID: PAT_MRT4530_97201C.1.pep
MEERIPEPQDPTADVAADVLPAEASSSDVTTTGVEEESDSDGEFEFEFPFVSRDSPAGTAAVADDLFADGRIKPFYPVFGRAGAGGGGDRQQHLAKDDAAATVPPRTRGPLGRLFLEESRGSFDRWSTSTSSSSSSSAPASDEGGLDGAPPESYCLWTPGAGAGSASASASPRPPRKSGSTGSMARWRRISELVVGRSHSDGKEKFLFLPIPPPSSKENDVEHFKPKPKPPKPTPASGRKTAQAAAAEIDTVAAIHRIAYGAKGGGATGTSAGGGTPRRTFLPYREELVGLFANVNGISRSHPHPF

SEQ ID NO: 201869 - protein, 53 aa, Oryza sativa
  Clone ID: PAT_MRT4530_97202C.1.pep
KKQKTAKGLYSKETNPNPLFKNKPANMRAPNEQLTGGLGYKIYSAKGPRFRFQ

SEQ ID NO: 201870 - protein, 75 aa, Oryza sativa
  unsure (1)..(75): unsure at all Xaa locations
  Clone ID: PAT_MRT4530_97203C.1.pep
GRRRPPTPTPPPPTAPPPATLSAPRHRPQPPPPPSPLLXASYLTRTXRGTGQPPPXSPTSLVLVLDHHKSPKTEK

SEQ ID NO: 201871 - protein, 381 aa, Oryza sativa
  unsure (1)..(381): unsure at all Xaa locations
  Clone ID: PAT_MRT4530_97204C.1.pep
YDAWLSKLQNTYFDSFALTRQGTVIQKHKVEIPPPSNSEASGSGTSGRNKEEGKEGLKQEDANLEFKNFQDSVDYAVNHALINQSGILANVMSNVMEKMMDCKFEERGARGPAFFPGDKFPNYRTLVTDNQPQINLTGTNSAQPNPMVPASAQPNSTVISSAHKQPEFRPRILQFQGAPEQQQQKPWADMIAYIMREXFGFKPKDSGNLYRKPYLEXFDRIPLPHXYKVLDFSKFSTYEHISRFLAQLGEASANDAFRFRMFPLSLSRSAFTWFSNLPYNSISNXADLEKQFHSYFYSGVHEMKLTDLIPVKXKHDESIQDYIQRFRDMRNRCYSLSFSDSQLADLAFQGLLHPIRENFSAQDFESLAHLAQKVGVHEQRF

SEQ ID NO: 201872 - protein, 124 aa, Oryza sativa
  Clone ID: PAT_MRT4530_97205C.1.pep
GAPPPGAPPAPPPGAQVLRRRRALAALLPLHRPPPPSQGARRRRRRGRRGQAAAVHQTPGPARHARVPRRPRRGPGRARRSPPARQVALPRVLPHLRRRRHHRPDDRHRRRGVGRRAPRRRRPQ

SEQ ID NO: 201873 - protein, 240 aa, Oryza sativa
  Clone ID: PAT_MRT4530_97206C.1.pep
MRIRRRPQCVSLQSSDPSTSTAATQNAAARSREGGGGDGVGRRLHQLHHHGNVDLGKKSSGVARRRLALLQQENGVDCSDSKGPGEEHGGAGDAHRSVPLPCTGGEVGSKSEPAAAVAPAVIVDVKEEEKSVGNGGGGGGAKKRRGGGAPAVLMEGSRCSRVNGRGWRCIQPTLVGYALCEHHLGKGRMRSVTGGGGGRGGASQLGRTEHRPPATARNPAAAAAPPPKADEPGPNHIAHH

SEQ ID NO: 201874 - protein, 546 aa, Oryza sativa
  unsure (1)..(546): unsure at all Xaa locations
  Clone ID: PAT_MRT4530_97207C.1.pep
MVHQTPPPYDGDGKIKFDNSKRLMKIERNPFQVNMVHTTGKTADKKDYRSKQLNSARIINKYQKRHDRHEEKFYEDDDSFDPHWSCEFFRFCWNEGMRLPSIEDCPSCSNHKRGHVASSSRSRPRENRLPQKKLPVHQILGPIHEDYFQDESAQEREQVENKQWCPSGPFTKNQKRRVXRVRNREQFEEFGVDHADMEEEDVVEESSAKLVLSPEQAIFEKPDGAENRHLRPLYVKGFVNGKPISKMLVDGGAAVNLMPYATFKKLGKTAEDLITTNMVLKDFGGNPSETKGVLNVELTIGSKTVPTTFFVIDGKGSYNLLLGRDWIHANCCIPSTMHQSLIQWQGDKVEVVPADKSVNVANADLTIWEMDGIDCLSGKVWEGDFLKMESPNCSFEGVVEGSSFYTKDIVDDLDGKLGQGFMSADDLEEVDIGPGDKPRPTFISKNLSSEFRTKLIELLKEYRDCFAWEYFEMPGLSRLIVQHRLPIKPGYRLYKQPPRRCKADMFEAIKAEIKRLYDAGFIQPCRYAEWVSNIVSRPKTTLKYIL

SEQ ID NO: 201875 - protein, 926 aa, Oryza sativa
  unsure (1)..(926): unsure at all Xaa locations
  Clone ID: PAT_MRT4530_97208C.1.pep
LQDQTNWHALNPKXDFRSCTEVKQIFQAXCVFFASTRFWHARWDTSXQSFIMVDVKPTDDDGKRTEVDSTNKIPITIDMLTPEQRGXYDAWLSKLQNTYFDSFALTRQGTVIQKHKVEIPPPSNSEASGSGTSGRNKEEGKEGLKQEDANLEFKNFQDSVDYAVNHALINQSGILANVMSNVMEKMMDCKFEERGARGPAFFPGDKFPNYRTLVTDNQPQINLTGTNSAQPNPMVPASAQPNSTVISSAHKQPEFRPRILMRPQPQHVGHNIPQVNQEQISSMFYPSHNTIHHSAPFLDHNHPLINKAWTPQRPPWAYLCHTAAXQGAPEQQQQKPWADMIAYIMREXFGFKPKDSGNLYRKPYLEXFDRIPLPHXYKVLDFSKFSTYEHISRFLAQLGEASANDAFRFRMFPLSLSRSAFTWFSNLPYNSISNXADLEKQFHSYFYSGVHEMKLTDLIPVKXKHDESIQDYIQRFRDMRNRCYSLSFSDSQLADLAFQGLLHPIRENFSAQDFESLAHLAQKVGVHEQRFXEAKKIVKKMNSVYSYNYASDSDYEDESEVAAAEWIRNKKVTTCLWVKPSSKEEKYDFDITKADKIFDMLLREKQIQLPANHVIPSAEELGKRKYCKWHNTGSHTTNECKLFXNRSSXAIQDGKIKFDNSKRLMKIERNPFQVNMVHTTGKTADKKDYRSKQLNSARIINKYQKRHDRHEEKFYEDDDSGMRLPSIEDCPSCSNHKRGHVASSSRSRPRENRLPQKKLPVHQILGPIHEDYFQDESAQEREQVENKQWCPSGPFTKNQKRRVQXRNREQFEEVSKKSTISXIRGDVLADEAKRLAKGKSVVSSSVNMAFVLPAKFGVDHADMEEEDVVEESSAKLVLSPEQAIFEKPDGAENRHLRPLYVKGFVNGKPISKMLVDGGAAVNLMPY

SEQ ID NO: 201876 - protein, 152 aa, Oryza sativa
  Clone ID: PAT_MRT4530_97209C.1.pep
MVDVKPTDDDGKRTEVDSTNKIPITIDMLTPEQRGTVIQKHKVEIPPPSNSEASGSGTSGRNKEEGKEGLKQEDANLEFKNFQDSVDYAVNHALINQSGILANVMSNVMEKMMDCKFEERGARGPAFFPGDKFPNYRTLVTDGLPVSGITSG

SEQ ID NO: 201877 - protein, 214 aa, Oryza sativa
  Clone ID: PAT_MRT4530_9720C.1.pep
SPLPRSPVAAPPLPTVLLSLPCRWPSPVAPSASPARRSPVPSPPSVSQSPPLSRPALRFPRRPPKACPRRQPVVLAPLCCLRPAPVRRWYADRRRRLLRYRGIVSFPSHSSVSPEHRRAAPASPSTSPEFPRSALPPPVRRRPRHHHLRHRSGEPPRHRLCPRLRVVKPRAGRVATSSKDRRRSRPLAVRLRRSRPSPPRPFVVVVPTPRRVVV

SEQ ID NO: 201878 - protein, 164 aa, Oryza sativa
  Clone ID: PAT_MRT4530_97210C.1.pep
MGDAQRRQLLLVALMLAAAADHSLAGFFGGAPPASGPAAAAADNDEKCSRTCESEHCLGTYAQAPLMRYGKYCGVSYTGCPGEAPCDALDACCMLHDACVQATDNDYLNMLCNQSLLDCVAAVRSPAARIRTFEGNQCNVTDVADEITSLVEAAVFAKRILHRP

SEQ ID NO: 201879 - protein, 87 aa, Oryza sativa
  Clone ID: PAT_MRT4530_97211C.1.pep
HFYSNLNHWLQVKQALYSVRCPNQKPTVPNNASSRALKCRSVCIAHSDRLLHTAPPGDGVLDEHLVLREVIVCAEATPADIPAATHL

SEQ ID NO: 201880 - protein, 87 aa, Oryza sativa
  Clone ID: PAT_MRT4530_97212C.1.pep
KEYRDCFAWEYFEMPGLSRLIVQHRLPIKPGYRLYKQPPRRCKADMFEAIKAEIKRLYDAGFIQPCRYAEWVSNIVSRPKTTLKYIL

SEQ ID NO: 201881 - protein, 74 aa, Oryza sativa
  Clone ID: PAT_MRT4530_97213C.1.pep
TFRPESPFRYVSFHGGPRVCLGKEMAYIQMKSIIACVLQELELAVDGAYRPRQVTSLTLRMADGLPTRVKVRGN

SEQ ID NO: 201882 - protein, 109 aa, Oryza sativa
  Clone ID: PAT_MRT4530_97214C.1.pep
MSTTSTETAASQLHRVCRAVRAPRVSAPATTTQSARWPRAGRRHLLVSSLPDATAAARRGAAACAALLRVGAALKKSGDLRGVRRSRRKKTKDMPLTCFALQHHSISEV

SEQ ID NO: 201883 - protein, 35 aa, Oryza sativa
  Clone ID: PAT_MRT4530_97215C.1.pep
ANVKSLVLESEDTFLEKSRDMFATRAESPTNGTHP

SEQ ID NO: 201884 - protein, 68 aa, Oryza sativa
  Clone ID: PAT_MRT4530_97216C.1.pep
MVSAVLKATAAVGVAGVFGMPFSDGTSIGLLLNTKGIIELVILNIARNNGSMSYQSFTVLVFVSTLNR

SEQ ID NO: 201885 - protein, 172 aa, Oryza sativa
  unsure (1)..(172): unsure at all Xaa locations
  Clone ID: PAT_MRT4530_97217C.1.pep
TSRGPGIQTGLHIRPHRATSPEPTYYPHPHNTDYLPPSKMPAPLPRQLTLHPSPLPPSNITMGAAPRSPAATTGPPSRPTTXPPPAPGPTPAQRPAATPRATPPPTITPPRPQPPHPRSPTPHHPPNPPRVRARLPPPKPPALPQPHPPTPSAPPPSPRPPPTPPSPARPPA

SEQ ID NO: 201886 - protein, 172 aa, Oryza sativa
  Clone ID: PAT_MRT4530_97218C.1.pep
MTMKVKSTMMAASMLLFLLVLAGIVTATTTTTDSNIRLPSNGAAGETDGNKQAKSRPWECCDNIEMSVLKIYPPRWRCNDEVKQCAAACENCLQLVPGAGGEDVVFVCDDWYPTTNPGPVCTPRPWGDCCDKAFCTRSLPPICHCADEVASCAAACKECDMVNSSSEPPRYI

SEQ ID NO: 201887 - protein, 1183 aa, Oryza sativa
  unsure (1)..(1183): unsure at all Xaa locations
  Clone ID: PAT_MRT4530_97219C.1.pep
MTRSPPSAASMIAVQIWRDSEGSAPSSYFSVRQGWSFGGPRTFRRLATKTWTNHNELKLVVRVGSFFSLLDEGSKTYMEGKTSPTQLVDMHNYGLLELVNFIAEHFIWGSKQYMTLWCSMDGDSVEITLDDQSLDWFQLNLEKGVVCIDAQIIDFDGPLQFSPTKRRYHPSVRNRAAISEIATNERATIEIATNEIATNERATNVIATNERATNVTATNERAKKSKKRGPCDEEAVGVVDEGIYSDTESLVAQSDSSYDSDLAESFDSEFDCSDPEFDPDQEIVDEDDDDDVPVFAYDVHDPCIDVGVVFPDVNQCKSAVTHHCILNDHAFDIIKKDKKRFRAKCKSADQGCKWLFLHLLVPSTLDVKISGPKHTCGSFNNCGETMASNKWVADRVVELLRDDPSLGPKKLKEELKKKYSVNIPYLRVFGGKERALDMINVRWDDSYNLLPTYQDELLRSVPGSVVKLDTEENNGDVCFRRFLVALKLCIDGFLQGCRPYIAMDSTHLTGRSRGQLASAVAIDGNNRLFPVAYGVIETESKESWTWFVQNLKEAIGTPTGLVISTDAGKGIEGAVDDVYPGVEHRECMRHLWKNMKKKYHGPLFAQNMWAAAKSFTNVKFTYHMDKIKERCPEALTWLDDNHPYIWSRSKFYEECKVDYINNNLSECFNSWVSKIKDRQIVDLHDTIRKMIISKFVSRAKLACKMDERIIPSITNTLNAKSKTLKNHEVLICGSGTVEVTVGTITHAVNLKERTCTCRAWQVSGKPCDHALAFIAKLNREVQMDDFVDKCFSIEMLKMAYAGQFNPMASKDEWAHVDLXYKIKKPSASASGTTRGRGRGRGGAGVGAAAAPNGGGGGGAGPARVHKRQLLTYRSTSYKNIKDYKCSGKREKRAKPEDLTPAAGDSIPQAILDGSDETNLFETSSTEKDFNSGVGEKRARLSTTHGTQQVTPEEEHKEGWRRHAGPAGQRHKGRGRGRLAGGPTGQRLKREREGRRHMGPTDSGTRREGARLVARLGFKPAGRLWRGRRRARTVASDGNRRREAAADGAKTAAAAEAAARATLAAALRGGRRGKGRERKRGRPILTEGLGRREGGATANGNDERREDDGDGFREDLEKRLGGVREREMNHGDRKPWPKAAVEVVLTRARGDEGSGDELRRRRGGRGGSRPRESNGGDGARRRRA

SEQ ID NO: 201888 - protein, 60 aa, Oryza sativa
  Clone ID: PAT_MRT4530_9721C.1.pep
MDWWENGENPLSVSAKRHRRTDGDLTESETRIAPLLGLDEHNNGVVCGDVSLGSPKDGTG

SEQ ID NO: 201889 - protein, 59 aa, Oryza sativa
  unsure (1)..(59): unsure at all Xaa locations
  Clone ID: PAT_MRT4530_97220C.1.pep
MEAGSSPTSSXPAARRATAAVRELAGAPPLPVGDESSDGDGGGMERSGTRAHPSTPGQQ

SEQ ID NO: 201890 - protein, 215 aa, Oryza sativa
  Clone ID: PAT_MRT4530_97221C.1.pep
RQHKEGWRRHAGPAGQRHKGRGRGRLAGGPTGQRGTRREGARLVARLGFKPAGRLWRGRRRARTVASDGNRRREAAADGAKTAAAAEAAARATLAAALRGGRRGKGRERKRGRPILTEGLGRREGGATANGNDERREDDGDGFREDLEKRLGGVREREMNHGDRKPWPKAAVEVVLTRARGDEGSGDELRRRRGGRGGSRPRESNGGDGARRRRA

SEQ ID NO: 201891 - protein, 293 aa, Oryza sativa
  Clone ID: PAT_MRT4530_97222C.1.pep
EELQLWCGGKESKTEYYPLYSASHPGREGNGQPPFRAAVNPKADHRTPRPTQLHYAHPRLGLTSSRWGAAPTCGTHGSVTLREGEGRLAGGTHRAVAQGGRGAAGKRGPPGGGSRGKEEGGLARLGFKPAGRLWRGRRRARTVASDGNRRREAAADGAKTAAAAEAAARATLAATLRGGRRGKGRERKRGRPILTEGLGRREGGATANSNDERREDDGDGLREDLEKRLGGVREREMDHGDRKPWPTAAVEVVLTRARGDEGSGDELRRRRGGRGGSRPRESNGGDGARRRRA

SEQ ID NO: 201892 - protein, 130 aa, Oryza sativa
  unsure (1)..(130): unsure at all Xaa locations
  Clone ID: PAT_MRT4530_97223C.1.pep
RTAKLSINKLPPRIQQERVQRFAKKAKPRTGKFSQKRKRGIKKKHTHTHTHSQKQPSRRPPRQAQQIEQSRAAPRVITPPHDTRTLRGSGSSEVGAKRDGKKGKKTATANAAYIXRRRCSYPEISRVYFS

SEQ ID NO: 201893 - protein, 52 aa, Oryza sativa
  Clone ID: PAT_MRT4530_97224C.1.pep
ISFAPHTRPKCNQQCVSQEIKTKQSCSASYLDIQLQIHLVCQMNYRLSSADH

SEQ ID NO: 201894 - protein, 80 aa, Oryza sativa
  Clone ID: PAT_MRT4530_97225C.1.pep
KASETESPLLNTNLNKRDHQPILLIMKLPLPRIMQGSIHRHIFTHQMASLIHRLRDKSDSGYNSPLLIHQMALLQVVPCR

SEQ ID NO: 201895 - protein, 80 aa, Oryza sativa
  Clone ID: PAT_MRT4530_97226C.1.pep
FLSGSVKVEKLMNIERYSHVMHISSTVRLFFYTAKQRVCTHYVPRQCCVIIISFSIPVCIGSSDKCLFMLRKSRILTHYA

SEQ ID NO: 201896 - protein, 623 aa, Oryza sativa
  Clone ID: PAT_MRT4530_97227C.1.pep
MVSEQSIRGIPSKEACWATHSCNGDLWRRNLSRGGVSAGGARQVFGEMPSWLGDGAGAALRVQVSQVLYPVTSEVLHQVYNTYGAVAVQVLTTSPLGVEAFVWFRSSCDAERARSVTNGRNIYDGCYLLDVQHVHPFNGNGVDMTPTKCLTLGPSSITTRPAVESSLAAPEHVFPATMNSSTPSTTAAAIATPSPSIKTNKAEGDMAQVEMKPKDTFQELCAKIIATLNNMLVTCRNIKLESITSVGITRVVTAKSTNTKSVPNTLEVSDEANSISLVDTNEFYMVTTTKCLTKGNEQMINDDDDDMATEDLVELTKVNSKFTLLQTGEASKTLISERTCSIELRPWPPPYFLLNEVIKEVLEICHQVNMNWISSYVWENIQGLLVLDDQVFQSSTQWQSAIYKEMNCLELLIGLELLRGKIHSCWREMAQLKIPWTPPLNACAVTLLAHARESFSCKCKIKGSHTIVGLWKHEYWQPTMKTSDWYTKSCTYSWVSLNSKLINLNEVIPVDMLQLPTSDEEFVIWPRPIGWFATSDQFVDLGLGYSSYHLVRVITTVVSLKKSWLREIIEELSEPGPQGQTLQRQDNKLWESLLLNDHDTLCSLQLIWNPGGIKGIGLGTSRN

SEQ ID NO: 201897 - protein, 81 aa, Oryza sativa
  Clone ID: PAT_MRT4530_97228C.1.pep
MCPWACRLPVTVQRPKGELSAVEVGGGGDRRWEAAKQADEGGNRQLEDVDNRRWELGAAWDAATVTACLVNPPVAAVKVAS

SEQ ID NO: 201898 - protein, 59 aa, Oryza sativa
  Clone ID: PAT_MRT4530_97229C.1.pep
MAHGQRAHPREAAMAVGVGGLDELGEDAIEVALGIATESACAVTGERGNRRRDGESDFA

SEQ ID NO: 201899 - protein, 354 aa, Oryza sativa
  unsure (1)..(354): unsure at all Xaa locations
  Clone ID: PAT_MRT4530_9722C.1.pep
MQAHRSPAMVGGGGAGAVGPPSPATVPVRRRCEGTAMGAITLDLRPGNGVGPFTLGMPISDAFAQIEGQPTLYDVVHVKYFDEEPLKLDFVISFPDHGFHLRFDPWSQRLRLIEIYDVKRLQLRYAKSLIGGPSTLATFVAVYGLFGPTFPGIYDKERGIYTLFYPGLSFAFPIPSQYTNLFTNGEVADLPLEFPDGTTPVTCRVSIYDSSTDSKVGVGSLMDKAVVPALPAGSLYMEEVHAKLGEELLFTIGGQHIPFGASPQDVWTELGRPCGIHQKQVDQMVIHSASDPRPRTTLCGXDYFYNYFSRGIDILFDGQTHRIKXKFVLHTNFPGHSDFNPIXKCNFVIYDAEA

SEQ ID NO: 201900 - protein, 119 aa, Oryza sativa
  Clone ID: PAT_MRT4530_97230C.1.pep
RKKRWDARKFLTSAGIISSLSATVGSLAVAVGQQEGGDSSSFALALVFAAVVMYDASGIRFHTGRQAALLNQIVSDFPPEHPIISSFRPVQEPLGHSPFQVFAGALVGCSIAYLMGKSV

SEQ ID NO: 201901 - protein, 120 aa, Oryza sativa
  Clone ID: PAT_MRT4530_97231C.1.pep
LTSTSRKEDEHPPASVFIPAPPRRIPRRRRGEARAARLNYQECPPTLHGSPPRLGPGVAGRMRIPAAGEREGGEVGVGGGGGAWRWTAALQLGEEGEEGEGSKVREEEDDDFGWWPACSP

SEQ ID NO: 201902 - protein, 125 aa, Oryza sativa
  unsure (1)..(125): unsure at all Xaa locations
  Clone ID: PAT_MRT4530_97232C.1.pep
TSLSLRIVVVAPPPRRRPSPLRAPSPLHRAALASASTVAPPLRRRLSPLQAPSPPAFPPRRRPSPXPPCRRRTVFIDRSLTIPRQSPSLANPLPHCRITVHGHHASSVFPCNFPTASPRLCSFSF

SEQ ID NO: 201903 - protein, 579 aa, Oryza sativa
  Clone ID: PAT_MRT4530_97233C.1.pep
MYDALQITETNYRRLCHEKSVLTVNGQFPGPTIYARKGDLVIVNVYNHGNKNITIHWHGVDQPRNPWSDGPEFITQCPIRPDGKFTYQVIMSEEEGTLWWHAHSDFDRATVLGAIVVHPKHGDTFPFKRPDKEIPIILGEWWKNDVNHLLEEMKRIGEDVKPSDANTINGQPGDMFPCSRDDTFKVAVEHGNTYLLQVINAGLTNDMFFAVSGHRLTVVGIDARYTKPLTVEYIMIAPGQTMDLLLEANRSLGSKSNSRYYMAARTFITLPVPIPFNNSTATAVVEYYTGDSGAGPPDFPAVLPSLDDVDAAMAFLRQLRSLGSKDHPVHVPTHVDEHMLIDLAINFLPCNATNATDTACKGPKGNTTRFAASLNNVSFVSPAIDVLHAYYYGSGRGVYEDDFPNNPAPVFVNLTGDNDRPGVTKHGAKVKVLEYGTVVEVVFQDTSFESHPMHLHGFAFYVVGLGSGKFDDRRDPATYNLLDPPYQSTVSVPKAGWAAIRFRADNPGVWFMHCHFDRHMVWGMNTVFIVKDGKTPQAQMLPRPPNMPNSQRQGQPGDGRWKQQGGMRQQQGREARLRR

SEQ ID NO: 201904 - protein, 134 aa, Oryza sativa
  Clone ID: PAT_MRT4530_97234C.1.pep
GPSPAIQKACWAGPRLKRPSPTSAPGGLALSFPQSAPLWMGLMSQPRMPSRRLDSATAPLNARLTASYCPKVYAIMVATDVPARIPSSQLTCPGPTLAWRLFFPTSPPPFGSRHLKDPAPHRPSHYILVSHSPP

SEQ ID NO: 201905 - protein, 120 aa, Oryza sativa
  Clone ID: PAT_MRT4530_97235C.1.pep
HEGTGSCAVAGGRMYIVAEYGEWRLKRYDEPRDEWRMVAGSGVPPEVRRPHVVSGEVEEVGSGGRRRIYVVGAGLDVAIGTVSPSPAIHGGDDERVDWEVVKGPAEFAGLAPCNAQVLYA

SEQ ID NO: 201906 - protein, 116 aa, Oryza sativa
  Clone ID: PAT_MRT4530_97236C.1.pep
MGHPRLRAGPARPDGWWAVPGRELGGEASLGRRFSYSLVPHSVNSSSAFNFGTLANVTELGAASTPLVAGDVDTYYTVVLDFVRVGNKTVASAASSRIIVDSGNAKISFVTPANCK

SEQ ID NO: 201907 - protein, 119 aa, Oryza sativa
  unsure (1)..(119): unsure at all Xaa locations
  Clone ID: PAT_MRT4530_97237C.1.pep
IFCTEHLPSLTYDARGQEKNTGEEAXAAEEIVKERADDVEERRLRSDGGEMGRENAAAGMGKRSCGRRKGEPSSSLTPXGKASRYERAELTLIVLRLQACGRAIGCTPLSRVAHLTRVC

SEQ ID NO: 201908 - protein, 50 aa, Oryza sativa
  Clone ID: PAT_MRT4530_97238C.1.pep
MGDEVETPISDFSAGLGLAQKQTRGCSDLSNVGASDGPRAGRDCCTVAES

SEQ ID NO: 201909 - protein, 104 aa, Oryza sativa
  unsure (1)..(104): unsure at all Xaa locations
  Clone ID: PAT_MRT4530_97239C.1.pep
HTISWPNLSADMWXSWGQTHTSRRHTHFXPFVGRGGGFNFTXIPAAHISPPVGFIPSQFQFPNTGVSSHRVAHXQVASHTHAHRHAHTLAPRHTLHTSHRXPKX

SEQ ID NO: 201910 - protein, 306 aa, Oryza sativa
  Clone ID: PAT_MRT4530_9723C.1.pep
MAGSGVNGLNCERGYHHLSPIQPCGKNWRDSPRVEAKSHSAAAWTGAHGVERQFLAAIVVLALSSSRLVRRRWAEGVGRATARQGSRARANGPKADARRHGAQQNRMPVRCVQGEEEVKKSTAEAQPGRPAALLSGVTDRPRRRRRRVRVAEIHPVHPSSVEGTPKLVRPPTSSSRGLPSLFAIVFLRAGHPRITALRRRLCVAVSAAGCRRRQRDARVPPPSAPGRPVGFDAEPSPAAASTAARPIGPRAIWAVGPVDRRWTTRVVLARVGVMERGGPCDGLCRFRIHLGTRGDCPSPAGDGGET

SEQ ID NO: 201911 - protein, 194 aa, Oryza sativa
  Clone ID: PAT_MRT4530_97240C.1.pep
MAAAMGDVDGGGGGRARVDAFSRVAWMRIASVEEEYPARGRDNPSIPVYKLRDAIYLVLRFHSRITRLSQQFLPLDCIKSGCDARQYRAVQYRFGCIIYGDFLKRFLSCSLDVQQVKQGNFSSDALDINMSSCQLFLVERQYLTFNSRRREAICIRELQNLLNFWAMLADAGFAGQSSERHLQVRTPDESYLER

SEQ ID NO: 201912 - protein, 336 aa, Oryza sativa
  Clone ID: PAT_MRT4530_97241C.1.pep
HSISKDYSASPVFTRPSQWTSRPCQQVVAAALLSASPPGPALGPAAPAGVWRCCCGALNGLSTRGSPVVPLRAGCHCARVIRPILGPPPSRPPPRPPSPRSGNRRSRRDRSRSPYTSTRRSPSPRWERSQSPTPRRRRSPPSPRRQRRRRSRSNTSSTVNNSCSPSHVSEQNNLIEKQKEEGDKKRRQKEAELKLLEEELARRVEESIRKNVEDRLNSEDIKNEIKRRVEEGIKQLFDEVDAQLQKEKETALREARHKAEQERREREELDRMLEENRRKVEEAQRKEALEQQQKELERFLELERIPKQREDAMRRKKIEEEEDRANQMKLLGKNNR

SEQ ID NO: 201913 - protein, 467 aa, Oryza sativa
  Clone ID: PAT_MRT4530_97242C.1.pep
MDHADMDGLATAMLPLSLWSREIAGLLFMMDRLTGTTVTSLRNQGPKFSYATHGARCLMLLPTLTASASFPLDIAINGEMANRMMHQVPKKRAPQTHNAFYLDALMLLPHAALCHRNHRSMEHATVSENRSRRHFRNPVLAYVTPWNSKGYDMAKLYSTKFTHISPVWYDLKSDGNKLVLEGQHNFDAKWVSELQSNGSLVLPRVVLEAFPGVVLMKKKLRDKAIDLIFVIWLSVNRDKGYDGVVLESWSRWAVYGVLDDSELRNRALQFVKHLGKTLPLTSSNLSTHHHLKLIYVVPAPRMKELNNQEFRPEDLLQLADSVDGFSLMTYDFSGPQNPGPSAPLSWIQYSLKTLLAAKGSASHGHSHMIFLGINFYGNDFLLSKGDGGNAITGRDFIYLLDKYKPSLQWDEKSSEHFFVYSDKGLRHAVFYPTLMSLSLRLDEAQDWGTGLSIWEIGQGLDYFFDVL

SEQ ID NO: 201914 - protein, 83 aa, Oryza sativa
  Clone ID: PAT_MRT4530_97243C.1.pep
MDSSSGSQGKNSKTSDGCETKEVNNTAQNFVHFTEEEEDLVFRMHRLVGNRWELIAGRIPGRTAKEQYTEGEIWCLETFPRRM

SEQ ID NO: 201915 - protein, 162 aa, Oryza sativa
  Clone ID: PAT_MRT4530_97244C.1.pep
MDGNFGSEERILWPASVLAGIAMCAAVYDITQKVSSHCFKGYDNISPMKKVEWNNRGFSTFHALVAAVVSFYLVVISDLFHSNIIIDRNSWLSDAMFGVSIGYFLTDLVMILWYFPSLGGKEYLLHHGLSMYAICLALLSGKAHMYILMVLFTEATTPFVNL

SEQ ID NO: 201916 - protein, 134 aa, Oryza sativa
  Clone ID: PAT_MRT4530_97245C.1.pep
LAQDLNSAFHWSFSRLMDSSSGSQGKNSKTSDGCETKEVNNTAQNFVHFTEEEEDLVFECTGLLGTGILIHILHICNVHQVKMKTNCIFTLLACTMIVSEVWQIHETHMSVSKKYIICSSLTLLLVWSYAGGNL

SEQ ID NO: 201917 - protein, 82 aa, Oryza sativa
  unsure (1)..(82): unsure at all Xaa locations
  Clone ID: PAT_MRT4530_97246C.1.pep
FIQICCHGTYIKEDHSLIEDSTMQFDINAFYKEKDMLHGVLHLIRQXTAILRHALHPNIKRMTEVMDNKQKNYYEMVLLHFD

SEQ ID NO: 201918 - protein, 590 aa, Oryza sativa
  unsure (1)..(590): unsure at all Xaa locations
  Clone ID: PAT_MRT4530_97247C.1.pep
MSATMDAVMPGAAGAHNATAAAAAGRRGGGIVAGMMALPEVQTVELLVAVSIFVAIHSLRQRRSQGLPSWPLVGMLPSLLLGLRGDMYEWLTGVLASRGGTFTFHGPWLTNLHCVVTSDPRNLEHMLKTKFGSFPKGPYFRDTVRDLLGDGIFGADDEVWRRQRKAASLEFHSAEFRALTASSLVELVHRRLLRVLGDAEEAGDAVDLQDVLLRLTFDNEKKIGNILETSEPQVGHLHTEDKQEERLGSAASNAALQRXLLAVAHEHQKVFQCFSTVPFALPILTFRVDWKCRTXVEPLFAXLNNSNSSIFILAGRDSSCAAVSCTICSTTTNTTFQIKIVDENDDKDQALRGSPSASTVSAYGSHXAVLLFYPKDAMKIXYLQDEQSVALSLYTSVPVDRTKVEEDEVFPDGTVLKKGTKVIYAMYTMGRMESIWGEDCREYKPERWLRDGRFMGESAYKFTRLSNGGPSFVWPSGTPRYAYYQXKFAAASILRRYHLXVVDGQPSGGPANGATPCYLKHGLKVKLTKRDKEQALKPKLLKSFSHKAHGLGKKKAGALDGSNGGFQMWSVKQMMRVHLCKAFFCICFFI

SEQ ID NO: 201919 - protein, 279 aa, Oryza sativa
  Clone ID: PAT_MRT4530_97248C.1.pep
MDGNFGSEERILWPASVLAGIAMCAAFSALQSLSFSLLVGVKTVTVYDITQKVSSHCFKGYDNISPMKKVEWNNRGFSTFHALVAAVVSFYLVVISDLFHSNIIIDRNSWLSDAMFGVSIGYFLTDLVMILWYFPSLGGKEYLLHHGLSMYAICLALLSGKAHMYILMVLFTEATTPFVNLRWYLEVAGKKTHNLYLYNGLALFVGWLVARVILFIYFFTHMYFHFDQVKSIFPLGFYSILTVPPALAVMNLFWFWKIFKGMLKTLSKRRQQSENGKAE

SEQ ID NO: 201920 - protein, 76 aa, Oryza sativa
  Clone ID: PAT_MRT4530_97249C.1.pep
DPPGKCRGWHDCTLVPCHLQMNHPPQYFQRRSNKTNHSGIIAGRSKKLCSIAEPKLQLYGQGHQLRGQVSEDPRHG

SEQ ID NO: 201921 - protein, 1521 aa, Oryza sativa
  unsure (1)..(1521): unsure at all Xaa locations
  Clone ID: PAT_MRT4530_9724C.1.pep
MPRYKPEYLFGVEGFVQELRTMSFAIGFGTAPFYAQIPHDRHEEKCRVKVTLNSNSEDIPSVMFEAGGRNYIHACQEVARIAIGELRDRYSDQLADMEYRYHPRQPQGSDRGSYLETEGIENDATTRHLVEMLWAMDESRAETVLAAQDREDRNRGKICKLEDKVDRLEKELAALKGEAPPQKARIRLTARKRALFVPRYQLAPKVRVVEKEVTPALADPPVVNMVNTRSNGNGPNNNNNNNNGENPTLAQVLAQQTQLMNMMMQQLQNQQNQGNNHAPPQNKLAEFLRVRPPTFSSTTNPVEAGDWLHAIEKKLDLLQCTDQEKVSFASHQLHGPASEWWDHFRLNRTTAEPITWLEFTAAIRKTHIPSGVVSLKKKEFRSLTQGSRSVTEYLHEFNRLARYAPEDRQFFNNNAGNNIRNQAPHPVAASTQQQPAKREQGSKPVVCFNCGDPGHYADKCPKPRRVKVVPTQSNSTVPASKARVNHVAAAEAQDAPDVILGTFLVNLVPATVLFDSGATHSFLSMSFAGNHGMEVEDLRRPLMVSTPSNQALSLQRSPSVKIEIKGVPFLANLILLESKDLDVILGMDWLARHKGVIDCANRKVTLTSNDGRVVTVHAMSSESLRSRLKQITLEEIPIVREYPDVFPDDLPGMPPKRDIEFRIDLVPGTTPIHKRPYRMAANELAEVKRQVDDLLQKGYIRPSSSPWGAPVIFVEKKDHTQRMCVDYRALNDVTIKNKYPLPRIDDLFDQLKGATVFSKIDLRSGYHQLRIKEEDIPKTAFTTRYGLFECTVMSFGLTNAPAFFMNLMNKVFMEYLDKFVVVFIDDILIYSRTKEEHEEHLRLALEKLREHQLYAKFSKCEFWLSEVKFLGHVISAEGVAVDPSNVESVTNWKQPKTVPEIRSFLGLAGYYRRFIENFSKIAKPMTRLLQKDVKYKWSEECEQSFQELKNRLISAPILILPDQKKGFQVYCDASKLGLGCVLMQDGKVVAYASRQLRPHEKNYPTHDLELAAVVHALKIWRHYLFGTRTEVYTDHKSLKYIFTQPDLNMRQRRWLELIKDYDMGIHYHPRKANVVADALSRKGYCNATEGRQLPLELCKEFERLNLGIVSRGFVAALEAKPTLIDQVREAQINDPDIQEIKKNMRRGKAIGFLEDEHGAVWLGERICVPDNKDLKDAILKEAHDTLYSIHPGSTKMYQDLKERFWWASMKREIAEYVAVCDVCQRVKAEHQKPAGLLQPLKIPEWKWEEIGMDFITGLPRTSSGHDSIWVIVDRLTKVAHFIPVKTTYSGSRLAELYMARIVCLHGVPKKIVSDRGSQFTSNFWKKLQEEMGSKLNFSTAYHPQTDGQTERVNQVLEDMLRACALDFGGSWDKNLPYAEFSYNNSYQASLQMAPYEALYGRKCRTPLLWDQTGERQVFGTDILREAEEKVKIIQERLRVAQSRHKSYADNRRRDLSFEEGDYVYLRVTPLRGVRRFHIKGKLAPRFVGPYKIVSRRGEVAYQXELPQSLAGVHNVFHVSQL

SEQ ID NO: 201922 - protein, 115 aa, Oryza sativa
  unsure (1)..(115): unsure at all Xaa locations
  Clone ID: PAT_MRT4530_97250C.1.pep
IPSTLRYTSHIGTVYLRVYGRFLHTLRKFITEFIDGRSPTRTGLGRHCIVQGLMSPSSTWKPPDLRYKRDPXREDLRHRISXPTHPPQPTKSESTGAKSPGDLVEPARLRSRRYH

SEQ ID NO: 201923 - protein, 86 aa, Oryza sativa
  Clone ID: PAT_MRT4530_97251C.1.pep
CVEVPDFMALSCCCCVFPFAEDVIIMFGECKHTQNTCKQSVTCKHTTFFVNFALPEIKKKSVPMCFVGALYQKKKKKKLETSSLSL

SEQ ID NO: 201924 - protein, 77 aa, Oryza sativa
  unsure (1)..(77): unsure at all Xaa locations
  Clone ID: PAT_MRT4530_97252C.1.pep
APLFPEPPEGGPLGFVPTGAQIPLDFVKRVFFVXLPQAGLEKXPGKWXPPPPRVARGALWGSPKLVSPPPKGFVPHK

SEQ ID NO: 201925 - protein, 156 aa, Oryza sativa
  Clone ID: PAT_MRT4530_97253C.1.pep
IPTYRRRRSMMYMRATHRDEEGKKVTEKVAVPETRHPDTARHFERKLDQQGLHRMERHPANGSRGIGAPPPKSGRGGKFTWEGPDSIVDSQLDPLPAAIDRNDPNYEEEEGDHEREADVVGEVEVAKVAGDARDGVARVDVVAPPQLHEKLQLQPQ

SEQ ID NO: 201926 - protein, 96 aa, Oryza sativa
  Clone ID: PAT_MRT4530_97254C.1.pep
EKEMSFLLNAQRMSYAKQGSDHPLHRIYMLSKNYLHLRCICTATSLGKKTRGHTHTHTHTVPVSITRNHLSVFCICNLQCRGDHAEIIYSRICRVE

SEQ ID NO: 201927 - protein, 110 aa, Oryza sativa
  unsure (1)..(110): unsure at all Xaa locations
  Clone ID: PAT_MRT4530_97255C.1.pep
CFLTANNGFIGILADEVSRRCIGLQGLHPIXFYWILLLLYYITISRSSLFISSVIFYIKHIADCSKPYCYRLDXTGWHVSISSTFGSALELSISPRQVCVFHVNRWVGAW

SEQ ID NO: 201928 - protein, 122 aa, Oryza sativa
  unsure (1)..(122): unsure at all Xaa locations
  Clone ID: PAT_MRT4530_97256C.1.pep
SFSRGASRTEGFIGRRCWGPRTTTTSHRRRRPTRTTARRSSGAANENYCLTVRDGAHRLGPSNPEDEHQHWGTATGYSTKANDGEGMPAVGLXTKDTGLVVKHCLGQGHPVKLVALNTEHED

SEQ ID NO: 201929 - protein, 96 aa, Oryza sativa
  unsure (1)..(96): unsure at all Xaa locations
  Clone ID: PAT_MRT4530_97257C.1.pep
RPISGRSFRAGPITSPRPSLVSGCKPYGIPFPPSLATNPSPSPAIPPTPGRLCFPGDVSSXHCAVNARCPVYASPSVXPCVLVRPEPQIQAPSEMP

SEQ ID NO: 201930 - protein, 437 aa, Oryza sativa
  Clone ID: PAT_MRT4530_97258C.1.pep
MASSWRDFQAAKDVHYCIVVKPKPTPPSYQHRTNRSAAPRRAASPAMDSDYGVPRELSEVQKKRALYQPELPPCLQGTTVRVEYGDAAIAADPAGAHVISHAFPHTYGQPLAHFLRKTANVPDATVISEHPVVRVGVVFCGRQSPGGHNVIWGLHEAIKAHNPNSKLIGFLGGSDGLLAQKTLEITDEVLSSYKNQGGGYDMLGRTKDQIRTTEQVNGAMASCQALKLDALVIIGGVTSNTDAAQLAETFAEAKCATKVVGVPVTLNGDLKNQFVETTVGFDTICKVNSQLISNVCTDALSAEKYYYFIRMMGRKASHVALECALQSHPNMVIVKAYELVETKLFQHSLDGRHVTETLVLVQFEGPGGETKPISLCVEDRDYMGRIKQLQEYLEKVKSIVKPGCSQDVLKAALSAMASVTEMLTIMSSPSFSGQATI

SEQ ID NO: 201931 - protein, 114 aa, Oryza sativa
  unsure (1)..(114): unsure at all Xaa locations
  Clone ID: PAT_MRT4530_97259C.1.pep
YIYIYIYIYIYIYIYIYIYFLYMIIVGDMGPGVSGLEGGGCPPMPRGPPRRGVRPEVTMYGGLSVRLQVATYPHLWLPEXSRHAAFNAVCNALNRSVTGRMTDGTRVVQPYPGS

SEQ ID NO: 201932 - protein, 226 aa, Oryza sativa
  unsure (1)..(226): unsure at all Xaa locations
  Clone ID: PAT_MRT4530_9725C.1.pep
WPGPTRQPLGAPEGSQAGAAGGGHRHGGAAAERGEGKGEKRRRSTAHPRSTATTKKAAGAEEGGGAARVDGVDGVPAVGERNGGVDEVGEDAAKPKEAAPRWEVVWGDDGGGPELGGDGGERERRRELDSGEEEGRREAETDGGGAGWVXNRAGAREGGRXGRKPARDVGRHQWRRRDLRGQGNNSPLLIARGDXGCGGFGGGGGAXRGRGGGSGGRKGMTGGPHP

SEQ ID NO: 201933 - protein, 83 aa, Oryza sativa
  unsure (1)..(83): unsure at all Xaa locations
  Clone ID: PAT_MRT4530_97260C.1.pep
RETKAGQLLDPGYXVKALGLPXKSQGQPWYLNXQVGGRFXEYQGLPMAPVXGVGHAVPQNXPEXAXVXNSFXXGRXLPTKNTX

SEQ ID NO: 201934 - protein, 529 aa, Oryza sativa
  Clone ID: PAT_MRT4530_97261C.1.pep
MWVLYVIEIRVVYLKFINIGWHGSNMPEEQQEAEEGIAGGGGGWASTALQPVRWLRMLCRELGATFVAGVVLVYGLSQGFAGSFFRVASDYYWKDVQRVQPATVQLLSAVFFIPWVLKPLWGIMTDVFPVRGYRRRPYFLFAGVLGTASAAIVTMVNGLPMTSAILSFVGISTAVAIADVTIDACIAKNGIDKPSLVPDMQSLCAFSSSLGALIGYATSGMFVHHLGAQGALGVMALPPATLVFLGFFIYELKMYQHNVKEKVLNKVHMAVKGMAQTIKYPVVWKPSLYMFLSLALSISTHEGQFYWYTSKEPPNPGFSQEFVGMVHAIGAVASMVGVLVYHKYLKDYPFRSILFYAQLLYGVSGLLDLTFVLRWNLLLGVPDAAFVTLEECCARVVGRVRLMPMMVLSTKLCPPGAEGTFFALLMCIDSAGMLAAKAGGAAVLRALRVTRTDFARLWLAVLVRNLLRLSTLAAISLVPTADQTDVLLPRDLLAVAGDGSPPAAGDGDDEERLQLAKFADHVDDDDDDD

SEQ ID NO: 201935 - protein, 119 aa, Oryza sativa
  Clone ID: PAT_MRT4530_97262C.1.pep
MTRVPRGYIARRRRAKMRSFASNFRGAHLRLNRMITQQVRRAFVSSHRDRVRQKRDFRRLWISRINAATRIHKVFDNYSKLIHNLYKKELILNRKILAQVAVLNPNNLYTISNKIKIIN

SEQ ID NO: 201936 - protein, 93 aa, Oryza sativa
  unsure (1)..(93): unsure at all Xaa locations
  Clone ID: PAT_MRT4530_97263C.1.pep
GEVARFKEKSFPSAPSFPRPSTIIVKVRRHNSPTPPRRDPSRREDPTRSGGLALXPSPGGGRPQRVGARRRLTYGDGGLPRGALQAAGALLQH

SEQ ID NO: 201937 - protein, 417 aa, Oryza sativa
  Clone ID: PAT_MRT4530_97264C.1.pep
RAAGIGTTRVAISSSVLTRRRRDRELNHGTAGDLVDLACRHIIAAVAYSPPLPDPDPIRSAPHLFIPARELITARSTAADNTQAKRGRFRVLISSSSSSSHSPLAWAGRKSQMVALLRSCRRLIPHLSACAAAAPSSSSSCAPRARPISRGLRLLPVVLAMAGYSSGSAAEGRRLLFRQLFEKESSTYTYLLADVGDPEKPAVLIDPVDRTVDRDLNLIKELGLKLVYAMNTHVHADHVTGTGLIKTKLPGVKSVIAKVSKAKADHFIEHGDKIYFGNLFLEVRSTPGHTAGCVTYVTGEGDDQPSPRMAFTGDALLIRACGRTDFQGGSSDELYESVHSQIFTLPKDTLLYPGHDYKGFTVSTVEEEVAYNARLTKDKETFKKIMDNLNLAYPKMIDVAVPANLLCGIQDPPPSKV

SEQ ID NO: 201938 - protein, 79 aa, Oryza sativa
  Clone ID: PAT_MRT4530_97265C.1.pep
GDPYRGHWVEAPLLVALIHVPAGAAEEANQVTTSHLWTAGYKNADRSKSKSPRQERSFADPDNYKAVFEHIDDDSHFDD

SEQ ID NO: 201939 - protein, 277 aa, Oryza sativa
  unsure (1)..(277): unsure at all Xaa locations
  Clone ID: PAT_MRT4530_97266C.1.pep
KGSGYLSDLKPMSTPELSRKRHRRTFTSSQSCRVPCXAVLEHPATILCRRREASAWRCPXPPTRSRPLGARRRLHAYLARPRTSWHGFASPSGAPPXRRSKSRSAVVAVRTHQLAXTAVVPLARRRREMGSGESDLGARVLPLSPGRCFIRGRDDWSRPLDRTAQIRLASGRRRRXITLRXWAAEVHRTVPAYVGHAQLLSLRAVELMTQLAEDGQAQVWASLGRPMPKVFKVSHYQTMFXPLQRTGTIASHKKIKKKEAGSICRSLKKNILIDDLE

SEQ ID NO: 201940 - protein, 62 aa, Oryza sativa
  Clone ID: PAT_MRT4530_97267C.1.pep
MESTGVEAKPPVSGAIESIGGGDEVSHKRRGVGEEEFAKVVDEKIGHREEEFAKVDYIALVD

SEQ ID NO: 201941 - protein, 531 aa, Oryza sativa
  Clone ID: PAT_MRT4530_97268C.1.pep
MALSFAVRRRATELVAPAAPTPRETKRLSDVDDPESLRWQVPVVFVYRPSAAAADPVDTIRRALAAALVPYYPFAGRLREVEGRKLVVDCTGEGVMFVEADADVTRLLCGGFVLGIRLNHAMCDASGIVQFMDAVADLARGAREPAVSPAWSRELLDARKPPKLAFHLREYNDFAAAPPAAPSVGALGDMVMRTFSFSPGDVAALKGALPPHLRGRATSFDVLASFVWRARARALETPAGEDARLAIIVSFRNNGELRLPRGYYGNVCVPVTVAMPAEALRRRGSLADVVEQVREAKKTVNAEYVRSVADTLVMRGRPAIDTANLLLLSDVRLAGFHRVDFGWGEPVYGGPSHAWYGVSYLIAVKNGAGEDGVAVPVVLPAAAMERFTSEIERLRKGQQRGHFRYTVWGRSWTGQFLTDQTDPHESDTHPEEASEQLPNRHLQLSNDSQAFESWLRRWAGGGDEAGGGGACSRLHFSDAGAHEVSCAGEGEWREHGGGGCGGGCCGGVGFVESPTCGWGSSYHIQIKIKQR

SEQ ID NO: 201942 - protein, 118 aa, Oryza sativa
  Clone ID: PAT_MRT4530_97269C.1.pep
IPGSPSLRRRGGDGGGGEEEEKVRASVKRLCAYCKVVKRRGIVFIQCKANAKHKQRQGFSTLAEAAAACHPPPPPLLTNTSPAVAAAVAEASKVAKQEPSMKFNWPLGLAALLKNSDK

SEQ ID NO: 201943 - protein, 108 aa, Oryza sativa
  unsure (1)..(108): unsure at all Xaa locations
  Clone ID: PAT_MRT4530_9726C.1.pep
SLACFLTANKGFIGVSADEVSRHCIGLRGFHPIGFYWIILFNYIDYHQSIVFISLSTLXPDSFKPYCYQLGQTDWHVCISSTFGPALELSKSPRPVCVFRVNTYVFSI

SEQ ID NO: 201944 - protein, 320 aa, Oryza sativa
  Clone ID: PAT_MRT4530_97270C.1.pep
MDDDDDTSFNNSLDLYCDEDPFDSTPPPPPPPPEQQQQAGTTTPDDIDDEVMEYYKAKQRCYALQIRDYCCYLQCHHLLLQQQQHGVAAARLKAAMGRLGLEAATAFNAANYLDRFLSINCHLKWEEWMVEVVSVGCLSLACKLDEVTIPSLHDLQMEEAMGHSFRASTIRDMELTLLKALRWRLACVTPFSFLPVTTTTTTTRALLLRSLLDPSFLRFDASLLAASALTLSSTTPQHPNHLLLNRLIHPFSQTDHEVKECFNMMKALHLDMSKNPGRSSDHPCWSPISVVIPFHTDGTVKRSAISRCLFGSGRLKARSI

SEQ ID NO: 201945 - protein, 260 aa, Oryza sativa
  Clone ID: PAT_MRT4530_97271C.1.pep
MLNLHTIRMSIPSLHRSSPYRCALLKRKRSCIRACSSEDDGSDASSSLGGDKRQQEVLAKIAMLQAQKVRITSFLDERSAYLTKFAKDADTEFDLIGQNAMKELDEVGDQIMERLDSKMQAFEETAEVQRQEIEMNERVLEDFEDWIEKEKNEGMFFKSLGKVKPRNKKKLTVKPIPKLEAQKVKDIAKESAGSKTRMNIYLGLMAILGLTIANAVFATPEVEWRKVAALGLIFIGLVAQVIYEQDISSPEAEKKGGKEE

SEQ ID NO: 201946 - protein, 101 aa, Oryza sativa
  Clone ID: PAT_MRT4530_97272C.1.pep
AKQQKNDGCGNAGANLDNRRGLRLGLPMSGSKNREAAAKAKNTGFEETIDLKLKLPTAGMEEAAAGKAEAPAVQKAKRPAEAVVDDAEKPPAPKAQAVGWP

SEQ ID NO: 201947 - protein, 108 aa, Oryza sativa
  Clone ID: PAT_MRT4530_97273C.1.pep
MKALNRHPAPTKTVTGSETGGTHRGTRTREADADGCLGSQKTENNYGRTMTIREDPTKTTTNRGVEGPDPSPSLPRRRATGEEEGEGPEGTKDSYRKDSRELSREEEK

SEQ ID NO: 201948 - protein, 109 aa, Oryza sativa
  unsure (1)..(109): unsure at all Xaa locations
  Clone ID: PAT_MRT4530_97274C.1.pep
EDSRAGGGAVAAPRRGGKHPPLLPLRAQAGEGEXQPPSAPRPXRGGGRSRCSHAGDGSSRRHAXGRKSSSRRHCRRRRGGXSSRLHRLGFEATGEVAREREGDQRPTRP

SEQ ID NO: 201949 - protein, 73 aa, Oryza sativa
  unsure (1)..(73): unsure at all Xaa locations
  Clone ID: PAT_MRT4530_97275C.1.pep
MPGGKTIGPTREETRENLPSEVELAEMVQAQGAVMVNKEQYEELQRELQRXLHDQTMGAGGSENARSKHNPVC

SEQ ID NO: 201950 - protein, 82 aa, Oryza sativa
  unsure (1)..(82): unsure at all Xaa locations
  Clone ID: PAT_MRT4530_97276C.1.pep
MGHPXFRPARHGPTAGGPCLGGRRSPWAGTALHEVPIGPCRPDGWWAVPGRVWAGPFGHLYSPTTMTTTTVDGARTAVLSPC

SEQ ID NO: 201951 - protein, 97 aa, Oryza sativa
  Clone ID: PAT_MRT4530_97277C.1.pep
SARGSKHCCDGRDHEGGTTFSVEKQASGCLSQVSLLLPYCCCCSPWPTPPLHALSRRRALSSGSLLGYRMTMASPCRGGMASTAARGKASPAVKTGL

SEQ ID NO: 201952 - protein, 351 aa, Oryza sativa
  Clone ID: PAT_MRT4530_97278C.1.pep
MEVKCLLLLALFLLLGTHGGEAQPLVPAVMTFGDSSVDVGNNDYLKTIIKANFPPYGRDFKNQVPTGRFCNGKLATDITAETLGFESYAPAYLSPDASGKNLLIGANFASAGSGYYDHTALLYHAIPLSQQLEYFKEYQSKLAAVAGSSQAQSIINGSLYIISAGASDFVQNYYINPFLYKTQTADQFSDRLVGIFKNTVAQLYSMGARRIGVTSLPPLGCLPAAITLFGYGSSGCVSRLNSDAQNFNGKMNVTVDSLSKTYSDLKIAVFDIYTPLYDLVTSPQSQGFTEARRGCCGTGTVETTVLLCNPKSIGTCPNATTYVFWDAVHPSEAANQVLADSLLAEGINLVT

SEQ ID NO: 201953 - protein, 69 aa, Oryza sativa
  Clone ID: PAT_MRT4530_97279C.1.pep
MAGSSGFRSEEARPGRVLHGGQQRRRRARGEAAVAAAAGSANGVVAGAAVSSVDCEGRRVLCSWEIFLE

SEQ ID NO: 201954 - protein, 202 aa, Oryza sativa
  unsure (1)..(202): unsure at all Xaa locations
  Clone ID: PAT_MRT4530_9727C.1.pep
MRSLRILSTPMAQRSSAPFIAHCLPLPYLCSVQVVPGIPVSHPXLPLPTGDQGSARLRWDPLTSVPPRKIVVTRGATQEVRRASCSFPVAWVSSPVISSLLTLSARYGSTAGHAGDEVVPLPHRPXWSRRPPHLPPPTELRSSPAAAAAAKLQRCHSLCISQRGLIFLSLQEEERVIVVAARWLTGKARGRGRAQRDRESGL

SEQ ID NO: 201955 - protein, 141 aa, Oryza sativa
  Clone ID: PAT_MRT4530_97280C.1.pep
MARKVAVAAMDAKEAEEVMRRNAALEAAAAEAAAREERLRRELEAALAALAVAEEAEERLCVQLGELEAEAMAQAVEYQQQVRELSDRLAFADGVLRFPKAKAIIAESKQRQDLFVDFGCLAKARLGLRLKLERYSFSLLN

SEQ ID NO: 201956 - protein, 214 aa, Oryza sativa
  unsure (1)..(214): unsure at all Xaa locations
  Clone ID: PAT_MRT4530_97281C.1.pep
MEVKCLLLLALFLLLGTHGGEAQPLVPAVMTFGDSSVDVGNNDYLKTIIKANFPPYGRDFKNQVPTGRFCNGKLATDITGHILTLAKCCYFPMYMXVAVAFSNRDPVLLLPVVAAETLGFESYAPAYLSPDASGKNLLIGANFASAGSGYYDHTALLYHAIPLSQQLEYFKEYQSKLAAVAGSSQAQSIINGSLYIISAGGSDFVQKYYINPFL

SEQ ID NO: 201957 - protein, 71 aa, Oryza sativa
  Clone ID: PAT_MRT4530_97282C.1.pep
MAQAVEYQQQVRELSDRLAFADGVLRSFPKAKAIIAESKQRQDLFVDFGCLAKARLGLRLKLERYSFSLLN

SEQ ID NO: 201958 - protein, 457 aa, Oryza sativa
  unsure (1)..(457): unsure at all Xaa locations
  Clone ID: PAT_MRT4530_97283C.1.pep
MGGILVPYVCGACGPGRTGGKRGFAIRGSEATKSRHDAPQSPXSLPRVSQRGVGGVPGASWGWFFQAAAGSPKLDPAEERISGKGAAKLLDGRLVLDNAXRARIHADPAPEFDQFDCLPDPVVLLILNKLEDVRSLGRCAAVSKRFSGLVPLVSDVYVKIDRVVATDGDADDALNLSSAKPKNIFSHFFKLMLFTIVKPFHSMRNLNGTGRPLFPLAQHSPVHVLRNFSDVWNLRVELPSGDVGTEEGVLLKWRAEYGSTLRNCVILGGTLVDRKPIGAEHESSVEDNGSMPESFYTNGGLKLRVVWTISSLIAASTRHYLLRSIIKDHPTLRSLVLADADGQGTLYMGMEQLREFRENKLSASACSNRTQVPACNMKLKYAPYLELPGGMTLQGATLVVIKPSNDGGSGGHSSRKETEAFVSSAFDEPFRFAVKALMKRRTYLLEMNAEQLQSCLE

SEQ ID NO: 201959 - protein, 82 aa, Oryza sativa
  Clone ID: PAT_MRT4530_97284C.1.pep
MFACRLVDLLHSPLYLPRRLTILDIASHRWSKPNAVASALLSPLLLAAATAPTTTALLSALLAGILLAAAVAVATDAASVEL

SEQ ID NO: 201960 - protein, 69 aa, Oryza sativa
  Clone ID: PAT_MRT4530_97285C.1.pep
HQRCHSPPSGVAGANLCSWRVAAAQDQQAPKTDPVEDDVVSDTEALHHHRPRPPRPRRAAAFGCPAAAL

SEQ ID NO: 201961 - protein, 47 aa, Oryza sativa
  Clone ID: PAT_MRT4530_97286C.1.pep
EWWEQLAPGRMLTESPDNGMCASEARDPHRRPSWASAMPRCSRRAPE

SEQ ID NO: 201962 - protein, 105 aa, Oryza sativa
  Clone ID: PAT_MRT4530_97287C.1.pep
MAKLIPCNTVVQTKKTQVFTTYKDKQMMVTIQVFEDEQSMTRDNLLLGKFDFTGIVLALRGLPQIEVTFDMDEHVDTRNNLEAYVYNIKNAVDGKMADAVEGEEK

SEQ ID NO: 201963 - protein, 103 aa, Oryza sativa
  Clone ID: PAT_MRT4530_97288C.1.pep
DQISPPRRGTPRTPRKGRANPERPPPNPEARQKRQWGKKKKPGEKGKKRGPPGKTKREKKAKKKGGPRGKGKNGKNKKGKAKKKKGKPEKPAVPGENPRGPMR

SEQ ID NO: 201964 - protein, 347 aa, Oryza sativa
  Clone ID: PAT_MRT4530_97289C.1.pep
MELPQDILMSIFSTLEILDLIRAGSVCNSWRSAYTSICSLGHCKPQQTPCLLYTFESDSTKATGLYSLAEKKAYMLTLLDPALPSRFIIGSSHGWIITADERSELHLVNPITGKQIALPPVTTIEQLSIARSGDDKWTWLPPHKDYEDCIFRDGLLYALTSEGEIYEYDLSGPAITRKIVLNKVKGFTCENMYIVRAPCGDLLQVWRSYDPLDDEDEDASDDLEADHDDESYVWNTTMIKVHKVDLVARMLVEACDLGENVLILGHNQSLCLRADEYPLLKANHVYLSDDRELYIKGCKNGCRDIGVFNLENNCAEEIVSPQLWSNWPPPVWMTPNARKISLETHSL

SEQ ID NO: 201965 - protein, 185 aa, Oryza sativa
  unsure (1)..(185): unsure at all Xaa locations
  Clone ID: PAT_MRT4530_9728C.1.pep
VPIPATKLDGEGAAGVELSLANPTAATARCGATLAAASGGRSNGNGGGXAGFRRPTWGVGEERGAGFENXIPAISGAGRGCGRERERRSGCGRCGTRAGVADVAWRRRRRGRGGGCGRGGAGWRKETGPTGGAHLSASRGEREGRLGLAHKEEGARGGVDWADGPRRGKGTNKKQRKTRATTTGA

SEQ ID NO: 201966 - protein, 61 aa, Oryza sativa
  Clone ID: PAT_MRT4530_97290C.1.pep
RYAFFNLAKNWFGLVFEKIRQNNLIVVDLVQSSVLREKNKSQQNIKIASIVAVLTSNSTQE

SEQ ID NO: 201967 - protein, 91 aa, Oryza sativa
  unsure (1)..(91): unsure at all Xaa locations
  Clone ID: PAT_MRT4530_97291C.1.pep
SPRLVFGGRGRRFGAAAAAPRSVPGPAGSGEEQPAVGNEGGGGGAXGGRGTAEFGGDGGGVFLADLDSGDGRGWRWQACWRRQMAAGDGGG

SEQ ID NO: 201968 - protein, 578 aa, Oryza sativa
  unsure (1)..(578): unsure at all Xaa locations
  Clone ID: PAT_MRT4530_97292C.1.pep
MAAEEVVEPSAPDVEAGVAPSASAPALQPPPSAPAASTGQAPNTAATARVLQTRAEILSTSQQVAPQAASPQQAPTSTALAAAQVNPNLDAQAEADMEAMRQNMARLQDMLRQMEGQQQAHHRRWWKGFQPGKRSFKLSFTSSTNPTIFQVQPLRSDRKGMQVRVHPVGYRRTSLVQGLRLGAKDRSSTPTLPFKHRPSNHRRRHQASEPIKRRTRSPWLGHSLVPNKPGGEKGLPLSRGIKIHPIPPQFKFPPVPRYSGKTDPKEFLSIYESAIEAAHGDENTKAKDITEASVINAASAGLLEGELKRKIANKEPQTLEHLLRIIDGYARGEEDSKRWQAIQAEYDKASIAAAQAQQISFGPEDAEGVLFPHQDPLVILAEVAGFEVRQILVDGGSSADVIFAEAYAIMGLPTLALTQAAAWLRGFGGEAVQVLGQVQLAVAFGTNENKREEQILFDVVDIPYNYNAIFGRATLNKFKAISNHNYLKLKMPSPAGVIVVRGFSLRLHHXGDLAAISRAVHNVQAEPHDRTKHPPLMARPQQGVPERRLPPAQQVGGGVISLRSAFCRPHCYQVPSPS

SEQ ID NO: 201969 - protein, 90 aa, Oryza sativa
  Clone ID: PAT_MRT4530_97293C.1.pep
SPGKGVFPFFYKMGAKVGGYSPIFLPGGGFPPGDPHVGGTPGVFIWAVTLPGVLGGGALLVLNTRALPGLIFPQSRLCMEPPTGGLQIFL

SEQ ID NO: 201970 - protein, 251 aa, Oryza sativa
  Clone ID: PAT_MRT4530_97294C.1.pep
MADYHFVYKDVEGASTEWDDIQRRLGNLPPKPEPFKPPAYAPKVDADEQPKSKEWLDEREPDELEDLEDDLDDDRFLEQYRRMRLAELREAAKAAKFGSIVPITGSDFVREVSQAPSDVWVVVFLYKDGIPECGLLQTCLDELATRYPATKFVKIISTDCIPNYPDRNVPTILVYNNSAVKGTYVGLQKFGGKRCTPESVALALCQSEPVLNDGQSGGDSSRDNVIEGVRRKFIEKVVAQHEEREEDDDSD

SEQ ID NO: 201971 - protein, 277 aa, Oryza sativa
  Clone ID: PAT_MRT4530_97295C.1.pep
MVSSHAAIVFFLVAASSLLSSVAADYGYPADYGYAAGSKLGPENWGKLSPAYKLCGDGKKQSPIDIVTKQAISNPNLDSLNRTYTASDGTLVNNGKDILASHPDKVGTVTVNGKVYSFRRVHWHAPSEHTINGEKHPLELQMVHAAADGSLAVIAILYKYGAPDSFYFQLKRKLAELAADGCSFGEENAQVALGLVHLRSLQKRTGSYFRYAGSLTAPPCTEDVFWSVLGKIRQISQEQVALITALLPAGGARPTQPLNGRTVQFYNPPNSTISFKV

SEQ ID NO: 201972 - protein, 143 aa, Oryza sativa
  unsure (1)..(143): unsure at all Xaa locations
  Clone ID: PAT_MRT4530_97296C.1.pep
MSSADSAWNPGGGASNRMKHSVSTPNLMSGGSSVQALSTSNGGNKKQQPPQSSQTLPAADDVRAANKTLVERMRSALGMDEDRYSAFKEIAGEYRQGIIGTSEYLSYVEXIGLSHLVPEMAXRLYLILRSRKELADAYHTNIR

SEQ ID NO: 201973 - protein, 241 aa, Oryza sativa
  Clone ID: PAT_MRT4530_97297C.1.pep
MVSSHAAIVFFLVAASSLLSYGEAAPKMTAVAADYGYPADYGYAAGSKLGPENWGKLSPAYKLCGDGKKQSPIDIVTKQAISNPNLDSLNRTYTASDGTLVNNGKDILMEFEPDKVGTVTVNGKVYSFRRVHWHAPSEHTINGEKHPLELQMVHAAADGSLAVIAILYKYGAPDSFYFQLKRKLAELAADGCSFGEENAQVALGLVHLRSLQKRTGSYFRYAGSLTAPPCTEDVFWSVLGQ

SEQ ID NO: 201974 - protein, 192 aa, Oryza sativa
  unsure (1)..(192): unsure at all Xaa locations
  Clone ID: PAT_MRT4530_97298C.1.pep
FLTFDTILAAVPATLDCKDYTDGLPRHTGTNTLSTPLHVARGQNFDAGWVKYDRVVKCNDQSEGXMKDTVFVLEEGAKLRNGIIGANHKEGVYCKASCTLEFVWCEDVCXDVISIKGAGTDDIIVGVAYEAADKIIHHNGCGHINIINFYANDYGKVYRSCGNCSANCRRSVHMHMTTAVNGGELMDINLNY

SEQ ID NO: 201975 - protein, 62 aa, Oryza sativa
  Clone ID: PAT_MRT4530_97299C.1.pep
LEIPIRRHRVPLPRHGGVAGGPQRHRVPLPLRRRRVHHCRVPPSAPRDRRPHRRRKRRRRRM

SEQ ID NO: 201976 - protein, 78 aa, Oryza sativa
  Clone ID: PAT_MRT4530_9729C.1.pep
GVRQTANRIKERAGSGCLGPRGRGKRNPTPPSGEIRRRADTSPSGPTSPKVPGHVGDCVCLKPLVMILPVPYHRQAAM

SEQ ID NO: 201977 - protein, 219 aa, Oryza sativa
  unsure (1)..(219): unsure at all Xaa locations
  Clone ID: PAT_MRT4530_972C.1.pep
SIMLCKTFVGSNCLCVCSYHLSFLXHFDSEYFAIVCRDVDVEDVQQRGQPELPVLVPALCXEPYVPQDVVDQNLPVETGMAMTSLGWSFLXSTPFALESVLADRDHRMQYXRTKFEVAELEGTMXEVKKDRAVEALRGREVWFNSYLRSCCTAMAGVCKELRVPRGYPKEFAAGYISWLNGAYAQLEGIGKHIDEALKQECRRSSRYAGGHVLACIRDH

SEQ ID NO: 201978 - protein, 823 aa, Oryza sativa
  unsure (1)..(823): unsure at all Xaa locations
  Clone ID: PAT_MRT4530_97300C.1.pep
IAFNYLTTAIFLLLLPACVADDQLVPGKPLSIGSTVVSNGGAFALGFFSPTNSTSSNLYLGIWYNDISPLTLVWVANRGTPVKDGGHGSSSSAPSLTLSNSSGLVLADGDGRVLWTTDITIIAANSPAVAVLMNTGNLVVRSPNGATLWQSFDHPTDTYLPGMKIGINYRTRVGERLLSWNDGPGDPSPGSFSFGGDPDTFLQLFIWNQSRPYWRSPVWTGNPIPSQLMVNGTTVIYLSVVDADDEIYLSFGISDRAPRTRYVLTNSGKLQVLSWDGGDGASEWSKLGELPKYECEHYGYCGPYGYCYYSEVAPTCECLDGFEPRSKEEWSNGRFSRGCRRTEELPCGGDGRRKEAARCGDGFAEFPDMKLPDGYALVGNMNAGECAAACRRNCSCVAYAYADLSRSTRRDPTRCLMWGGELLDMEKVNESWGDLGETLYLRMAGAGKXNLFRYMALSIFFRLVLSQFLTAKYVLSVSDEFGKEIPAQDLDFPFVEYNEIATATENFSDAAMNGKGGFGKVYKVKLIGGREVAIKRLSRCSEQGVVEFRNEVLLIAKLQHRNLVRLVGCSIEGDEKLLIYEFMANKSLDASLFNSERKSSLNWSTRFKIIKGVARGLLYLHQDSRLTVIHRDLKASNILLDAEMNPKISDFGMARIFGDNQQNGITRRVVGTYGYMAPEYAMGGIFSMKSDVYSFGVLLLEIVSGSRISSTDFIEDFPNLSIYAWNLWNEGKAKNMIDPSIVASCLLDEVMLCIHVGLLCVQENLNDRPLMSSVMLILENGSNSLPAPNRPAYFAQRDIEMEQPRDDTQNSNNTVTLTVMEGR

SEQ ID NO: 201979 - protein, 118 aa, Oryza sativa
  Clone ID: PAT_MRT4530_97301C.1.pep
MAATTCRLAAAPFVLAPLPRRPTTVAFAVAATGIKQWAKVEDKYAVTAIGVAALVGLWTAIGAIKAIDRLPLLPGVLELVGIGYTGWFTYRNLIFQPDREALVSKIKSTYNEITGSSS

SEQ ID NO: 201980 - protein, 150 aa, Oryza sativa
  Clone ID: PAT_MRT4530_97302C.1.pep
MAATTCRLAAAPLVLAPLPRRPTTVAFAVAATGIKYGLRASRGVAIRAADGTGSETEVPEVVKAAQDAWAKVEDKYAVTAIGVAALVGLWTAIGAIKAIDRLPLLPGVLELVGIGYTGWFTYRNLIFQPDREALVSKIKSTYNEITGSSS

SEQ ID NO: 201981 - protein, 165 aa, Oryza sativa
  Clone ID: PAT_MRT4530_97303C.1.pep
MAATTCRLAAAPLVLAPLPRRPTTVAFAVAATGIKYGLRASRGVAIRAADGTGSETEVPEVVKAAQDASQFLLQLVVRPFLCNWAKVEDKYAVTAIGVAALVGLWTAIGAIKAIDRLPLLPGVLELVGIGYTGWFTYRNLIFQPDREALVSKIKSTYNEITGSSS

SEQ ID NO: 201982 - protein, 424 aa, Oryza sativa
  Clone ID: PAT_MRT4530_97304C.1.pep
MGNCCGWGARIKDGSPQPGASGMFSRSGAKDGSRLSGCSSRASSASMPPTAKTECEILQSANVKIFSFSDLRIATRNFRPDSVLGEGGFGSVYKGWIDENTLSACKPGTGIAVAVKRLNQESLQGHREWLAEVNYLGQFCHPNLVKLFGYCLEDEHRLLVYEFMPRGSLENHLFRRGSHFQPLSWNLRMKVALGAAKGLAYLHSSEAKVIYRDFKTSNILLDTDYSAKLSDFGLAKDGPVGEKSHVSTRVMGTYGYAAPEYLSTGHLTAKSDVYSFGVVLLEMMSGRRAIDKNRPQGEHNLVEWARPYLTHKRKIFRVLDTRLEGQYSHVGAQTVATLALECLSYEAKMRPSMEAVVTILEELQESSHVDRKPAAERRQESTTGTGKKAPTANASKNSGKPRRKSLGETREKIGPNPTALVRSH

SEQ ID NO: 201983 - protein, 51 aa, Oryza sativa
  Clone ID: PAT_MRT4530_97305C.1.pep
FFFFFFFSGENIILFISDHIYSCDHGVSSGAHQPKSPAFQLQLFTTINTMV

SEQ ID NO: 201984 - protein, 99 aa, Oryza sativa
  unsure (1)..(99): unsure at all Xaa locations
  Clone ID: PAT_MRT4530_97306C.1.pep
AXFCGMVGIGLAFCGGPSSGCSMNVVVAWICSGGRGYVASIPSLYPIYLGLLADLLDCFLVCVTYQGLPFPPIVFFISIYTVVCFCCFDSPVHIFSYVH

SEQ ID NO: 201985 - protein, 67 aa, Oryza sativa
  Clone ID: PAT_MRT4530_97307C.1.pep
RAAGIRHEGHIWILEAAKTLFSITRTSTHLTSINIPCLLDTTHITLELYSKLKIIKQKNKYKTISLH

SEQ ID NO: 201986 - protein, 77 aa, Oryza sativa
  Clone ID: PAT_MRT4530_97308C.1.pep
TRFVSNPSPPPPPKTLPFPSPYSNGAATNPAQLLAIDSHHPRASSSSVNLPQPLLSLSLSLRRPPAPPPPPVSPWRP

SEQ ID NO: 201987 - protein, 76 aa, Oryza sativa
  Clone ID: PAT_MRT4530_97309C.1.pep
TFLVFNENKVPNLQSHLENIVGENYFLNQSAKEAYRSYILAYDSHSMKDIFDVHNLNLKVHCLLNFFLKDFWFPCA

SEQ ID NO: 201988 - protein, 679 aa, Oryza sativa
  Clone ID: PAT_MRT4530_9730C.1.pep
MDEVVATMDISEANEGYASCGSVIEMSRQMKTTRVGARAQPWPACPGIPAVGRVGSVLLFTARMGEWLCHIFTTGSKAMECGVKMCLVGWPGLAWDELGPRSGCQFGPNHRRPWVKAVLDGQVSEEEDIVSCSPKLRKTAGSASEVEEAVKPAVKQDKRLRSVKVLSLVSNLSLPFVFPLSLSKPLQQMADNEKGNKVRSQDIGTSSSRVNEAPDTSCVAVVQHLINQNKLLIEILQQHRMPILNPSQIQPQVQLEAVQALTPQVSAPPTSQKAPHAMPHVDPKEASIICFMCDEQGHYARNCPQQKRKAPMRTEDEVRKMIITSTEWPPPGMTKCQRRNSSRGAQQLTEHLLANGGRVSGSEDSDQVSSDDEDEKSPQGFNQNKIELKACSRCGEIGHVASSCASTCVHCEEDHPPDRCPTSRITCFFCEGTDHVPKDCRFSFLLTKKMANQPVSSNGEKHQGNTNPRQDYSFSLTPVPGQRKQNEKRKCRVREDICCFNCQGMGHFADKCPKPRNVAASTSVHANPRNQKLAPQRIVIHASRSSPIARVATAPIPMSALPQGVNAQFQPQPPADKTEASICVVPLEVPIQQLRNQVQDEEPECKKVIVCYNCTEEGHYSKNCPQPRQNRPPHYRQFTRSRHSNRIVVTGANAVPKSEIFNSVSDATRSEKCKHRLPG

SEQ ID NO: 201989 - protein, 429 aa, Oryza sativa
  Clone ID: PAT_MRT4530_97310C.1.pep
MRPSPALAGGGRTVANLLSATEWMLPSPATQVHTISVLPSHSPPSPPHHFAFSNLTTAPKRNGGKGEEEGRPRFEVVRDDLLHPLANGNKARKLDALLPLLRRRGATDVVRAHRCIPLHPALITSCFSNLMVTCGGCQSAHAAATAVHCAEWGMRPHILLRGEQPDIPTGYNLISLMFGNVAYASRSVYAHRDEMLYNHARKVAGTGGTVLWADDISKEDFVLDEDNGCEIGSRRVVIIKEGAGDVQALLGVIRLVEYLYNLSSFHKHENVHVVVDAGTGTTAVGLALGAVCLGLHWRVTAVMLADTLERYKEREKSLISDFKKLCHNNYHEMVGENDIGDSLVEWVERFSPRRFGKVLNGEIALCRQIAQQTGILLDPMYTLAGWEQAVDLCVGDSRTKVVMIHTGGTLGFCGLAQRYSSHFTSDEQT

SEQ ID NO: 201990 - protein, 62 aa, Oryza sativa
  unsure (1)..(62): unsure at all Xaa locations
  Clone ID: PAT_MRT4530_97311C.1.pep
MAKWAAIMAVLLLAAAWARRRRXMXCNVGQLAICAGAIIGGSTSSXXXCSNLRAQSGCFCQY

SEQ ID NO: 201991 - protein, 55 aa, Oryza sativa
  Clone ID: PAT_MRT4530_97312C.1.pep
MVGYVIRVSASEKSSNMYCIDEWHMAEDDMLKHVQEKERYTAHRPTKTKSKALAS

SEQ ID NO: 201992 - protein, 115 aa, Oryza sativa
  unsure (1)..(115): unsure at all Xaa locations
  Clone ID: PAT_MRT4530_97313C.1.pep
SSCAPQWDDAWGRRRRGAADTDEGSEQEEAAARGGGPDPLSLTSPRRRWHGEGGGGGGTGKEEAAAAPTPMRGASRXGGGGGGAGTRREEQRRGRREEGGRGSRRGGGRRGGVAM

SEQ ID NO: 201993 - protein, 446 aa, Oryza sativa
  Clone ID: PAT_MRT4530_97314C.1.pep
MEDQRLQWRKPGSFLLVAGVFLAAAAAVSNAGIGEFDEHWEKRRAAAEAAAEEVYKPDPFNVTNEFNHAVIRSTERGVLRRELSGKNSKYKGPCLATNPIDRCWRCRKDWATDRKRLARCAMGFGRGATGGVRGKIYVVTDPGDGDAANPRYGTLRWGAMQAAPLWITFAKSMVIRLTQELLVASDKTIDGRGAQVHIARGGAGITVQFARNVIITSLHVHDVKHSDGGAVRDSPTHIGPRTRADGDGISLFAATDVWVDHVSMSMCEDGLIDVVQGSTGVTISNSHFTNHNDVMLFGASDSYPQDKVMQITVAFNHFGRGLVQRMPRCRWGFFHVVNNDYTHWLMYAIGGGMSPTILSQGNRYIAPPNIAAKLITRHYAPEWEWKNWAWRSDGDLFMNGAYFQASNGAINRKVKGSDMVKPKPGSYVRRLTRFAGALSCRPGEPC

SEQ ID NO: 201994 - protein, 90 aa, Oryza sativa
  Clone ID: PAT_MRT4530_97315C.1.pep
MAAAAAAAAAEVRAPVPSRRGWEEVDERRCWLPRPPIVDGRRSKTVASTTVAPKEVKENNDNNSGSRASCRGWRRSKIVAVTTTVGSVRR

SEQ ID NO: 201995 - protein, 358 aa, Oryza sativa
  Clone ID: PAT_MRT4530_97316C.1.pep
MHTIAEVTGGTFSFIENKAAIQDGFAQYIGGLLNVAVQEFHFDAETWRGPDGPRVHERGRRRGGGVRRRRALRGGVAVRPGETVMCDPPGEFYYHISQIALEPGELNENVQVFGEVDGKRILLGTLSVEHRPQLSIDLEYFSLTFCLAVCTSDSPTEEGDESDEEVPLAIPLFPNSDDDKIKEVQNSPSKFATLKSAAAASPTPEAIVEERKNYGKSEADDDDSDEESDASGEDEYDDDEDMIDKQDSSDDDGDSSDEEETPSKILCAGTGKRSGYVHVATPYPAKQAKKTPVNNDMAKQSSGYVHVATPYPAKQAKKRTANNDMSEHSAGYACKPCTDFQHLYGSGSSFQAKHTATK

SEQ ID NO: 201996 - protein, 1307 aa, Oryza sativa
  Clone ID: PAT_MRT4530_97317C.1.pep
MAQPRRRGGGGHNKCPRPALLPAAALLLFLLAAVALLYVSPPPLIDHPALASSRRRSPHAPLLNSSGGGSTVVSEHSEISRVPISKEADGLWGSKFASRFYGCSNSSSRFLGSSVITQPDRYLMIVTSGGLNQQRTGIIDAVVAARILNATLVVPKLDQTSFWKDASNFSEIFDVDWFISNLSKDVKIVKELPEIGGKLRTPHRMRVPRKCTQRCYVNRVLPALLKKHVVRLTKFDYRLANRLDTDLQKLRCRVNYHGLRFTGLIEEMGEKLIQRMRERSKHFIALHLRFEPDMLAFSGCYYGGGEKERKELGAIRKRWKTLHAINPEKGRRQGRCPLTPEEVGLMLRALGYRNDVHIYVASGEIYGGARTLAPLKAFFPNLHTKETISSKEELAPFSKYSSRMAALDFIVCDGSDAFVTNNNGNMAKILAGRRRYFGHKRTIRPNAKRLYSLISNRRNMSWDSFSSRVRMVQKGFMGEPKELRPGRGEFHENPSTCICEKTVSKTVAKSNSQSEQVLSNDTERGIAIQTEQVSSNDTEMGIATSEPTVPDHTDEEAGESEADEDAPGEKEEIIDPEADDDAFFGISYGFVVTELTFLESVTSMDVNNRPNKQRSHLSTSQASEAFDPFTSHSQQQQAVLTNHQEVEIKNGIFELTLSNPDGIVTGVRYNGVDNLMEILNKEDNRGYWDLVWSKLGERTGIFDVIKGTEFRIIYQDENHAEVSFVRTWDPSLEGKAVPLNIDKSLLNYATSYTECLNPLLWCKFRFHYMALADDRQRIMPMPEDRVPPRGQQLAYPEAVLLVDPINPDLRGEVDDKYQYSCEDQYNNVHGWISFDPPIGFWQITPSDEFRTGGPVKQNLTSHVGPTMLAMFLSGHYAGDDLTPKFLTGEYWKKVHGPVFMYLNSSWDGSDPTLLWEDAKVQVITFRLILIDSTSVMNTAQMMIEKESWPYCFALSDDFQKTEQRGCISGRLLVRDRYLDDADLYATSAYVGLALPGDVGSWQRECKGYQFWCRAEDDGSFCIRNIVAGDYNLYAWVPGFIGDYKLDAKLTISSGDDIYLGDLVYEPPRDGPTMWEIGIPDRSASEFFVPDPNPNYVNRLYINHPDRFRQYGLWERYAELYPDGDLVYTIGQSDYTTDWFFAQVNRRTDQSTYQPTTWQIKFNLDSVSPNSTYKFRVALASSANAELQVRFNDQDRTAPHFTTGLIGKDNTIARHGIHGLYWLFNIDVSGAWLVQGMNTIYLKQPRNQSPFQGLMYDYLRMEELRSPLSTSQAPEAFDPFTSYSQQQQAVLTTDQPPVSAPLLSSSLA

SEQ ID NO: 201997 - protein, 127 aa, Oryza sativa
  Clone ID: PAT_MRT4530_97318C.1.pep
ARGQRNQREQVIKWNIFFCRKVGLIMFIRDIWLLKACDGSLQHIWVRRDCPAAPGEAMQALKCAGCGASSKGFLILLEPVLCDPNFLKANYFVVSSPLFSHMSSSCYLGIMSFIHLWQLELLTRLTC

SEQ ID NO: 201998 - protein, 618 aa, Oryza sativa
  Clone ID: PAT_MRT4530_97319C.1.pep
MGKLSCKNLLPCCMGHPPATSSPAGATAGVSVMVSDRYVEIKNGIFEVTLSNPDGIVTGVRYNGVDNLMEILNKEDKRGYWDLVWSKLGERTGIFDVIKGTEFRIIYQDENQAEVSFVRTWDPSLEGKAVPLNIDKRFHYMALADDRKRIMPMPEDRVSPRGQQLAYPEAVLLVDPINPDLRGEVDDKYQYSCENQYNNVHGWISFDPPIGFWQITPSDEFRTGGPVKQNLTSHVGPTMLAMFLSGHYAGDDLTPKFMTGEYWKKVHGPVFMYLNSSWDGSNPTLLWKDAKVQMMIEKESWPYYFALSDDFQKTEQRGRISGRLLVRDRYLHDADLYGTSAYVGLALPGDVGSWQRECKGYQFWCRAHDGGSFSIRNIVAGDYNLYAWVPGFIGDYKLDAKLTISSGDDIYLGDLVYEPPRDGPTMWEIGIPDRSASEFFVPDPNPNYVNRLYINHPDRFRQYGLWERYAELYPDGDLVYTIGQSDYTNRWFFAQVNRRTDQSTYQPTTWQIKFNLDSVSPNSTYKFRVALASSANAELQVRFNNQDRTAPHFTTGLIGKDNTIARHGIHALYWLFNIDVSGAWLVQGMNTIYLKQPRNQSPFQGLMYDYLRMEGPSG

SEQ ID NO: 201999 - protein, 132 aa, Oryza sativa
  Clone ID: PAT_MRT4530_9731C.1.pep
MACPCTAPRRIALVWSPPPDQATETPRKSCAARVRASPRSQGITAHVPPCVILETLAPRPNYPKVAWLDIRSHRAAPLCHCPCACVIAVASVTPCHARRTSVKPPSSQTFYSKGWGVNRVATSTASSTTNDD

SEQ ID NO: 202000 - protein, 412 aa, Oryza sativa
  Clone ID: PAT_MRT4530_97320C.1.pep
MGHPPATSSPAGATAGVSVMVSDRYVEIKNGIFEVTLSNPDGIVTGVRYNGVDNLMEILNKEDKRGYWDLVWSKLGERTGIFDVIKGTEFRIIYQDENQAEVSFVRTWDPSLEGKAVPLNIDKRFHYMALADDRKRIMPMPEDRVSPRGQQLAYPEAVLLVDPINPDLRGEVDDKYQYSCENQYNNVHGWISFDPPIGFWQITPSDEFRTGGPVKQNLTSHVGPTMLAMFLSGHYAGDDLTPKFMTGEYWKKVHGPVFMYLNSSWDGSDPTLLWEDAKVQVITFRLILIDSTSVMNTAQMMIEKESWPYCFALSDDFQKTEQRGCISGRLLVRDRYLDDADLYATSAYVGLALPGDVGSWQRECKGYQFWCRAEDDGSFCIRNIVAGDYNLYAWVPGFIGDYKLDAKLTISS

SEQ ID NO: 202001 - protein, 57 aa, Oryza sativa
  Clone ID: PAT_MRT4530_97321C.1.pep
MAKTTPHGIGDGFIIREACGDHVPKCEANLPLAAAPTIDPSPPSSSVSAPVVEPLPP

SEQ ID NO: 202002 - protein, 64 aa, Oryza sativa
  Clone ID: PAT_MRT4530_97322C.1.pep
TWMDNLKRAQIRSTELEECVPIMTASEPRNAEWGLLIELYMNRLTSLLMLLTTTRVINVVGTDA

SEQ ID NO: 202003 - protein, 54 aa, Oryza sativa
  Clone ID: PAT_MRT4530_97323C.1.pep
MSSSTFNGDQTAPFFGFLGAVSALVFSCMGAAYGTAQSGVRVASMVVMRPELVM

SEQ ID NO: 202004 - protein, 326 aa, Oryza sativa
  Clone ID: PAT_MRT4530_97324C.1.pep
MYMGNNNNNGYCPQGGQGWNQTRPYYQGGNNNDNFSNQPSLKDLVFAQAKTTYALSKKLAAYDKTLENINVKLDGFASAFQNQLSFNKMIETQLAQLAAFVPANESGRIPRQPESSVENVKVITMRGGKSTRDLPYPNRASTSSITREAPSSNTADEEVQPKKTVPQEYCDTRLLPLTQRSMKPNPEDPHQRAIVGCYASANMHTLSQGHPQQQVTAHDYGSGQADEAVHQCHTPQAPGKEEGSRVSHDHLLDQVTAIRPSRLRPWSKCKCHAQRHLQQAHFTVLAPTPMRLQLANSSVRYLAGIAEDVLVKIWTWTQSRKRHSSL

SEQ ID NO: 202005 - protein, 262 aa, Oryza sativa
  Clone ID: PAT_MRT4530_97325C.1.pep
MIPVPDILYEADDEDSMASDSMDEASEEELVVLDMHVVVDSMDVMAGKEVHVVADSMDDEVGEEVLLLVADSMDDATGEEVHVVADSMDDEVSEEVLLVVADSMDDEAGEEALLVVADSMDDAAGEEMHVVADSMDDAAGEEVVMVADSMDDIAGEEVVVVADSMDDEAAEVVEVEQNKKVHSGHEFDEIKIEMWKLLLPRYFAKEECVTTGAGDNNDEVIEEERDLHNQKVHSDFEFDEIRTEMLKLLLPSYFPKKRNDSS

SEQ ID NO: 202006 - protein, 75 aa, Oryza sativa
  Clone ID: PAT_MRT4530_97326C.1.pep
TFLFLAGGKHATTERISTTKSRFLYNSYLPGYFLVKFLIPKTELHNSVTNSHILPSLRRRPPFLILTILELIMLL

SEQ ID NO: 202007 - protein, 52 aa, Oryza sativa
  Clone ID: PAT_MRT4530_97327C.1.pep
MAAPRAPLDPSAIAAERIDEIHATGSSDFRAYWRVGPTACGTGMSLCRCPGA

SEQ ID NO: 202008 - protein, 147 aa, Oryza sativa
  Clone ID: PAT_MRT4530_97328C.1.pep
MAASAPVEVGAQGTIGSLVCREVEYFRRMEVAVVSHDHGKNMSSSSKQASRRRHRQRGEPQDQEQGPAAVEGGRGRRAYLFLPSICSSAEVAEATGAARVRPFASYQIRSGEEQNVRGQNCVMTCVPSGRITTLIIEVDYLVLRKDY

SEQ ID NO: 202009 - protein, 102 aa, Oryza sativa
  unsure (1)..(102): unsure at all Xaa locations
  Clone ID: PAT_MRT4530_97329C.1.pep
TRVPDFPKGYEKXRFRXSRDTNRSGFXNEHALEPRNRSTMSPLIITRVETAQKPKYGDATPGLILDINLFGRFPLTRKEFECGTRTIGNVSKVKILLKGGLK

SEQ ID NO: 202010 - protein, 1439 aa, Oryza sativa
  unsure (1)..(1439): unsure at all Xaa locations
  Clone ID: PAT_MRT4530_9732C.1.pep
MGPTPRRRRRGKVVGGGCAGVGLAGRCNAVLKEHKTRLYILGRILDEKYGSLSLVRMGPYVTIILLIRGIIENGIFVNEKISFGFWCSILPLDLAPTGGPCKLQEVFRSENGKMGYLTELVVPVATAADTDSYKKASRTVRWALTWKADAASPEWAFPRPRGPCGAAAAGYRQPAMDSGIIGSTIGIFMQVIFDKYLSSKLEQWADRANLGGEFQNLCRQLDMAKAILMTLKGSPVMEEGIWQLVWDLKSSAYDAEDVLDELDYFRLMEIVDNRSENKLAASIGLSIPKALRNTFDQPGSSLFPPFKKARPTFDYVSCDWDSVSCKMKSISDRLQRATAHIERVAQFKKLVADDMQQPKFPNSRQTSSLLTEPEVYGRDEEKNTIVKILLETKFSNIQNRYKSFLVLPVVGIGGVGKTTLVQYVYNDLATITCFEVTIDILQSIDEEGHNQFISSLSLNNIQTMLVKKLKKRKFLIVLDDVWSCSNWELLCAPLSSGTPGSKIIITTRHHNIANTVGTIPSVILGGLQDSPFWSFFKQNAFGDANMVDNLNLIGRKIASKLNGIPLAAKTIGKLLHKQLTTEHWMSILDSNLWELRQGPEDIMPVLLLSYQHLPANIQRCFVFCSAFPKDYSFCEEELIFSWMAHGFIQCMRRDKTLEDTAREYLYELASASFFQVSSNDNLYRMHDLLHDLASSLSKDECFTTSDNLPEGIPDVVRHLYFLSPDHAKFFRHKFSLIEYGSLSNESLPERRPPGRPLELNNLRTIWFMDSPTISLSDASDDGFWNMSINYRRIINLRMLCLHHINCEALPVTIGDLIHLRYLDLRFSDIAELPESVRKLCHLQVLDVRSCKNLVKLPTGVNNLISIRHLLVDASSKLLAGYAGISYIGKLTSLQELDCFNVGKGNGFSIEQLKELREMGQSLAIGDLENVRNKEEASNSGVREKYRLVELNLLWNSNLKSRSSDVEISVLEGLQPHPNLRHLRIINYRGSTSPTWLATDLHTKYLESLYLHDCSGWEMLPPLGQLPYLRRLHFTGMGSILSIGPELYGSGSLMGFPCLEELHFENMLEWRSWCGVEKECFFPKLLTLTIMDCPSLQMLPVEQWSDQXDQLPPLPHSSTLSRISXKNAGIISLMELNDEEIVISGISDLVLERQLFLPFHNLRSLKSFSIPGCDNFMVLPLKGQGKHDISEVSTTMDDSGSSLSNISELKICGSGISEDVLHEILSNVGILDCLSIKDCPQVTSLELNPMVRLDYLIIEDCLELTTLKCMKTLIHLTELTVLRSPKFMEGWKNLVEEAEGSHLRITASLKRLHIDDLSFLTMPICRTLGYLQYLMIDTDQQTICLTPEQEQAFGTLTSLKTLVFSECSYLRSLPATLHQISSLKSLHLSSCESIDSLPHLGLPGSLERLFIAGCDLLRDKCVEGGIDQHKIAHVRETILA

SEQ ID NO: 202011 - protein, 138 aa, Oryza sativa
  Clone ID: PAT_MRT4530_97330C.1.pep
MAASAPVEVGAQGTIGSLVCREVEYFRRMEVAVVSHDHGKNMSSSSKQASRRRHRQRGEPQDQEQGPAAVEGGRGRRAYLFLPSICSSAEVAEATGAARVRPFASYQIRSGEEQNVRVPNACQNCVMTCVPSGRITTL

SEQ ID NO: 202012 - protein, 545 aa, Oryza sativa
  Clone ID: PAT_MRT4530_97331C.1.pep
MASRAPIAIQNENLPIFRGIDGKKAGAAARVGRQERRALGDLSKARRARPASSTGGKATAAASVGGSGKNLVKPSYLSDEDWMKCCEWAKDGVETASFTGNDMQKLLSDKLEERIQKKVEKAMGTMQLSMDSLYRIDAHSKACMVDPEDKTELDLDTEFLPPMSYLSSRLGEHNANHNCACPPPSKGNMITILSIDGGGVKGIIPAVILSFLESKLQELDGKDARIANYFDAIAGTSTGGLIAGMLAAPSLGNANQPCYAKDIVPFYLKHSPHIFPHRTGFFGWFFNILGIIKMAIGPKYDGKYLHRLINDLLGETRMKETLTNVVIPTFDVKCVKPIIFSTFKARRKPLKNACLADVCIGTSAAPTFLPAHYFETVDHTGASQSFNIIDGGMAANNPTLVTMGEITKQIKRKSEEFPKAEPLDYRKYLVISLGTDMADTLVADLFQAIGCSHQLLRIQDHNIPIGAISNDLSTKDHLQLLVKIGENLLKKPLSKEECEKNNIEPEPNLHGDHVTTYADMLTRFAKLLSDERKLRLHNMKLDAKP

SEQ ID NO: 202013 - protein, 62 aa, Oryza sativa
  Clone ID: PAT_MRT4530_97332C.1.pep
MSIVPDVSKTPLVHAGTGATAESVLAAELCATGGSNKNSRKCGQARLNRQYNHGAGQLDLAI

SEQ ID NO: 202014 - protein, 411 aa, Oryza sativa
  Clone ID: PAT_MRT4530_97333C.1.pep
FPENCACPPPSKGNMITILSIDGGGVKGIIPAVILSFLESKLQELDGKDARIANYFDAIAGTSTGGLIAGMLAAPSLGNANQPCYAKDIVPFYLKHSPHIFPHRTGFFGWFFNILGIIKMAIGPKYDGKYLHRLIIDLLGETRMKETLTNVVIPTFDVKCVKPIIFSTFKARRKPLKNACLADVCIGTSAAPTFLPAHYFETVDHTGASQSFNIIDGGMAANNPTLVTMGEITKQIKRKSEEFPKAEPLDYRKYLVISLGTGLPEHDIMFDARNVAKWGIFRWLVDKDTMPLLNMFFHASSDMADTLVADLFQAIGCSHQLLRIQDHNIPIGAISNDLSTKDHLQLLVKIGENLLKKPLSKEECEKNNIEPEPNLHGDHVTTYADMLTRFAKLLSDERKLRLHNMKLDAKP

SEQ ID NO: 202015 - protein, 110 aa, Oryza sativa
  unsure (1)..(110): unsure at all Xaa locations
  Clone ID: PAT_MRT4530_97334C.1.pep
WYDLEKIWXIQKVGFXCANXGISIXLWCXKKMAAIWEGEVIMNMDRPFYDSKEILVFILSFVRVKFTECLLFLFILLMIDLDVDQSLNSKRLCIYXMFNLKKKKKKKKKK

SEQ ID NO: 202016 - protein, 49 aa, Oryza sativa
  Clone ID: PAT_MRT4530_97335C.1.pep
RDTERWTWRARFFFFFFCTSERCRYVIEWYLISSASTRSYATPYYLEAL

SEQ ID NO: 202017 - protein, 520 aa, Oryza sativa
  Clone ID: PAT_MRT4530_97336C.1.pep
METQLPTVMELDSSEPANFTQPSRRYSYLEKIRSLSVVSGEVAGWSSSASASSSRSARSSYYSSSMSSNASGGPHNHRYAPYSNSSPGDIDLHGAQDIARQMVHDGFMVNLIREFDRAPGPALERWFSELDVGWLLRSAAAADKEQSELGLADLVRRWTRGYTVMAEALSATQTKVAGVPAIILPQAQRDHNNIMCDQELEDDLRLQFARFVEATVSKMLAFVDALAAENTRLSIDNLSRLVGLCSCIYSCFYKCNVVVITDSEEIVDSELQCLGRKVVGAFIITTTTLCNAIESMAMVAEAVTPVLIGWDSCENFKQNAEIHEATRLIVDYVRLFWGYQSLRSNMRYLKWVQIPITMIPQMLINFEDQLEKISESFSDPSLRYLFLLNNSYFVREEFLEPSNYVFILPSGTTLKFMQYQEKYMLASWEPVLYCLHEKMPLWFPKHSSQLARFKSEFQKTFRHQKLWKVPNPRLRQKLREAIIDKVITGYKRYLEDHPELEKCSSDLQDMEDMVNELFEG

SEQ ID NO: 202018 - protein, 37 aa, Oryza sativa
  Clone ID: PAT_MRT4530_97337C.1.pep
IYNVICFYHSELSLEFLCVFVMMIPHSTTCSSSYLLL

SEQ ID NO: 202019 - protein, 156 aa, Oryza sativa
  Clone ID: PAT_MRT4530_97338C.1.pep
MGKCRPMKIYKMAMKGLRGKKGKIDMFHHSSQNSYRRVQFHMASGYLLRYHRDSVPRHVIHKAFGEATGVGEQQKAKVPWRSDAEKDGSETAMMRTATRSSLISPHNPTGKGGKGMVGRRCRGAGGGGRPGGRGGCWWWPESRGGGGRGEGFGGRL

SEQ ID NO: 202020 - protein, 307 aa, Oryza sativa
  unsure (1)..(307): unsure at all Xaa locations
  Clone ID: PAT_MRT4530_97339C.1.pep
STEASGRQTDSTRHHAGGVDNHTTGMRRHRKDEDGAARGRXSLPPRDEAWERRRRMDDXFGGDPWRKAGRGAEDEDNDEAAAVGEEAIRAAGSSCMDTRTARMTTMMTMVAAQXTMSWATDGTSTTRTNGDDNNGQRRGSDGGEAMPRTKLPARRCEAGGGGGTADGARVEEGPTGEIPARXMERPARHGGVPAKYGRRRGLAGEEDGVSVPGEVAATSAGAQERWQRRPEAEQWRQRHCCRRGCTSGGLLEKRRAGRGRGGDCDAGGGDGTAGRRADMAAGADVTIHLLIRDVDSIKNLHVNIRIK

SEQ ID NO: 202021 - protein, 516 aa, Oryza sativa
  Clone ID: PAT_MRT4530_9733C.1.pep
MQQLYAKFGSVFTVSVAGLLKATFLVGPEVSAHFFQGLESEVSHGDLFEFTVPMFGKEVGHGVDNATRIEQGRFFAEALKPVRLRIHVDPMVQEVEDYFAKWGQHGTVDLKHELEQLLLLISGRCLLGKEVMGTKFDEVCNLFRDIEGGVNLMSVFFPYTPLIPSNRRRDMARERLHAIFSDIVRSRKQQQGDQEEVNDKDVLQSFIDSRYKADGRATTEAEVAGLITGVLFAAKHTSTHTSVWTGARLLTHEKFLAAAVDEQDQIVRKHGIINGRIVTDHYGFLMEMHMLHICIKETLRLHPPAPMIVRTALRQFTVRTREGHEYCVPAGHTMASPIVISNRVPYIYKDAHLYDPDRFGPRREEDKVGGKFSYTSFGGGRNSCVGENYAYMQIKAIWSHLLRNFELKLLSPFPKTDWSKLVPEPQGKVMVVLAVMFISGYLVATALVFILVSNDGSSSDHRDGKREEVAGDMLVVAGSATLRGRRTPPTMLAVVGQREAVRGEDADDLAGDYGSG

SEQ ID NO: 202022 - protein, 88 aa, Oryza sativa
  Clone ID: PAT_MRT4530_97340C.1.pep
EDAPKWKDDEHHDDDDTQACPEPAKSFDQAAGLFVTSTSCDRLRELHVSEVFTVIDSGNGGCSRVLGNNEVGIYMVALMRGTLVWAYN

SEQ ID NO: 202023 - protein, 155 aa, Oryza sativa
  unsure (1)..(155): unsure at all Xaa locations
  Clone ID: PAT_MRT4530_97341C.1.pep
MPRTKLPARRCEAGGGGGTAXRRTGGGRADRGNSGEAMERPARXVVFRRNTGDAVAWPGKRMAFRCQERWRRRRPVHRRGGRGGRRRNSGGNATVAGGDALPEVSSRNGGQAGEGEATATLGEATARPAGVLTWRQGRLELAGGVGEREGRRRCG

SEQ ID NO: 202024 - protein, 173 aa, Oryza sativa
  Clone ID: PAT_MRT4530_97342C.1.pep
MPRTTSPARRCDAGGGVGAADGARVEEGSTGEIPARRMERPARHGGVPVKFGQRCGLAGEEDGVPVPGEVVATSAGAQETRQRRPEAEQWRQRHCCRRGCTSGGLHGKRRAGRGRGGDCDAGGGDGMASQRADAAVGAAGGCWRREREGAATGGATDLGEAKTERREEEGFVL

SEQ ID NO: 202025 - protein, 295 aa, Oryza sativa
  Clone ID: PAT_MRT4530_97343C.1.pep
MAAVCGEKGGGLSGENGGSSEIVGAAPADPESNLNVLPEDVAPLSAMDDMFIEYCSTDPLVDAFHTWHDRLGHPGDLFTARFADSIFDEEHFPALGGDFKYQKECHEINWDAHGDHDESIRVDEIAINYSKTGESFNRRATIVDTNFSEQIAECLQVDPEPRSIKECQKGSHWNKWNDAIDVELASLYKRDVFSAVMPTPCGIFPVGYKWVFVRKRNENNEVLMDVVTAYLYGSLDSDIYMKVPDGIDIPNQKGSSNRGRGPLRTSTVVVALQTLELVWRELCSDIHHGAVSPVR

SEQ ID NO: 202026 - protein, 231 aa, Oryza sativa
  unsure (1)..(231): unsure at all Xaa locations
  Clone ID: PAT_MRT4530_97344C.1.pep
MGGRRWEPARRRRRTPADSTEGEAKPRTTLLARRCDAEGGGCAANGARVEEGPTGEIPARLMERPARHGGVLAKYGRRRGLAGQEDGFPVPGEVVATSAGAQETRQRRPEAEQWRQRHCCRRGCTSGGLHGKRRAGRRRGGTCEAEEDGGAASRRTGAAARAAGSGRRHGREKEXAGRSGAAVGELGKRQNGDRRGRRSRFIGHRGEQAMARAGTAPGIRPAAMNAGQGRE

SEQ ID NO: 202027 - protein, 75 aa, Oryza sativa
  unsure (1)..(75): unsure at all Xaa locations
  Clone ID: PAT_MRT4530_97345C.1.pep
FGYAHLLSGLACGPPGLPSGKALGNVGETGVRANAQQPKPFVGKIPNPLFPKAPAPXGLIVGINPSSRAGQSCAN

SEQ ID NO: 202028 - protein, 188 aa, Oryza sativa
  unsure (1)..(188): unsure at all Xaa locations
  Clone ID: PAT_MRT4530_97346C.1.pep
SSSCRRLQPQEACTEEHPGGGVRRRRWRSSDSPPRSLAPPPTCPQPARRRRHQSPLRRHHPAXRCCRMPPVSPSXAVSPRVVTQAARRRQPPRRQLPRISPEMMRGWEEEKFRGSSAFLCKYIKKLKGSGFFGXEWSCGAVKTQLHPRSTNLXSSSANSAPKNRESVPFNTAPALDKXAGAVPNGTLI

SEQ ID NO: 202029 - protein, 54 aa, Oryza sativa
  Clone ID: PAT_MRT4530_97347C.1.pep
GRAVDDRAGGLSRWVGYLPGEVLVDAQHLERDERKSISFSEPDEGCVDYFHKLN

SEQ ID NO: 202030 - protein, 842 aa, Oryza sativa
  Clone ID: PAT_MRT4530_97348C.1.pep
MDPSYPPSATARRAAAIARHLAGLSPRDAAAVAAALEPSACLSYAPPESSEPAPAFSPLELRSLLDGHHLRERDWAFRAMEESPLFCQRRSGGKVFVSPDYNEGKEGQREATMRRVGYLARRGVFRGWLTEPGPDAELRKLALLECLGMYDHSLAIKIGVHFFLCRRAAAIARHLAGIPAAKFASLLEPFSCLGYVPPESNEQPPAFALGDLRRLLDGHDLGVRDWMFRVMEQSTLFCSRHGGPGPAGRVFASPDFNKDKEGLREAKMRRIGYLARRGVFRGWLTDTEGDAEAELRRIALLDCIGVYDHSLAIKIGVHFFLWGSAIKFLGTKRHHDKWLSDTENYVIKGCFSMTELGHGSNVRGIETVATYDIKTREFVINTPCESAQKYWIGGAANHATHTIVFAQLHINGRNEGVHAFVAQIRDEHENVMPNIQIADCGHKIGLNGVDNGRIWFNNIRVPRENLLNLVADVLPDGQYVSTIDDPDQRFAAFLSPLTLGRVNIAVNAVYISKVGVAIAVRYALSRRAFSVTPDGPEMLLLDYPSHQRRLLPLLAKACLMSSAGNFMKRMYVKRTPELNKSIHIYSSALKATLTWQNMTTLQECREACGGQGLKTENRIGIFKAEFDVQSTFEGDNNVLMQQVSKALYAEFLTAKRKNQPFKGLGLEHLNGPCPVIPDYLTSGTLRSSSFQMDLLCLRERDLLKRFTTEVSNYLAQGENREKALMLSYQLAEDLARAFTERTILQIFLEDEKNIPTGSLKDILGLLRSLYVMVCIDESASFLRYGCLSRENVAAARKEVMTLCSELRPHALAIVSSFGIPDAFLSPLAFDWIEANARSSGNE

SEQ ID NO: 202031 - protein, 100 aa, Oryza sativa
  unsure (1)..(100): unsure at all Xaa locations
  Clone ID: PAT_MRT4530_97349C.1.pep
KALNQSFDLKEWRGSLEAVRKLPMMVLWSGSWTDRWIDEGKKVVAALPDAKFVYHSGGRWPQEDAYDELSELIAEFXTSLPTSVRSQHIDQSSEQATAQE

SEQ ID NO: 202032 - protein, 190 aa, Oryza sativa
  Clone ID: PAT_MRT4530_9734C.1.pep
MTVSLACPHTCSPSSADKKTETVRERRETEPAELWACSTRGLDATEEEALNFSVALISIAGHREDEAVKRKRDRALRRSGARTECHRCIIIVALASVDQIRPSHRPNIITTTSSSKSLKNPRLPANAATWREIGVVYLKSGRRPSSPIPHSRLEDRRNVDAVAMPISVAAGSSSPLSPMFRTIQAAVKLQ

SEQ ID NO: 202033 - protein, 201 aa, Oryza sativa
  Clone ID: PAT_MRT4530_97350C.1.pep
MSFTGTQDKCTACDKTVHFIDLLTADGVPYHKTCFKCSHCKGILSMCSYSSMDGVLYCKTHFEQLFKETGSFSKKFAPGCRSTDKELARAPSKICSAFSGTQDKCAACQKTVYPLEKLTLEGESYHKSCFKCSHGGCILTTSSYAALNGVLYCKIHFGQLFMEKGSYNHMKKKSESQEVLPEVVPEEQPAPPPPDENREDN

SEQ ID NO: 202034 - protein, 161 aa, Oryza sativa
  Clone ID: PAT_MRT4530_97351C.1.pep
PPSGSSRLPTEGKSFSNGPSRRLSLGGADNMSKLSPNGLLARRSPSFHSRSSLSSSSSLVLKHAKGTSKSFDGGTRSLDRSKINGNGAHLLNRSTDAVRDCETNDSWKGNADEGTIENTNSNTDESNKETANNKSAEMVSGFLYDMLQKEVISLRKACHEK

SEQ ID NO: 202035 - protein, 148 aa, Oryza sativa
  unsure (1)..(148): unsure at all Xaa locations
  Clone ID: PAT_MRT4530_97352C.1.pep
VRLGGVVAAGGPLLATAQLSDHLYCYTCPSXEKVEYTVIERKFKEDPTTYELLLRLLXHDCFDNGCDASILIDPLPNQSAEQEAEPNIXGKGYDIIDXSTTELETECPQVVSSADIVALNTRDSVRLDGGPNSDVPTGRRDSICYNRE

SEQ ID NO: 202036 - protein, 59 aa, Oryza sativa
  Clone ID: PAT_MRT4530_97353C.1.pep
MEGESALGSFALNGVFVVVLPSAGQAPPFIEGSGKATMVAEIPRFALGGGGGESDYRHN

SEQ ID NO: 202037 - protein, 319 aa, Oryza sativa
  Clone ID: PAT_MRT4530_97354C.1.pep
MASLAVVVVVVAVVCAAGVAAAGKFDDVVEPSWANDHVVYEGDLLKLRLDSSSGGGFASKSKFLYGKATADLKLVAGDSAGVVTAFYLSSGGDKHNEFDFEFLGNVTGEPYLVQTNLYIDGVGNREQRIDLWFDPTADFHTYAVLWNPSQVVFLVDDTPIRVYENKNATAAVKGHHRHAAAANGTSNATSAAASVPPFPSPQPMSVYSSIWNADDWATQGGRVKTDWSHAPFVATFRDVRVEGCAWAANATDSDAGEVARCTGSSWGKEGRYWWKEKDMEELTVHQNHQLVWARAHHLVYDYCVDTDRFPVQPPECAGR

SEQ ID NO: 202038 - protein, 377 aa, Oryza sativa
  Clone ID: PAT_MRT4530_97355C.1.pep
VSTLAGPPGYVPLEYYQSFRCTTKGDVYSYGVVLLKLLSGKKPIDPTEFGDNNLVGWVKQMVKENRSSEIFDPTLTDRKSGEAELYQYLKIACECLDDRPNRRPTMIQVMAMFKELQLDSDSDILDGFSINSSTIDESGEKSIIKKFSVLLTLSEMDLVDMAVHFPNRKMRRLHEFCSHSVFVIILPAWEISSVFETLVDATYIYLQLAILLKSVYTVNMVIPAEVWKHLCAQKEKERIRQEDYDFRDNDYPLVFIFFGGPLYIYMGSDPLWLWSCVVYPHNFDEIMDIILASTLQPDTVVLYMALHGIYIHAHNYYSKRNLVRFFDLLMPQSLNHVLIGTLTDKEECHGRGMNYCYTRSGSTGANDCCSAAWQSHL

SEQ ID NO: 202039 - protein, 198 aa, Oryza sativa
  unsure (1)..(198): unsure at all Xaa locations
  Clone ID: PAT_MRT4530_97356C.1.pep
MDSPATPVGLSPPLLSLVLRNEPCTGDDDDDVSGDVTTGGGSGAQARRRTTARRCERRTPTRRGRRGELTGDQNNGGRSTDGDGVEEETAVTFSLTTATVFRWPTVTTEGRTRSAMTWRSRRXLSRAATTTRATATHGWTNSDDGGARRKWKGAAGFGRRRRRRGARVRAGDGARKTTALTGGPHLSAGGRARASGRL

SEQ ID NO: 202040 - protein, 100 aa, Oryza sativa
  Clone ID: PAT_MRT4530_97357C.1.pep
ARSSSAYEFAAVLSGQGSDCILLFFSGVTDGSTMSGGAVSNRTRFQFCYHQWSGTIWIVGFMCSGVCFNVLGLGDCNNVIKEGFPSCFIFYITSKMRVLH

SEQ ID NO: 202041 - protein, 215 aa, Oryza sativa
  unsure (1)..(215): unsure at all Xaa locations
  Clone ID: PAT_MRT4530_97358C.1.pep
IDSPTTPVGLSPPLLSLVLRNEPCYTKGKRELLRQRVGFAVDRVHGGSSRKRTAEIDXSTTNGQDLTVYDRSTTDGNDDVGNDVITGGGSGXQARRRTTARRRERRTPTRRGQRGELTGDQNNGGRSTDGDGVEEEAAATFGLTTTAVLRRPTATAKGWTRSATAWXPRRRPPRAATTTGATAAHGWSCGGDGGARLHDARALPATRGEGEGGGG

SEQ ID NO: 202042 - protein, 169 aa, Oryza sativa
  Clone ID: PAT_MRT4530_97359C.1.pep
MMNQSLFLVGEIGGNDYNHPLMGGVSIRKIRSFTPSIIAKISSTITELIGLGAKTLVVPGNLPIGCIPHYLMIFKSGIENPLVACCGGGGPYGVSETARCGNGEYKVCDDPQLYGSWDGFHPSEAVYKAIATGLIWGSYTQPPIATTTISCLQITELSSSVEYKVLYDL

SEQ ID NO: 202043 - protein, 126 aa, Oryza sativa
  unsure (1)..(126): unsure at all Xaa locations
  Clone ID: PAT_MRT4530_9735C.1.pep
WPRVGPDLVHGGRRDDGDAAVALGARSRASECAVAFPFNRCMEWDEIRWNGDGIKSEXEERKRRGNDRGSMALATFVFSVAGDGDEGDGEVESLLLGCVEATCRARPELGWLCFPSLSHRLCFLVG

SEQ ID NO: 202044 - protein, 455 aa, Oryza sativa
  unsure (1)..(455): unsure at all Xaa locations
  Clone ID: PAT_MRT4530_97360C.1.pep
MAVPLLYNKETSVAVIICLPVIPALFPGTERKNGFLYLREKRRAAAVVLAAVAVLLSASQALAAPCYPRVFSFGDSLTDTGNIAFLYGNDSRRPTLWPPYGETFFHRATGRASNGRLIIDFIADALGLPFVRPYWSGRTAGDFAHGANFAVGGATALSPDFYRERGVHVRDTVHLDMEMNWFRDLLGLLCPDDLAGHNLFENEENFINPNRTIHGTRSSNCNDMMNQSLFLVGEIGGNDYNHPLICGVSIRKIRSFTPSVIAEISSTITELIRLGAKTLVVPGNLPIGCIPYYLMIFKSGKKEDYEPETGCLRWMNGFSQYHNKLLMDELENLRKLHPDVAIIYADYYGAAMEIFLXPEPFGIENPLVAXCGGGGPYGVSETARCGNGEYKVCDDPQLYGSWDGFHPSEAXVYKAIATGLIWGSYTQPPIATTTISCLQITELXASVEYKVLYEL

SEQ ID NO: 202045 - protein, 244 aa, Oryza sativa
  Clone ID: PAT_MRT4530_97361C.1.pep
MAMDAERRQAELIEQFSAQAAALSSSAPQLAALVLEATSHPALFAFSELLSLPALSKLTGTQYASSLDVLRLFAYGTLKDYKSNSGNLPALLPDQVRKLKQLSVLTLAESTKVLPYDQLMQELDVSNVRELEDFLINECMYSVQFATGRDLTPDQLNNMIDTLSDWRAGTSDNLLHQIQEKIKWADTMSEVNKKHQKEFEDKVEEAKKSIKEATTNGIVSMAYLPASPLVEVLTPYLETFWHQS

SEQ ID NO: 202046 - protein, 108 aa, Oryza sativa
  Clone ID: PAT_MRT4530_97362C.1.pep
MAAKREEDDDSIEALSEDADHRQRNPRGGAERCCESDLRLAVLRCPPRAGAPEEEPSIAVNPTSASPRSTVHREPARRRRYRREDSLPGKRGSSAMKGMAGLTGEKGG

SEQ ID NO: 202047 - protein, 88 aa, Oryza sativa
  unsure (1)..(88): unsure at all Xaa locations
  Clone ID: PAT_MRT4530_97363C.1.pep
AAAQADLWRHSLYYLTSTGLRCAIKLGIPTAIHRXXGAXSXPGLMTKLSLPASKQPFLRRLMRVLVTNGVFAQRTXTGEVERYCLTPV

SEQ ID NO: 202048 - protein, 56 aa, Oryza sativa
  Clone ID: PAT_MRT4530_97365C.1.pep
CEDAGILLSAVGVSHKAGNAGYGNEGCMPVKLQPLFQLRYMVFLARSRGVVDSCLA

SEQ ID NO: 202049 - protein, 64 aa, Oryza sativa
  Clone ID: PAT_MRT4530_97366C.1.pep
CPQQPLPSPPTPHLPPDSGSPHSPRSPPFPPRTLLPRPPPPPAHRTLCLRWLLPPPPRRSLCRR

SEQ ID NO: 202050 - protein, 127 aa, Oryza sativa
  Clone ID: PAT_MRT4530_97367C.1.pep
PAPMAMTCPMPALKRRRSPPSSFSSLPSSWPSRRTPRPRPSASASSALASQAVLQSSRPSPPDEHVYDDDDDDGDDVDGDDHDAGDGHDGDERPRCGGGRRRGGGGGCARGGGPPPAARGPRLPGAR

SEQ ID NO: 202051 - protein, 62 aa, Oryza sativa
  unsure (1)..(62): unsure at all Xaa locations
  Clone ID: PAT_MRT4530_97368C.1.pep
SISSVQSIVXKLQLQQVGVVYFDHSQVQGXRFLALNLPSICGIYHKXYIVARSIPTVGGVWY

SEQ ID NO: 202052 - protein, 46 aa, Oryza sativa
  Clone ID: PAT_MRT4530_97369C.1.pep
MAQDKLETALQLKRSFGIHHKYTGGCTDGHDEYFFWGAFRESVGAC

SEQ ID NO: 202053 - protein, 193 aa, Oryza sativa
  unsure (1)..(193): unsure at all Xaa locations
  Clone ID: PAT_MRT4530_9736C.1.pep
PTYEKLDRVLMSRKEXKFSLSSIFALNIDIXDHVPLVLNINSSSVCNSHQNFKFKLDWLFIDXFVDMVKEIWLNIVDGNTTLEHWXAKIRRLRLEKLDLLDKKAKLTMLSQDEIDTRXFFWRNRLACLLTEEEIKWYQRVKTKDILKGDSNTKYFHLVANGFFGPPEASSLTLDESQISDIPXVSQLENNALV

SEQ ID NO: 202054 - protein, 556 aa, Oryza sativa
  Clone ID: PAT_MRT4530_97370C.1.pep
MPHEPIARTNVMKPPYSHMSSGPPLKDTAERIKAVDRAASMIEEILKQGPNPEGTIQSNGQAVHPFSASIFLGFHADPSLNVAAWVRGPNDQYINHIMNETGVTVVLRGKGSGTPVNCHAEASQQPLHLYISSMHVKNLEAAKVLAENLLDTIAAEFGASRISSSKVYGAVPPPQQLLDVVQTSGTIPDVHPTLGPNVLTGASHSFASTGANASLVAPSVTSQSGAPSYSVVSPPSNLICPSQPANGGTFYGGYGGIYPQATPLQQVALTLKHASSSSTHVVSATSTSTSTVAMVNPCSHAEADKRSQRRKFQELPVSQGATTEVQVFSLTLSEAHRVNSQQRSKFVKTGLDGLGNMTNSSIEPPIKVQPGSNGMLLQDQPHVSAHPSASKNMLPPPPPPPRNMLPPPPKSMPPPPPKFPSNEMSRNEDRCADLNKPMAPPKSMPPPPPKSMPPPPPKFPSNEMSRNEDRRSDLNKPMAPPRSLDVSSVSPPNLYSAQLPSKEPRVVKPGGASVSDTLLKLMDYGDDDEEDNIDETNSVLGGNPTSISGQKPFWAV

SEQ ID NO: 202055 - protein, 184 aa, Oryza sativa
  Clone ID: PAT_MRT4530_97371C.1.pep
RPGLGPNVLTGASHSFASTGANASLVAPSVTSQSGAPSYSVVSPPSNLICPSQPANGGTFYGGYGGIYPQATPLQQVALTLKHASSSSTQVVSATSTSTSTVAMVNPCSHAEADKRSQRRKFQELPVSQGATTEVQVFSLTLSEAHRVVIECEFFTGLVTSWSFHQWSLTDESLLLLNIIACIF

SEQ ID NO: 202056 - protein, 76 aa, Oryza sativa
  Clone ID: PAT_MRT4530_97372C.1.pep
MPPSSPCRSLSVLMLQYNPTLGDIPSGFLLGRPASSCPMMPRRPPASSACSSRAAPPRAARPADELVPRAPSSPPC

SEQ ID NO: 202057 - protein, 71 aa, Oryza sativa
  unsure (1)..(71): unsure at all Xaa locations
  Clone ID: PAT_MRT4530_97373C.1.pep
PTMCGSRPWEVHTIGTYSDKSHLIKKDVPCETDQLTDEHTXIIHADAACTILIDNVEKLSCSFYLHWDFLA

SEQ ID NO: 202058 - protein, 81 aa, Oryza sativa
  Clone ID: PAT_MRT4530_97374C.1.pep
GKMTGFLFLESPVWPLHQQVPKGVLAPKNKKNFYPPQSPTKKNPHLIPPNLKGNPTRNEQHPPWKNPGAPKNCKLEPKPRG

SEQ ID NO: 202059 - protein, 73 aa, Oryza sativa
  Clone ID: PAT_MRT4530_97375C.1.pep
GWMGYPTTDTILVFSTASIEYPRGPGNKTHLCKQKGFRVSTKSWIGLRALWDITHSWKMLKKICEKEPHRIEC

SEQ ID NO: 202060 - protein, 92 aa, Oryza sativa
  Clone ID: PAT_MRT4530_97376C.1.pep
MQCAYDHQGPHTCSASCSPDLAARATTAADLPASGNTATTVAAVPLPFLFHEQWQIPTAMEDLAASSPASPPPFFASVASAGLSPPTPFSQR

SEQ ID NO: 202061 - protein, 263 aa, Oryza sativa
  Clone ID: PAT_MRT4530_97377C.1.pep
MSVAPPQNIFHGQGGSAAALLPSSFPVPPAVPPYGLQSMPGFPLPSLPSGPPPPSQIGPSSSQVGGPPLVSGLLSNLMQHGIISLQPPSQPQDSVGVDFNVDLKVRNESVINALYQDLPRQCKTCGLRFKCQEEHRAHMDWHVTKNRNSKNRKQTSRKYFVTVGEWLRAAETVGNDGVPSFEPAEPVADAKEEKELAVPADEDQTTCALCQEPFEDFYSDETEEWMYKGAVYMNAPDGNIGGLERSQLGPIVHAKCLSGPNNT

SEQ ID NO: 202062 - protein, 116 aa, Oryza sativa
  unsure (1)..(116): unsure at all Xaa locations
  Clone ID: PAT_MRT4530_97378C.1.pep
LGIPFTLRYTSHIGMAYPRAYGYSLHTLRKSFTEFTDGKSSTRTRLGRQCIVXGLMSPSSTWKPLDLRYKGTPRGGPRDRISEPTQPSQPTKSEPARSQIAGDLVEPTRLRTRRIR

SEQ ID NO: 202063 - protein, 118 aa, Oryza sativa
  unsure (1)..(118): unsure at all Xaa locations
  Clone ID: PAT_MRT4530_97379C.1.pep
MDCINRPLVCLQLAXFLSCRASLAHKLLAQTTIYWQSSLLRKSKRIAGTHTVRKHCDPIXRQVRAHAATTEFSNASTEQFQRTGVSAVRRVIDPRGLVLPYDTNGASVVYVIQGRGIT

SEQ ID NO: 202064 - protein, 240 aa, Oryza sativa
  Clone ID: PAT_MRT4530_9737C.1.pep
MAGAGRDELKLLGMWASPYVSRAKLALQLKGVSYEYIEEDLGNKSDLFLRSNPVHKTVPVLIHNGNPICESSIIVQYIDESFPSSAASLLPADPYDRAVARFWAAYIDDKLAAPWRMVYRVKTEEERDELMKQTLAAVDVLEGGLKECSKGKGCFFGGDSVGYVDVVLGGLVSWVHASDKLSGAKLFDAAKAPLLAAWLGRFGELDAAKAVLQDVDKVVEYAKKFQPRDSGTAADRQAVN

SEQ ID NO: 202065 - protein, 127 aa, Oryza sativa
  unsure (1)..(127): unsure at all Xaa locations
  Clone ID: PAT_MRT4530_97380C.1.pep
FVVLYIVKNESGIPFTLRYTSHIGIACPRAYGYSLHTGRKPFTEFTDEKSPTRTRLGRQCIVXGLMSPSSTXKPPDLXYKRDPXGEDLGHRISEPTQPPQPTKSEPAGAKXARDLVEPTRLRSRRIP

SEQ ID NO: 202066 - protein, 109 aa, Oryza sativa
  unsure (1)..(109): unsure at all Xaa locations
  Clone ID: PAT_MRT4530_97381C.1.pep
YTSHIGMACPRAYGYSLHTLRKSFTEFTDEKSPTRTRLGRQCIVXGLMSPSSTWKPPDLRYKRDPPGEDIRHRILEPTQPPQPTKSKPAGAKSXEDLVEPTRLRSRRIH

SEQ ID NO: 202067 - protein, 133 aa, Oryza sativa
  unsure (1)..(133): unsure at all Xaa locations
  Clone ID: PAT_MRT4530_97382C.1.pep
LTIVLAYVAHLTRSSSHGIPFTLRYTSHIGMACPRAYGYSLHTLRKSFTESTDEKSPTRTRLGRQCIVXGLMSPSSTWKPPDLRYKRDLPXEDLGHRISKPTQPPQPTKSEPAGAKSPXDLVEPTRLRSRRIH

SEQ ID NO: 202068 - protein, 117 aa, Oryza sativa
  Clone ID: PAT_MRT4530_97383C.1.pep
MPNDSLVGAATEWDRRRARSNGWLRRAVYSSARDLDDARASPMAAHAPLRFSVAPTAAAKPKDAIEVAGVALVLIGPGTVEKTVAVAATTTTARKRKGHIQISIVHKDFSDNEHIQI

SEQ ID NO: 202069 - protein, 69 aa, Oryza sativa
  Clone ID: PAT_MRT4530_97384C.1.pep
MTIILHFALLAIAVCNATAQLDHLRQNISQYEVQYTLLPQDHVLSLDKAIYRLYHRIYGRPFSISTLVQ

SEQ ID NO: 202070 - protein, 189 aa, Oryza sativa
  Clone ID: PAT_MRT4530_97385C.1.pep
MTTLLSDLPDDVLLLILDKLDTRDAVRCSLLSRRWSRVPGMLANIELDVDSFAPDPDDDPDDGFTSTLSESARSNHAMVRAVQSILAAHESRHAIRRLGLSFFSRDESVGIVRAVDDAMARGRRIHDLWFTVSSEKPELLCAGRDVARQGARLASYRDKYPRVFAGLTRLHVECVKLGAARVSAVSEMI

SEQ ID NO: 202071 - protein, 287 aa, Oryza sativa
  unsure (1)..(287): unsure at all Xaa locations
  Clone ID: PAT_MRT4530_97386C.1.pep
KGKEGLLRQRLGFRWTGRTGDGSRERTAEIDXSKTDGRDRTVHDRLTADGHDDVSGDVTTGGGSAAXGAQTRRRTAALRHERRAPTGSGRHGEPTGDQRNGGGDLRLDDGGGAPAVFGGGEGANEDGDDLATTMXSSRATTTTGTAAAHGWSDGGSRLHGARALRTTRGEGEGGDGGXEAAAKAHGGRRRDGKIGVRRKEADPNRTRFHELPKRISRCFQRGKGRGDPEDHFPSINFTGNGKERWAPPVSERGRLQTGPDWAEEREKXVLGRLSAQSQKRLLKTFFN

SEQ ID NO: 202072 - protein, 298 aa, Oryza sativa
  unsure (1)..(298): unsure at all Xaa locations
  Clone ID: PAT_MRT4530_97387C.1.pep
KGKGGLLRQRLGFAVDRVHGNGSRKRTAEIXTLSKTDGRDRSVHDRLTGDGDDDVSDDVTTGGDSGXACSPANDGAATRTEGTNGXRATRRTHRXPKKKRRRRSGQRRRRGSGGLRRRRRSGRGRRRLDDHDDDLPEQRRRLKRRRRTAGATAATAALGLMALGRYGRREAKAKVATATRRRRQRPTAAGDEMETSGFGGKRPIRIELDSTNFQNKLADVSKREKVEEIPRIISPLSIRPEKERRGGAHLSAAERERRAAARRTGPTGPTGPGREREREVLGRLSAQSQKKTFKTFFN

SEQ ID NO: 202073 - protein, 188 aa, Oryza sativa
  unsure (1)..(188): unsure at all Xaa locations
  Clone ID: PAT_MRT4530_97388C.1.pep
GCTAAAHGNERPRSTLSKTDGRDRSGPRRLTGEGDDDVSDDGSDDVSTGGDSGGSGAHARRRTTARRRERRAPTGRGRRGELTGDQRNGGRATDGAGDEEEAAATFGSTAATALRRSSAVAKRXTGTATTLRTRRRSSRATATTGATAKDDWSDGGDGGTKRHGARALRTTRGEGEGGDFFMIHRGTF

SEQ ID NO: 202074 - protein, 281 aa, Oryza sativa
  unsure (1)..(281): unsure at all Xaa locations
  Clone ID: PAT_MRT4530_97389C.1.pep
MTSAVTSPPAAARRLGRAXLAGERRRFGTNEGHQRVADGTANPPVTKETAEEQRTATATRKKRRRPSAXRRRRCSGGLRRRRRSERGRRRLGDHDGDLPERRRRPERRRRTAGATAARGYTALGRYGRREAKARVATGRGDTGEPFKGARRRRQRPTAAGDEMERSGFEGKRXDPNRTRFHELPKRISRCFQRGKGRGDPEDHFPSINFTGNGKERPNLERNGGGAKLGFRAAAAGGRRXGLTGGPHLSAXRGRLQTGPDWAEEREKGFGPTFGPKPKETF

SEQ ID NO: 202075 - protein, 114 aa, Oryza sativa
  unsure (1)..(114): unsure at all Xaa locations
  Clone ID: PAT_MRT4530_9738C.1.pep
LITRNPLLAAEGSNYPPWXMARYSPESPNRAAERGRRGPGSSDGVGDARQHNKHDDDPRTTRSNGGKQNAAAALQAETTTLLFLLDLSQLSLHIMLGWMESLDDGDCCGLTCRD

SEQ ID NO: 202076 - protein, 98 aa, Oryza sativa
  Clone ID: PAT_MRT4530_97390C.1.pep
MAPHRRVRLLHRSSSHPPPSVTAATRRWRATEAAAAAARRWLGCGLAEDSSRVAEEAATAAGRQLGGGPVEGGGQAVAGLWPRRRRQRRAEEAAVAAA

SEQ ID NO: 202077 - protein, 67 aa, Oryza sativa
  unsure (1)..(67): unsure at all Xaa locations
  Clone ID: PAT_MRT4530_97391C.1.pep
RVEPEPRRQPRLHHAQXIHPXXAHPLLLEFLEMLDRRRRRLPMLLQELQLRRTRRXTRKEXNSTSTK

SEQ ID NO: 202078 - protein, 121 aa, Oryza sativa
  Clone ID: PAT_MRT4530_97392C.1.pep
MGTGDAWAVSPRSYPLPSSPSSSCATAIGVRDGAGGGYRRLDWPPSPPPRAPPWPSPLGFLRRLLTRPPRSAFSRRLLVLRHGVPLPSLARRRRSGTYLHAAVARSRRLLSLRVEISGFVV

SEQ ID NO: 202079 - protein, 56 aa, Oryza sativa
  Clone ID: PAT_MRT4530_97393C.1.pep
RTAPLRRPAGDVAAARTPLREASRPSVPSTERSTSNLIYVCERSQQKQQHTICLTA

SEQ ID NO: 202080 - protein, 74 aa, Oryza sativa
  unsure (1)..(74): unsure at all Xaa locations
  Clone ID: PAT_MRT4530_97394C.1.pep
NDGRVGLHQTTSFLGTXPRRDELVRRVXDSGGRITMXRTVKSAPQSIWYGPDRPKXLGPLWEQTPSXLTGELXG

SEQ ID NO: 202081 - protein, 98 aa, Oryza sativa
  Clone ID: PAT_MRT4530_97395C.1.pep
MERGGTEWDGTDLVVSMGGGGLEEAIIKLLLRTGQGGLERRMTTRLTVRNGNENEAADAHAIDVIRSGHRCVGSDEAQAHALSQRVMRTVPRQFLASL

SEQ ID NO: 202082 - protein, 98 aa, Oryza sativa
  Clone ID: PAT_MRT4530_97396C.1.pep
RWPNGPGQTGRARHGRTCSRHGPARPATVTGRAGTARLAVPCLGRWPSTRAGTARPGYCSGPARHGPRHGPARHGGGPSGAAGGRRSNGTATRGTNGY

SEQ ID NO: 202083 - protein, 55 aa, Oryza sativa
  Clone ID: PAT_MRT4530_97397C.1.pep
PFRLQAEIQLPIALGGMLPGLRPRCRARPTGAELAWCRSSLSVINAPHRSCVPSR

SEQ ID NO: 202084 - protein, 486 aa, Oryza sativa
  Clone ID: PAT_MRT4530_97398C.1.pep
MAAAGAYSASLPAVPDWLNNGDNAWQLTASTLVGIQSMPGLVVLYGSIVKKKWAVNSAFMALYAYASSLLVWVLVGFRMAFGDQLLPFWGKAGVALTQSYLVGRATLPATAHGAIPRTEPFYPEATLVLFQFEFAAITLVLLAGSVLGRMNIKAWMAFTPLWLLLSYTVGAFSLWGGGFLYRWGVIDYSGGYVIHLSSGIAGFTAAYWVGPRLKSDRERFSPNNILLMIAGGGLLWMGWAGFNGGAPYAANIAASVAVLNTNVCAATSLLMWTCLDVIFFRKPSVIGAVQGMMTGLVCITPGAGLVQTWAAVVMGIFAGSVPWFTMMILHKKSALLMKVDDTLAVFHTHAVAGLLGGILTGLLATPELFSLESTVPGLRGAFYGGGIKQIGKQLGGAAFVIAWNLVVTTAILLGIGLFIPLRMPDEQLMIGDDAAHGEEAYALWGDGEKFDATRHDLSRGGGGGDRDGPAGERLSALGARGVTIQL

SEQ ID NO: 202085 - protein, 144 aa, Oryza sativa
  unsure (1)..(144): unsure at all Xaa locations
  Clone ID: PAT_MRT4530_97399C.1.pep
DEWLRAVHHHNGTGHTCHTPPDTRSGAWGXLAAVPFVIRPATGWRPAXACQACTAPYLMRRDVLAPPALKVVRWVLGHAHLTPSTWRPXEGSGQPNPSGLQEMXPPIHGPDPLXGERHVGTRXRPLPSKLGTPRLISPTRGIDF

SEQ ID NO: 202086 - protein, 667 aa, Oryza sativa
  unsure (1)..(667): unsure at all Xaa locations
  Clone ID: PAT_MRT4530_9739C.1.pep
MAGLGGGWGGGYDDDDDWGLSAEQLDQLERDAYRKLAERKASSSAASTATSPLPSAAYSPVKNSHHHPASRVSQESCFGKVESLSPSRLSQPNASGNAVNNSQGNMSKVSVHLFLHSTGVIAAKFQYHQKLVNIPKEDIMVRLPRTGGLNKXRTLIGXSNNKGVCNLDGVVNVISXDVVLVKQELTPSLYSGDLLDLDGKIPTDVESKLMPFQREGVRFALQHGARTLIADEMGLGKTLQAIAVASCLHDAWPVLVISPSSLRLHWASVVLPQTGGSNKAGYRLVYSNTKGDFNLDGVFNVISYDVVPKIKDMLLDLDFKIVIADESHFLKNAQAKRTMHSLPVLQKAKYVVLLSGTPALSRPIELFTQLQALYPTVYKNVNEYGNRYCKGGFFGLYQGASNHEELHNLMKATVMIRRLKKDVLSQLPVKRRQQLETVKIKIQSCDSQETMDSLKFAQKNLINKIYNDSAEAKIPAVLDYLGTIIEAECKFLIFAHHQSMLEAIHQHLLKKKVKCIRIDGQTPVPVRQTLVTDFQNKDDIKAAVLSIKAGGVGLTLTAASTVIFAELSWTPGDLIQAEDRAHRIGQVSSVNIYYLLANDTVDDIIWDVVQGKLENLGQMLDGQEKTLDVSQSDTRPSPSKQKTLDAYLKRCSNSTEADQPKLKNPRF

SEQ ID NO: 202087 - protein, 245 aa, Oryza sativa
  Clone ID: PAT_MRT4530_973C.1.pep
GIRHEDLEARRGVLPHPFAAACLVGRAAAFQAGGRPADARADCNRALALDPAYIPALRARADLLQSVGALADCLRDLDHLKLLYDAALRDGKLPGPRWRPQGGVRYREIAGAHRKLTARIQGLRSRVAAGEACNIDYYALLGVRRGCTRSELERAHLLLTLKLKPDRAVVFGERLELVDEHRDLEAVRDQARMSALLLYRMLQKGYSFIMSAVIDEEAAERQRAREAAAAAAAAAAAAAAAAAAA

SEQ ID NO: 202088 - protein, 265 aa, Oryza sativa
  Clone ID: PAT_MRT4530_97400C.1.pep
MAMAMDAFGSMFGEAKPPVAMRMRPILFHAHAHTNDVSQLRLLATDLHSLAWDRSLSLSDIDDLRDDVGIGGSCSDFLDYLKSCLSSGEVNLLFPHNGLDRVHLVATKAKGLPRITISLNTLTHSALNDAIANFSLSLYAAFRTTQDHASREQERASKLMETLSSEKEKNEIMQKQLQALSFLDKRKATKPKLVANQVPSVSDVTQGSDQVIVPAQQQTPARPESSQAGHGHGHGCLRLRVRRGQAAGDDTDATRPIARPRPRPY

SEQ ID NO: 202089 - protein, 79 aa, Oryza sativa
  Clone ID: PAT_MRT4530_97401C.1.pep
PPPGCFSGPGPPPGGGSPPFFGGGPLGSQRPGGKASFGPPQKGGSFFNPLNRKNPFSPPWSLFSRGWAPSGFVSRGGPG

SEQ ID NO: 202090 - protein, 107 aa, Oryza sativa
  unsure (1)..(107): unsure at all Xaa locations
  Clone ID: PAT_MRT4530_97402C.1.pep
SPDYVLVGDLGPKNPKLIGASRDIRGPRMIGTRDRTLGLDYPGISVINAPTTWQSMLEQELMAXNVYSTWXNADPDAYSWGELLAGGRDPMHXEGDHTCQRVCHRGY

SEQ ID NO: 202091 - protein, 47 aa, Oryza sativa
  Clone ID: PAT_MRT4530_97403C.1.pep
PEVDGKVVIEKIEDSEWEVGYNAMNNKYGHSIEAGVIDPAKMRRCML

SEQ ID NO: 202092 - protein, 49 aa, Oryza sativa
  Clone ID: PAT_MRT4530_97404C.1.pep
DKQTYITNLIKLINELVRSICSAHLDQTRSARPNLSLSRITTNSIIIIS

SEQ ID NO: 202093 - protein, 69 aa, Oryza sativa
  unsure (1)..(69): unsure at all Xaa locations
  Clone ID: PAT_MRT4530_97405C.1.pep
MHAYVKLSTPYALFLFFFFXENXXTTKTGGGLNGQGSSPSFXGXTPCPWPYQHSVQCSRDYLQALFKFP

SEQ ID NO: 202094 - protein, 58 aa, Oryza sativa
  Clone ID: PAT_MRT4530_97406C.1.pep
MVRHMAGTEMIERCFSRRGATSPGLLLAARTGVARPRSPCRLAAELSSAVRICVAPAR

SEQ ID NO: 202095 - protein, 71 aa, Oryza sativa
  Clone ID: PAT_MRT4530_97407C.1.pep
LIPCVLMQVFGHTSHEQNLHMVHAARFSQNMAKERLINQVFPIANIFSFSDFQLILFDKALQVTIHGRDVL

SEQ ID NO: 202096 - protein, 54 aa, Oryza sativa
  Clone ID: PAT_MRT4530_97408C.1.pep
LIVPVSLSRYLSEKLPWVVYHELPKSGHMFPLADGMADTIVKSLLLGDQPPQAS

SEQ ID NO: 202097 - protein, 305 aa, Oryza sativa
  Clone ID: PAT_MRT4530_97409C.1.pep
MSMWRFSRSLLRAAATTTTATAACASASTAGKHAASRRWVTPRELQRCWYASLPAAAAAVPGKDGEAEVTAEEARRLMRLANVEALKRKLGDGEVIPYAELLRACEEAGAARTRAEAAALAGALDEAGVVLLFRDKVYLQPDKIVDLVRKAMPLALTPEDDPRKEELKKLQTQLEDINKLAHKQVRRILWSGLGFLITQVGLFFRLTFWEFSWDVMEPITFFTTTTGLVVGYAYFLITSRDPTYRDFMERLFESRQKKLIQRQNFNLDRYLELQRRCKGPLEKMCGTNQTPNPDMAHLHELSVNK

SEQ ID NO: 202098 - protein, 81 aa, Oryza sativa
  Clone ID: PAT_MRT4530_9740C.1.pep
SLIYNLISVEISHFRPNSLIHIKHGGQTKPRGSKVHFADRSQVRGSILLSSRGAGGIHTDSTHNHNANSPGIPWHWPVEAQ

SEQ ID NO: 202099 - protein, 46 aa, Oryza sativa
  Clone ID: PAT_MRT4530_97410C.1.pep
MAVDGVRRKFVVPLIRCHGQTISAASTEVAEAQQYFPPHYWSSPTM

SEQ ID NO: 202100 - protein, 38 aa, Oryza sativa
  Clone ID: PAT_MRT4530_97411C.1.pep
MALGRPSVSTAHPLFSTAVPVPFQPVAIAEPDPPLALR

SEQ ID NO: 202101 - protein, 283 aa, Oryza sativa
  Clone ID: PAT_MRT4530_97412C.1.pep
MASGFFHQLEVIIIILCFFPTFPSFASGRYSPHDGATATWAGHHHQLQVARDHPRGCGGGGGLAEYCWVARPQASVASVATFVSTAGAASPHQAVSNCRTWGPMWYISFFVSKSIIKGNVHVDYLGSSAIDGHIILGPATRPMARYFGPTQASLQPGDFNCSVLSGFVTRPGCSPLPAFAAAAGKSSSHRTVTGGLPELDSELALLAMIIVLADRATDRRKKKSGRARYSVAAIGALLVMLLRQVPHLQHRWQMQHAQTAPMIPTCPSIFGATPIVIKPRAAQ

SEQ ID NO: 202102 - protein, 112 aa, Oryza sativa
  Clone ID: PAT_MRT4530_97413C.1.pep
NAPSAQPMAPVSAPPQHTVDPTQQQPIQQTPPRQQIVQPIQQTPPIQQVVQPIQQMSPRRQVQGGNLNYQYQPPSPQVQYQQGGSAQPQFVPQYNQFEPMPQQPQGAPQQRP

SEQ ID NO: 202103 - protein, 138 aa, Oryza sativa
  Clone ID: PAT_MRT4530_97414C.1.pep
SERDGQIARLISLSLSHTHLFLQDLFLFIIFFFFSPPFASPIHLLSRDVAELKLVVVEQRKQVRQEKKKEEERRKKERKKRQLEGRGQKRRRGAVAKAQILPVGYFYHPHPLSLSPLADSFTDAKIQPLFRCRQMPPL

SEQ ID NO: 202104 - protein, 138 aa, Oryza sativa
  unsure (1)..(138): unsure at all Xaa locations
  Clone ID: PAT_MRT4530_97415C.1.pep
MRTPIHKARTMQDLDQMKRRLKDMEVEANALRQMLPTVVLDMKSLHPNASSCESXEEMNARSVYVENVYYTCTLXELQMHLNTCGTTHGMTILTHKFVQPESCHYHEFLGVXADHEAVKYNESXLDGRQIMVAPKRTN

SEQ ID NO: 202105 - protein, 271 aa, Oryza sativa
  Clone ID: PAT_MRT4530_97416C.1.pep
KKNPKKEIKFMTYNVWSREDVAVYKRMKAIGSLVEKHKPDVIFFQEITPYILRIFKSFAWWKEYHCSEVKPEEQATKLHFCMMLSKIPMEKPASWKFTNTSTGRGYVEADINPGTSSPAIHIATTQLESPSSGPPAAQPQTRSLERYAQAEHAVAALGSARNVVLGGDMSWDDAVDMPFPLPAGGGGGGGDWVDAWTVLRPEHERASARRTTASGTRISPCSTASRRMLASSLKKRSDRFVCKLQDYKLGGIELIGSTENLGIDYLKKRRD

SEQ ID NO: 202106 - protein, 57 aa, Oryza sativa
  Clone ID: PAT_MRT4530_97417C.1.pep
PADCCYVVACYIIYHFLESKKYIDLTIRNQLENRYLLTFMLPCSTTYSFRQYLNYEM

SEQ ID NO: 202107 - protein, 52 aa, Oryza sativa
  unsure (1)..(52): unsure at all Xaa locations
  Clone ID: PAT_MRT4530_97418C.1.pep
TTPAMWRRASHLLRATATVTXTAVSRXVPHPHSXXEXAISTVLXXPKXXXYL

SEQ ID NO: 202108 - protein, 44 aa, Oryza sativa
  Clone ID: PAT_MRT4530_97419C.1.pep
GGGRIVGGTRPVRFFYKSAPSAQGHFWGPCFKYQLLNPISFSAR

SEQ ID NO: 202109 - protein, 71 aa, Oryza sativa
  Clone ID: PAT_MRT4530_9741C.1.pep
VPASAQQVTEQTRAASRGQGEQSECRNEQHTYDSITQHCCPSSSWARCAMNGSWAQTVCAHRLGKQGMEQQ

SEQ ID NO: 202110 - protein, 84 aa, Oryza sativa
  unsure (1)..(84): unsure at all Xaa locations
  Clone ID: PAT_MRT4530_97420C.1.pep
MGRMIPWRAAKERAEEQTQSGPPQWRLKLPWPNKKTTAAPRRRKTEYQXKEHRSSVLVTREKLDGRHNLFACKSGELEAADTEE

SEQ ID NO: 202111 - protein, 197 aa, Oryza sativa
  Clone ID: PAT_MRT4530_97421C.1.pep
SPGEAREMDAAGVAAKPSLSRKPSPSFRLRNGSLNALRLRRVFDLFDRNGDGEITLDEMASALDALGLGADRAGLEATVGGYIPAGAAGLRFGDFEALHRALGDALFGPVEEEEPGKQGEDDDEGDMKEAFRVFDEDGDGFISAAELQAVLKKLGLPEARNLATVQEMICNVDRDCDGRVDFGEFKCMMQGITVWGA

SEQ ID NO: 202112 - protein, 72 aa, Oryza sativa
  unsure (1)..(72): unsure at all Xaa locations
  Clone ID: PAT_MRT4530_97422C.1.pep
AAEXXAVKXTTLXLFXFLFLSCXCVXKFCXSTXKKRKKDRXDSXDVIVXRSRYTRXQXSDAKSTXRVKKKKK

SEQ ID NO: 202113 - protein, 154 aa, Oryza sativa
  Clone ID: PAT_MRT4530_97423C.1.pep
LAPAPPVLCVTFGSPLLGNQALSRAILRERWAGNFCHVVSQHDVVPRLLFCPLNVIPVHIVVGMQLHQLPVRARRAAGVVATVTARMADTNQESLRQLIQEHAGEAAIEQKLAAPEIPSGSPYRPFWGRMSCARRMVRRVSTIQQQQFRCYMQH

SEQ ID NO: 202114 - protein, 54 aa, Oryza sativa
  Clone ID: PAT_MRT4530_97424C.1.pep
KEQENNRSSHIYSTPKNLPNSRPYCIKKIIYMGGGKINRAQGIKECIVKWLTAQ

SEQ ID NO: 202115 - protein, 67 aa, Oryza sativa
  Clone ID: PAT_MRT4530_97425C.1.pep
TPFILIFKIYKKNSSDHVPPFFPFKPKTHEYYYYIQHLKLACPNILVNLSWSTLKLFLTPQRIHILF

SEQ ID NO: 202116 - protein, 84 aa, Oryza sativa
  unsure (1)..(84): unsure at all Xaa locations
  Clone ID: PAT_MRT4530_97426C.1.pep
AGLXDKLCGQPMQARCNGHVWSLQCXAEHADDCGGRTGAVAGGWQKLGVISCKFSHYSNRRWKPGTGKSIDIIKGIEKRTSKKK

SEQ ID NO: 202117 - protein, 57 aa, Oryza sativa
  Clone ID: PAT_MRT4530_97427C.1.pep
RENLLHSHGPETIQKLYWDAQIWSTAQETTAVGQCDKLHCGAAMYTWIRVIHHIEET

SEQ ID NO: 202118 - protein, 115 aa, Oryza sativa
  Clone ID: PAT_MRT4530_97428C.1.pep
TVNIKHLFIFLREMELISDMYADKHSSVFYSSYPEREREKKRKKTVWSSSRGCKKAATCTTRCCTACTSDCYTTELAASLLLLLLEVLVVVAWPDGHQTNNKKSWNRRGEREIDR

SEQ ID NO: 202119 - protein, 52 aa, Oryza sativa
  Clone ID: PAT_MRT4530_97429C.1.pep
LFRVHVVVLPFYLQTRRVILCCNSRGDLYTLPAAAPPIVAHCFQATSTTIWH

SEQ ID NO: 202120 - protein, 379 aa, Oryza sativa
  Clone ID: PAT_MRT4530_9742C.1.pep
MGCGALGGQQAVAGEAKTARVAELGESYIDSDFPPCRPATAVMEKRDDKRRSLYLVARCCLKQMAIYTPTVCLQRCTYSLYSQSCQLQGGLTQGMALWKYSRSQAVGYHVKIRLVGLPPKMNIKSLRTCFASSGKQLCGRQPARDNILKLKLDEPSRQKLYSILWDSRSIGHKVGATGTGLFLSFAVPAKANAEGPVDNNTDSPQTTESSTSYAHGKKVCTDYSVTACIVCSLVFDSHGNPQAFLEMEGACSDLWLMVHVLGQILNVALEATQPFLVADEFIKRRAETEWFVEGDFDAYVSRIRKPHVWGGEPELLMASHVLRMPITVYMHDKEAGGLIAIAEYGQEYGKEDPIQVLFHGFGHYDALQIPGKGGPRSRL

SEQ ID NO: 202121 - protein, 73 aa, Oryza sativa
  Clone ID: PAT_MRT4530_97430C.1.pep
MELVQPGCPVDRLPDSPRHERGAARCLLGTGANPKQEGSSTISDLDEFIFEEEDYPVIDYELVIHAAKSTTAR

SEQ ID NO: 202122 - protein, 61 aa, Oryza sativa
  Clone ID: PAT_MRT4530_97431C.1.pep
HKYLVIIISTRTVLATRKSTNSAIRIEAWGARSSTSTLGLVLPGFTTNGPTSGSVDRRNVP

SEQ ID NO: 202123 - protein, 99 aa, Oryza sativa
  Clone ID: PAT_MRT4530_97432C.1.pep
MQQQGWSYAEDEEEEEQEVASAAAIGERAGGFYSGGHRICARLREWRRRTSGGGGGARLRAAATKGDKQRKQAKEKKPGNLPGGNALLGSAARLSPQTP

SEQ ID NO: 202124 - protein, 137 aa, Oryza sativa
  unsure (1)..(137): unsure at all Xaa locations
  Clone ID: PAT_MRT4530_97433C.1.pep
CGSFNLSLTTKIRKNQRRAPPLLVTTAAAGPPPPPAAGPPPHAPPPXFDGGRAPPLPVNTAAVGPPPPPAAGPPPXPPSRSDGGRAPPPLIPPSGRAASPPPPDLANGRAPRPAXPPLPPPPGHSRLHATGSGGGEA

SEQ ID NO: 202125 - protein, 67 aa, Oryza sativa
  Clone ID: PAT_MRT4530_97434C.1.pep
AAPSEHRGRQSGLSNYPTIKREDYVNREDRACHTAEQNKHNTRHIIRFSNSYPGSHPNGMTIQAERS

SEQ ID NO: 202126 - protein, 177 aa, Oryza sativa
  Clone ID: PAT_MRT4530_97435C.1.pep
IYLAINPNDNIAEYSNFEIWASDPAFPSNVFVAKVAQSLCVLASGPSTYLIVQFVIPCSWNAAGLTTFTLTYSQTLDSDEKVLQFLSKSITIGSNVACNLSLVLNYPGTCPLPYNPSDCGCLSQGNGASLAPCGNCAACPSLAFQGTGSFVPGDTLNFYAHNGSISSFNSVFGTISD

SEQ ID NO: 202127 - protein, 166 aa, Oryza sativa
  Clone ID: PAT_MRT4530_97436C.1.pep
CCRRRRRRRRTSPSPPPRPLASPRAPPPSAAAAADRSPSPSPSRSRRRRCAASSRPPSAASSRGRAPSPSSSSAAAAAVGDGSGWGEGGGGGQHRRKSSRRWRSPWRSATSWPSSPTTGTRRASARRSACGRRCGGEEEGGGGEAAGSGGSRRCCSGSPSAPSSAI

SEQ ID NO: 202128 - protein, 71 aa, Oryza sativa
  Clone ID: PAT_MRT4530_97437C.1.pep
LEGVLQGVPDVRAHFLLKYLGLPLILDRMKKAKNVKGRLGAPAQVAAALPAGWHLEHHQREMQGQLDKYVH

SEQ ID NO: 202129 - protein, 767 aa, Oryza sativa
  unsure (1)..(767): unsure at all Xaa locations
  Clone ID: PAT_MRT4530_97438C.1.pep
STPSLKDLVFAQAKITDALSKKLAANDKVLENINVKLDGFASVFQNQLSFNKMIETQLAQLVALVPATEFGRIPEQPESSIKNVKAITTRGGKSTHAPPYPNPAGTSSITKEAPFGNSADEEVQPEKTMPQEYCDTRLLPFPQRSRKPSVDEXFARFVEVIXKIHINVPLXDAMQVPTYAXYLKDILNNKRPLPTTEVVKLTEQCSNVTLHKLSDKKKDPGCPTITCSIGTEQFEQALCDLRASVRSSQRTSLTNLTSRKKSLSVSQGLNSAPWSESKFPSEENNVSQQLSLEDAGKIXYTGQKVRAAGSEEAVFHTKTKEGVEVKTKDTHSITSGDGWKIRELNRKKFALXIHSALIVSLKXKYLVAYIQVALVKLTGGTRRRLSRLFKGSGSSSSHHDESSARSSADVSMEDADVPQCLLSDADLDLVDDWERQAYYMLRDREYAHTREYSPELLKNIGMDTDFHAIWKAVGWQRFVVVNEHGSRLLTLQFLFTLKETTEDGISFRFFHKEHTISXKGLSTLLGFHDSCKIDLQKGISGFEKNRFWEDISGASIYKKPRTNNIHNPTLRLMHIWIAMTLFPRGNLRPIRGDXLIIMFTMTIEESRAGGTYRETRNMARNEQEGSSSSTPMQMYEAGWEPTGDAPGWTQAPRHSIGVSSWASASEDRRHAPHNIQWGDMSNQPPRSSGMTPSLGEWRSSSSRWDLGEITRRMNTLDMQTGEIRGSILTKDPERKPSLGGDIFPPLIVVARYEIVNKSCYDPSLSLT

SEQ ID NO: 202130 - protein, 177 aa, Oryza sativa
  unsure (1)..(177): unsure at all Xaa locations
  Clone ID: PAT_MRT4530_97439C.1.pep
MGNAHGEDKRGEGRSARTAQSSVLRTARGRSQLWVAEGARGRRRPATEAEANRARGDARWAAGSSSSSWARGDAXGRRALPRRWRAGTRGGTPPPRACSSSEPSRRTPSHLPVPGSATETGRCGSTXEDVGVDGDRESRSTSPFHSPIPLHHPRSKHELGDAWKEETSGGKLSAAAS

SEQ ID NO: 202131 - protein, 433 aa, Oryza sativa
  Clone ID: PAT_MRT4530_9743C.1.pep
RLSSSPPQNPHTRAWLIGCLREPRPWSSPPPPPPPPPPPPPVLTDPAAPGSQSRRGTAAPSSPPLPPASSPRSPRTAASTAYAVHGAQRRRLPVRLRPPSSSGRPTSQGGDSVRVTETLQPGSSVKFSVEVPPSICQQCYETTLQEYAKRFKIPGFRPGKVVPENVLINYVGPKHVQDATVEAILRHTLPQALSSVEDRALEDSVRILTKFEDMANSFSLDNVFRYDVSVDVAPEVRWLSEDKYKNLKVVVEIDEIVDAEKAAEIELKRRHKALGLLRIVADRGLQVGDLVVLDIFAESITSDGSKGEKIPSAVAAAFHLDTEENNNLVPGFLGSLIGIRPGETRSFPLQFPESFEQESLQGVRAQFTVVCKELFYRELPELDDSLAGKLLPGCTTMDQVRERILQRCKAGVKPALVHAPQCAPSFSVASELK

SEQ ID NO: 202132 - protein, 69 aa, Oryza sativa
  unsure (1)..(69): unsure at all Xaa locations
  Clone ID: PAT_MRT4530_97440C.1.pep
WVLQGESLAPLSVLATATPLGAVHFLEGVCYWSPRSTPLQEFSPGKNXRFVRIGRCRRSVGVTFLKASF

SEQ ID NO: 202133 - protein, 86 aa, Oryza sativa
  Clone ID: PAT_MRT4530_97441C.1.pep
MPPRCLLVSCTTTRKVMVVFFAGEEINGGGGCNKNGMEKIRSQQARRHWDLNWRLVVLNNSDGDRNDMASKAWIHLRQASGAWIRI

SEQ ID NO: 202134 - protein, 67 aa, Oryza sativa
  Clone ID: PAT_MRT4530_97442C.1.pep
FWQARSCSRAMKAVGVVEASCEAIFQLVMSMDTTRYEWDCSFQYGSLVEEVDGHTAILYHRLQLDWF

SEQ ID NO: 202135 - protein, 431 aa, Oryza sativa
  Clone ID: PAT_MRT4530_97443C.1.pep
MGPPLLPSTSWVILSREVYACGDGDGGGGGIPLPEGADLALELAAPPRVSKLAVSRRITPAKVSPFAKWKSFVIAIDPSAGLVLLLAPPPPGPGPGELRSFTDADGKVHTYHVTTMPTQRYFVCDIAARTAYYLPDPEGCVFNNDLSIIAAPGGGGKYLVVEFKFIVGGDKATLLCFSSETGLWEKKPVNNPLPRWIWRCFDVGSYAGKLYWVDTAAGLLFCDPFVDEPHMEYVPLPRVELPPEHDEDCHGCDYCAERAFVSRRCVRLSDGKFREAGTKVWTLEYAVSFADLWASESYKAAGLPEKAPVLALVHPKNPDVVYFFVEDQLVGEENLRLSFSRERKTSVSPNFLPLVGVDLRAKEVLEYETHKMTVPENARVFPYGLLPMVLPPALSAGLSKEGATSACDNQLDVGILDLSNVRILEFSSPAS

SEQ ID NO: 202136 - protein, 214 aa, Oryza sativa
  unsure (1)..(214): unsure at all Xaa locations
  Clone ID: PAT_MRT4530_97444C.1.pep
MKLSTFATAAGAAADRSRGGGGKHGVRAASRVGATGGVVAGDMAELQLRRAQPAVGGGETVYQECPKNHAASLGGHXALDGCEEFMPSSAXEPTDPTSLMCAACGCHCNFHCWLLEGSPPPPPPLALPAPPMPANVLHGQLHREEETPEVRLPGVDGDESDNNSDGSEYYDERSVSPPSPPHLPAPVVHQPYYPSAQHMLLSLGSSGQAQRLPL

SEQ ID NO: 202137 - protein, 381 aa, Oryza sativa
  Clone ID: PAT_MRT4530_97445C.1.pep
MAPPSWVILSCEPRVCGDDTVLPQGADVALSLAAPPRVAVLSVSRRVSPAEVDPCARCKSPFVLALDPSAGLVLLVAPPPPSPDDSGDLRSWTDRDGNERTFRVSLIPRPLYFVCDVAAATASHVPDPERLIFNNDLGVIAAPGGGRGSYMVVEFQFIVSGDEATLLRFSSETGLWEKKRVNNPLPRWIWRFFDVVSHAGKLCWVDTAAGLLFCDPFVDEPHMEYVPLPRVDLPPEHNGDCRGCGYCAERALASRRYVQLSDGKFRCVDMGSCKRRESYKAAGLPEKAPVLALVHPKNPDMVYFFVKDQLVGVDLRAKEVLEYETHKMTVPENARVFSYGLLPMELPPALSAGLSKEGAANNSSGVRSASLASPPSDPNGS

SEQ ID NO: 202138 - protein, 86 aa, Oryza sativa
  Clone ID: PAT_MRT4530_97446C.1.pep
KTPGFLKNGGFFFFFGGGRGPPPPPFRERGPTPDPKGPRGGGCPGCDPPCMGSLQPGIHSLDGRPTRGWESSSLLKPWGGSVTGPP

SEQ ID NO: 202139 - protein, 106 aa, Oryza sativa
  unsure (1)..(106): unsure at all Xaa locations
  Clone ID: PAT_MRT4530_97447C.1.pep
LXPXHTPGLTSXLLQKTXPNEAYTNEASTQATNTNERERTRTLSRGGHFYTPPXHSKLTQRTXNPTRTVXTKPCRGNEPSPPFNEVSGALWPEKLNKRNPKPPKQN

SEQ ID NO: 202140 - protein, 61 aa, Oryza sativa
  unsure (1)..(61): unsure at all Xaa locations
  Clone ID: PAT_MRT4530_97448C.1.pep
SDALPFFFFFXXNNLQLYYIKHFFFLGGGGFPCDFLKPRTFPFTRGFPFHTARQIFFPGTN

SEQ ID NO: 202141 - protein, 122 aa, Oryza sativa
  unsure (1)..(122): unsure at all Xaa locations
  Clone ID: PAT_MRT4530_97449C.1.pep
GGADHPYGGSGSFEDRGDGGVADPVCIGGDGVDADCGDSGRTRAVYYVAAFRCFNLXRCLMVHAMSFSAISIMSARQNLIRRHSSTLFLKVGCSSHSSMLLLPNRRNHVDYVIQIELGPPDE

SEQ ID NO: 202142 - protein, 1690 aa, Oryza sativa
  Clone ID: PAT_MRT4530_9744C.1.pep
ACAVRAVRAAEPPPPVVTSSPTSSSPSPIPSFPESPFSQEKSLKSSKASKATPGLEWYIPGLEIGLCSRDGCSEWLGLYNRMPRYKPEYLFGVEGFVQELRTMSFAIGFGTAPFYAQIPHDRHEEKCRVKVTLNSNSEDIPSVMFEAGGRNYIHTCQEVARIAIGELRDRYSDQLADTEYRYHPRQPQGSDRGSYLETEGIENDATTRHLVEMLWAMDETRAETVLAAQDREDRNRGKICKLEDKVDRLEKELAVLKGEAPPQKARVRLTARKRALFVPRYQLVPKVRVVEKEVTPALADPPVVNMVLTRSNGNGPNSNNNNNNEGNPTLAQVLAQQTQLMNMMMQQLQNQQNQGNNHAPPQNKLAEFLRVRPPIFSSTANPVEAGDWLHAIEKKLDLLQCTDQEKVSFASHQLHGPASEWWDHFRLNRITAEPITWLEFTAAFRKTHIPSGVVSLKKKEFRSLTQGSRSVTEYLHEFNRLARYAPEDKLVDKAIRQEDKYNRMEQKKRRIAHFMTQQGNNQRPRLTLGPQSMPQGGSSSVVRPQRQFFNNNAGNNIRNQAPRPVAALTQQQPAKKEQGSKPVVCFNCGEPGHYADKCPKPRRAKVVPAQSNSTAPASKARVNHVAAAETQGAPDVILAPSIRIEIQGVPFLANLILLESKDLDVILGMDWLARHKGVIDCANRKITLTSNDGRVVTVHALSPEFLRSRLNQITLEEIPIVREYPDVFPDDLPGMPPKRDIEFRIDLVPGTTPIHKRPYRMAANELAEVKRQVDDLLQKGYIRPSSSPWGAPVIFVEKKDHTQRMCVDYRALNDMTIKNKYPLPRIDDLFDQLKGATVFSKIDLRSGYHQLRIKEEDIPKTAFTTRYGLFECTVMSFGLTNAPTFFMNLMNKVFMEYLDKFVVVFIDDILIYSRTKEEHIEHLRLALEKLREHQLYAKFSKCEFWLSEVKFLGHVISAGGVAVDPSNVESVTNWKQPKTVSEIRSFLGLAGYYRRFIENFSKIAKPMTRLLQKDVKYKWSEECEQSFQELKNRLISAPILILPDPKKGFQVYCDASKLGLGCVLMQDGKVVAYASRQLRPHEKNYPTHDLELAAVVHALKIWRHYLFGTRTEVYTDHKSLKYIFTQPDLNMRQRRWLELIKDYDMGIHYHPGKANVVADALSRKGYCNATEGRQLPLELCKEFERLNLGIVSTGFVAALEAKPTLIDQVREAQINNPDIQEIKKNMRRGKAIGFLEDEQGTVWLGERICVPDNKDLKDAILKEAHDTLYSIHPGSTKMYQDLKERFWWASMKREIAEYVAVCDVCQRVKAEHQKPAGLLQPLKIPEWKWEEIGMDFITGLPRTSSGHDSIWVIVDRLTKVAHFIPVKTTYSGSRLAELYMARIVCLHGVPKKIVSDRGSQFTSKFWKKLQEEMGSKLNFSTAYHPQTDGQTERVNQILEDMLRACALDFGGSWDKNLPYAEFSYNNSYQASLQMAPYEALYGRKCRTPLLWDQTGERQVFGTDILREAEEKVKIIQERLRVAQSRHKSYADNRRRDLSFDAGDYVYLRVTPLRGVHRFHTKGKLAPRFVGPYKIISRRGEVAYQLELPQSLAGVHNVFHVSQLKKCLRVPTEEANLEHIEVQEDLTYVERPIHILEIDERRTRNRVIRFCKVQWSNHSEEESTWEREDELKSAHPHLIASASESRGRDSV

SEQ ID NO: 202143 - protein, 73 aa, Oryza sativa
  Clone ID: PAT_MRT4530_97450C.1.pep
KFFNPGRSILALDVLTLFRSKRTILSIFAHFFFPLESPAFTRRPKIEKSFLPKKQDDSKSRFLKKNCSPMKKI

SEQ ID NO: 202144 - protein, 218 aa, Oryza sativa
  Clone ID: PAT_MRT4530_97451C.1.pep
MDALSCLAPHAALLPCAAFTDADITRALHFSSSMPDTSSSPSSSSSAAFLADFCGGGAGGGFVVSAPPPTMPAITCESVLVADSARPSPAGPARRHQQQQLGLGPAGGRAGKRRSRASKRAPTTYISTDPANFRLMVQHVTGVQADPASLADGAAGILPTTTTTAPFDASSGLHMLDTFAAANPLLQAEQAAALQQQPCFPTLDSSWSAVMYDGSDLL

SEQ ID NO: 202145 - protein, 60 aa, Oryza sativa
  unsure (1)..(60): unsure at all Xaa locations
  Clone ID: PAT_MRT4530_97452C.1.pep
FALXIEPTXTGXMIRAXIEEEDRXIGQXIYKGVLXTDDKAAHEYNIEAGSVLHXTLNLRA

SEQ ID NO: 202146 - protein, 108 aa, Oryza sativa
  Clone ID: PAT_MRT4530_97453C.1.pep
STCSSSAPPRTHVDVWKTGPTQTAETLDAKPSSLARETKTKSSGGYWSRNFQRKFCSPCDAIADTQLSSKLDARSAFSFRDVKIGKALASKQKRQIEKFSPFSCVPLN

SEQ ID NO: 202147 - protein, 284 aa, Oryza sativa
  Clone ID: PAT_MRT4530_97454C.1.pep
RQSSISSCPHAPLLQKAFLHAGEQHLCIRLRQPHGRVGLHRIGRPRRPWFWIHVGQRQPRRQSRPTAAAVRRGRGGRIGGGRNRVGGGRPPPDPCWGRAPVPDPRWRRQLSPDPQWGRAPPPDPSWGMAPLPDPRGESPAVTEGSGGGRSTRADRLRPSSPWPLPLLPSSPRPLPSAAAARRDPRPVPPPRPSRPALSIGLRKPFKRPIWENRFFHMGVLRSRLRKCRSIFAVATSYGPFAANRSRSSAPPPAQTASRPGAGRRRAGAGRNRPGAGRQPPGHLD

SEQ ID NO: 202148 - protein, 330 aa, Oryza sativa
  Clone ID: PAT_MRT4530_97455C.1.pep
MAGQVSTGNAAASASMAGEGQEEDPAAAGTSHLVLFSPALAHGMEGHGFQSPAPMDVEITGDVGAGGERIMQVRANNLDLQTLVVVLISREMTPANACEYTTKIPSSPLTCMPLQRCCSASISSAAMVVGVGGPAAAAAAANEGGEREVEVERKGRGGRRKMSGNGVKKVAEVAAKAGKAIDWEGMAKMLVSDEARKEFNTLRRTFEDVNHQLQTKFSQEPQPIDWEYYRKGIGSKVVDMYKEAYESIEIPKYVDTVTPQYKPKFDALLVELKEAEKESLKESERIEKELAELQEMKKNISTMTADEYFAKHPEVKQKFDDEIRNDNWGY

SEQ ID NO: 202149 - protein, 360 aa, Oryza sativa
  unsure (1)..(360): unsure at all Xaa locations
  Clone ID: PAT_MRT4530_97456C.1.pep
WQVISMDFIEGLPLSSRQNCIPVVMDRFSNYAHFIALHHPFTAMDIAKLFMLHIFKLHGLPQVIVSDRDKVFTGQLWEKLFLRDSTKLHFSSAYHPXSDGHTERVNQCLEIYLRCFVHSTPTKWGTWLHLAEYWYNTSYYSSLGRTPFQVLYGYPPNHYGIGANDCALPDLADXLHNRALMQKLVQQPLKSTXQMKHYADKGRCFRESQVGEWVYLKLQPYVQISVALRANHKLAFKYYGPYQILERLGQVASRLHAPAHSSVHPVFHVSLLKHNRGFSGPIQSQLPSSNSSFHYPLKVXSHHVTKKGNYAISEVLIQWSDTLAEQATWEDLEEMMTSFPAALAWGQANFQGEGILRSST

SEQ ID NO: 202150 - protein, 90 aa, Oryza sativa
  Clone ID: PAT_MRT4530_97457C.1.pep
FLNRTRVKIYRTTHQFCYLRWLSPRHLSNTPQTLLHFTQFLSCHESMSTGNLLYQKAASIHYPFILLPVPNILVKRQDIPQDFSSCPCTA

SEQ ID NO: 202151 - protein, 86 aa, Oryza sativa
  Clone ID: PAT_MRT4530_97458C.1.pep
LSFQKKAFFRGPKKAAKKGNPREGKFFSLETGVFNGGQKKKKNFERDLGALQKFGLNLFGGGKELFGLGFNQFPKARAPLFSQGAL

SEQ ID NO: 202152 - protein, 37 aa, Oryza sativa
  Clone ID: PAT_MRT4530_97459C.1.pep
MASNGIARSITTKSSLALHHRFRFIVTKPLAGPSPPH

SEQ ID NO: 202153 - protein, 261 aa, Oryza sativa
  Clone ID: PAT_MRT4530_9745C.1.pep
MDDLTVAPSSTVSAIAALVALGVMDIREFFHFPAWICAEKELMGEAACKCKSGLRVSRRPRHRVDCRPSCHHQLRCLRLRSPATSGSAMRRIVASHGSRQGGAKEHQVNRARAHRPRICHLRDGMLPQCSGKMSLPVKHVMVSSTTIAGSTGGEVPATASAPSAIAGTGFVQGLVTYAVMDDLKVAPMSTIALVKSGVTHIKSLQEKTVQIGYTEGLAMLKASLQSKTVLTDVFLGKKRKKWPFVLVLLLLFILLAGKPQA

SEQ ID NO: 202154 - protein, 87 aa, Oryza sativa
  Clone ID: PAT_MRT4530_97460C.1.pep
PSPIGGVPFQKPIPPPISFLPAEAFLPPLVFGPGTPPPGPLGKWGLRGCPPFWGERKNSGFVKGGQCLSPPGGIPIPPDANAFFQNV

SEQ ID NO: 202155 - protein, 867 aa, Oryza sativa
  Clone ID: PAT_MRT4530_97461C.1.pep
MSSFILPFLLPPSLSSLPLFSSPFERLGGSGGRGPEWRRRPRHRLPCLQAGLPSRKLRQGLRRGRGMGARAQPTPSWAREPLFEKAVTPSDVGKLNRLLVPKQHAEKHFPLRRTSSDASATAAAATCNSARACSSTSRTARGSSQSYVLTKGWSRFVREKGLRAGDTIVFSGSAYGPDKLLFIDCKKNNTAAATGDEKPITSGEATRVVRLFGMDITGGGGDCRKRERAVEMGQEAFLMKRQCVCTTLHRPLSEGDITAMQVQQRKPKACAESAAAARGADQQQCDGRPLEAGEESLERSVPRKRKPAAAVAAAEKRWSSVAYVVLAAFVMATVFAVLGGRRPAVWIAATKALRRGSDDKSIPLARSAADKLLGGLLPEGFDEKSCRSRYESYLYRRNPGRRPSPHLVARLRMHEELQRRCGPNTESYNRAVQRLRDGGAAEADAHSPDDEQCKYVVSISYRGLGNRILAAASAFLYAVLTGRVLLVDPSNEMDELFCEPFPGTTWLLPRDFPLASSYANFSADTAESYGNMLKNKVLGTDGSTDGDMPAAQMPAFAYLHLDHDYGDGDKMFFCDDDQRLLSNIQWLVMRTDTYIVPSLFLVTTFQDELDALFPERDAVFHHLGRYLFHPANHVWGLVARYYRAYLATARQLVGVQVRVFDHRQAKSPHVVLEQITSCAWKEKLLPEVLDAVEDAAMPTPPTTPHGGSNNSKAVLITSLRPWFYERVKAMYWERATATGEDVSVHQPSHEEYQHFGEKSHDGKAWAEMYLLSLCDVLVTSGWSTFGYVAQGLGGLRPWVMYKPVNITAVPDPPCGRDVSMEPCFHSPPFYDCKTKRGVDTGTILPHVRHCDDVSWGLKLVDPNGSPN

SEQ ID NO: 202156 - protein, 50 aa, Oryza sativa
  Clone ID: PAT_MRT4530_97462C.1.pep
MDSEPDLKTPPPPPHLALPQPQVDAVPMPSLSRRRKRAPFLVELTPEEIE

SEQ ID NO: 202157 - protein, 961 aa, Oryza sativa
  Clone ID: PAT_MRT4530_97463C.1.pep
MASISLEDVRNETVDLETIPVEEVFQHLKCSKQGLSAAEGQNRLNIFGPNKLEEKTESKLLKFLGFMWNPLSWVMEAAAIMAIVLANGGGRPPDWQDFVGIVVLLVINSTISFIEENNAGNAAAALMAGLAPKTKVLRDGKWQEQDASILVPGDIISIKLGDIIPADARLLEGDPLKVDQAALTGESMPVNKHAGQGVFSGSTVKQGEIEAVVIATGVHTFFGKAAHLVDSTNNIGHFQLVLTAIGNFCIISIGVGMIIEIIVMYPIQHRAYRDGIDNLLVLLIGGIPIAMPTVLSVTMAIGSHRLSQQGAITKRMTAIEEMAGMDVLCSDKTGTLTLNKLTVDKTLIEVYGRGLDKDSVLLYAARASRVENQDAIDTCIVGMLADPKEARAGIKEVHFLPFNPVEKRTAITYIDGNGEWHRISKGAPEQIIELCKMSKDAEKKVHTLIDQYADRGLRSLGVSYQKVPEKSKESEGEPWQFVGLLPLFDPPRHDSAETIRRALHLGVNVKMITGDQLAIGKETARRLGMGTNMYPSTTLLGDKSSEMSGLPIDELIEKADGFAGVFPEHKYEIVKRLQDRKHICGMTGDGVNDAPALKKADIGIAVDDATDAARSASDIVLTEPGLSVIVSAVLTSRAIFQRMKNYTIYAVSITIRIVLGFMLVALLWKFDFAPFMVLIIAILNDGTIMTISKDRVKPSPTPDSWKLKEIFATGIVLGTYMALITALFFYLAHDTDFFTETFGVRSIKTNEKEMMAALYLQVSIITWESETKVSIISQALIFVTRSRSWSFVERPGALLVIAFLAAQLVATCIAVYAEWEFCTMQGIGWGWGGAIWAFSVVTYFPLDVLKFIIRYALSGRAWNNINNKTAFVNKNDYGKGEREAQWATAQRTLHGLNQSSTSSDLFNDKTGYRELSEIAEQAAKRAEVARLRELHTLKGHVESVVKLKGLDIDTIQQSYTV

SEQ ID NO: 202158 - protein, 73 aa, Oryza sativa
  Clone ID: PAT_MRT4530_97464C.1.pep
RLRVKRVEIGRISSETMLDQPVIDHIYHLNYSVSTLIRCRKKLEKTKFKNSQKRYSRKLYPLNGNGARSIGNF

SEQ ID NO: 202159 - protein, 155 aa, Oryza sativa
  unsure (1)..(155): unsure at all Xaa locations
  Clone ID: PAT_MRT4530_97465C.1.pep
DGYPISHPIVLPTCSSTNPKSYLHRIAHRCRPTALTRLLQVTVVPSYLCDRAKNRALVCYTSTGGGTARAPESSHAARAGRRGPVLAAPDEAKNAAGLWRAAVHGVHGQGCDRVLAGGGVGRLGGQRRDPERRRRRQSKEAGDQVGAXRGETEXD

SEQ ID NO: 202160 - protein, 204 aa, Oryza sativa
  unsure (1)..(204): unsure at all Xaa locations
  Clone ID: PAT_MRT4530_97466C.1.pep
VFVADLFSAFRLKPEEVFAHLPIWRSFAPPQCHXRYFLWLVAHWRYWTTDRLEKRGLPHPTYCVFCDQLEETVDHILIGCLESLXLWWTVLSSPGLPQCFPSDADSFFEWHCSCRLKVPREHRRGFNTIVTLGGWSIWXKRDNHVFDNHSRPXPEVVAAMAXEAILWRLAHPPLPALPSXMFGHVFEDDQPTPCISQSQLLPFH

SEQ ID NO: 202161 - protein, 134 aa, Oryza sativa
  Clone ID: PAT_MRT4530_97467C.1.pep
PTRPAHSCPLLFLIRRPASERANRQRCCDGGPARQRARAAASAVAAPPRLAGGRTQGRRQAVCYGVGGPARRRTSDGKRLCGRTSSAGVRSPKAAAKPTLPVPGEGRWRDKLQGGARTAVNRRGPEETGELRQA

SEQ ID NO: 202162 - protein, 123 aa, Oryza sativa
  unsure (1)..(123): unsure at all Xaa locations
  Clone ID: PAT_MRT4530_97468C.1.pep
RRTASPLGHDECKSWQQTRDGSRECRCAVIRRMVRRYQAEXMPPPKEQGWSAMSAENYRCDVLTPEQGNYGEXNARRRYYGQHQQQPMMTRLRLTHARQYDGQLTSMCLDETQQCIIFDVGHY

SEQ ID NO: 202163 - protein, 67 aa, Oryza sativa
  Clone ID: PAT_MRT4530_97469C.1.pep
AAAVGPGEPPASTPPPAPKDPNPNSAAGKRAAGGGPATPSWSSPTKTTAARTEQSSYVSSSLLVRLF

SEQ ID NO: 202164 - protein, 2080 aa, Oryza sativa
  unsure (1)..(2080): unsure at all Xaa locations
  Clone ID: PAT_MRT4530_9746C.1.pep
CSIFYLRRWEGPMSPSPTXKTSXLRYKRDPPGGPXGIESQSQHIHHSLRNPCTSVPQYLLYLVYGYPPSIVARXVGGLGAQGSTTMTSSFVDNSVNTNLNQGVPTSTTLVWTQVGEIVFPVYTTMSISAGPAMAGNKNALATTRGDSMSKDPPAEAEIGTLTTSKPEMDPSAAKPCLSDRNHEPTRITSEVTRSWCPIHKTRKHTLQACWVFLNVHAEIRACKERGIQRTSPTRDVYCPIHKTKNHDLSSCKVFLSAMKTPPPKVQQSHIPIRDEDKEQGATPISDRFVGVIDIDPHEPSXLHLLEDYGSSTTSTPREVLAIDDVGTSARTNAEAENQVTTPAQHIRAVNAILRETPYDPVLNDDLARWTERLRESVTNLSNAFEEAAATAHPEQPPTGDANGEDPERRGSPHRATPPPRGTGDLRDHLNGRREARRTRDNKNRSRRHVSSRRHDNGDNCHNRHDHDDRERRVLGDTGRGRRHNDDDDGDRCRDNNXERRQDSQEPSRRPRNHTPEPSNPSSSSSSLSSSSSDRHPRRTYDRRQPTAPSDGCRAFGRSLRDVRWPERFRPRGIEKYDGSTDPEEFLXVYSIVLYAAGVDDNALANYLPTTLKGSARSWRMHXPPYSISSWADLWQQFVANFQGTYKHHAIKDDLHALTQNPGECLRDYVRRFNECRNTIPEITDASIIRAFKSGVRDRYTTQKLAMRRVTTTRRLFEIVDRCAHADDALRCKNDQPKTGGEKKPAKDAPESSKKKNRKSEKRKSQSEVLATEYADPPKRPDPQGSNMKKAWCPIHKSDIHSLEDCLVFKKSLAKHMASEKGKRVRVVEKDAEAPTQESDSAYPDSDLHVSHSFXAPRRRYPIVVEPTIRNIKVAXVLIDGGSSINLLFASTLDAMGIPRSELTPTDQPFHGITPQSSSKSLGKIMLTVTFGQANNFRTEQITFDVAEFDTAYNAIIGITALAKFMAASHYAYQVLKMLGPMGTITIQGNAKLAVQCDKRSLDMVEHTPSPPATAELPKKVSKTNKTPKPDGTIKIVPLSNANPDKTELVLITFLRDNADVFAWQLSDMPGVPREVIEHKLMVRPDAKPVKQKLRRFAPDQKQAIXEELDKLFKAGFIREVFHPEWLANPVMVRKANRKWRMCVDFTDLNKACPKDHFPLPRIDQLMDSTASCELLSFLDAYSGCHQISMAKEDEEKTAFITPFRVFCYVKMPFGLITAGNTFQRKVQGALSDQLGNNIEAYVDDIVVKTKTSDSLIDDLRETFDNLRRYRLMLNPEKCTSGVPSGKLLSFLVSGRGIEANPEKIKAIENMKSPTRLKEIQKLTGCMAALSRFVARMGEQGQPFFALLKKQDKFVWTQEAEEAFIALKRYLSNPPVLVAPQPNEELFLYIATTPYSVSTVIVVEREKVQRAXPVYYVSEALHDAKTRYPQIQKLLYAVIMTSRKLRHYFQAHRVTVVSSFPLGEVVRNKDFVGRIAKWVVELSQFDIHFVPRTAIKSQVLADFVADWTMPDNRSDNQIDNETWTMAFDGALNSQGAGAGFILTSPSGDQFKHAIHLNFRATNNTAEYEGLLAGIRAAAVLGVRRLIVKGDSELVANQVHKDYMCSSPELSKYLAEVRKLEKRFDGIEVRHVYRKDNIEPDDLARHASRREPLERSTFLDVLTRPSVKEATGEDSSVAPNIGSGATKAERAVADIETTDDWRTPLIKFISSEELPEDDAEAEKISRKAKVYYMIGNDLYKKAPNGVLLKCVSSDDSRHLLLDIYEGICGSHAAGRTLVEKAFRQGFFWPTALKDACDMXTHKAASASTPDYPSHLAVLVLGARYTRAIPTRAGRLQIPIXVAIDKFTKWIEATPTGEIKADNAIKFIKGIFCRFGLRHRIITDNDSQFISADFQDYCIRLGVKICFASVSHPQSNGQVERANGIVLQGIKTLLWAVRTTRTTSNKETPFFLVYGSEAMLPTELRHQSTXVQKYFDEDQEEQRYDDVNLLEEHRERVAVRAASYQQALRRYHEKRIRAHTLSIGDYVLRRVQSQAGRNKLSPKWEGPYTITQVLRPGAFKIADDNGRELANSWNIDQLCKLYV

SEQ ID NO: 202165 - protein, 59 aa, Oryza sativa
  Clone ID: PAT_MRT4530_97470C.1.pep
YTLSLAPTLVVVESFSEDKALGPLTYLVEQALILPPSREKTFSSVGTRQQKILVCRQGK

SEQ ID NO: 202166 - protein, 347 aa, Oryza sativa
  Clone ID: PAT_MRT4530_97471C.1.pep
MVSGFLRFGGPLFCPFFDELFAGCSDASVCLCRCRSGEVFESEQEAEEDFRGIGGEGTLARIHTSRNYSNMPEMRDSKRTALGELSGGGGFFIRRVASPGALAARGPGKPLARRFIRPSNNKENVPPVWAVKATATKRRSPLPDWYPRTPLRDITAIAKAIQRSRLRIAAAQQRSQTPEQNTPHCTEVRDSLDVEPGINSTQIVATPASSLAKDSLKIFSSPSETSLVTPSKPMDPVLLDDMEKKLSSSIEQIEKMVRRNLKRTPKAAAAQPSKRAIQRRTLMLTIAWCSARGPSSRINSWKCQNILKYSKNAQYLLPIVKHQNCHEEDWGVPEKERKTGVAVADKA

SEQ ID NO: 202167 - protein, 89 aa, Oryza sativa
  unsure (1)..(89): unsure at all Xaa locations
  Clone ID: PAT_MRT4530_97472C.1.pep
GPLCIELARFXHSSTKTSLGRSRHHMGIYSGIIRAFGASLSISAKLNWICFVTRECFFTVSEGMKNMNRAWLKQNAPNTIQKMNGVLVR

SEQ ID NO: 202168 - protein, 70 aa, Oryza sativa
  Clone ID: PAT_MRT4530_97473C.1.pep
AYGNTTEKRLQKRCHHGGHDIQECRHRPSKKMCFSPREAHQARERVTLDNTPRGYDTQRRSRCQPGEPPN

SEQ ID NO: 202169 - protein, 365 aa, Oryza sativa
  Clone ID: PAT_MRT4530_97474C.1.pep
MTNLASTLLLVRAVNLRGWFPLLGPAFAANELVLPTNCLFCRGVDSHAPGGLLKFLRKTTPRTEQHVCNGSSSQPINVGDDCNVGDCVRTEKRLPWTKEEDLRLVSAWLNNSNDPIQSNYKKNDQYWNGVAAVYNNTTPKNRARQVKQVKDRFGRIKKRVAWFCASWKEANALWASGESEVNLMDRTVKSYEEDHKKDGPFMFKHCWDVLSKEPKWDAYLERLEGLEPDKRKFNVEEGVGHHFSLDDARDERPIGGKQAKEQQKRKRKDQAIIDLEEEFHKLVDAQNTANEGHKEMLETQRRVSSENVEARKLKYLAEKEHKESTILETYKSLMMQDTTGMPEDVRSERMLALRCFREKLFGKTD

SEQ ID NO: 202170 - protein, 77 aa, Oryza sativa
  unsure (1)..(77): unsure at all Xaa locations
  Clone ID: PAT_MRT4530_97475C.1.pep
NEWNCNLKGKEFNREDGEDTIQDDFTLCNLSSQVPYYNYDVDLIKDIQFSHSXMFTEEQNPLLKLDAKKGYALTHAR

SEQ ID NO: 202171 - protein, 94 aa, Oryza sativa
  Clone ID: PAT_MRT4530_97476C.1.pep
SPPLDLPAAPPPPPPPSSPPHALRKLLEPPASPSPGGTFSPPAAMQSAAAGVRPRPAVPLRGRRSSWAPAAVAVVPSCSMPGPSPPASPPLREG

SEQ ID NO: 202172 - protein, 410 aa, Oryza sativa
  unsure (1)..(410): unsure at all Xaa locations
  Clone ID: PAT_MRT4530_97477C.1.pep
MWRLRVAEEAGAGGEGWLSSTNAHVGRQVWEFDAAAADDDDAAAAAEEVEAARREFTRRRHQIKHSADLLLLLQNVTESGRRHIQIRWLKIWVIFHPKPKKSTLVWIGLSQLTYLFIPTNPILKFTRSNPSKLEIPGIKLGEDEDVTEEAVLTSLKRAIRRYSTLQAHDGHWPGDYAGPMFLLPGLFYXVIVLHVTGALNTVLSTEHQKEIRRYXGVFDWSGNNPLLPELWMLPYFLPFHPGRIWSHCRMVYLPMSYIYGKKFVGPITPIVLTLRKELYNIPYDDINWDKARNQCAKEDLYYRHPLGQDILWATLYKFVEPVLSHWPGSKLREKALKNAMQHIHYEDENTRYICSGAVQKVLNMLSCWIENPNSEAFRFHIPRVHDYLWVAEDGMKMQVLISYLGLMAIF

SEQ ID NO: 202173 - protein, 137 aa, Oryza sativa
  unsure (1)..(137): unsure at all Xaa locations
  Clone ID: PAT_MRT4530_97478C.1.pep
SIRLYPPLPFNHKSLAKPDXLPSGHKVDANSKIVICIYAMERMRSVWGEDALDFKPERWISDNGGLRHEPSYKFMAFNSGPRTCLGKNLALLQMKMVALEIIRNYDFKVIEGHKVEPIPSILLRMKHGLKVTVTKKI

SEQ ID NO: 202174 - protein, 47 aa, Oryza sativa
  Clone ID: PAT_MRT4530_97479C.1.pep
ISDCRTGTRLYFISFANLLASNMVPCLKCSTTSFYICMLGISTRKHM

SEQ ID NO: 202175 - protein, 245 aa, Oryza sativa
  unsure (1)..(245): unsure at all Xaa locations
  Clone ID: PAT_MRT4530_9747C.1.pep
MDPPLVAEQAAAMERDLAHXRKRKDFLSVVLAARESNKSSRELLTSDYISMLTYEHPLIRSATTSFTISPVVYLIAKHPEVEDKLLRAIDGIRNSTARRRLGYLSCGTIAGGATRTCATTNSDIGFGRNANMVTNPNDDDAMNPRKGTLCYAIIRDKPLLMAHHGRRRLHLRCQPHLDDAISIFGAPATSGLTIAHRRGAHLCPAYCRRVPAPPHRPSRLALMVSRREGKVRKKERGKEEMRGER

SEQ ID NO: 202176 - protein, 63 aa, Oryza sativa
  Clone ID: PAT_MRT4530_97480C.1.pep
MAEQANQPTVLHKFGGQVHLGSSFSEGVRSLNICPFVLSYDWRLTTRSYMTNGLVQWFHSTFI

SEQ ID NO: 202177 - protein, 51 aa, Oryza sativa
  Clone ID: PAT_MRT4530_97481C.1.pep
PSPARRDDLSIGPFCIRLCGLNFLLNYIETCYFRSSDQLQRMKSCSSNLAI

SEQ ID NO: 202178 - protein, 57 aa, Oryza sativa
  Clone ID: PAT_MRT4530_97482C.1.pep
FYCFTVSCIKCGLEARKHPCLMKQRILHVAKRCMEFYGNSSPFMITFRTRGPEPLST

SEQ ID NO: 202179 - protein, 86 aa, Oryza sativa
  Clone ID: PAT_MRT4530_97483C.1.pep
AAGGPKGRFPSYQGSRKLSVFSSNCNGSLILAMLKGPGTPWGRPLVGFGGHPKSGLPPVKSPAGLRMPFPWSWDYHWDKNSSGKVL

SEQ ID NO: 202180 - protein, 151 aa, Oryza sativa
  unsure (1)..(151): unsure at all Xaa locations
  Clone ID: PAT_MRT4530_97484C.1.pep
NAKCRFFLWFAFQWHYWTADLLXKRGIDSHSACPFCSQDLEIANHILLDCVFAQQIWFWVLSPSGWAALSXPCGSWFQDCWLSSRACLPEHLCADFDSLVLLVSWQVWKKRNSRVFDSALSFVSMVLESIRLEGHLWSLASVAAFGDLLGV

SEQ ID NO: 202181 - protein, 89 aa, Oryza sativa
  unsure (1)..(89): unsure at all Xaa locations
  Clone ID: PAT_MRT4530_97485C.1.pep
MSNISSVISGIISRRCYGVYARAVVTTXRASDAAAAXRRTDVASAATAATAKRDXVAWMRDPKTGCWAPENRVDEVDAVDLRNLLLNYK

SEQ ID NO: 202182 - protein, 64 aa, Oryza sativa
  unsure (1)..(64): unsure at all Xaa locations
  Clone ID: PAT_MRT4530_97486C.1.pep
CARLSXSCGLNFKYVXEILKAVQNAYFRKRNYDAVMKTMGGNSSGHXILSSHAVVIEAFNKLFK

SEQ ID NO: 202183 - protein, 107 aa, Oryza sativa
  Clone ID: PAT_MRT4530_97487C.1.pep
RARQEDPWALGHRWVPRHRQGPPGFPPGFPLWRGRDPFGLKGLFFWAFPPPGFWGVLLFQNAAFAPSGAFFFPPFLSPFSGGLVEPPMFLLPLGPLWPPGMGFQGLA

SEQ ID NO: 202184 - protein, 1206 aa, Oryza sativa
  unsure (1)..(1206): unsure at all Xaa locations
  Clone ID: PAT_MRT4530_97488C.1.pep
MNENKKIRKSNPKTKIQKIKKISRNKRKNRPRTIRKENEPKSSPRERFGHSPRRLGSPTYNHPQAMSWGSYPMPPSGYLFPYYMPWGAAPPMFNHMPPMQFNQGWGGPRRPTRECLSSPNNGRFYAKNRVNEGRREGKRIKVETRTSEVITIKVGSHDEPIPSRDEVGESSSNKSEAGRSDRGPTAGLTRPTGRSDHRSQAGRTGASVRSDRWSPSSLTGLQCRFDSXFAKGSSGASSSSNKINRGHYLPPGIEPKQRWMPKDXTATQKRRLQCLRAQELKEKGAEERRDRRFNELRPPPEKEEQSVAKDETSPKEDMDINMVCMLPMELCAMDEAEVAQLSLGPKNAVFEKPDESNRHMKPLYLKGHIDGKPVSRMLVDRGAAVNLMPYSLFKRLGRGDDELKKTNMILNGFNGEPTEAKGIFSVELTMGNKTLPTTFFIVDVQGSYNVILGRCWIHANCCVPSTLHQCLIQWDGDDVEIVQADTSTEVAMADAIFEWRHWNIQCLSGMDLSKANLEWSQKRVQEYRSTKNDIGETIEDFDEVEKLGQGFTSADPLEEVDIGDGTKPKATFVNKNIKADYKIKIIELLKEYVDCFAWEYHEMSGLSRDLVEHWLPIKPGFRPYKQPPRRFNPLLYDRVKEEIDRLLKAGDLNKATSKVEYPMPIADMMINDASSHKVISFLDGNAGYNQIFMAEEDMYKTAFRCPGFVCLFEWVVMTFGLKNAGATYQRAMNLIFHDLLGIILEIYIDNIVVKSDDIEGHIANLRLAFERMRPYVLKMNPLKCAFGVSAAKFLGFIVHERGVEIDPKKIEKIRDFKAPTCKKEVQKLLGKVNYLSRFISNLVGQAFKCTLLDGDLYRRNIDEVLLKCLDDDQSKVAMGKVHEGICGTHQSAHKMNWLLRREGFYWPRMIEDCFKYYRRCEACQRLGNGHRFMLVATDYFTKWAEAVPLKNMTHTEVIDFILKHIVHRFGIPQTLTTNQGASFMSKEVKSFVESYGIKLLSSSPYNAQANGQAESSNKTLLKLVKKKIEEHPKKWHEVLSEALWAHRISKHGATKVXSPFELVYGXEDILPVEVNLGSLRFIKQDDLSSEDYKTFIGDNLDEVIDKRLKALEEIKKDKKRVAKAYNKRVKAKLFQVGDLVWKTILPLGTRSREFGKRSPSWEGPYRVCGIVXGNAYFLETLQGECFQQAINGKYLKKYFPSIWQDT

SEQ ID NO: 202185 - protein, 42 aa, Oryza sativa
  Clone ID: PAT_MRT4530_97489C.1.pep
TGFAALITYNLSTKVALKCIFVEHQANQKYGIICEHTDTESS

SEQ ID NO: 202186 - protein, 341 aa, Oryza sativa
  unsure (1)..(341): unsure at all Xaa locations
  Clone ID: PAT_MRT4530_9748C.1.pep
LAFLRENGLPNLRRRPRTTLLEPPERQKGRGGDGRRGNDFGGDPXTKARHGRHEAXRRGAEDEDDDGXATTTGNDERTTTTTTGAGEEAMRAAGSGCTETRTTWDTPLRXTXRRRRRETTSRATDGTSTTRTIGDDDDGPRRGLDGGETMPRMALPVTVPREGTAAPADARAWRKGQPEEMPLRRKEKPARATVFRRNSGEEEVMPGMRAASRSRGRWWRRRPAHGKRDSGGRRWNSGGNTTXCRRGRVSGASPAKRRADRGRGGGCEAEGEDGAAGRRSGEEGEAAGGGRRGGKRRATAGTRLRRSPREXGGQAGVEEVAATLLDGTQPRGGTGCGGAHI

SEQ ID NO: 202187 - protein, 76 aa, Oryza sativa
  unsure (1)..(76): unsure at all Xaa locations
  Clone ID: PAT_MRT4530_97490C.1.pep
NIELVGNWVAAVIGGWCNFLTVIYIGFVSAHTLPVLYEKXIYEDQVDDFLCNILGLLRNQYQKLDQVVLSKKILPN

SEQ ID NO: 202188 - protein, 53 aa, Oryza sativa
  Clone ID: PAT_MRT4530_97491C.1.pep
MGDDIDARYEVPRTAEFIRARAYTRVALQFPDEMLRDAAAVAQALRRELGGVG

SEQ ID NO: 202189 - protein, 433 aa, Oryza sativa
  Clone ID: PAT_MRT4530_97492C.1.pep
PPNFVQNHHLQNSQFFLLPKRQLVTYALYALIPLALLHYLLFNPVATAKKPVVVVVQATDDASVIASSHHEHVKVNAKQQVAAAAACDYSDGEWVPDARPPLYNGTSCATIKDGQNCMAHGRPDTGYLHWRWRPRRCDLPAFSPEAFLGWLRGKHLAFVGDSLARNQAESLVCLLASRSTPELVHRDGEENRFRRWAFREHDATVSIFWSPFLVKAAEKAERAGVRHNNVFLDAFDERWMSGLGGLDAVVLSIGHWFLIPGIYHDAGEVVGCHDCAEFNHTETPFFAVFRQAVHRTLAAAGRRGRTVVVTTFSPAHFEKEWDDPATCARTRPYEDGEKEVGGIEGELRSIAIEEAAGAAAAAAAAARSRVEVLDVTRLATMRPDGHPGVYMHRDPFARGVPERLQSDCLHFCLPGPVDTFNEILLQLLIKKKQ

SEQ ID NO: 202190 - protein, 93 aa, Oryza sativa
  unsure (1)..(93): unsure at all Xaa locations
  Clone ID: PAT_MRT4530_97493C.1.pep
XNXRGFSFWVKKGAPCFFPGPVFCLFSWGWAKRNNLFPEKTGFFFKTSLGVNFYPKNFFFFFLGFFQMRGGPPILKLLPVFSPFGRGGSTFSF

SEQ ID NO: 202191 - protein, 87 aa, Oryza sativa
  Clone ID: PAT_MRT4530_97494C.1.pep
MPLSLRLCLPVASLRWRPRRRRVGGCLLELELKRSNILVPEDEEEMHIDSRLLERELCSFPALEAAELPLCKLRLCHPLQVTGVTDW

SEQ ID NO: 202192 - protein, 91 aa, Oryza sativa
  Clone ID: PAT_MRT4530_97495C.1.pep
MGDYLKRPPKVVPLNAHAHLGSELAQNKIKEGSSCLLYPVVGPSHEVKSRASTSWEEEAPVEVEEKVQPESSHEDPVVPIPQARTLVWADH

SEQ ID NO: 202193 - protein, 112 aa, Oryza sativa
  Clone ID: PAT_MRT4530_97496C.1.pep
AGALEAHGWPTGFPGYKTAKVAMNGYPRFLARRPPELGVNWGPPGLVKTDMPIDSGFLPPQEGGRNVVPVAPLPDGGPPGGFFLEGKEGSFLGCRRRGQKVGPFGGGVPPPK

SEQ ID NO: 202194 - protein, 66 aa, Oryza sativa
  Clone ID: PAT_MRT4530_97497C.1.pep
GEGVLVAVFLDMSPSLTFRDEGSIFFPFPFSFLASKYVVHRCSNKLASTFQACTVFREFEYQLLLS

SEQ ID NO: 202195 - protein, 831 aa, Oryza sativa
  Clone ID: PAT_MRT4530_97498C.1.pep
MVHETRSRTLAASQEEGKAAPKKQKTESKEQEGGQQAPSKNKKTADNEEHDGEQEPSKNKKLKAEESDLNGKATAVKEFSEFCKAIREHLTIEDMRKILQGNEQDASGSEDAVVPRCEDVMFYGPLDKCPVCGGQLECKGLKYNCTGTHSEWACCSFSTNNPSRRGGPIKVPDDVKNDFVRKWLKQQEGNKYPKRNLDDEGIFSGMMIALSGRMSRSHGYFKEQIMKHGGKVNNSVIGVTCVVASPAERHQGGSGGFAEALERGTPVVSENWIIDSVQKKEKQPLAAYDIASDVVPEGRGLPLGNLDPTEEAIETLAAELKLAGKRAVHKDSKLEKDGGHIYEKDGIIYNCAFSVCDLGGDINQLCIMQLIMVPENHLHLYYKKGPIGHDQMAEERVEDFGSRFNDAIKEFVRLFEEVTGNEFEPWEREKKFKKKCMKMYPLDMDDGVDVRHGGVALRQLGAAAAHCKLDPSVTFIMKQLCSQEIYRYALTEMGHDVPDLPIGMLTDLHLKRGEETLLEWKQDVESAPESGPAADAFWMEISNKWFTLFPTTRPYTMKGYEQIADNVASGLETVRDINVASRLIGDVFGSTLDDPLSQCYKKLGCSINRVVEDSEDYKMILKYLEKTYEPVKVGDVVYSATVERIYAVESSALPSYDEIKKLPNKVLLWCGTRSSNLLRHLRDGFVPAVCHIPVPGYMFGKAIVCSDAAAEAALYGFTAVDRPEGYLVLAVASLGKEIQEITGTPGSEDVKRMEEKKMGVKGVGRKTTDPSEHFTWRDGVTVPCGKLVPSTNKDGPLEYNEYAVYDPKQVSIAFLVGVKYEEQNMEVVPDE

SEQ ID NO: 202196 - protein, 58 aa, Oryza sativa
  unsure (1)..(58): unsure at all Xaa locations
  Clone ID: PAT_MRT4530_97499C.1.pep
VHAPIIHINCIIFNLGLTXHHPAIIINSSQQQTIPLLILPIYTNTYFLLAHLLNLLLH

SEQ ID NO: 202197 - protein, 72 aa, Oryza sativa
  Clone ID: PAT_MRT4530_9749C.1.pep
SCNCCYCACCGECDKMYPYLPYNFTTSADNSIAVLDVAPKYSQYSRVGKECESGYYAHDIKCGSVCRCDPCI

SEQ ID NO: 202198 - protein, 68 aa, Oryza sativa
  Clone ID: PAT_MRT4530_974C.1.pep
MSRRRHAPPRPLDEPTVSMGEEEQRRSTVTAALLVLVACNLALALSGLSPPPPSAHDDDDGRARRAGG

SEQ ID NO: 202199 - protein, 189 aa, Oryza sativa
  unsure (1)..(189): unsure at all Xaa locations
  Clone ID: PAT_MRT4530_97500C.1.pep
KGALFLSGFRGPFWFALFWVQHGFFXFGVNSPGFLWEFTPLLPGLFVLWLITGLPAAWNGCGAGVSVCGGKVVLCGSYMLNWLFLLCGWRGLYCMLGWAMDQGIPLDLVNSLVRCCRLLYXCMYMVVRFSXDFDVGLPXGLVLLVCFPAPYVCVGIVSRMYGFRRLGILAMYRCIYCFVVAALLYLSIC

SEQ ID NO: 202200 - protein, 75 aa, Oryza sativa
  unsure (1)..(75): unsure at all Xaa locations
  Clone ID: PAT_MRT4530_97501C.1.pep
FTVDQEQIHSVRSTXPSGLFTVKQCSPRLLSWRQYDNSXVTGPLCQTYLESSQQPGRSTIYVDTCCIVHTLVSTI

SEQ ID NO: 202201 - protein, 177 aa, Oryza sativa
  unsure (1)..(177): unsure at all Xaa locations
  Clone ID: PAT_MRT4530_97502C.1.pep
RHHRREARDITVTGGHGGENRGHQRDEHDAGNSPSGGTTTNDDGRRPATNSEGXQGTGRRRQRLFGDEQRQRRGGRASPWCCDAEGGGGTSRGRPRRRHGADGGEADRLDVGNGLPVVFGFGEVEAALPLFDAVPMEATAPTGDGGADGYSWGMRRIWWRKRRLHRYRTAGSGSIQA

SEQ ID NO: 202202 - protein, 195 aa, Oryza sativa
  unsure (1)..(195): unsure at all Xaa locations
  Clone ID: PAT_MRT4530_97503C.1.pep
MTSSMTSSTASRDITVTGDLGHGGENGGHQRDEHDAGNSLRGGTTTNEDGRRPATNSEGXQGTDRRRQRLFGDEQRQRRGGRASPWCCDAEGGGGTSRGRPRRRHGADGGEADRFDVGNGLPVVFGFGEVEAALPLFDAVPMEATALTGDGGADGYSRVGGDGPPGRAQKQEAGLPLQLRRLHAVTRSRVETGPR

SEQ ID NO: 202203 - protein, 66 aa, Oryza sativa
  Clone ID: PAT_MRT4530_97504C.1.pep
DALKKKHGSPGKLRLWPDPMVSYLPRKIKLSVAACRASLFNQSMSGPSPGWAVGWSLRCDVAFGIE

SEQ ID NO: 202204 - protein, 539 aa, Oryza sativa
  Clone ID: PAT_MRT4530_97505C.1.pep
MAGRAALLALLLALAAPAPAASQPAAVDPPPSWAFPNARLRAAYVALQAWRRTAIFSDPANFTANWSGPDVCGYNGVFCAAHPTDGRVRVVAGLDLNHADIAGYIPASLPEGLPDLALLHLNSNRFCGVLPDTFSHLRLLHELDISNNRFVGGFPEVVLSLPSLRYLDLRFNDFEGAIPPKLFDRPLDAIFLNSNRLTRPIPPNLGSSPASVVVLAHNRLGGCIPPSIGRMAETLNEIVLIDDELTGCIPPQVGLLRKVTVFDVSGNHLQGPLPGSVAGLAAVEQLDVAGNLFEGPVPATICSLQSLKNFTYEDNFFSSRPGCPAATADGRWNCIPGAPAQRPPAQCAAAAAHPFDCSKAQCQATPPTTRRPGGRTPLAPHRSPLPHHMPPRRTPPTPPPPSSPTPFHLPPPPPTYSESPKSSMPPSTSPPSSHGASPPSSSSSPPTEHPGYVLPPLTPPPPTTTPPGHHAPGPGNTILAGQALLGRHLKEAEGKLPFPPVHGVAYSSPPPPPSGDKLPFPPVYGVAYSSPPPPSKPYN

SEQ ID NO: 202205 - protein, 108 aa, Oryza sativa
  unsure (1)..(108): unsure at all Xaa locations
  Clone ID: PAT_MRT4530_97506C.1.pep
PPNNRGHDYSNSFTLIRGVQLYPQDTIHRHVTMSSCAHDEHVTMSSDCDKTRHITLPNRTYXTLGFTPSXSKSGSPLSCLGRSRSSIDQNPGXPYSITPTLAMVRQLG

SEQ ID NO: 202206 - protein, 105 aa, Oryza sativa
  Clone ID: PAT_MRT4530_97507C.1.pep
PGCRNFGTRERERELVSSFFFFFVTICKGNHSGKLGTLPWHIVRINPNTLNQQSTASHYPVVWAARLRRKSKEACSTEHQYYMPIYHTDLWSASSILTTRASNAH

SEQ ID NO: 202207 - protein, 126 aa, Oryza sativa
  Clone ID: PAT_MRT4530_97508C.1.pep
MAGLSVLLETHKNDHHPNMRPPQIISKATLHSHPETMSSSSPATATTATMSSFLQRCFLCRRELADGKDIYMYRGDRAFCSVDCRCKQIFMDEDAAAGGGNCAAVRAGRRRADVPREQTRAGGFAY

SEQ ID NO: 202208 - protein, 42 aa, Oryza sativa
  Clone ID: PAT_MRT4530_97509C.1.pep
ALSRSLSTAKCNTPVEGRLLVAVRDKSISMRRNLIDSQSKTD

SEQ ID NO: 202209 - protein, 375 aa, Oryza sativa
  unsure (1)..(375): unsure at all Xaa locations
  Clone ID: PAT_MRT4530_9750C.1.pep
GFVYSRVNKAEGRGARTGSTGVGPTRQPHGPRWTRCTRLAPAGAVGPTRQPHPRARAADGRAPPGSRGARPKAASPAQPTGGGAPAPRWSPPVTTGAAERRPREGREGGKEATVHGSPRGDGGDGGGGRSGGRWWRGSGRRGRRRSGGRRPKRRGGRGRRGCGEAEGGGAEVGGGPGXRRRRAGAWRRRRRERATSRAQIRRGGRAARGGTGRRRCGEGLNRAGAREGGRGREETGAGXSAAINGAGEICGGKSARXTRERERERGERERGSRGIIPPTLMRAGTAGGGGIRGGGGARARAGRRERREDRDDRWALPVSEGGGRARPXSAARARGEAEWAAGRRREREGDGARAGPRGGGGGKRLFRVFLFTKSF

SEQ ID NO: 202210 - protein, 134 aa, Oryza sativa
  Clone ID: PAT_MRT4530_97510C.1.pep
MCPDIGFIFPQKVRKSIGATASFITVLFNLHTCRFVTNQHCYLDLTHADLGDVSFPNLMLASPRKSSPLPASPTPLHRISNVAIGKVILGHMWLHGSLLHLSLLGILTIVAHGRLTSQVAVDNLAPRLLRLVFS

SEQ ID NO: 202211 - protein, 80 aa, Oryza sativa
  Clone ID: PAT_MRT4530_97511C.1.pep
MKVPCDEGSSYHRGVPYYISGQFLWKGARLQICNFKHHNEDEHECSLMRTGEWIIIVAKPVWSNTILNPVWIVVARENTN

SEQ ID NO: 202212 - protein, 75 aa, Oryza sativa
  unsure (1)..(75): unsure at all Xaa locations
  Clone ID: PAT_MRT4530_97512C.1.pep
FMLHCSPQISYEYHDVQSSGPTFCPDVCHERFALRYHNNVLPSYFFLKKEREADVELFFLFFVKKARRQXESPFV

SEQ ID NO: 202213 - protein, 137 aa, Oryza sativa
  Clone ID: PAT_MRT4530_97513C.1.pep
MAVPLVDALRGSPSELLALPDHAHHFPLQLHRRGALPLSLSLTAPAAELLAVTTSPAAAAAGSGNGGVTVTGRATPRVPSDLEEGSEPARQDLHPYAAVYYTGDARTSVSSSSHLDEISQPRHSFASPAALTPNITS

SEQ ID NO: 202214 - protein, 111 aa, Oryza sativa
  unsure (1)..(111): unsure at all Xaa locations
  Clone ID: PAT_MRT4530_97514C.1.pep
SQAKRNRAIGDIGPGPGGLGVPRHTPRALALPRPEALAQLPCGGGNVRCRPMDPPLSGVPSXEEDRHKPSLIXEGMTGLSPVSGGGRRRVPLKDGLLLSFRAKARIVVRSR

SEQ ID NO: 202215 - protein, 88 aa, Oryza sativa
  unsure (1)..(88): unsure at all Xaa locations
  Clone ID: PAT_MRT4530_97515C.1.pep
MATVSAVEATFGGARAVLAGPLALPXDEGEEEREGEVQLLQGGGNTGSGRQGSRCNSTGDCCDGRARNGTRPREVDNRGHRAYCGPEQ

SEQ ID NO: 202216 - protein, 105 aa, Oryza sativa
  unsure (1)..(105): unsure at all Xaa locations
  Clone ID: PAT_MRT4530_97516C.1.pep
WNSPEFPPAPSRSSPLPPLCPAPPPPPLRPPPPSLPLLLCPPPPTTAXGGGCSSWPPPPPRPLPPPLRHLPPPPPPRLRVTRPLHAAVHRPPWRVVVRSYRERWK

SEQ ID NO: 202217 - protein, 214 aa, Oryza sativa
  unsure (1)..(214): unsure at all Xaa locations
  Clone ID: PAT_MRT4530_97517C.1.pep
MPFAVGSAVTKQDLAVAQAEAPQLAKVKWWADPGMRVLYFYAAILCVCSATTGYDGSMLNTSQAMDDWQDYFGHPKGSKLGILNSIYQIGSIASFPFAPYMADHFGRKLXXAVGCLIMILGAFLSAFTNGYGXYLGGRFLVGFGNSLAQLSCPVLLTEICHPQHRAIVSAIYNCLWNLGATLCAFIGLGTINISSNWSWRSITLIQAVPSLSNH

SEQ ID NO: 202218 - protein, 302 aa, Oryza sativa
  Clone ID: PAT_MRT4530_97518C.1.pep
MDWGFEIWNGTDTGQQTKKQFSHLGFLRDSFPTRRHDGTDATGMQVEEPEKCMQYGTIEMLAALFPGIETCGVGKQIATPDVHPTNLHLPAALDAVAPHTHRTNGDSFRRTVDGPMRSTLTFDNNHSVVPSQNIDYGQPMACISYPYNDSGSGVWASYSSRSVPYLHESRHRHAMKRARGTGGRFLNTKQLQLQQQSHTTSTKTTTDSQNSSGSVHLRLGGGAIGDQTPFPFKAMDSQANIKRAAASASTFTVTSAAQKDDAFFDRHGHHLSSFSGHFGQASAQGGVGSMHNGSQQRVPAMR

SEQ ID NO: 202219 - protein, 467 aa, Oryza sativa
  Clone ID: PAT_MRT4530_97519C.1.pep
MAAAAVHEPLLAAAPPTPGKAADGDGPEEGRRLASAEAKRLLRLAGPIVASCILQCVVNMVSVMFVGHLGELPLAGASLATSLANVTGYSLLTGMATAMDTLCGQAYGARQYHLLGVYKQRAMVVLAAACVPIALVWASAGRILLLLGQDAGIAAEAGAYARWMLPSLAAYVPLQCHIRFLQTQTVVLPVTASSAATALLHPLVCWLLVFRAGMGSKGAALANAISYAVNLAILAVYVRASNTCKGRWSGFSGEAFKELRQFAALAMPSAMMICLEWWSFEILVLLSGLLPNPQLETSVLSICTRVSNEIGAGQPQAAKRATRVVMYMALSEGLVISFTMFLLRNVWGYMYSNEQEVVTYIARMLPILDISFFIDGLHSSLSGVLTGCGKQKIGAAVNLGAFYLVGIPVAVLLAFYLHLNGMGLWLGIVCGSIIKLLVLIIVSCCIDWEKEAILAKDRVFSSSLPVA

SEQ ID NO: 202220 - protein, 1779 aa, Oryza sativa
  unsure (1)..(1779): unsure at all Xaa locations
  Clone ID: PAT_MRT4530_9751C.1.pep
MSSGTNDGYTSCGPVVEMSWHRAGVLLLGAQSCLPVRGVPAVGGVGSMYTSDQSIICSNSRALGYGQAEQCTQMAGSINHRGLDLTGFVLELRGMCVVLGYPHGVDYQGKQLSKQEGDDAEPHAAWEVTAVILTGSPERTSLAVTAGGDSFSAACQNAALLTIGTLHQRYPDELQHSPYRYHPRRGGARDYATFRDASSEDDATIMHLARIVEAYDVARIDFHQMVRRGLVENNMKILELRQENLQLKKDLDAGEAQLCQLKIAXGEVCRPKRCRVCRSLKITARKSTSRPELVRQSLAWTCFVETPRDEPAPLVSQDEGASGVGSTEDALLLTFHXTTRRSAATGEGSHPEGSNYNNHGSPPPPPHPPPPPPPDTNSILTQILAQQANMMAAFLHHIQNPPQHNAPPPPPPPQHSKLAEFLRIRPPTFSSSNNPVDALDWLHAVGKKLDTVQCNDEEKVIFAAHQLQGPASLWWDHFXATQPEGQPITWARFTAAFRRTHVPAGVMTLKKREFRELKQGNCSVMEYLHEFNNLARYAPEDVREDEEKQEKFLAGMDPELSVHMVSGDYPDFQRLADKSIRLEAKHKELESHKRRLANFRNQQGANQRIRYTNPYPGGSSSXQQQQQPRSALRPQFVVRVPQPQQQQSQQGTRAPRPPTPAVQPGQGRRDVHGQQRLCFNYFEPGHFADKCPKPRRQQGQAPPRPNNGGKDVIRGRVNHVTAEDMLTTPGVIVGTFLIHSIPATILFDSGASHSFISVPFVGRNQLGVERLRNPLLITTPGGVMTAKYYSPAVPIEIQGILFPSDLILLDTKNLDVILGMKWLAQFQGVVDCARRTVTLYRGPEQPVVFFAPPTSASSSELHQIGLSEIPIVREFGDVFPEELLGMPPKREIEFRIDLAPGTTPLYKRPYRMAANELAEVKKXLEELKEKGYIRPSTSPXSAPVIFVEKKDKTKRMCVDYRALNEVTIKNKYPLPRIDDLFDQLKGATVFSKIDLRSGYHQLRIREEDIPKTAFTSRYGLYEFTVMSFGLTNAPAFFMNLMDKVFMENLDKFVVVFIDDILMYSQSEEDHQQHLRLVLGKLREHQLYAKLSKCEFWLSEVKFLGHVISAKGVAVDPETVTAVTNWKQPKTVTQVRSFLSMAGYYRRFIENFSKIARPVTQLLKKEEKFVWSPQCEKAFQTLKEKLVSSPVLILPDTRKDFLVYCDASRRGLGCVLMQEGHVVAYASRQLRPHEGNYPTHDLELSAVVHALKIWRHYLIVNRCEIYIDHKSLKYILTQSDLNLRXRRWLELIKDYDVGIHYHPSKANVVADALSRKSHCNTLGVRGIPPKLNQQMEALNLSIVGRGFLATLEAKPTLLDQIHEAQKNDPDMRGLLKNMKQGKATGFTEDEHGTQWNGNRHVKAEHQRPAGLLQPLQVPEWKWDEIGMDFITGLPKTQGGYDSMWVVVDRLTKVARFIPMKTTYGGNKLAELYFARIVSLHGVPKKIVSDQGSQFTSHFWKKLQEELGTRLNFSTAYHPQTDGQTERLNQILEDMLHACVLDFGKTWGKSLPYAEFSYNNSYQASIQMAPYEXALYGRKCRTPLLWDQVGESQVFGTDILREAEAKVRTIRDNLKVAQSRQKSYADNRRRNLEFAVDDFVYLRVTPLRGVHRFQIKGKLATRFVGPFRIIARRGEVAYQLELPASLGNVQDVFHVSQLKKCLRVPSEQADSEXIEVREDLTYVERLVKILDTMERRTRNRVIRFCKVQWSNHAEEEATWEREDELKAVHPDLFAGSSESRG

SEQ ID NO: 202221 - protein, 1149 aa, Oryza sativa
  Clone ID: PAT_MRT4530_97520C.1.pep
MHPSKTTATVVANVAAAALPLPLPRAATPLDARMVKTGFDVLTYRLNLGLRSLLSSGHLHRARAMFDQMPHKNIFSLNLILSAYSSSGDLPAAQHLFLSSPHRNATTWTIMMRAHAAAGRTSDALSLFRAMLGEGVIPDRVTVTTVLNLPGCTVPSLHPFAIKFGLDTHVFVCNTLLDAYCKHGLLAAARRVFLEMHDKDAVTYNAMMMGCSKEGLHTQALQLFAAMRRAGIPATHFTFSSILTVAAGMAHLLLGHQVHALVLRSTSVLNVFVNNSLLDFYSKCDCLDDMRRLFDEMPERDNVSYNVIIAAYAWNQCAATVLRLFREMQKLGFDRQVLPYATMLSVAGSLPDVHIGKQIHAQLVLLGLASEDLLGNALIDMYSKCGMLDAAKSNFSNRSEKSAISWTALITGYVQNGQHEEALQLFSDMRRAGLRPDRATFSSIIKASSSLAMIGLGRQLHSYLIRSGYKSSVFSGSVLVDMYAKCGCLDEALRTFDEMPERNSISWNAVISAYAHYGEAKNAIKMFEGMLHCGFNPDSVTFLSVLAACSHNGLADECMKYFHLMKHQYSISPWKEHYACVIDTLGRVGCFSQVQKMLVEMPFKADPIIWTSILHSCRIHGNQELARVAADKLFGMEPTDATPYVILSNIYARAGQWEDAACVKKIMRDRGVRKESGYSWVEIKQKIYSFASNDLTSPMIDEIKDELDRLYKEMDKQGYKPDITCALHMVDHELKLESLKYHSERLAIAFALMNTPAGTPIRIMKNLTACLDCHAVIKMISKIVNRDIIVRDSRRFHHFKDGVCSCGDYWHQCDVKSGDSKGSACGWCERMKWMSAGERSMQVQMQMQQATTVLSSSSNRPWTLWCHPVPVVSSPSHAKNKKHGLRLRAGMAMASSELPDLSAIQRVVLDIEGTTTPISFVADVLFPYARDNVRRHLAATYGSSEETRADVALLRAQVEEDLAQGVDGAVAVPPDAEGEGEGAVVEALAANVESMIRADRKVTALKQLQGRIWRRGFDSGELRSEVYDDAADALRRWRAKAYIYSSGSREAQRLIFANTAAHGDLRDHLCGFFDTTIGAKREVSSYYEIWQTLGTDRPSQILFLTDVYQEAAAAKTAGLEVIISVRPGNAPLPDNHGFHTITSFAEISI

SEQ ID NO: 202222 - protein, 461 aa, Oryza sativa
  Clone ID: PAT_MRT4530_97521C.1.pep
MEKAINRQRVLLAHLEPAASPAAAAPAITASACAAGDSAAYHRGACFADDVVIVAAYRTAICKSKRGGFKDTPAEDLLVPVFKALIDKTKLNPSEVGDIVVGTVLAPGSQRAIECRMAAFYAGFPDTVPLMTVNRQCSSGLQAVANVASNIKAGLYDIGIAAGLESMTVNQVRLDGQVNPKVELFSQARDCLLPMGLTSENVAKRFGITRMEQDQAAVESHRKAAAAAASGKFKEEIVPVHTKIVDPKTGEEKEIVVSADDGIRPGTSLAVLSKLKPAFSKDGTTTAGNASQVSDGAGAVLLMRRDIAMQKGLPIVGVFRSFAAVGVDPAIMGVGPAVAIPAAVKAAGLQIDDVDLFEINEAFASQYVYCCKKLGLDPAKVNVNGGAMALGHPLGATGARSVSTLLNEMKRRGKDCRFGVISMCIGSGMGAAAVFERGDAVDELTNARCIPTHNRLSKDAM

SEQ ID NO: 202223 - protein, 152 aa, Oryza sativa
  Clone ID: PAT_MRT4530_97522C.1.pep
CWHRTPRSSTPPAPRCAPTAAYRRRRSLAPRSSAASPATVAVEEEGEDSSADEVRDKKLLVPSPPPPPTRSPPSPSTRSLPLHPPFPSPPPLPPPPTSPSWPTSPFPRLTSTSRWGPLRAPQQPRAPRDRGGWGRLTRLRRGRCRGGPARSR

SEQ ID NO: 202224 - protein, 145 aa, Oryza sativa
  Clone ID: PAT_MRT4530_97523C.1.pep
WLTSTAAAATAGPAPAPATTTRAAATTGPAPAAPTSTAAGREAVPVATTSPVAPTTTTAATTSPPAATTTTTAAPAAAGTTSPAPTTTTTAATTTGQGLTRSTVATSPATTSTAAAAAPKPTRSTSTGCRPGTTRRSTRWRSRST

SEQ ID NO: 202225 - protein, 42 aa, Oryza sativa
  Clone ID: PAT_MRT4530_97524C.1.pep
LYISSTQGAYLTSSPSFMPVFSSMARIHSSPHVVLLGPSQIY

SEQ ID NO: 202226 - protein, 147 aa, Oryza sativa
  Clone ID: PAT_MRT4530_97525C.1.pep
WLTRAAATTGPAPAAPTSTAAGREAVPVATTSPVAPTTTTAATTSPPAATTTTTAAPAAAGTTSPAPTTTTTAATTTGQGLTRSTAATSPATTSTAAAAAPKPTRSTSTGCRPGTTRRSTGRRRRSTRTRSASARWAPSPPAPLPCT

SEQ ID NO: 202227 - protein, 52 aa, Oryza sativa
  unsure (1)..(52): unsure at all Xaa locations
  Clone ID: PAT_MRT4530_97526C.1.pep
LNWGPFNCXXPFFSFXFFFFFLFFFFFNSPPLQKLRTDPPQGFTYLGHFIFF

SEQ ID NO: 202228 - protein, 356 aa, Oryza sativa
  unsure (1)..(356): unsure at all Xaa locations
  Clone ID: PAT_MRT4530_97527C.1.pep
QRIERKLSSWKGKHMSVGGRLVLINSVLSSLAMFMISFFEIPKGVLQKIDYYRSRFFWQGDDHKKKYRLTRWDIICQPKDQGGLGVHNLEIQNKCLLSKWLYKLINENGVWQDLLKRKYLHNNSITQVDRKQGDSHFWSGLMKIKNTFLSMGSWIVNYSQHIRFWEDKWVGNMAFRDKYPSLYAIVRRKSATIASVMALVPLNVSFIRALVGQNLTLWYDLCASIAHIQLDDSFDCFRWNYHQNGXFSVRLMYLALINNGYIDRNKFIWKLKMPLKIKIFMWYLLKGVVLTKDNLXKMKLEWVXRCCFYMKNESIQHLFMDCEEDGKLLSVACRNLESTVMQLFTNHGWRFINRME

SEQ ID NO: 202229 - protein, 53 aa, Oryza sativa
  Clone ID: PAT_MRT4530_97528C.1.pep
ILFDQIIPSVLKYITVVAFYIKFLTIHFNIAYFILACFIIKIAIILTCTFIYS

SEQ ID NO: 202230 - protein, 70 aa, Oryza sativa
  unsure (1)..(70): unsure at all Xaa locations
  Clone ID: PAT_MRT4530_97529C.1.pep
YSIPLAGVHRXSGEQVSETSAFVVLHREKTTIRFLGSASRDCSLFVRDGSPFSPLACFAPSSMLATASSS

SEQ ID NO: 202231 - protein, 410 aa, Oryza sativa
  unsure (1)..(410): unsure at all Xaa locations
  Clone ID: PAT_MRT4530_9752C.1.pep
MAALGRAEWLPRGARPSAARALGMFNREKGKNVSGYASSNLSFQLNPPLASRELTRAHPWSIPSMLLSSQLPLVGSQDQNRYVFDRAFATQVNELPMPEEDVPFCHDCRERGHYALNCPWVYAKEAPSFGLAGQTSLNQPPRSKSSLQPSVQSREPNGENPLNPENCFPPSLSYHMGSRTKQAKGKKSKNQKRKAPMRTEEEVHKMTITSTEWPPAGITIPRRQRGNTFRGARQLTQHLVSHGGRVSDSEGSDQVSSDYEDESLRHLGEEEMESKACPRCGEIGHVASMCFTLCPHCEEDHPPGECPTRKVTCFLCEXVSSNSNIDDIIHSTNAPLAAPDSAINHSNNTFSTNHSLHRRPQQRIVIDGRSCVSPRPTPGRAKGNQPQEDDTKQKTVIRFNQQSEGSFSCE

SEQ ID NO: 202232 - protein, 93 aa, Oryza sativa
  Clone ID: PAT_MRT4530_97530C.1.pep
ILFINKRLFMRANLRFFKKENLPPRGFLMSQPFKWLWHRGMGIWAKFLSEILGGTKKLALIKFPSSFLPRKRCFIHGFPPKLKGLFCSQVLGF

SEQ ID NO: 202233 - protein, 113 aa, Oryza sativa
  unsure (1)..(113): unsure at all Xaa locations
  Clone ID: PAT_MRT4530_97531C.1.pep
AALRHEAVTVMVLNFVVTPXXLSLXVXFLRFGXIIXXSGXXPLXSXAFXXXITXQAXXDXXXHIXHXKXXXVXXAPXPLGXPFMGFXXCFXPMGQXVGGVPSNXKNPESICYP

SEQ ID NO: 202234 - protein, 318 aa, Oryza sativa
  unsure (1)..(318): unsure at all Xaa locations
  Clone ID: PAT_MRT4530_97532C.1.pep
RSHYASPSTASSAEYAEHLSNLVAIPNLSHENYYFLGAVGNPDPTEFIISKTNRIPFRLANPNLGHXKNTFKSWPSLDKTPPEKSWTTWYKRVSASKKVHXDEIGIGQALALTIANSAKDEPLMAAATYIWSNTINAFLFNQGPMTPTLIDITMITGLDVTSSANPMSMNTKNQFDFKTKSIGGXSGYIAAYMGKGPVTPREHVAFLLMWLEKFLFCGSSCGPTTNWXFVAEALESKKQFPLGKILLGYLYQMLNNASAKIAIRSVVGAGGPWWLLQTSLNLMVMKVVNRPSLTEAEFPRLEPIVEDDGEERTHRRWG

SEQ ID NO: 202235 - protein, 180 aa, Oryza sativa
  unsure (1)..(180): unsure at all Xaa locations
  Clone ID: PAT_MRT4530_97533C.1.pep
RTRGRTRGLSPLPLRPYLLCTCDPSAPARRREPDAAATRAGERRRGGDRRRRHRLRCRSRAGAEMGLTFTKLFSRLWGKREMRILMVGLEASGKTTILYKLLLGEIVTTMPTIGXNVETAEYNNINLTVGDAGGHDKSRPLRRHYFQNTPXLIYVVDSNDRXRVGDGRDELHRMLNEDEL

SEQ ID NO: 202236 - protein, 471 aa, Oryza sativa
  Clone ID: PAT_MRT4530_97534C.1.pep
MSSSASPSATPSAEYAEHVSNLVAIPSLSHENYYFLGPIGNPDPTEFIIGETSRIPFRLANPDLGHWKNTFKSWPSLEKTPPKKSWTTWLSSSSCQAQAYIAKLARAQLVDSPTSKKVHWDEIGIGQALALTIANSSKDEPLMAAATYFWSNTINAFLFNQGLMTPTLIDITMITGLDVTSSANPMSMNTKNQFDFKTKSIGGWSGYVAAYMGKGPVTPREHTTKFSPPHQSNSGRDIEYAPGLIPNGGGPSPPVIGYNAPKTSTLLQGLIREPADAGKKRRFRSSAMDTSAPDPKKKAKLKKPKPFDDLPALDPSIEQALDEEEIGEDVNQAADEKKKTVVKKKSASTILKSAPPPPPPPSSAVQQSSSGQTPSAVESHHVEEEEQPAAPAIPKTLEDISHQLEASSLDNLVVNSGPIRTRLHEIQALILDELADVLTPAIYLEQHQFKLEKAKLRLAERRERKDIEATI

SEQ ID NO: 202237 - protein, 213 aa, Oryza sativa
  Clone ID: PAT_MRT4530_97535C.1.pep
MEALIPRTQAAITSLPLVEDRNRCSSTRKQELVETKRKQQFLNRLHQTRLHEVQALIPDELADILTPAVYLEQHQFKLEKAKLRLAERRERKDIEATIQANRQLVHEEKAKLDQLSEGPIKSNIDRLETRKTELLAQLEECNAELDMEHKKLADLPNSVEEQKARLKSAIKNVADLTKFLKVIPVTDAQGAHAIEEVEKIRQRAISAFQQYLS

SEQ ID NO: 202238 - protein, 139 aa, Oryza sativa
  Clone ID: PAT_MRT4530_97536C.1.pep
GDAAAGFCWRCPRRRQPQSPLPLGAKIGAAAIEIDSISLLLSSSRVFSVHRKPYLFQKIPKSAPAHRSTGGRRVLGLPEGADGWVYGRARPAGDLACRIGRGNRPAVGGSGRAACRSSSRAWLSRGRPSCCMLWLWLWL

SEQ ID NO: 202239 - protein, 542 aa, Oryza sativa
  Clone ID: PAT_MRT4530_97537C.1.pep
MSSSAGPSTASSAEYAEHLSNLVAIPNLSHENYYFLGAVGNPDPTEFIISKTNRIPFRLANPNLAEALESKKQFPLGKILLGYLYQMLNNASAKIAIRSVVGAGGPWWLLQTSLNLMVMKVVNRPSLTEAEFPRLEPIVEDDGEERTHRRCMSYGEYASTPTDAGAKLSAELLKDWFCSFYDGFQKDVRVWFPYEDSANLELPSDFRFEDINHERYQKSREVFSAAISPCMLSVGIHQGKNIQIREFFLPHQSNSGRDIEYALGLIPNGGGPSPPVIGYNAPETSTLLQGLIREPADAKSHHIEEEEQPTASAIPVLANLFSFDIRDYLDETEEDTTSKALAPLSDDVKKILEDISHRLEATSLDSLVVDCGSIRTRLHEVQALIPDELADVLTPAVYLEQHQFKLEKAKQRLAERQGRKDIEATIQANRQLVHKEKAKHDQLFEGPIKSNIDRLEARKIELLAQLEECNAELDMEHKKLADLPKSIEEHKARLKSAIKNVADLTKSLKVIPRTNAQDPKAIEEVEQIRQRAISAIQQYLSQ

SEQ ID NO: 202240 - protein, 275 aa, Oryza sativa
  Clone ID: PAT_MRT4530_97538C.1.pep
MQLNPKARTCRNKTKATILKPAPPPPPPPSSPVRPSSSDHTPSAVGSHHVEEEEQLAAPTIPVLADLFCFDIRDYLDETEEDTTSKALAPLSDDASSLDSLVVDCGSIRTRLHEVQALIPDELADILTPAVYLEQHQFKLEKAKLRLAERRERKDIEATIQANRQLVHEEKAKLDQLSEGPIKSNIDRLETRKTELLAQLEECNAELDMEHKKLADLPNSVEEQKARLKSAIKNVADLTKFLKVIPVTDAQGAHAIEEVEKIRQRAISAFQQYLS

SEQ ID NO: 202241 - protein, 339 aa, Oryza sativa
  Clone ID: PAT_MRT4530_97539C.1.pep
MSSSASPSAAPSAEYAEHLSNLVAIPSLSHENYYFLGPVGNPDPTEFIIGETNRIPFRLANPDLAKDEPLMAAATYFWSNIINAFLFNQGPMTPTLIDITMIIGLDVTSLANPMSMNTKNQFDFKTKSIGDVIPQTTEFSPPHQTNSGRDIEYAPGLIPNEVGHLLLSSAIMPPRLQLFSKGSSENQPMPVKREEPGSHHVEEEEQPTAPAIPVLANLFSFDIRDYLDETEEDTTSKALAPLSDDVRKILKDISHRLEASSLDSLVVDCGSIRTRLHEVQALIPDELADVLTPAVYLEQHQFKLEKAKLRLAECWERKDIEATIQANRQLVHEEKAKLD

SEQ ID NO: 202242 - protein, 91 aa, Oryza sativa
  Clone ID: PAT_MRT4530_9753C.1.pep
RGLGRRRVIEVPHGVALPPSVRCLCLASSVLPLVGSWTLGTAGDRKKERKRRESKEKQRKEREGSSSCCLVGLCKYFLFCLSISLAKPLLT

SEQ ID NO: 202243 - protein, 414 aa, Oryza sativa
  unsure (1)..(414): unsure at all Xaa locations
  Clone ID: PAT_MRT4530_97540C.1.pep
GHWKNTFKSWPSIEKTPPKRSWITWYKRVSASKKVHWDDSQFSQRXLMMSAATYFWSKTINAFLFNQGPMTPTLIDITMITGLDVTSSTNPMSMNTKNQFDFKTKSIGGWSGYVAAYMGQGSVTPREHVAFLLMWLEKFLFCGSSCGPTTNWQFTAEALESKREFPLGKILLGYLYQMLNNASAKIAVGSGRNIQVSYEFYHPMSSARQLGMGQLLIGLFFADKIQCRGEISSTLMMDRQLNLQGPPLGSIENIELAKFRSKTIDRWWGEWKLHLFHKSASMYRIDLFLVVIPQTTEFSPPHQSNSGRDIEYAPGLIPNGGGPSPPVIGYHAPRTSTLLQGLIREPADAGKKGKTRSSAVDTSAPAPKKKTKPKKTKETDDLPALDPSIKQALDEVEIGEDVDQAADKSTGNNY

SEQ ID NO: 202244 - protein, 215 aa, Oryza sativa
  unsure (1)..(215): unsure at all Xaa locations
  Clone ID: PAT_MRT4530_97541C.1.pep
QIRELFLPHQSNSGRDIEYALGLIPNGGGPSPPVIGYNAPETSTLLQGLIREPADASKKRRTRLSAVDTSAPAPKKAKLKKPKPTDDLPALDPSIXQALDEEEIGEDVDQATDEISNTEITPSTSPKLTPPTPSAPAYFSRLQKKRIAVKKKSASTTLKPAPPPPLLRSCPVQQSSSDQTPSPVESHHIEEEEQPTASAITVLANLFSFDIRDYL

SEQ ID NO: 202245 - protein, 42 aa, Oryza sativa
  Clone ID: PAT_MRT4530_97542C.1.pep
LSLWVQVKNFCHVMHVFGYCRHVVAHSQGILYMLFNRYTSFT

SEQ ID NO: 202246 - protein, 125 aa, Oryza sativa
  Clone ID: PAT_MRT4530_97543C.1.pep
MEKEKGHGQRRRRLRSGRRPALLFTDAIHAGQRRHDAGQPTSTQPTPVEGARLHQPRPALRCCRETRASLASWTEELRDKSAATDDARKGGEGSGMIETSTKVKNDDDEEKLAANASAATPRRSR

SEQ ID NO: 202247 - protein, 77 aa, Oryza sativa
  Clone ID: PAT_MRT4530_97544C.1.pep
FEYLFEKGTKTISPVKNSSLLLSAEFIRKRHHQLIITSNKKNHWTDQMPPRQALWHFLCLSSYERNRGAPRAPATVA

SEQ ID NO: 202248 - protein, 51 aa, Oryza sativa
  Clone ID: PAT_MRT4530_97545C.1.pep
HHFRGRHARRRLPSGQDARPEAEREFSLTMPKQRPLHLDEQSFSITLDDYL

SEQ ID NO: 202249 - protein, 138 aa, Oryza sativa
  unsure (1)..(138): unsure at all Xaa locations
  Clone ID: PAT_MRT4530_97546C.1.pep
SRARTHVRTKHVSLFSTYATSEQQLWYSPIATATKEVAAAAAAADKAPTTPSTPLIQEANEALKAPKPKEAPKAKEGEEKKAKGDKEKENANKERHPRATXPRSARPHHPPYSETIKEDIMALQGNSTGGSSTYAISK

SEQ ID NO: 202250 - protein, 262 aa, Oryza sativa
  Clone ID: PAT_MRT4530_97547C.1.pep
VVVVEEEEEERRLRGALRSLQQEAGVLERLVYKHRNQHRGAAYFQYLLKVRRDVRLLLAAGLGDVLTAVFPVLASRKPANTILAVNSRQSKKKPGANHCHHERLLGVARLLSEMAEPVMMGASQISFLLARSFFVDLCTAILALLARVRALVQQMLLDVVSVYNKASDLIDRKQSVKISIGGAQAFREYYPSSNDARTFLECVWVKDKFVLHENTKGSKRSKPTPPRKSCASESAVLYETLGQVSEDMENAEGLNSPMKLPD

SEQ ID NO: 202251 - protein, 61 aa, Oryza sativa
  Clone ID: PAT_MRT4530_97548C.1.pep
FMTGIIAMAWWLSVIMNFWYLVCLANEEGVRKELRECIFLWIVELDQGGVQQPSPPESRKP

SEQ ID NO: 202252 - protein, 75 aa, Oryza sativa
  Clone ID: PAT_MRT4530_97549C.1.pep
LVAAVHLWSGWSKGAPRPRRRPAHRAGRQVLGHSPISSLFSRRSSLEIDGGEGRMERRSRESKLRTRACNVIALL

SEQ ID NO: 202253 - protein, 1756 aa, Oryza sativa
  unsure (1)..(1756): unsure at all Xaa locations
  Clone ID: PAT_MRT4530_9754C.1.pep
MPISTGPPMTGNENAVATNQDASTSKNPPVETENGLPTTSKFVKDSDAARPCPSDTNRGPAKMNSETIRSWCPIHKTNKHTLQDCWVFVNARAEIRACKERGIQRTSPTWNVYCSIHKTKNHDLSSCKVLLGAMKTPSPKSYVPIRDNGKEQGVTPAPDRFVGVIDLNPHEPSVLHLLEDYGSSTSDTAREVLAIDDVGTSAQANAEAANQSTTPAQHIRAVEAILRETPYDPVLNNNLERWMERLRTSVTNLCNAFEEAATAAQQNRSPVGDANGEIPERRESPRQATPPPRGTGDLRDQINGRREARRTRDDANRSRRHISSRRHDRGSRLNENRDHDDRDRRGPDNTSHGRRRNDEDEGDWRRDNSERRRQDSRDPGRHPRNHTPEPSDPSSSSSSSSASSSSSDRHPRRSRDHRQPTAPSAGCRAFGRSLRDVRWPERFRPGAIEKYDGSTDPEEFFQVYSTVLYVAGADDNALANYLPTALKGFAHLWQQFVANFQGTYKRHAIEDDLHALTQNSGESLREYVRRFNECRNTIPEITDASVIRAFKSGVRDRYTTQELATRRITTTRRLFEIVERCAHVDDALRRKNDKPKTGGEKKSVADTSESSKKKNRKKGKRKAQAEVLAAEYANPPKRPDPQGSDTKKSWCPIHKTDRHSLEDCLVFKKSLEKHMAFEKGKRVRVVEKNEESPPHESDSAYPDSDLHVSHIFGGSTTYSSKREYKKVEREVCSMWQGDAPRMKWSEQKMEFSEADHSWTAVIPGRYPIVVEPTIRNIKVARVLIDGGSSINLLFASTLDAMGIPQMLKMPGSKGTITIQGNAKLAVQCDKRSLDMVEQTPTPPAMSEPPKKELALIAFLRDNADVFAWQPSDMPGVPREVIEHKLMVRPDAKPVKQRLRRFAPDRKQAIREELEKLLKAGFIREVLHPEWLANPVMVRKANGKWRMCVDFTDLNKACPKDHFPLPRIDQLVDSTAGCELLSFLDAYSGYHQISMAKEDEEKTAFITPFGVFCYVKMPFGLITAGKTFQRTVQGALSNQLGNNVEAYVDDIVVKTKTSDSLIDDLRETFDNLRRYRLMLNPEKCTFGVPSGKLLGFLVSGRGIEANPEKIKAIENMKSPTRLKEIQKLLYAVIMTSRKLRHYFQAHRVTIVSSFPLGEVVRNKDVVGRIAKWVVELSQFDVHFMPRTAIKSQVLADFVADWTMPDNKSDNQGDNETWTMAFDGALNSQGAGAGFILTSPSGDQFKHAIHLNFRATNNTAEYEGLLAGIRAAAALGAKRLIVKGDSELVANQVHKDYKCSNPELSKYLAEVRKLEKRFDGIEVRHVYRKDNVEPDDLARRASRREPLEPGTFLDVLTKPSVKEVSGEVGPSTPDISSEVTEAERAVAEIETTDDWRTPLIKFISSEELPEDDTEAEKITRKAKIYCMVGNDLYKKAPNGILLKCVSTDDGRQLLLDIHEDICGSHAAGRTLVGKAFRQGFFWPTALKDACDMVQRCEACQFHXQTHKTARTSASNNPSDLAVLVLGARYTWAIPKRTGRLQIPIXVAIDKFTKWIEASPTGEIKADNAIKFIRGIFCRYGLPHRIITDNSSQFISADFQDYCIGLGVKICFASVSHPQSNGQVERANGIVLQGIKTRVYDRLMSHDKKWVEELPSVLWAVRTTPTTSNKETPFFLVYGSEAMLPGELRHQSTRVQKHSDENQDEQRDIDVNLLEEHHERVAVRAASYQQALSRPEFLSKIPNAYMCVNPRPGISRGTQ

SEQ ID NO: 202254 - protein, 212 aa, Oryza sativa
  unsure (1)..(212): unsure at all Xaa locations
  Clone ID: PAT_MRT4530_97550C.1.pep
WPAAASAGSPAPRRSAASSSSPSSSARRRRAPPRGRSRRRRRRAPRRRRXRSSRWRRRRGRPVAAGVGSGAPRAPRRPSGSRSSRVAPRGATRTAARSGGSRRRRRGGWCRGRRRRRRRGWRSGREGSXRRRRHRAAARTRRRRHGRSRPPCGRRCSTPRRSGRRQRGRWRATARQRRRRPTPSRRPKGWTPATSHRRAACWSASQSGRCHR

SEQ ID NO: 202255 - protein, 119 aa, Oryza sativa
  unsure (1)..(119): unsure at all Xaa locations
  Clone ID: PAT_MRT4530_97551C.1.pep
MATDPMRWAVLHCQTSYITLPLVGVKTGGGGGGGSWRRRRRHCSAALGSGLELXGGGGGDLGRRVGGNLGRRHHRHLLLTVAADDDEEPTGQIRRRRFSSRPDPAAADLVPPESDGGLG

SEQ ID NO: 202256 - protein, 641 aa, Oryza sativa
  Clone ID: PAT_MRT4530_97552C.1.pep
MYSANHWGGSFEIAADGAAEDDHSRNMDLDRGALSARQHQLDETQQSWLLGPPEAKKKDKYVDLGCVVVKRKLLWWVLWTLLAAFILIGLPVIIAKSIPKKKPHAPPPDQYTDALHKALLFFNAQKSLLSLTNNFGHVSFSALTAGRLPKNNGIKWRGNSGLSDGSDLTDVKGGLVGGYYDAGDNIKFHFPLAFSMTMLSWSVIEYSAKYKAVGEYDHVRELIKWGTDYLLLTFNSSASTIDKVYSQVGIAKINGTQPDDHYCWNRPEDMAYPRPVQTAGSAPDLGGEMAAALAAASIVFRDNAAYSKKLVNGAAAVYKFARSSGRRTPYSRGNQYIEYYYNSTSYWDEYMWSAAWMYYATGNNTYITFATDPRLPKNAKAFYSILDFSVFSWDNKLPGAELLLSRLRMFLNPGYPYEESLIGYHNTTSMNMCTYFPRFGAFNFTKGGLAQFNHGKGQPLQYTVANSFLAALYADYMESVNVPGWYCGPYFMTVDDLRSFARSQVNYILGDNPKKMSYVVGYGKKYPRRLHHRGASTPHNGIKYSCTGGYKWRDTKGADPNVLVGAMVGGPDKNDQFKDARLTYAQNEPTLVGNAGLVAALVALTNSGRGAGVTAVDKNTMFSAVPPMFPATPPPPSKWKP

SEQ ID NO: 202257 - protein, 105 aa, Oryza sativa
  Clone ID: PAT_MRT4530_97553C.1.pep
GGSLVWEDHLFAGFSFDPLDNVRGGIPFMEGIFYSPQSMVFVGNHLVDGRTLGGCPIQGGSPLPVVVRFRGGRWSASLVEVPMCLVVRSFCWARFCGADVYLCLV

SEQ ID NO: 202258 - protein, 66 aa, Oryza sativa
  unsure (1)..(66): unsure at all Xaa locations
  Clone ID: PAT_MRT4530_97554C.1.pep
VMVCFVHPRYRGRSIHYLSYHVELSIQETPVSPGSGSELHADWWXNLSKGKQEEGTSTMRNPAAKG

SEQ ID NO: 202259 - protein, 65 aa, Oryza sativa
  unsure (1)..(65): unsure at all Xaa locations
  Clone ID: PAT_MRT4530_97555C.1.pep
MGEAEARRRWTLVLVNXXXVLEKADEVLLPAXYXEVGADXXVXPTXXXSLTLXRAIXQAASYPLA

SEQ ID NO: 202260 - protein, 364 aa, Oryza sativa
  Clone ID: PAT_MRT4530_97556C.1.pep
MIRRFLYMVDLCGDNSLTQRLRRIDTSRLFYPKDQLPRASPSSSAAAAAVEDARLPPAAMGFSASMNFMRTSDDKIVTVDDTGRRAILYDPAAHTVRSLPPMASPKFLTVSLAVAGDLYVMVTPPHPDKVGGGEGRRPEYSFEALVHRERRSGWMTNADEEARHWRPMPPPPFVHDAAAGEIHGYAAIGDSHILVSTDRATYSFDTASAAWSKAGDWRLPFRGRAEHVPEHGLCVGFLEMDDTVLAAWDVSASPQPRAPAASVQSKGFSVASPGEWKGLAAPREVASHVVHLGGGKLCVAKVFWVVRRGTCSYPCCVGEHDKMKFSMLTGVEVAPGGGHGGKPRIVKHKSCRYRFGQYHPTHVL

SEQ ID NO: 202261 - protein, 291 aa, Oryza sativa
  unsure (1)..(291): unsure at all Xaa locations
  Clone ID: PAT_MRT4530_97557C.1.pep
HSSRQQQRAARIGDRHKHLCNGLWMNHHSTLMNFFGXAQIVHSYWHFDNAPXYGGFVMGHEAVDRNRETCHLRLYQDYFSNNPTYGPVLFRRRNRMSRPLFLRIMNTVEDHDDYFVKXRNAAGIPGLSCHQKVTATMRXLAYGIAIDALDEYLGIAXSTAIESLRRFVKAVVEVFEHEYLRSPNENDTTRLLELGENRGFPGMLGSIHXRMHWKCKNCPTEXWHGMYQGHVHKFTIILKAIASKDLWIWHAFFXMPGSHNDIRQNHRDPLKQRLLKLLQVHARALGMYHAI

SEQ ID NO: 202262 - protein, 113 aa, Oryza sativa
  Clone ID: PAT_MRT4530_97558C.1.pep
MEWYEDSMIWSESRTRGGETVRRVASRGRAGRKRIERSRRRWPPHKRWRRARGGEAWRGVAWGGRRERQLAVEEFGGGGFESVARRRTEAHVAIQHRTQHLQTGTVKVPRYFR

SEQ ID NO: 202263 - protein, 346 aa, Oryza sativa
  unsure (1)..(346): unsure at all Xaa locations
  Clone ID: PAT_MRT4530_9755C.1.pep
MQRPETTLLLLVVHQPHCRTLPHVPQYHHGISERSCDNTPRITQSTAAHLRRTTPMTSAVTSPTAAAARRRRRLERRTLAGERRHXDANGGHQDVEDNTANSPVTXTAAEDQRTATATRRKRREPSGRRRRCCSGDLRRRRRGGRGRRRLGEHDGGLPERRRRLKRRQRTAGAAAATAKLGHTALERFRRLEAKARVATGRGDTGGPFKGARRRRRRPTATATAKERSGRTNPRRTRIQLFPKRNSRRFQRRKGRGDPEDHFPSFNSAGEGKERPDXWIVNGGGAKLGFRXAAAEGRRXTLTGGTHLSATARTRGRLRLRTGPXWAEEREKGFXGPTFGPKPKEDF

SEQ ID NO: 202264 - protein, 236 aa, Oryza sativa
  unsure (1)..(236): unsure at all Xaa locations
  Clone ID: PAT_MRT4530_97560C.1.pep
SRTSSAPLLVLSAALAVLASTCIADPEPVQDFCVAVVPRAGDAAAAACPAYPGFPCKPASTVVSDDFFFAGLAVASDTDNRFGFNVTAANAETFPGLNTLGVSIGRVDLAPGGVNPLHSHPRATELIHVVAGRVLAGFVSTXAGEFYSKVLGEGEXTFVVPRGMIHFQYNXGGVAAQVITAFNSQMPGVXWPPGRTLFGSDPEIPDAVLAKSXQVDAKIIKLLKSXVLKSLIIRHG

SEQ ID NO: 202265 - protein, 40 aa, Oryza sativa
  unsure (1)..(40): unsure at all Xaa locations
  Clone ID: PAT_MRT4530_97561C.1.pep
VDGPTVTRISGXNILDNNGVNVVSVFLTTLITALACVYIF

SEQ ID NO: 202266 - protein, 226 aa, Oryza sativa
  Clone ID: PAT_MRT4530_97562C.1.pep
MCSIRSFAFVLVLAFSVAVAESRDSFNVLAHKSFPLENKKTGLTSANGKLCQLCEQYSTEALFYLQQNETQTEILSILHHACANVGPLKQQCITLVDYYIPLFFLEVSMVTPEKFCESVHLCRKGTMLRLPSRGDTCGICHHVLVEVLIMLKDPDMQLEIVEIFLKACSKADNYVQQCKKMVLEYTPLILVKSQKFLETTDVCSTIHACKTGTQASAETMLLSAAS

SEQ ID NO: 202267 - protein, 169 aa, Oryza sativa
  unsure (1)..(169): unsure at all Xaa locations
  Clone ID: PAT_MRT4530_97563C.1.pep
FQKRVCCFSRKNQKNDGPWXGSWAVCFTYATFFAXKGLVAPGRTFQNSLSIRKACNFLLSKQLSTGGWGEDYLGCQVEEYIDSGRPHVVHTAWGMLGLIYAGQVELDPAPLYRAAKELINMQLETGEFPQQEILGSFNSSLFFNYTNYRNLFPIWALGEFHRRLLAKRA

SEQ ID NO: 202268 - protein, 1906 aa, Oryza sativa
  Clone ID: PAT_MRT4530_97564C.1.pep
MAEQAKAHNLSPSVSGDDGEPNPRRRARTPPPPPRQSPRREEALERVEGSATSTSTGDGEGRRDGERRLLVYGDGSTPQGALQAAGALLRHPPIVPDPESPAQRWLDDVANLVMTARQRLDAGGRSSATKTSGTATTGSASSRRRARRAAAAVRHSAATPSSAPPTREDLRGGPDACISIERRRNGRRAAHATEGASSSGVSPQHGRGDQPSVPPVGGVGCRAFVASLRNVRWPPRFRPTIAEKYDGSVNPAEFLQVYTTGIEAAGGDDRVMANFFPMALKGQARGWLMNLPPASVHSWEDLCQQFTMNFQGTYPRPGEEADLHAVQRRDDESLRSYIQRFCQGGVRHNRMLEKIASKEPQTTAELFQLADRVARKEESWTWNPSGSGVAASAAPGSAARTGRRDRRRKKRSAHSDDEGHVLAVEGASRATRKGRPASDKKEASAPSRERPTGKWCTVHNTSLHDLADCRAVKSLAERTRKWEEERRQERREGKSPAVPSGNRRREAKQKAPAEDIDDGDDDLGFQEPGATIATVDGGACAHVSRRSLKAMKRELLAAAPTHEATRRARWSEVALTFDQTDHPPCVARGGQVAMVVSPTVCNVKLGRVLIDGGAALNILSPAAFDAIKAPGMVLRPSQPIIGVTPGHTWPLGHIDLPVTFGGSANFRTERVNFDVADLSLPYNAVLGRPALVKFMAAVHYAYLQMKMPGPGGPISVHGDLKVALACMEQRADHLAAASKPEGGDERLGTSVPAAPRQRIVTCDEVPEDALVSFLRANADVFAWRPADMPGVPREVIEHRLAVRPGAKPVRQKVRQQAPERQAFIREEVARLLEAGFIREVIHPEWLANLVVVPKANGKLRMCIDYTDLNKACPKDPYPLPRIDQIVDSTAACDLLCFLDAYSGYHQIRMAREDEEKTAFITPIGTYCYTTMSFGLKNAGPTFQRTTRISLGSQIGRNVEAYVDDLVVKTRDRETLLSDLAETFESLRSTCIKLNPDKCVFGVPAGKLLGFLVSARGIEANPEKIRAIERMRPPSKLRDVQCVTGCMAALSRFISRLGEKALPLFKLLKRSGPFTWTEEAERALTQLKAYLSSPPVLVAPEPGEPLLLYLAVTPQVVSAALVVERDEDNPHSAHPHPVLAWPGREQGGEAPEPNGGPRPPTTGAGPLPACQTVPGAPDPQDGPGATAGKPHLSPSDPEVNPVPTRPGREQGEEAPEPNGGLRLPMTGVDPLPACPTTPGAPDPQDGPKATVGRPHLSSSDPEVISTEDKCAPRGRLDEERPRDAAPGEEDRPHRKVQRPVYFVSEALRDAKTRYPQAQKMLYTILMASRKLRHYFQAHRVTVVTSYPLAQILHNREGTGRVVKWTIELSEFDLHFEPRHAIKSQALADFVAEWTPAPEPVSVPEASSGPSQLPHTAHWGAGAGVILTSPSGDVLRYLVRLDFRATNNMAEYEGLLAGLRVAAGLGIRRLLVLGDSQLVVNQVCKEYRCSDPQMDAYVRQVRRMERHFDGIELRHVPRRDNTIADELSRLASSRAQTPPGAFEERLAQPSARPDPLGETDAPDRPPRPVGVQASGPEGSAPSSLRLIAWIVEIQAYLTDKTLPEDREGSERVQRISKRYVLIEGTLYRRAANGILLKRAPGGFEYLYVAIDKFTKWPEAYPVVKIDKHSALKFIKGITARFGVPNRIITDNGTQFTSELFGDYCEDMGIKLCFASPAHPRSNGQVERANAEILKGLKTKTFNILKKHGDSWIEELPAVLWANRTTPSRATGETPFFLVYGAEAVLPSELTLKSPRTTMYCEADQDQLRRDDLDYLEERRRRAALRAARSQQSLRRYHQRHVRARSLCVDDLVLRRVQTRAGLSKLSPIWEGPYRVIGVPRPGSVRLATGDGTELPNPWNIEHLRRFYP

SEQ ID NO: 202269 - protein, 61 aa, Oryza sativa
  Clone ID: PAT_MRT4530_97565C.1.pep
NQNGIYTPSTSLPCAPKLIIQRGALLHSPLSTISHQHYPWLASGSQPAARKANGGCGDLDC

SEQ ID NO: 202270 - protein, 214 aa, Oryza sativa
  unsure (1)..(214): unsure at all Xaa locations
  Clone ID: PAT_MRT4530_97566C.1.pep
QTVPGAPDPQDGPEATAGRPHLSPXGAGPLPACPTTPRAPDPQDGPEATVGRPPLSSSDPEVIGTEDECAPRGRLDEERPKDAAPSEEDRPHRKVQRPVYFVSEALRDAKNPIMEPDACVPRFGHRDRHGVSLLVELRLRRGQIKPRLGLAHHHAVRRRRRLRRRLLAVHRSPEAPPLLLRRLSGQSRRHCLALLATLLAAGQEAPQPSPRLPH

SEQ ID NO: 202271 - protein, 1210 aa, Oryza sativa
  Clone ID: PAT_MRT4530_97567C.1.pep
MAEQAKAHNLSPSVSGDDGEPNPRRRARTPPPPPRQSPRREEALERVEGSATSTSTGDGEGRRDGERRLLVYGDGSTPQGALQTAGALLRHPPIVPDPESPAQRWLDDVANLVMTARQRLDAGGRSSATKTSEPLWRAFGTSVGPPRFRPTIAEKYDGSVNPAEFLQVYMTGIEAAGGDDRVMANFFPMALKGQARGEEADLHAVQRRDDESLRSYIQRFCQVRNTIPCIPTHAVIYAFRGGVRHNRMLEKIASKEPQTTAELFQLADRVARKEESWTWNPSGSGVAASAAPGSAARTGRRDRRRKKRSAHSDNEGHVLAVEGASRATRKGRPASDKKEASAPSRERPTGKWCTVHNTSLHDLADCRAVKSLAEQTRKWEEERRQERREGKSPAVPSGNRRSEAKQKAPAEDIDDGDDDLGFQEPGATIATVDGGACAHVSRRSLKAMKRELLAAAPTHEATRRARWSEVALTFDQTDHPPCVARGGQVAMVVSPTVCNVKLGRVLIDGGAALNILSPAAFDAIKAPGMVLRPSQPIIGVTPGHTWPLGHINLPVTFGGSANFRTERVNFDVADLSLPYNAVLGRPTLVKFMAAVHYAYLQMKMPGPGGPISVHGDLKVALACMEQRADHLAAASKPEGGDERLGTSVPVAPRQRIVTCDEVPEDALVSFLRANADVFAWRPADMPGVPREVIEHRLAVRPDAKPVRQKVRRQAPERQAFIREEVARLLEAGFIREVIHLEWLANPVVVPKANGKLRMCIDYTDLNKACPKDPYPLPRIDQIVDSTAGCDLLCFLDAYSGYHQIRMAREDEERLAQPSARPDPLGETDAPDRPPRPVGVQASGPEGSAPSSLRLIAWIVEIQAYLTDKTLPEDREGSERVQRISKRYVLIEGTLYRHAANGILLKCIPREQGVELLADIHEGECGAHSASRTLVGKAFRQGFYWPTALNDAVDLFTKWPEAYPVVKIDKHSALKFIKGITARFGVPNRIITDNGTQFTSELFGDYCEDMGIKLCFASPAHPRSNGQVERANAEILKGLKTKTFNILKKHGDSWIEELPAVLWANRTTPSRATGETPFFLVYGAEAVLPSELTLKSPRATMYCEADQDQLRRDDLDYLEERRRRAALRAAHYQQSLRRYHQRHVRARSLCVDDLVLRRVQTRAGLSKLSPMWEGPYRVIGVPRPGSVRLATGDGTELPNPWNIEHLRRFYP

SEQ ID NO: 202272 - protein, 1834 aa, Oryza sativa
  Clone ID: PAT_MRT4530_97568C.1.pep
MAEQAKAHNLSPSVSGDDGEPNPRHRARTPPPPPRQSPRREEALERVEGSATSTSTGDGEGRRDGERRLLVYGDGSTPQGALQAAGALLRHPLIVPDPESPAQRWLDDVANLVMTARQRLDAGGRSSATKTSGTATTGSASSRRRARRAAAAVRHSAATPSSAPPTREDLRGGPDARISIERRRNGRRAAHATEGASSSGVSPQHGRGDQPSVPPVGGVGCRAFVASLRNVRWPPRFRPTIAEKYDGSVNPAEFLQVYTTGIEAAGGDDRVMANFFPMALKGQARGWLMNLPPASVHSWEDLCQQFTMNFQGTYPRPGGGVRHNRMLEKIASKEPQTTAELFQLTDRVARKEESWTWNPSGSGVAASAAPGSAARTGRRDRRRKKRSAHSDDEGHVLAVEGASRATRKGRPASDKKEASAPSRERPTGKWCTVHNTSLHDLADCRAVKSLAEWTRKWEEERRQERREGKSPAVPSGNRRREAKQKAPAEDIDDGDDDLGFQEPGATIATVDGGACAHVSRRSLKAMKRELLAAAPTHEATRRARWSEVALTFDQTDHPPCVARGGQVAMVVSPTVCNVKLGRVLIDGGAALNILSPAAFDAIKAPGMVLRPSQPIIGVTPGHTWPLGHIDLPVTFGGSANFRTERVNFDVADLSLPYNAVLGRPALVKFMAAVHYAYLQMKMPGPGGPISVHGDLKVALACMEQRADHLAAASKPEGGDERLGTSVPAAPRQRIVTCDEVPEDALVSFLRANADIFTWRPADMPGVPREVIEHRLAVRPGAKPVRQKVRRQAPERQAFIREEVARLLEAGFIREVIHPEWLANPVVVPKANGKLRMCIDYTDLNKACPKDPYPLPRIDQIVDSTAGCDLLCFLDAYSGYHQIRMAREDEEKTAFITPIGTYCYTTMPFGLKNAGPTFQRTTRISLGSQIGRNVEAYVDDLVVKTRDRETLLSDLAETFESLRSTCIKLNPDKYVFGVPAGKLLGFLVSARGIEANPEKIRAIERMRPPSKLRDVQCVTGCMAALSRFISRLGEKALPLFKLLKRSGPFTWTEEAERALTQLKAYLSSPPVLVAPEPGEPLLLYLAATPQVVSAALVVERDEDNPHSAHPHPVLAWPGREQGGEAPEPNGGPRPPTTGAGPLPACQTVPGAPDPQDGPGATAGRPHLSPSDPEVNPVPTRPGREQGEEAPEPNGGLRLPMTGVDPLPACPTTPGAPDPQDGPEATVGRPHLSSSDPEVVSTEDKCAPRGRLDEERPRDATPGEEDRPHRKVQRPVYFVSEALRDAKTRYPQVQKMLYAIMMASRKLRHYFQAHRVTVVTSYPLAQILHNREGTGRVVKWTIELSEFDLHFEPRHAIKSQALADFVAEWTPAPEPVSVPEASSGPSQLPHTAHWVMQFDGSLSLQGAGAGVILTSPSGDVLRYLVRLDFRATNNMAEYEGLLAGLRVAAGLGIRRLLVLGDSQLVVNQVCKEYRCSDPQMDAYVRQVRRMERHFDGIELRHVPRRDNTIADELSRLASSRAQTPPGAFEERLAQPSARPDPLGETDAPDRPPRPVGVQASGPEGSAPSSLRLIAWIVKIQAYLTDKTLPEDREGSERVQRISKRYVLIEGTLYRRAANGILLKCIPREQGVELLADIHEGECGAHSASRTLVGKAFRQGFYWPTALNDAVDLVRRCRACQFHAKQIHQPAQALQIIPLSWPFAVWGLDILGPFRRAPGGFEYLYVAIDKFTKWPEAYPVVKIDKHSALKFIKGITARFGVPNRIITDNGTQFTSELFGDYCEDMGIKLCFASPAHPRSNGQVERANAEILKGLKTKTFNILKKHDDSWIEELPAVL

SEQ ID NO: 202273 - protein, 83 aa, Oryza sativa
  Clone ID: PAT_MRT4530_97569C.1.pep
EVVKQRQVRSLWGSGADSSCPVCMAALLNVGVPSCGIPIVGSAAASGEQSNGRRGRVLPVLKEALVLPFLPAAEGSRPRGQIE

SEQ ID NO: 202274 - protein, 596 aa, Oryza sativa
  Clone ID: PAT_MRT4530_9756C.1.pep
MSASKSTHWDEIGISQALALTAANMARDEPMMAASTYFWSTAMNAFLFSQGLMTATLLDVTMITGLDITSSANLSSLNNQLTHEFKTRSIGGWSCYMAKYMGTGPVTQREHTAFIMMWLEKFLFGGPSCGPTANWQRIAENLVEKKHFPLAKYLLGYLYQTLNTATDKIASGKTIGTGGPPLGSIDNIKFRMLRSTAFDRWWVEWKKHLFHQSASMYLAGLFPDEIPQTTESSPPQQSKSGVEIAYAPGLLPNGGGLTPPVIGYNAPKTSTLLHGLSHVPIILTARRKRAKSATALSAVKNKPQKQKTTTDDKPKIAADDLPAIDPDVADFLEDEAMSEEVNEATDVVSETREQTPPADPPGQQKTPPPPVLGDMFSFDISQFLHEEETTSQALVPLADDLKSTLLDMSKRLEGSLETLVTSCGSIQDRFNEIHDKIPDELADVFTPAVYLEQHRLKLEKAKNRMADRLERRDLEATIQANRVSINEEKAKLDELEGGLDSIQTNIDRLNARKIDLLAELEQCNAQIAIEQKKLEDLPKAIEDQKSKLKASVKHLAELIKSLKPIPSSDAADARMIDEVDQIKHKAISGIQKYVSS

SEQ ID NO: 202275 - protein, 1995 aa, Oryza sativa
  Clone ID: PAT_MRT4530_97570C.1.pep
MAEQAKAHNLSPSVSGDDGEPNPRRRARTPPPPPRQSPRREEALERVEGSATSTSTGDGEGRRDGERRLLVYGDGSTPQGALLRHPPIVPDPESPAQRWLDDMANLVMTAQQRLDAGGRSSATKTSGTATTGSASSRRRARRAAAAVRYSAVTPSSAPPTREDLRGGPDARISIERRHNGRRAAHATEGASSSGVSPQHGRGDQPSVPPVGGVGCRAFVASLRNVRWPPRFRPTIAEKYDGSVNPAEFLQVYTTGIEAAGGDDRVMANFFPMALKGQARGWLMNLPPASVHSWEDLCQQFTMNFQGTYPRPGEEADLHAVQRRDDESLRSYIQRFCQVRNTIPCIPAHAVIYAFRGGVRHNRMLEKIASKEPQTTAELFQLADRVARKEESWTWNPSGSGVAASAAPGSAARTGRRDRRRKKRSAHSDDEGHVLAVEGASRATRKGRPASDKKEASAPSRERPTGKWCTVHNTSLHDLADCRVVKSLAERTRKWEEERRQERREGKSSAVPSGNRRREAKQKAPAEDIDDGDDDLGFQEPGATIATVDGGACAHVSRRSLKAMKRELLAAAPTHEATRRARWSEVALTFDQTDHPSCVARGGQVAMVVSPTVCNVKLGRVLIDGGAALNILSPAAFDAIKAPGMVLRPSQPIIGVTPGHTWPLGHIDLPVTFGGSANFRTERVNFDVADLSLPYNAVLGRPALVKFMAAVHYAYLQMKMPGPGGPISVHGDLKVALACMEQRADHLAAASKPEDGDERLGTSVPAALRQRIVTCDEVPEDALVSFLRANADVFTWRPADMPGVPREVIEHRLAVRPGAKPVRQKVRRQAPERQAFIREEVARLLEAGFIREVIHPEWLANPVVVPKANGKLRMCIDYTDLNKACPKDPYPLPRIDQIVDSTAGCDLLCFLDAYSGYHQIRMAREDEEKTAFITPIGTYCYTTMPFGLKNAGPTFQRTTRISLGSQIGRNVEAYVDDLVVKTRDRETLLSDLAETFESLRSTRIKLNPDKCVFGVPAGKLLGKLRDVQCVTGCMAALSLFISRLGEKALPLFKLLKRSGPFTWTEEAERALTQLKAYLSSPPVLVAPEPGEPLLLYLAATPQVVSAALVVERDEDNPHSAHPHPVLAWPGREQGGEAPEPNGGPRPPTTGAGPLPACQTVPGAPDPQDGPGATAGRPHLSPSDPEVNPVPTRPGREQGEEAPEPNGGLRLPMTGVDPLPACPTTPGAPDPQDGPEATVGRPHLSSSDPEVVSTEDKCAPRGRLDEERPRDAAPGEEDRPHRKVQRPVYFVSEALRDAKTRYPQAQKMLYAILMASRKLRHYFQAHRVTVVTSYPLAQILHNREGTGRVVKWTIELSEFDLHFEPRHAIKSQALADFVAEWTPAPEPVSVPEASSGPSQLPHTAHWVMQFDGSLTLQGAGAGVILTSPSGDVLRYLVRLDFRATNNMAEYEGLLAGLRVAAGLGIRRLLVLGDSQLVVNQICKEYRCSDPQMDAYVRQVRRMERHFDGIELRHVPRRDNTIADELSRLASSRAQTPPGAFEERLAQPSARPDPLGETDAPDRPPRPVGVQASGPEGSAPSSLRLIAWIIEIQAYLTDKTLPEDREGSERVQRISKRYVLIEGTLYRRAANGILLKCIPREQGVELLADIHEGECGAHSASRALVGKAFRQGFYWPTALNDAVDLVRRCRACQFHAKQIHQLAQALQIIPLSWPFAVWGLDILGPFRRAPGGFEYLYVAIDKFTKWPEAYPVVKIDKHSALKFIKGITARFGVPNRIITDNGTQFTSELFGDYCEDMGIKLCFASPAHPRSNGQVERANAEILKGLKTKTFNILKKHGDSWIEELPVVLWANRTTPSRATGETPFFLVYGAEAVLPSELTLKSPRATMYCEADQDQLRRDDLDYLEERRRRAALRAARYQQSLRRYHQRHVRARSLCVDDLVLRRVQTRAGLSKLSPMWEGPYRVIGVPRPGSVRLATGDGTELPNPWNIEHLRRFYP

SEQ ID NO: 202276 - protein, 1233 aa, Oryza sativa
  Clone ID: PAT_MRT4530_97571C.1.pep
MAEQAKAHNLSPSVSGDDGEPNPRRRARTPPPPPRQSPRREEALERVEGSATSTSTGDGEGRRDGERRLLVYGDGSTPQGALQAAGALLRHPPVVPDPESPAQRWLDDVAILVMTARQRLDAGGRSSATKASAFVASLRNVRWPPRFRPTIAEKYDGSVNPAEFLQVYATGIEAAGGDDRVMANFFPMALKGQARGWLMNLPPASVHSWEDLCQQFTMNFQGTYPRPGEEADLHAVQRRDDESLRSYIQRFCQVRNTIPCIPAHAVIYAFRGGVRHNRMLEKIASKEPQTTAELFQLADRVARKEEAWTWNPSGSGVAASAAPGSAAQTGRRDRRRKKRSAHSDDEGHVLAVEGASRATRKGRPVSDKKKEAGAPSRERPTGKWCTVHNTSLHDLADCRAVKSLAERTRKWEEERRQERRVGKSPAVPSGNRRSEAKQKAPAEDIDDGDDDLGFQEPGVTIATVDGGACAHVSRRSLKAMKRELLAAAPTHEATRRARWSEVALTFDQTDHPPCVARGGQIAMVVSPTVCNVKLGRVLIDGGAALDILSPAAFDAIKAPGMVLRPSQLIIGVTPGHTWPLGHIDLPVTFGGSANFRTERVNFDVADLSLPYNAVLGRPALVKFMAAVHYAYLQMKMPGPGGPISVHGDLKVALACMEQRADHLAAASKPEGGDERLGTSVPAAPRQRMITCDEVPEDALVSFLRANADVFAWRPADMPGVPREVIEHRLAVRPGARPVRQKVRRQAPERQAFIREEVARLLEAGFILEVIHPEWLANPVVVPKANGKLRMCIDYTDLNKACPKDPYPLPRIDQIVDSTAGCDLLCFLDAYSGYHQIRMAREDEEKTAFITPIGTYCYTTMPFGLKNAGPTFQRTTRISLGSQIGRNVEAYVDDLVVKTRNQETLLSDLAETFESLRSARIKLNPDKCVFGVPAGKLLGKLRDVQCVTGCMAALSRFISRLGEKALPLFKLLKRSGPFTWTEEAERALTQLKAYLSSPPVLVAPEPDEPLLLYLAATPQVVSAALVVERDEDNPHSAHPHPVLAWPGREQGGEAPEPNGGPRPPTTGAGPLPACQTVPGAPDPQDGPEATAGRPHLSPSDPEANPVPTRPGREQGGEAPEPNGGPRPPTTGAGPLPACPTTPRAPDPQDGPEATVGRPPLSSSDPEVIGTEDECAPRGRLDEERPKDAAPSEEDRPHRKVQRPVYFVSEALRDAKNPIMELLSNSCAPDQSDIR

SEQ ID NO: 202277 - protein, 457 aa, Oryza sativa
  Clone ID: PAT_MRT4530_97572C.1.pep
MAAAAVARLTAATTCRMRVSGPVTAATTSAASPVTVTLGDLPQQKRSAATATTTTSSGGSPVVVEKRAAAATAAEEEEVEEAAAVAALASAWREVQGAGDWRGMVEPLHPLLRDEVVRYGELVAACYRAFDLDPASKRYLNCKHGKKQMLPAVGMAGAGYTVTRYIYAAPDVALPFGVGGRCSCAGKSRWIGYVAVASNREAARLGRRDILVSFRGTVTGSEWLANFMSALSPARFDPADPRPDVRVESGFLSLYTSDDLSGKFTCGSCRNQLLSEVTRLIDKYKHDDVSITLAGHSMGSSLAILLGYDLAELGLNRGGRGGRGGAIPITVFSFGGPRVGNLEFKRRCDELRVKVLRVANARDPVTRMPGVVLNEAAARVFRVELPWSKACYTHVGVEVALDFFKASHAACVHDLDAYINHLLDGGAAASATTTTLESWRWQMAAIRAGEWLQTLGI

SEQ ID NO: 202278 - protein, 1956 aa, Oryza sativa
  Clone ID: PAT_MRT4530_97573C.1.pep
MAEQAKAHNLSPSVSGDDGEPNPRRRDRTPPPPPRQSPRREEALERVEGSATSTSTGDGEGRRDGERRLLVYGDGSTPQGALQAAGALLRHPPIVPDPESPAQRWLDDVANLVMTARQRLGAGGRSSATKTSGAATTGSVSSRRRARRAAAVARHSAATPSSAPPTQEDLRGGPDARISIERWRNGRRAAHATEGASSSGVSHQHGRGDQPSVPPVGGVGCRAFVASLRNVRWPPRFRPTIAEKYDGSVNPAEFLQVYTTGIEAAGGDDRVMANFFPMALKGQARGWLMNLPPASVHSWEDLCQQFTMNFQGTYPRPGEEVDLHAVQRRDVESLRSYIQRFCQVRNTIPCIPAHAVIYAFRGASAAPGFAAQTGRHDRRRKKRSAHSDDEGHVLAVEGASRATRKGRPAGDKKKEAGAPSRERPTGKWCIVHNTSLHDLADCRAVKSLAERTRKWEEERRQERREGKSPAVPSGNRRSEAKQKAPVEDIDDGDDDLGFQEPGATIATVDGGACAHVSRRSLKAMKRELLAAAPTHEATRRARWSEVALTFDQTDHPPCVARGGQIAMVVSPTVCNVKLGRVLIDGGAALNILSPAAFDAIKAPGMVLRPSQPIIGVTPGHTWPLGHIDLPVTFGGSANFRTERVNFDVADLSLPYNAVLGRPALVKFMAAVHYAYLQMKMPGPGGPISVHGDLKVALACMEQRADHLAAASKPEGGDERLGTPAPAAPRQWIVTCDEVPEDALVSFLRANADVFAWRPADMPGVPREVIEHRLAVRPGARPVRQKVRRQAPERQAFIREEVARLLEAGFIREVIHPEWLANPMVVPKANDKLRMCIDYTDLNKACPKDPYPLPRIDQIIDSTAGCDLLCFLDAYLGYHQIRMAREDEEKTAFITPIGTYCYTTMPFGLKNTGPTFQRTTRISLGSQIGRNVEAYVDDLVVKTRNQETLLLDLAETFESLRSARIKLNPDKCVFGVPAGKLLGKLRDVQCVTGCMAALSRFISRLGEKALPLFKLLKRSGPFTWTEEAERALTQLKAYLSSPPVLVAPEPNEPLLLYLAATPQVVSAALVVERDEDNPHSAHPHPVLAWPGREPGGEAPEPNGGPRPPTTGAGPLPTCQTVPGAPDPQDGPRATAGRPHLSPSDPEANPVPTRPGREQGEEAPEPNGGLRPLTTGVGPLPACPTTPGAPDPQDGPEATVGRPPLSSSDPEVVGTEDECTPRGRLDKERPRDMAPSEEDRPHRKVQRPVYFVSEALRDAKTRYPQAQKMLYAILMASRKLRHYFQAHRVTVVTSYPLGQILHNREGTGRVVKWAIELSEFDLHFEPRHTIKSQALADFVAEWTPAPEPVSVPEASSGPSQPPHTAHWVMQFDGSLSLQGAGAGVTLTSPSGDVLRYLVRLDFRATNNMAEYEGLLAGLRVAAGLGIRRLLVLGDSQLVVNQVCKEYRCYDPQMDAYVRQVRRMERHFDGIELRHVPRRDNTVADELSRLASSRAQTPPGTFEERLAQPSARPDPLGETDVPDRPPMPVGVQASGPEGSAPSSLRLIAWIAEIQAYLTDKTLPEDREGSERVQRISKRYVLVEGTLYRRAANGILLKCIPREQGVELFADIHEGECGAHSASRTLVGKAFRQGFYWPTALNDAVDLVRRCRACQFHAKQIHQPAQALQIIPLSWPFAVWGLDILGPFRRAPGGFEYLYVAIDKFTKWPEAYPVVKIDKHSALKFIKGITARFGVPNRIITDNGTQFTSELFGDYCEDMGIKLCFASPAHPRSNGQVERANAEILRGLKTKTFNILKKHGDSWIEELPAVLWANRTTPSRATGETPFFLVYGVEAVLPSELTLRSPRATMYCEADQDQIRRDDLDYLEERRRRASLRATRYQQSLRRYHQRHVRARSLCVDDLVLRRVQTRAGLSKLSPMWEGPYRVIGVPQPGSVRLATGDGTELPNPWNIEHLRRFYP

SEQ ID NO: 202279 - protein, 1984 aa, Oryza sativa
  Clone ID: PAT_MRT4530_97574C.1.pep
MAEQAKAHNLSSSVSGDEGEPNPRRRARTPPPPPRQSPRREEALERVEGSATSTSTGDGEGRRDGERRLLVYGDGSTPQGALQAAGVLLRHPPIVPDPESPAQRWLDDVANLVMTARQRLGAGGRSSATKTPGAATTGSVLSRRRARRAAAVARHSAATPSSAPPTQEDLRGGPDARISIERRRNGRRAAHATEGASSSGVSHQHGRGDQPSVPPVGGVGCRAFVASLRNVRWPPRFRPTIAEKYDGSVNPAEFLQVYTTGIEAAGGDDRVMANFFPMALKGQARGWLMNLPPASVHSWEDLCQQFTMNFQGTYPRPGGGVRHNRMLEKIASKEPQTTAELFQLADRVARKEEAWTWNPSGSGVAASAAPGSAAQTGRRDRRRKKRSAYTDDEGHVLAVEGASRATRKGRPAGDKKKEAGAPSRERPTGKWCIVHNTSLHDLADCRAVKSLAERTRKWEEERRQERREGKSPAVPSGNRRSEAKQKAPAEDIDDGDDDLGFQEPGATIATVDGGACAHVSRRSLKAMKRELLAAAPTHEATRRARWSEVALTFDQTDHPPCVARGGQIAMVVSPTVCNVKLGRVLIDGGAALNILSPAAFDAIKALGMVLRPSQPIIGVTPGHTWPLGHIDLPVTFGGSANFRTERVNFDVADLSLPYNAVLGRPALVKFMAAVHYAYLQMKMPGPGGPISVHGDLKVALACMEQRADHLAAASKPEGGDERLGTSAPAAPRQRIVTYDEVPEDALVSFLRANADVFAWRPADMPGVPREVIEHRLAVRPGARPVRQKVRRQAPERQAFIREEVARLLEAGFIREVIHPEWLANPVVVPKANGKLRMCIDYTDLNKACPKEPYPLPRIDQIVDSIAGCDLLCFLDAYSGYHQIRMAREDEEKTAFITPIGTYCYTTMPFGLKNAGPTFQRTTRISLGSQIGRNVEAYVDDLVVKTRNQETLLSDLAETFESLRSARIKLNPDKCVFGVPAGKLLGFLVSARGIEANPEKIRAIERMRPPSKLRDVQCVTGCMAALSRFISRLGEKALPLFKLLKRSGPFTWTEEAERALTQLKAYLSSPPVLVAPEPNEPLLLYLAATPQVVSAALVVERDEDNPHSAHPHPVLAWPGREQGGEAPELNGGPRPPTTGAGPLPACQTVPGAPDPQDGPEATAGRPHLSPSDPEANPVPIRPRREQGEEAPEPNDGLRPLTTGVGPLPACPTTPGAPDPQDGPEATVGRPPLSSSDPEVVGTEDECAPQGRLGEERPRDAAPSEEDRPHRKVQRPVYFVSEALRDAKTRYPQAQKMLYAILMASRKLRHYFQAHRVTVVTSYPLGQILHNRESTGRVVKWAIELSEFDLHFQPRHAIKSQALADFVAEWTPAPEPVSVPEASSGPSQLPHTAHWVMQFDGSLSLQGAGAGVTLTSPSGDVLRYLVRLDFRATNNMAEYEGLLAGLRVAAGLGIRRLLVLGDFQLVVNQVCKEYRCSDPQMDAYVRQVRRMERHFDGIELRHVPRRDNTVADELSRLASSRAQTPPGAFEERLAQPSARPDPIGETDAPDRPPMPVGVQASGPEGSAPSSLRLIAWIAEIQAYLTDKTLPEDREGSERVQRISKRYVLVEGTLYRRAANGILLKCIPRGQGVELLADIHEGECGAHSASRTLVGKAFRQGFYWPTALNDAVDLVRRCRACQFHAKQIHQPAQAVQIIPLSWPFAVWGLDILGPFRRAPGGFEYLYVAIDKFTKWPEAYPVVKIDKHSTLKFIKGITTRFGVPNRIITDNGTQFTSELFGDYCEDMGIKLCFASPAHPRSNGQVERANAEILRRLKTKTFNILKKHGDSWIEELPAVLWANRTTPSRATGETPFFLVYGAEAVLPSEITLRSPRATMYCEADQDQLRRDDLDYLEERRRRAALRAARYQQSLRRYHQRHVRARSLCVDDLVLRRVQTRAGLSKLSPMWEGPYRVIGVPRPGSVRLATGDGTELPNPWNIEHLRRFYP

SEQ ID NO: 202280 - protein, 99 aa, Oryza sativa
  unsure (1)..(99): unsure at all Xaa locations
  Clone ID: PAT_MRT4530_97575C.1.pep
NSGFVKKVHKTHVSKIYKKKALAPGDFTVGQFVYGVWKRIXVSPKKALFFFGKKPFPPNGFLRFAIPEKNKEGGGFLXKTYRGENPMGLGEFNKGWGWG

SEQ ID NO: 202281 - protein, 100 aa, Oryza sativa
  unsure (1)..(100): unsure at all Xaa locations
  Clone ID: PAT_MRT4530_97576C.1.pep
DAWEKKRKRKKEKKNIAKRSPRDGRWRAWRGGAQAGGGAAAGGQPAGRQWAVLFGGGTPAAAAGEESDVVVIGGXPGGYVAXIKAXQLGLKTTCIXKRGT

SEQ ID NO: 202282 - protein, 58 aa, Oryza sativa
  Clone ID: PAT_MRT4530_97577C.1.pep
SGSQRCFGPTEASRTTRIHKYRIHFSNSIVDSGHVKQAENQKPLKINEQKVYIIGQTM

SEQ ID NO: 202283 - protein, 54 aa, Oryza sativa
  Clone ID: PAT_MRT4530_97578C.1.pep
FSLFIFITPSPCCNRNRASHMTQAHRLNNSNELAGSITHAQEHQLLQYLALIYL

SEQ ID NO: 202284 - protein, 139 aa, Oryza sativa
  Clone ID: PAT_MRT4530_97579C.1.pep
MDPTAGTGSSTKKIPSWMVTELPMLSTEANRLPQIPSWMIRKPLMLCMEAGRSGKAAAAATATADAMEQSCSVCLKSFEKDDCIWSMPCSHTFHQLCILGDRSCRDMNANEECKELSLVEDEASTAREASELGRTRGSF

SEQ ID NO: 202285 - protein, 397 aa, Oryza sativa
  Clone ID: PAT_MRT4530_9757C.1.pep
MMNGSNGSQGYHVNGKQVQSVVPSIQNNGPRHRPLTLMRRCRGMLCLVIMPLTAFMMMVYLSPVTTFLIRLFSVHYSRKSTCFLFGMWLAMWPFLFEKINKTKFVFSGETVPPKERVLLFANHRTEVDWMYLWDLALRKGRLQCIKYILKKSLMKLPIFNWAFHIIEFIPVERKWEVDEPLIRSRLSELKNPKDPLWLAVFPEGTDYTEKKCIKSQEYAKEHGLPILNNVLLPKTKGFHCCLQELRDSMDSVCDITIAYKHRPPTFMDNVYGIDPSEVHIHVKIIQVSDIPTSEDEVADWLIERFKLKNKLLSDFSALGHFPNEGTEDDLSTLKCIANFVAVISTTTVLTYLTLFSSVWFKIFVAFSSAFLTFATLYSIHLPQLICSPEAGTHAKKS

SEQ ID NO: 202286 - protein, 393 aa, Oryza sativa
  Clone ID: PAT_MRT4530_97580C.1.pep
MAAPPRPIPSIHRQPPKPTTTHVARCFRDPPKAPDTNSNTNPLLSLLSAVPDWADAVSERRIRDRRPLYTHADWREHRSSRRHLRHLLSSLTSRVILSLAPPVSAFTAFAAAIATYNTLLPAYALTASSLPYQLTAPALALLLVFRTEASYARFDEGRKAWMRVIAAAADLAGMAMRHHNPPATRALLNYILAFPLALKCHIICHSDIKRDLQGLLSEDDLNVVLRSKHRPRCIIEFISQSLYMLDFDENKRNIMESKLSCFLEGISVCEQLIGIPIPLSYTRLTSRFLVLWHLTLPVILWDECKWIVVPATFISAASLFCIEEVGVLIEEPFPMLALDELCKQLHDSTQDVMSVQNLVHNRLAAKTKDQDSGSMRCSDNGWPSSKSEQAKID

SEQ ID NO: 202287 - protein, 318 aa, Oryza sativa
  Clone ID: PAT_MRT4530_97581C.1.pep
EDRDNILRSRATGKGALTAPFPLLKSNHLGVVLTFTVYKYDLPPDATPEERIEATLGYLGASFDVPSLVERLLEQLASKQKIVVRLYDITNHTYPTKMYDSDVIASDDLHISNIDFGDPTRKHVMHCRFKHAPSLPWSAIMISSAVAIIVLLVGYIIYATLNSLEEAEDNYTTMRDLKGRAEAADVAKSQFLATVSHEIRTPMNGVLGMLQMLMDTELDTTQRDFVVTAQESGKSLINLINEVLDLAKIESGKIELEAVRFDVRDILDNVVSLFSEKSWAKGIELAVLVSDQVPDVLIGDPWRFRQIITNLVGNSMKQ

SEQ ID NO: 202288 - protein, 57 aa, Oryza sativa
  Clone ID: PAT_MRT4530_97582C.1.pep
YSDILISGNLVFPCQPSYHCKGCQMSIFFAILYIERISKKIPFDRSHFMEGFLCSIL

SEQ ID NO: 202289 - protein, 57 aa, Oryza sativa
  Clone ID: PAT_MRT4530_97583C.1.pep
TITKVVTGGLYFENMLIASCALFVLKGTIGLKACLWFTRLIYSSVKMDYSLITLALA

SEQ ID NO: 202290 - protein, 197 aa, Oryza sativa
  Clone ID: PAT_MRT4530_97584C.1.pep
MASSAAARRRQEMAAEGQRHLEETIAAAFQILSSMNDELCNPTLWSSSSAAAAAAGGAGGLQHHGNNHHHHHQHHHHHGGLPPPPPPLHSADSDAADAAGGGPGGAPGSGGSLDEARHRYKVAMAALRTSIAAVSSCAQEMGSTEHKADQAEIERLEEHASALRKNFSLNQLVTGAYLAMSIPNISQTTCFEHNCFG

SEQ ID NO: 202291 - protein, 33 aa, Oryza sativa
  Clone ID: PAT_MRT4530_97585C.1.pep
MARTKEDIGTGTPALDFGAITGAPVHLVEAEAG

SEQ ID NO: 202292 - protein, 49 aa, Oryza sativa
  Clone ID: PAT_MRT4530_97586C.1.pep
LTCRADCLCARKTQEADPQPHSAMANDIYSPFLLFSYYITMFFIFSLSS

SEQ ID NO: 202293 - protein, 246 aa, Oryza sativa
  Clone ID: PAT_MRT4530_97587C.1.pep
MKRGFFSQGVLCKNQILWKIQLKWKVLLVVQSLSFRRWQLIFVVLLLRIPSLPPSSKFAVTNAAAFVRVHRRRRRRRHPRPRPPPALIRVHRALDRCRLPLPHPSPPSTAGRRPRPRPPPLPPSSAFAVTNAAALVRVRRRRHRHRTQLLPPPSSASTTPSTAAASLVRVRRRRRRRRLSASAEHSGWHAGMGEEKRALVVAADVVMRWRVKKPWRERTWAVIGWASHGDLLIQRFICDLIHRSNG

SEQ ID NO: 202294 - protein, 73 aa, Oryza sativa
  Clone ID: PAT_MRT4530_97588C.1.pep
INPKGKNKSNPAPPQTGGSQRTRPGPEGCPARIPKAPPPPGKWPGGPPPGPGAGKQPGKPGPPPREPPRPQKP

SEQ ID NO: 202295 - protein, 841 aa, Oryza sativa
  unsure (1)..(841): unsure at all Xaa locations
  Clone ID: PAT_MRT4530_97589C.1.pep
MTTKATTLLLLLAAAAAALLCHIHVAVAAGEDPEPCDDGLCLVNDGLQIVKGSPVVFTYAASAPVSLAFDNASPRAVIPLARKKGPNLTERMVAAEAELVDLNQRVGELTSNLNELLGSLTKLETWIPSVDTGIQALNKAVEGIAARVTVLENLPAAASGMTTPTPIEHGEIENHQGDESKALAAQDRSLVKGKSRFPNSPITFDIGESSVQNQSSNRFQGPRLPKSDFPKFDGNNPKLWKNSKKYFEMYQVSYENWAKFATLHFVGNAALWLQTYEALHSVETWPELCIAVHSKFGKDKYQEHLEELEGLRQIASVEEYYTKPRTVDTALSLAKTXRGTCLGVEEGYSKAGLQRELQNNYQGKGILGHAPDDAGKTEEKPKWEDRFESLKASRRAKGECFKCGEKWGPNHKCPKSVQLHVLEELLEVLQIQENQEAGQDCESEGSDEELVVSEWSSSSFVAQHLVDSLSLAVLETAPAQVVIADGGMDWLEHFSPMWINWQRKKLRFTYQGKRITLTGVKENLSDCKSVTAKQLKGMFKSRAIAQVVQLCSIEEIETNEQLPPEISAVLQESQDQFQEPSRLPPHRDFDHNIPLMPNAKPVNAKPYRKNVLVFVDDIPVYSKSLAEHVQHLRQVFQILQHHQLFVKASKCSFAKQQLEYLGHIIGEHGVATDPAKVQAVQEWPVPKNLKQLRGFLGLTGYYRKFIRHYGVITRPLTELLKKDKSYNWTDAQQKAFCQVKMAMVQAPVSVLAMLDFSQEFVLETDAYDRGIGAVLTQNGHPIAYLSKALGVKAQALSTYEKECLAILMAVQKWRAYLQHSEFVILTDHRSLTHLGEQKLTT

SEQ ID NO: 202296 - protein, 70 aa, Oryza sativa
  Clone ID: PAT_MRT4530_9758C.1.pep
SAVLRYAVARVYLVVAPCSPLLRVLSPPTYVYAAPLPRRRCGAGLATASVVAYGLATPIARGGSWRMVGR

SEQ ID NO: 202297 - protein, 1038 aa, Oryza sativa
  unsure (1)..(1038): unsure at all Xaa locations
  Clone ID: PAT_MRT4530_97590C.1.pep
LETWIPSVDTGIQALNKAVEGIAARVTVLENLPAAASGMTTPTPIEHGEIENHQGDESKALAAQDRSLVKGKSRFPNSPITFDIGESSVQNQSSNRFQGPRLPKSDFPKFDGNNPKLWKNSKKYFEMYQVSYENWAKFATLHFVGNAALWLQTYEALHSVETWPELCIAVHSKFGKDKYQEHLEELEGLRQIASVEEYYTKFEELMHRVLVYNQAYDETYFVTKFVGGLKTEIKAAXYIKLHRPRTVDTALSLAKTQEELVLELKKGTQTEEKPKWEDRFESLKASRRAKGEFIADGGVLQCNKVATKVDWWCQGHSFTSDLKVLQLGGYDVILGMDWLEHFSPMWINWQRKKLRFTYQGKRITLTGVKENLSDCKSVTAKQLKGMFKSRAIAQVVQLCSIEEIETNEQLPPEISAVLQESQDQFQEPSRLPPHRDFDHNIPLMPNAKPVNAKPYRGLNDITIKNKFPMPVVDELLDELAGAKWFTKLDLRSGYHKIRLLPQDEHKTAFRTHQGLYEFRVMPFGLTNAPASFQGLMNKIFALMIRKNVLVFVDDIPVYSKSLAEHVQHLRQVFQILQHHQLFVKASKCSFAKQQLEYLGHIIGEHGVATDPAKVQAVQEWPVPKNLKQLRGFLGLTGYYRKFIRHYGVITRPLTELLKKDKSYNWTDAQQKAFCQVKMAMVQAPVSVLAMLDFSQEFVLETDAYDRGIGAHSEFVILTDHRSLTHLGEQKLTTSMQHKAFVRLMGLQYRIQYKQGSENKVAYALSRRDAQTELLAISVGRPKWLEIVVERYEQDDEAKQLLAQLILNPTGVEHFSLLNGVIRFQGRIWLGKFEDAHXAALLALHASGVGGHSGITATYNRKLFKLADVKLNMSSSYHPQTDGQTERLNQCLEAYLRCAVHSCPKHWSKWLSQVQHWYNTAYHSALDKSPYERIGEVAYKLDLPPQSQVHPVVHVSLLKKAIRPDVQVQADLPASCMAEDAAIFPEEILHRQLIKRGNAAVPYGLVRWTGLPAALATWENLXQLQFRFPSSPAWGQASS

SEQ ID NO: 202298 - protein, 565 aa, Oryza sativa
  unsure (1)..(565): unsure at all Xaa locations
  Clone ID: PAT_MRT4530_97591C.1.pep
MDISRTNEGYTSCGPVVEMSWHRAGVLLLGAQSCLPVPGVPAVGGVGRRRGRRCDVDGGDSDVGRCSGTAEGAAGGGAVAATPLFTGEDASPMVSPRNRGDVGEEDAPARPRVATAQPDGARSWWEVRLEENGPRGFHFRDEGREPTMAEVGTEVGMAAGGHGKRQGVRHNLIPLAMKKGPNLTERMVAVKAELVDLNQRVGELASNLNDLLGSLTKLETWIPSVDTGIQALNKAVEGIAARVTVLENSPAAASGMTTPTPIGHGETENHQGDESKALAAQDRFLVKGKSRFPNSPITFDIGESSVQNQSSNRFHGPRLPKSDFPKFDGDNPKLWKKNSEKYFEMYQVSYENWAKFSTLHFVGNAALWLQTNEALHSVETWPELCIAVHSKFGKDKYQEHLEELEGLRLIVGVEEYYTKPRTVDTALSLAKTQXGTCLGVEEGYSKAGASRRAKGECFKCGEKWGPGHKCXKSVQLHVLEELLEVLQIQENQEAGQDCESEGIHVSLLKKAIRPDVQVQADLPANCMAEDAAVIPEEILHRQLIKRGRDKSTPLQESRPRDSRRL

SEQ ID NO: 202299 - protein, 185 aa, Oryza sativa
  unsure (1)..(185): unsure at all Xaa locations
  Clone ID: PAT_MRT4530_97592C.1.pep
IKFEKRNLWKAKQLKDFRKANGLYFKCGEKYSPYHKCSLAGIAREGDEAAELCHISVFAIAGNSHXQAMRLMALVXNKVANGEFITYKHHIPKFTWWIQGFTSSYNMKLLPLEGHDAILVMDWLAQWGDMQCNWAEKCLXNFSTMATGVQTPASTTNLSEIFLQQVLKWHKGCDIWATALVEQTD

SEQ ID NO: 202300 - protein, 107 aa, Oryza sativa
  Clone ID: PAT_MRT4530_97593C.1.pep
EFVTSGIRAVIPLARKKGPNLTERMIAAEAELVDLNQRVGELASNLNELLGSLTKLETWIPSVDTGIQALNKAVEGIAARVTVLENSPAAASGMTTPTPIGHGETKN

SEQ ID NO: 202301 - protein, 54 aa, Oryza sativa
  Clone ID: PAT_MRT4530_97594C.1.pep
SIICSHHLRGLRPLIPFLSRYIFLKVVPHTTSLTVTRQILFSINLGSNIKLKLA

SEQ ID NO: 202302 - protein, 332 aa, Oryza sativa
  Clone ID: PAT_MRT4530_97595C.1.pep
MDFIEGLPKSEGYDTILVVVDKFSKFAKFIPLSHPFTALQVATAFIKNVYDIFGMPQVIISDRDKIFTSALWQELFKLADVKLNMSSSYHPQTDGQTERLNQCLEAYLRCAVHSCPKHWSKWLSQVQHWYNTAYHSALDKSPYEVLFARKPTPFGLIDVGDSMVPDVHVWLQERAHMNEVLHQQLTRAQQRMKYQADKHRSKRVFNVGDMVYLKLQPYVQMSVAKRSCQKLCFRYFGPYKILERIGEVAYKLDLPPQSQVHPVVHVSLLKKAIRPDVQVQADLPASCMAEDAAIFPEEILHRQLIKRGNAAVPYGLVRWTGLPAALATWENL

SEQ ID NO: 202303 - protein, 504 aa, Oryza sativa
  Clone ID: PAT_MRT4530_97596C.1.pep
MEETWLFLLFSISLVAVLLATARRRRSSSIKARLPPGPSPLLFLAKFLRLRRSIFDLGPLLRDLHARHGPVISIRLFGTTLVFVADRRLAHRALVQGGSTFADRPPLPELGRLFTSDTRDINSSPYGPYWRLVRRNLASEALSPARVALFAPARRRARDVLVRGLRDRGGDGSRPVELRPLLRRAMFELLLYMSLGARLAPEALEEVERLELWMLRAFTSFPVFSFFPAITKRLFRNPRAAHVAVRRRVGEIYVPLINARRAGDGDGDDPPCYTDSLLQLRVAEEGDRPLTDDEIIALCSEFLNAGTDTTVTLVEWIMAELVNRPDIQAKVHDEVRRRPELTEADLQAMPYLKAVVLEGLRLHPPAQFLLPHGVQSDAEVGGYVVPRGAELNVWVAELGRDEVVWTAAREFMPERFMDGGEVEVDVTGSREITMMPFGVGRRMCPGYTVGTLHAEYLVGSLVRELEWLPETKGEAADMAEELDFTTVMKHPLRARVLPRPSSLY

SEQ ID NO: 202304 - protein, 77 aa, Oryza sativa
  Clone ID: PAT_MRT4530_97597C.1.pep
MCSEPATGWVPGVNNGCSYITQTLLVSRGGPVPNSPYSESYYNSLAVVLQRRDWENPGVTQLNRLAAHPPFASWRNN

SEQ ID NO: 202305 - protein, 127 aa, Oryza sativa
  Clone ID: PAT_MRT4530_97598C.1.pep
KKEKKIFFFFFFPKGYNCKIGGLWGFFLLANPFFVKNFLKNPPRGELGLGPPKPPGGTPILGGGVKAQKFFILGAPWGDPLVPPEISYRPLAGTPFFFLGECLNMVEKMGNRFFRGKYFSTINCHKN

SEQ ID NO: 202306 - protein, 509 aa, Oryza sativa
  Clone ID: PAT_MRT4530_97599C.1.pep
MEARGDLRSILPYLPVVLRGGALFWPPAAQEALKALALGPDVSRVSSGDVLADALTDLRLALNLDPLPRRAAEGFALFFDDLLSRAQARDWFDHVAPSLARLLLRLPTLLEGHYRAAGDEARGLRILSSQDAGLVLLSQELAAALLACALFCLFPTADRAEACLPAINFDSLFAALCYNSRQSQEQKVRCLVHYFDRVTASTPTGSVSFERKVLPRRPESDGITYPDMDTWMKSGVPLCTFRVFSSGLIEDEEQEALEVDFANRYLGGGALSRGCVQEEIRFMINPELIVGMLFMVSMEDNEAIEIVGAERFSQYMGYGSSFRFTGDYLDSKPFDAMGRRKTRIVAIDALDCPTRLQFESSGLLREVNKAFCGFLDQSNHQLCAKLVQDLNTKDNCPSVIPDECIGVSTGNWGCGAFGGNPEIKSMIQWIAASQALRSFINYYTFESESLKRLEEVTQWILRHRWTVGELWDMLVEYSSQRLRGDTNEGFLTWLLPKDIPNGDVDYMCE

SEQ ID NO: 202307 - protein, 239 aa, Oryza sativa
  unsure (1)..(239): unsure at all Xaa locations
  Clone ID: PAT_MRT4530_9759C.1.pep
RPGPLGSREGAPEGGLAGTADGRTAHPRPDGRRRRPTARRSGTRERGGKGEANGAVHGSPRSTATTGTAAEAEEGGGAARDDEDDGVPAVGERSGGADEVDDDAAKPMEVTPXREEARSDVGGVPEVGGDGGERGGRREHESDGESKRRTAETEEGGTGSKYIAPRGGERGRRGRKRAXEISAPLKTPATIAEFKSDESEGEREGKEGETGEGIAGNDSPLIMARGDGGMRRNPRRRRR

SEQ ID NO: 202308 - protein, 50 aa, Oryza sativa
  Clone ID: PAT_MRT4530_975C.1.pep
ESELETLEWSNNSIKSLDVWGRDGHLLDTLGDAPVVRHLQHRHGLMHHLR

SEQ ID NO: 202309 - protein, 241 aa, Oryza sativa
  Clone ID: PAT_MRT4530_97600C.1.pep
MPSALAALTALASASMLGVLTALAEVAPLLLPPSCQARLPTSSPVMPPVTPLSPPPPCFALSRPTYMRGYCFGKLRDWLEELRYRDGDTLFGAPYDFRYAPPVPGQTSEVYSRYFDELMAPVEAATKKKRKKAVIVGHSYGGMVAVEFIPSTPRAWQGEHIERLILVAPTLPYGFLGSVGSSSILLLTATSTARSVRPMWRSFESAMANFPSPAVFGREPLVITKKRNYSAYVMEDFLAAG

SEQ ID NO: 202310 - protein, 85 aa, Oryza sativa
  Clone ID: PAT_MRT4530_97601C.1.pep
FFRFLLVSSPLRGRGRFKSRERAPAPGAGAVARPVASPRILASLHPLPYAHPLPHLSLVSSHALLLEFAKNPMDSVLESCLNLTN

SEQ ID NO: 202311 - protein, 73 aa, Oryza sativa
  Clone ID: PAT_MRT4530_97602C.1.pep
MRRQQQHRSRKGDGGGRWTGIGGGCIESLWLGGGGGFGGEEPSEARKTAERGHLATDGSRRKRGGWQEGGWLG

SEQ ID NO: 202312 - protein, 40 aa, Oryza sativa
  Clone ID: PAT_MRT4530_97603C.1.pep
SQRIRNNHCSDREYSTSASPFTGLESYLYAIYENDSAHRS

SEQ ID NO: 202313 - protein, 712 aa, Oryza sativa
  Clone ID: PAT_MRT4530_97604C.1.pep
MPWEYAPYDPYPSSFPNVTFPNYYYMKASSTPANTVYQEPYGYGNFAANVSYNGYDYGYSNPMYGIPVPPDGERLAEDRAREAAAAAAPAPPPPMPMPEVSPWDFFNPFDSYDYNQQLPQYKDANGSFTSSPNSSEVREREGIPELEEETEQESMRESIKARKAVESTASTRIDNADAVNAKAKTASMEHKECEIESVGSASVLDSGEESVCSCECDHADGNAGAGAATAAPAGDDPRMVKKVASEEHSSMVVAEDVLPKNFGTRDVADVVNEIKEQFNSVVACGDDVARILEVGSMRYRPRRRIVRLVFSRLMGAFALLFSSVSEPPVENLEQTALSASGRNHNSSQRIGSASDIEFNTLSSVMDRLYVWEKRLHKEIMEEEKLRITYDKQWKRLKELDDNGAEPYKIDSTRASISTLLTRINITIRSAKVISRRIHILRDDELHPHLVKLIQGLVRMWKFILECHRKQFHAILETKSHVLIPKNGPERNSKITLELEMELLNWCSCFSNWILSQKAYIETLNGWLVKWLPEEKEETPDGIAPFSPGRLGAPAVFITANDWCQSMKRIPEGTVIGAMEAFAVNVHMLRERQDEEQQQKLKADYLSRDYAKRLKSFQKEHGLAGHHEADKTVLPVAENNRAVDSRIVALDALHKRLDEQRSRHEEAVNQIQESSATDLKAGLGPIFEALESFTQDTLKGYENVRIPINGCGA

SEQ ID NO: 202314 - protein, 201 aa, Oryza sativa
  Clone ID: PAT_MRT4530_97605C.1.pep
EEDDDTEPRCWIHRKSEPAPQASTAAADLSWTGKAKNRSPTCDLWSRCSRCGWIASILVVLGARDDVARAARAAGRAKTSCRISISEICLDRPYPVPSEAGRRDLARSLISSGVSSRRKATLLSTTSHTFRPPCRQQLDRLPYILYCLAYILAPTIPILCKYQNCDIKSRHLPTSGQTSDVTPKKCDTQKFSFPQLNTPLV

SEQ ID NO: 202315 - protein, 1218 aa, Oryza sativa
  unsure (1)..(1218): unsure at all Xaa locations
  Clone ID: PAT_MRT4530_97606C.1.pep
MVVAEGEIESLGSRVTKLTSNLNNILGSLQGLEKWIPNVDAGIKSLHQAVDEISSRVTALETKPAESPATATPPPFGHGVNDGYQGDTYEIPAIQERTLVKESWAELVMAVHSKFGKDKYQEYLEELENLSQVTSVESYYSKFEELMHKLLVYNKGFDETFFVTKFVGGLKTEIKAAIKLHKPRTVDAALSLAKTQVELLGEIHKKSYQRHSFKEVFKPVNKMPFQGKGILGAAPEDNKKAEEKSKWEEQFDSLKAARRARGECFKCGEKYGPGHKCPNFRRIXKSEEGDAESSEEELVLSECAAAGTMGRKTIKFHGXIQKQQLLILVDSGSSKLFLQXEWWCQGQTFVTDFKVLTLSGYDMILGMEWLETFSPMWVDWRRKKLRFTYHNQRLTFIGVKDQINSGKLIIAKQMQGLYKDGAIAQIVQLCQAEVPAHAGQTYPAEIDQVIAEFKERGLNEITVKNKYPMPVVEELLDELADAQWFTKLDLRSDDILIYTSKCSFAQQHLDYLGHVIGIHGVSTDPKKVMAVQHWPIPKNLKQLRGFLGLAGYYRKFIKGYGILTKPLTELLKKDVKHKWEQQEQTAFDAVKMALTQSPVLALPDFSKQFVVETDASDKGIGAVLMQQGHPIAFISKALGVKSQMLSTYEKEFMAILLAVNKWRSYLQHAEFVIQTDHKSLTHLNEQQLGTSMQQKAFVKLMGLQYVIKYKKGAENQVADALSRRGEEECVAITVSTPRWMELVVEEYHNHPQTKQLLASLCLNPEGEDGFQLVNGVIRFHGKIWLGHHPEAQQSVLLALHNSGVGGHSGITATYHRIKGLFAWPGLRKAVQTYVSQCEICQQAKVEHCKTPGLLQPLPVPLQAWHTVTMDFVEGLPKSGGYDTIMLVVDKFSKFAKFIPLTHPFTAYTVALAFIQHVYDVFGMPQVIISDRDRIFTSALWQELFRLADVKLNMSSSYHPQTNGQTERLNQCLEAFLRCTVHAIPSKWSGWLSQAQHWYNTLFHSVLGKSPYEVLFARKPTHFGLVDTGSITVPDVQIWLQERAQMNEVLHQQLTRAQQRMKHQVDKRRSERQFAVGDSVYLKLQPFAQMSVARCSCQKLSFRYFGPFTILEQIGKVAYRLVLPASSHIHPVVHVSLLKVAVKPDVEVSPELPLQEAEVAVGVLPELILRRNLIKRGKTVVPYVLIKWTGMPTELATWENLCQLKSRFPHAPAWGQAGP

SEQ ID NO: 202316 - protein, 688 aa, Oryza sativa
  unsure (1)..(688): unsure at all Xaa locations
  Clone ID: PAT_MRT4530_97607C.1.pep
APRLVEQDEATTAFRTHQGHYEFKVMPFGLTNAPATFQRLMNTIFSAVIRKFVLVFVDDILIYSKSLEEHVDHLRTVFQLLQQHGLFVKANKCSFAQQHLDYSGHIIGVHGASTDPEKVMTVQHWPTPRNLKQLRGFHGLAGYYRKFIKGYGVLTKPLTGLLKKEVKYKWKRXEQTAFDAVKMALTKSLVLALPDFSKQFVVETDASDKGIGAXHPIAFISKALGVKSQMLSTYEKECIAILLAVNKWRSYLQHAEFVIQTDHKSXQLGTSMQQKAFLKLMGLQYVIKYKKGAENQVADALSRRGEEECVAITVSTPRWMELVVEEYQNHPXTKQLLVSLSLNPEGEDGFQLVNGVIRFHGKIWLGHHPEAQQAVLLALHNSGVGGHLGITATYHRIKGLFAWPGLRKEVQTYVSNVKSASKTPGLLQPLPVPLQAWHTVTMDFVEGLPKSGVYDTIMVVVDKFSKFAKFIPLTHPFTAYTVALAFIQHVYDVFGMPQVIISDRDRIFTSALWQELFRLADVKLNMSSSYHPQTDCQMEXLNQCLEAFLRCTVHATPSKWSGWLSQAQHWYNTSFHSVLGKSPYEVLFARKPTHFGLVDTGSITVPDIQIWLQERAQMNEVLHQQLTRAQQRMKHXADKRRSXRQFAVGDSVYLKLQPFAQMSVAQRSCQKLSFRYFGPFTILEQIGK

SEQ ID NO: 202317 - protein, 114 aa, Oryza sativa
  unsure (1)..(114): unsure at all Xaa locations
  Clone ID: PAT_MRT4530_97608C.1.pep
TIEPNHTRASGGGLALSQRGVVLSSDWLILINYYYSFTAFNYCFXMPALCKXTFSLLWIYLASYLLFWYDLLSAVDSTQSCSLXPHTRAEVLLSWAXLREVGFVAAVKLRNSGS

SEQ ID NO: 202318 - protein, 190 aa, Oryza sativa
  Clone ID: PAT_MRT4530_97609C.1.pep
MQARRHRGFRLGRKLLGLWRWALCHRRRRRGRGYLRLQPCPGAAGGRSPLLAAGSVKKQPPPPQQQIVVHQRGGEKAVLKWGRSLARRMRLLRRRGSERLLEESPGEATTPKGQVAVYVGGGEPGESMRYVVPVVYFNHPLFGELLREAEEEFGFAHPGGITIPCAAARFERAAAVAAAGGGGRKVPTWW

SEQ ID NO: 202319 - protein, 1355 aa, Oryza sativa
  unsure (1)..(1355): unsure at all Xaa locations
  Clone ID: PAT_MRT4530_9760C.1.pep
WEGSARSWLMYXPPYSISSWSDLWQQFVANFQGTYKRHAIEDDLHALTHNSGESLREYVRRFNECRNTIPEITDAYVIRAFKFGVRDRYTTQELATRRITTTRRLFEIVERCAHVDDALRRKNDKPKTGGEKKSAADTSESNKKKNRKNGKRKAQAEVLAAEYANPPKHPDPQGSETKKSWCPIHKTDRHSLEDCLVFKKSPEKHMAFEKGKRVRVVEKNEESPPHESDFAYPDSDLHFSEADHPKTSVIPGRYPIVVEPTIRNIKVARVLIDGGSSINLLFATTLDAMGIPQSELTPTDQPFHGITPQSSSRPLGKITLPVTFGQANNFRTEQITFDVAEFDTAYNAIIGRTALAKFMAASHYAYQVLKMPGPKGTITIQGNAKLAVQCNKRSLDMVEQTPTPPAMSEPPKKELALIAFLRDNADVFAWQPSDMPGVPREVIEHKLMVRPDTKPVKQRLRRFAPDRKQAIREELDKLLKAGFIREVLHPEWLVNPVMVRKANGKWRMCVDFTDLNKACPKDHFPLPRIDQLVDSTPGCELLSFLDAYSGYDQISMAKEDEEKTTFITLFGVFCYVKMPFGLITVGNTFQRTVQGALSNQLGNNVEAYVDDIVVKTKTSDSLIDDLRETFDNLRRYRLMLNPEKCMFGVPSGKLLGFLVSGRGIEANPEKIKAIENMKSPTRLKEVQKLTGCMAALSRFVARMVERGQPFFALLKKQDKFVWTQEAEEAFIALKRYLSNPPVLVAPQPNEELFLYIAATPHSVSTVIVVEREKVQRPVYYVSEALHDAKTRYPQIQKLLYIVIMTSRKLRHYFQAHRVTIVSSFPLGEVVRNKDVVGRIAKWVVELSQFDVHFVPRTAIKSQVLADFVADWTMPDNKSDNQGDNETWTMAFDGALNSQGAGAGFILTSPSGDQFKHAIHLNFRATNNTAEYEGLLAGIRDAAALGAKRLIVKGDSELVANQVHKDYKCSNPELSKYLAEVRKLEKRFDGIEVRHVYRKDNVEPDDLARRASRREPLEPSTFLDILTKPSVKEVSGEVGPSTLDISSEVIAAERAVADIETTDDWRTPLIKFISSEELPEDDTEAEKITRKAKIYSLKDACDMQTHKATCTSASNNPSDLAYXVPRRRKTWPIPTRTRRLQIPIXVAIDKFTKWIEAAPTGEIMADNAIKFIRGIFCRYGLPHRIITDNGSQFISADFQDYCIGLGVKICFASVSHPQSNGQVERANDIVLEGIKTRVYDRLMSHDKKWVEELPSVLWAVRTTPTTSNKETLFFLVYGSEAMLPGELRHQSTRVQKHSDKKQDEQRDIYVNLLEEHRERVAVRAASYQQALRRYHEKRIRARILSIGDYVLRRVQT

SEQ ID NO: 202320 - protein, 176 aa, Oryza sativa
  unsure (1)..(176): unsure at all Xaa locations
  Clone ID: PAT_MRT4530_97610C.1.pep
NDRTRCSSIEHHSFACADLLWYTKGHAKCKFFLWFAFQXHYWTADLLQKRGIDSHSVCPFCAXXLETANHILLDCVFARQVWLRVLSPPGWAAISPLRGSWLQDEWPSSRACLLDHLRASFNSLVLLVSWQLWKERNSRVFDFALFSVSMVLESILSEGWLWFLAGVASFGDLLGV

SEQ ID NO: 202321 - protein, 179 aa, Oryza sativa
  unsure (1)..(179): unsure at all Xaa locations
  Clone ID: PAT_MRT4530_97611C.1.pep
GNLETQTDVSPIKNVRRGRDDDNVQQHTETTTLDEPRIRLDWIKENLTGEQHRSDCVAEWVDSKSEPFVCLALKPSPQKCRLSKKKYTFDWTMXDHIFDDLLKNDYIKLHDHYVMPSLPDLKEQIYCKWHNSFDHCTSDYNIFRQKIQSANNEGRLHFATPRKSYAKDNPYWIRSIDDS

SEQ ID NO: 202322 - protein, 185 aa, Oryza sativa
  Clone ID: PAT_MRT4530_97612C.1.pep
MWAPHASSPFLLPPLPSLFLSPSPLRPSVGSERRRRPWAGAEAAAARRSSRTTTTRTTRRPASRRRRRPSGGGNSPRAAAVGGGGREKQWEDKGNGGGRQKQWEDEGNGGRREKQATAATSTLTAEMAMGGSCVAADEANGSCDEDEAMSARGGGGSCSWRGRGGGSCELVKLQLDLYLRESAAP

SEQ ID NO: 202323 - protein, 708 aa, Oryza sativa
  Clone ID: PAT_MRT4530_97613C.1.pep
MSAAASWTAEDDVLLKNAVEAGASLESLAKGAVCFSRKFTLQELQDRWSSLLYDSETSGQASALIVKYETELSTSNPTKAHKLFYVRRKHLSLRKRKIESVKNQYYAMRKRICHDPCLAADFGYVITPCSCPVGSDCVCDGLFNLLEDNHLIHNVNQAPDVKFQGVNAPDMLTDVHHKEQEILAFSDDKKKETTNIDTFSCKVNVENGMSGSGLDDATEGEVMHSCLMDASQGEDFELLNSENILDSSLDPNLEGLGDRHANVILKDISKEHLLDIPHVSSACGNNTDPIHEKHDVADISGVDMIYTTEVPFPCAGIVCILNTEDPEIPCNDDIFTPGPVASTSTCDQNSQHNMHLVSAKPIPPLNAADLNHTDLVSDVQPLLLTMKLEPYTLEQKETLVGLNESCTVRSKSPVMPVDASNANACTSTFHSAAEFVKKSTCGLVQHECFDNLGSVSLDECIGVLDEMNSKVPDESGISCDATTQNSISAHALPDVEFLNPITTTSSPEGGGSDSEDGIPNYFDIEALILDQDLIPWDQESDFIQLEVSRFQSLESRKDLIRLERGARSNTNRSIMSHGAFAVLYGQHLKYYIKDPEVTLGRETSEEHVDIDLGKEGKANTISRQQAIIKMDKGGSFHITNIGKAPIFVNSKEVPCNECTHLISDALLQIRHMKFIFHINQDAVRQHIVRSRRGTSQGKYAVFNWDEKP

SEQ ID NO: 202324 - protein, 568 aa, Oryza sativa
  Clone ID: PAT_MRT4530_97614C.1.pep
MAADGDHCRLPDDSLFLGFDCSTQSLKATVLDAGLTAVAHDAVHFDSDLPHYATHGGVLRDPSGGDPGRVVSPPLMWAEALDLLLARLAPRVDYARVAAVSGGAQQHGSVYWKRGAAAVLASLDPARGLAPQLAAALATTESPVWMDSSTAAQCREVEAAVGGALELARMTGCRAHERCTGPQIRKMYQARRRVYDDTERISLVSSFMASLLVGGYACIDETDGAGMNLMDITTRELRRDALEATAPDLEDKIGKLAPAHAVAGTLSPYFVQRFQFSSNCLVVQWSGDNPNSLAGLTLSDPGDLAISLGTSDTVFGITDLPEPSLDGNILPNPVDPKTYMVMLCYKNGSLTREDVRNRYADGSWDVFNKHLENTAPLNGRKLGYYYNEPEILPPLPVGFHRYVVSSSASGSLDEMVEHQINQFDPPSEVRAIIEGQFLSMRGHAERCGLPVPPKRIIATGGASSNQIILKTMASIFGCSVYTVQRPDSASLGAALRAAHGWICNQKGKFVPVSCLHSDRLNRTSLSIKLAAPFGDSEEDIDLLNNYTLLMKKRLEIEQKLVEKFGRHS

SEQ ID NO: 202325 - protein, 83 aa, Oryza sativa
  unsure (1)..(83): unsure at all Xaa locations
  Clone ID: PAT_MRT4530_97615C.1.pep
PSHLAARRRGGAAPMNTSXFMDKQILGLAASAXTSSGVGVGGGGPELLDLMSPNPQEEGEDXLRRRHSSSNGXXDDVLPATTC

SEQ ID NO: 202326 - protein, 252 aa, Oryza sativa
  Clone ID: PAT_MRT4530_97616C.1.pep
MPDRRSPHGPYARGAVRCMGARCVQQQGRIQLAARPAGGRGSRWLQGKEEHDTVHTYGVREESERRSSHPSVPASAQPIDQAPVWGHTSMRRTWAATCALLSVNREALGAACRGGGRGQIGAILRWCGLDVLEAADIGSGYLAVYPDREIFQCRGWKTPAQNAEKRMEDPAKCRTKSALRVRVTFQEEEEAPQNEDQRRPWNAPVQSYRGPHGRGPCELICLQGKKKNKKKKYTHGRARLLPYAPSQRKPLP

SEQ ID NO: 202327 - protein, 209 aa, Oryza sativa
  Clone ID: PAT_MRT4530_97617C.1.pep
MAASSSKKKEEEEVAVVAARKGRLRQRYDGEYRLVAGCVPYRVVAAGGGGGGGELEVLMVSTPNRADLVFPKGGWEDDEDVYEAACREAMEEAGVKGNINVMSLYRNNASRSPRGGACKGYMFELEVTEEMDRWPEQATHGRRWLPPADAFRLSRYGWMREALAALLDRRCLLLLPPPQPEPSEHAGVYGLAMLKAAAAAAADRAVALC

SEQ ID NO: 202328 - protein, 368 aa, Oryza sativa
  Clone ID: PAT_MRT4530_97618C.1.pep
MKAPAAAAAAVGNRAGGVDPSIPRFKCQECHRALVVVGVDSFADKLPAQATSAHASSVHGSIMGASRMDNSYVVLSKQNKSHGHGIPPRPPSAAAPHIEPNQPTRAMEGSYIVLPPAAASIYKTSTSEGGGAQLPPPSINSSSLLPGNSFHSNVTVLKRAFEIATSQTQVEQPMCLDCMRLLSDKMDKEIEDVNADIKAYEVCLQHLEQESYNVLSDAGFQKEKLKIEEEEKKLNAAIEEAEKQYSEISSEMKDLEIKSKEFEELEERYWHEFNSFQFQLTSHQEERDAILAKIEVSQVHLELLKRTNVLNDAFYISHDGVIGTINNFRLGRLPNVQVEWDEINAAWGQAALLLHTMAQYFTPKFEYP

SEQ ID NO: 202329 - protein, 55 aa, Oryza sativa
  Clone ID: PAT_MRT4530_97619C.1.pep
GLSNGYLTVCILTEAPKGYKGPEQNALGNLLVLSLLGGIFCGAILDWLWLIGKGW

SEQ ID NO: 202330 - protein, 870 aa, Oryza sativa
  unsure (1)..(870): unsure at all Xaa locations
  Clone ID: PAT_MRT4530_9761C.1.pep
PPNLRPYRVPHYQKAAMENIITDLVESKEIQESESPYASLAVMVRKKDGSWRLCVDYRELNSQTVKNKFPMPIIEDLLDELHGARIFSKLDLRLGYHXIRMAEQDVHKTAFRTHMGHYEYQVMPFGLTNAPATFQSLMNQVLKPFSRKFELVFFDDILIYSRSKEEHLDHLKLVLQVLKENDLVIRLKKCAFGLSEVSYLGHVILQNWVATDPKKVDKISRWPIPTDVTELRKFLGMIGYCRRFIKGYGVICRPMHDMLQKQGFQWGPEQTAAFNELKSKMCTSLVLAMPDFSKEFXVEADACGSGIGVVLMQSGRPIAFLSKSLGPKADGQSVYEKEAIAILEAIKKWRHYILGGKLVIRTDQQSLKFMMNQRLVEGIQHKLMLKLMEYDYSVEYKQGKQNYVADALSRMPIIQEKEEESCQAITIVVPDWIEDIKRSYDDDVQAHKLLSLVGTEADPNGEYRXRIWIAEVQREDICWPGHXIRTELLRACHASSFGGHSSMRATYHRIKLLFYWPRLKKEVENFVRECPTCQVTKGENVHIPGLLEPLEIPDMAWSHITMDFIEGLPMSRGKDVIFVVVDRLTKYAHFLALSHPYAVEQVVEDFMDNIHKLHGMPNAIITDRDRIFTSGLFHKIFKAKKVQLRFSTAYHSQTDGQTERVNQCLESYLRNMTFQETKNCSPWLALAEWWYNTTYHTAIQMTPFKAXYGYSPTQINEFSIPCNVSAEGRMTLEEKEAILQKLKGSMELAQKRMKYFAGKNRTERVFETGDMVYLKLQPYRQTALRIRGSLKLRSKYYGPFKIIQKVGKVAYKLQLPAEAQIHPIFHVSQLKRHLGTHAIPMANLPAAGPDGQIKTEPVAILQRRMVPRRW

SEQ ID NO: 202331 - protein, 96 aa, Oryza sativa
  Clone ID: PAT_MRT4530_97620C.1.pep
MVCAKCEKKLGKVIVPDKWKEGASNTNESGGRKINENKLLSKKNRWTPYGNTKCVICKQQVHQDAKYCHTCAYSKGVCAMCGKQVLDTKLYKQSNV

SEQ ID NO: 202332 - protein, 463 aa, Oryza sativa
  Clone ID: PAT_MRT4530_97621C.1.pep
MPNPLFFLLLLAAAAAATAGAGEGGATRKDPCAGRRIHIRRLPPRFNAHLLRHCDAGFPLADPSTPATSSPPCESLVNHGLGPRTHSSSRSWYRTDTRLLEVFFHRRVAERGCLVADPALADAVYLPYYAGLDSLPYVLDPALLDSSAQHGAELAEFLARDRPQILARRHGHDHFLVLAGSAWDYSQPVRAAAAAAAEARLWGTTSLLRLPALGNLTFLTLESRAWPWQEHAIPHPTSFHPASLPRLRAWLARARRARRPALMLFSGGVSRPSRPNIRGSILAECANRTDACVVVDCSGGRCSHDPIRYMRPMLHSRFCLQPPGDTPTRRSTFDAILAGCVPVFFEDAAARRQYGWHLPPERYDEFSVYIPKESVVFGGVKIAETLAAVGEGEVRRMRERALEMAPRVLYRRHGSTAELSETAKDAVDLAVDGALRRIRRRVRALDDGEPERIYSLEDDAVES

SEQ ID NO: 202333 - protein, 39 aa, Oryza sativa
  Clone ID: PAT_MRT4530_97622C.1.pep
LYHKGHLVHHGNVEDGRAVTSSRNHKMSFCQLVLSTQIN

SEQ ID NO: 202334 - protein, 383 aa, Oryza sativa
  Clone ID: PAT_MRT4530_97623C.1.pep
MAPEEALRYAKKEIMAAGPVIDDPDLYAPLFKNVSQFKRSYELMERILKVYIYQDGRRPIFHTPPLSGIYASEGWFMKLLKESRRFAVTDPAKAHLFYLPYSSQQLRISLYVPDSHNLRPLAAYLRDFVKGLAAKYPFWNRTRGADHFLVACHDWGSYTTTAHGDLRRNTVKALCNADSSEGIFTPGRDVSLPETTIRTPRRPLRYVGGLPVSRRGILAFFAGNVHGRVRPVLLKHWGDGRDDDMRVYGPLPARVSRRMSYIQHMKNSRFCLCPMGYEVNSPRIVEALYYECVPVIIADNFVLPLSDVLDWSAFAVVVAEKDVPDLKKILQGITLRKYVAMHGCVKRLQRHFLWHARPLRYDLFHMILHSIWLSRVNQIELHE

SEQ ID NO: 202335 - protein, 99 aa, Oryza sativa
  unsure (1)..(99): unsure at all Xaa locations
  Clone ID: PAT_MRT4530_97624C.1.pep
MTIFSFNILKQAQECYEITMEYXGSHELDELGNMLTSXENDGSTVMAKAFSPVLNLANLAEEVQIAYWRRINLKKGDYADENSAPTESXIEETFRPYSF

SEQ ID NO: 202336 - protein, 77 aa, Oryza sativa
  Clone ID: PAT_MRT4530_97625C.1.pep
EGILSPSTVVLAGLHIDFHSSVKTELSSFKKKNRVVFLIRYHSNCVFSANWLSLRSSRSHSLLCLASSNASYPFFFF

SEQ ID NO: 202337 - protein, 744 aa, Oryza sativa
  Clone ID: PAT_MRT4530_97626C.1.pep
MATGVAPAPLPHVRVRDGGIGFTRSVDFAKILSVPATLRVGSSRGRVLVAKSSSTGSDTMELEPSSEGSPLLVPRQKYCESIYETRRRKTRTVMVGNVPLGSDHPIRIQTMTTSDTKDVAKTVEEVMRIADKGADFVRITVQGRKEADACFEIKNTLVQKNYNIPLVADIHFAPTVALRVAECFDKIRVNPGNFADRRAQFEQLEYTEDDYQKELEHIEKVFSPLVEKCKQYGRAMRIGTNHGSLSDRIMSYYGDSPRGMVESALEFARICRKLDFHNFVFSMKASNPVIMVQAYRLLVAEMYNLGWDYPLHLGVTEAGEGEDGRMKSAIGIGTLLMDGLGDTIRVSLTEPPEEEIDPCRRLANLGTHAADLQIGVAPFEEKHRRYFDFQRRSGQLPLQKEGEEVDYRGVLHRDGSVLMSVSLDQLKAPELLYRSLAAKLVVGMPFKDLATVDSILLRELPPVEDAQARLALKRLVDISMGVLTPLSEQLTKPLPHAIALVNVDELSSGAHKLLPEGTRLAVTLRGDESYEQLDLLKGVDDITMLLHSVPYGEEKTGRVHAARRLFEYLETNGLNFPVIHHIEFPKSVNRDDLVIGAGANVGALLVDGLGDGVLLEAADQEFEFLRDTSFNLLQGCRMRNTKTEYVSCPSCGRTLFDLQEVSAQIREKTSHLPGVSIAIMGCIVNGPGEMADADFGYVGGAPGKIDLYVGKTVVQRGIAMEGATDALIQLIKDHGRWVDPPVEE

SEQ ID NO: 202338 - protein, 57 aa, Oryza sativa
  unsure (1)..(57): unsure at all Xaa locations
  Clone ID: PAT_MRT4530_97627C.1.pep
LXTIWQGSQGXADTRWWVVIGQPWNVSXEEHAMHYAAFLSCVSYVMQCENAADAAAV

SEQ ID NO: 202339 - protein, 957 aa, Oryza sativa
  Clone ID: PAT_MRT4530_97628C.1.pep
MDTLAVGTLQPFRLVPLLSEIGNLLIGFRRVRMGFKNRRGPGYRHPAVRRLPAVTAGGAWKQSGVADHVGYLGGGGGALVGRARRARLCLYGLALAFGAFAAFLAFAPSLPAPPPSSPAAAWFDGLLASASPYRAQVSGYFSSLFPANSTSPEPPGGAATNRRGSSGGGGFSATGGQAGTNGSSTVVAGEQGRGVEVSSSNAGGVPSGNSPSGNATAAMQSNPPPNDQAGGGAAANNSTTGSAGEAAVPSRSSARNGTMTKDGAPDRINGTDVIASSSGDVTAVKANARNAAGSTHQLGGASAIVDSSNGTAAPSINKTGNAAVATDGNGAAPQRGGAPGKNQTVPNPPAALDQNKSGSRAAASGGSNSTMDATPQGIASNTTEAAVDAGGKKKKTHWIEAMASCDMFYGNWVRDDSYPLYPEGSCPHIDESFNCPLNGRPDNAYQRLRWQPSGCSIPRLNPSDMLERLRGKRLVFVGDSLNRNMWESLVCILRNSVKDKRKVFEVSGRQQFRAEGSYSFLFQDYNCSVEFFRSPFLVQEWEFPVRKGLTKETLRLDMISNSFPRYKDADIIIFNTGHWWTHEKTSLGKDYYQEGNRVYSELNVDDAFQKALITWANGGQWNSGGSCDKETEPITNEKFLTPYPRKMSILEDVLSGMKTPVVYLNITRMTDYRKEAHPSVYRKQKLTEEEKKSPQIYQDCSHWCLPGVPDSWNELLYAQIMALSSLHPSSDPSTAPQPPPRNHGRYWLSVDKVDEEEKKSERLHLHPNADLADDDSSAAMRAAAALPLFPQDNAVVECSKIRPRGGAQQGAADGHRSLENGHYSKPDPAIRSTTGERLVNGVVRAMPVAANAKEETKNDGGGGGGAKKRRGPAVLMEGSRCSRVNGRGWRCSQPTLVGYSLCEHHLGKGRMRSVTGGRGGAGQLGRTEPRKNTAAAAVAAAPKAAAAVAEPPVVRPC

SEQ ID NO: 202340 - protein, 86 aa, Oryza sativa
  Clone ID: PAT_MRT4530_97629C.1.pep
VSVHWKKTSSSILLCCEIGVAKLRKMFLSVQIRLQRYRLRIVSHYNVLHIYTVRFLWNIFASCMCNESSETARYCPYWNTNLQLSF

SEQ ID NO: 202341 - protein, 109 aa, Oryza sativa
  Clone ID: PAT_MRT4530_9762C.1.pep
RWSREIQIKADLNLLPFSGCPTDAVPSQECPHLTVTMLLLVRVWHSISVLYLTFSWKDGNGILLGAYVSNPKKHSGGKKRTDSCTDDFVTKNYLPGTGLLNPCMLFCCC

SEQ ID NO: 202342 - protein, 247 aa, Oryza sativa
  Clone ID: PAT_MRT4530_97630C.1.pep
MRIRRRPQSLQALSSLHPSSDPSTAPQPPPRNHGRYWLSVDKVDEEEKKSERLHLHPNADLADDDSSAAMRAAAALPLFPQDNAVVECSKIRPRGGAQQGAADGHRSLENGHYSKPDPAIRSTTGERLVNGVVRAMPVAANAKEETKNDGGGGGGAKKRRGPAVLMEGSRCSRVNGRGWRCSQPTLVGYSLCEHHLGKGRMRSVTGGRGGAGQLGRTEPRKNTAAAAVAAAPKAAAAVAEPPVVRPC

SEQ ID NO: 202343 - protein, 756 aa, Oryza sativa
  Clone ID: PAT_MRT4530_97631C.1.pep
MDTLAVGTLQPFSCTPAPVVNGSNLLQFVVMIRRLLTVDQGFKNRRGPGYRHPAYQMKGGAWKQSGVADHVGYLGGGGGALVGRARRARLCLYGLALAFGAFAAFLAFAPSLPAPPPSSPAAAWFDGLLASASPYRAQVSGYFSSLFPANSTSPEPPGGAATNRRGSSGGGGFSATGGQAGTNGSSTVVAGEQGRGVEVSSSNAGGVPSGNSPSGNATAAMQSNPPPNDQAGGGAAANNSTTGSAGEAAVPSRSSARNGTMTKDGAPDRINGTDVIASSSGDVTAVKANARNAAGSTHQLGGASAIVDSSNGTAAPSINKTGNAAVATDGNGAAPQRGGAPGKNQTVPNPPAALDQNKSGSRAAASGGSNSTMDATPQGIASNTTEAAVDAGGKKKKTHWIEAMASCDMFYGNWVRDDSYPLYPEGSCPHIDESFNCPLNGRPDNAYQRLRWQPSGCSIPRLNPSDMLERLRGKRLVFVGDSLNRNMWESLVCILRNSVKDKRKVFEVSGRQQFRAEGSYSFLFQDYNCSVEFFRSPFLVQEWEFPVRKGLTKETLRLDMISNSFPRYKDADIIIFNTGHWWTHEKTSLGKDYYQEGNRVYSELNVDDAFQKALITWAKWVDSSVNPKKTTVFFRGYSSSHFSGGQWNSGGSCDKETEPITNEKFLTPYPRKMSILEDVLSGMKTPVVYLNITRMTDYRKEAHPSVYRKQKLTEEEKKSPQIYQDCSHWCLPGVPDSWNELLYAQIMVKQHQMLHQ

SEQ ID NO: 202344 - protein, 250 aa, Oryza sativa
  Clone ID: PAT_MRT4530_97632C.1.pep
MIQLMFTVLTAEAAVAIALLFKTPVRKLAMLGLDRLKRGRGPVMVRTVAATVLVVLASSVHSMNKIRGRAAGELDGAGAGTLTPTDQVLLARHLLEASLMALKLVNLLTSAKYLNLYGGTIKGYSLFLALVIDRLHNYIREVRGLKRNLEAASKLNKTLDEAKLIGSSDESKTYQKDIASLNEEIKKMKRQLKEKANEAKDAEAKALAAQKQSEGLMIEYNHLVEDNKHLHDQLESADLTVSRSDGKKNT

SEQ ID NO: 202345 - protein, 141 aa, Oryza sativa
  Clone ID: PAT_MRT4530_97633C.1.pep
MSATATQETAPAAAAGPYRPEKMKLLYHHAISNAPYLMLAAAAAAVALRASRLAPADDLATARELLATNLPLAVALLAAAVVLATAYLMRRPRPVYLLDFACYKPGPEHVVTRETFMEQSAAAGAFTGDSLAFQRKILERS

SEQ ID NO: 202346 - protein, 87 aa, Oryza sativa
  Clone ID: PAT_MRT4530_97634C.1.pep
TGQEFDILKTIFRASVLRVHKSKFAQFIMFYACSLDPEICGLEFALFLSDIFIKKEEDSISRMSAVSYVGSYLSRARFISCDTGVGI

SEQ ID NO: 202347 - protein, 570 aa, Oryza sativa
  unsure (1)..(570): unsure at all Xaa locations
  Clone ID: PAT_MRT4530_97635C.1.pep
MGAELRRDDMEVAEEDISDSQAFRFVEHVLQSVRMDPFQVDLRDKEEYDSLLSIVDSSKKRSYDDEALLVTTLKALSEAVSKIDIMYHHALLNNAAVADQFLRECLQMLVNNFTPPGSLTAFIGQPNHQVFNKEIYSQLHESLRMISDTVPLAPRMLKDIIDRSMPKLFHHKANLKVFVASIVGDDNDRMGDLIGALLLAKVVDLLTELDVNITWEDILQDEHNKGIFDMELEDLGEDEDSLGQEGTKALFGGNACAEKLDGLMVLVDEHPPEMKVMSLDDHIXDILKTIFRASVLRVHKSKFAQFIMFYACSLDPEICGAVXASSSQTISKPPIIMGPKIIAAAKLSIATKKQPYAGSAIXDPACIRVQVSDRIGELELYFIAGRRVERPIFCDVSSPTRLDILTHPLEPLKVCLRTIVDEFLRQAKAARLFNASVHSEFEDALESDLSKTFGGMNRLDMFFPFDPYLLKESDRYMRPNFEYWSMVKTTYNNYNSDVDDELVDLDAPEMNVGSLDDHVEIDLNSDDDLEYSMNKMSITPNRSFFHQIMANSDTGLTMPARIRPSISPPS

SEQ ID NO: 202348 - protein, 365 aa, Oryza sativa
  Clone ID: PAT_MRT4530_97636C.1.pep
RFPVDPRVRELEDLGEDEDSLGQERTKALFGGNACAEKLDGLMVVFCEHLKSCKEHGRLPQEFDILKTIFRASVLRVHKSKFAQFIMFYACSLDPEICGLEFALFLSDIFIKKEEDSISRMSAVSYVGSYLSRARFISADTVVGILKRLVDWCVDYCDLQNNIRITTKPINHQIFYASCQAVMYILCFRLRSIMDYPNLKAQLFNMPFGYILTHPLEPLKVCLPSIVDEFLRQAKAARLFNASVHSEFEDALESDLSKTFGGMNRLDMFFPFDPYLLKESDRYMRPNFEYWSMVKTTYNNYNSDVDDELVDLDAPEMNVGSLDDHVEIDLNSDDDLEYSMNKMSITPNRSFFIKLWQSDTGLTCL

SEQ ID NO: 202349 - protein, 351 aa, Oryza sativa
  Clone ID: PAT_MRT4530_97637C.1.pep
MLSNTPAMPLGFSRLLIIVLIDLVSLVNISTLPSLKVIMCSAQVCMALAKMRFSKLDIGLLFITGVVPPNPPGARDNLVSELMATDESSTNAATLAAAAAVAAPVSNADIAKLRESMADVLHGMSLLASKSDLADLSRSVAVASSRLTSLEQQGAASTSTPPRLGGDGMFRRPPPPPPPPPSSGSPPPPPPPPPPPPPPPPPPLFTRRSHAPQDNSSGTGVPRFYKLEFPKYDGKDDPLNWFNHCEQFFRGQKTPDGDRVWLATYHLTGDAQEWYFHYEQHHGPPDWYAFKELCHAQFGPPIHRNALGELKRLYQASSVAAYQTKFLALASRTSEPPADVQQWEKEINKPS

SEQ ID NO: 202350 - protein, 142 aa, Oryza sativa
  Clone ID: PAT_MRT4530_97638C.1.pep
EAVSKIDIMYHHALLNNIFTMSIWYLNSDTRDALLSLITRLAAVADQFLRECLQMLVNNFTPPGSLTAFIGQPRWLARKKEIYSQLHESLRMISDTVPLAPRMLKDIIDRSMPKLFDNKAKMVSFAECMLGLDNDRMGDLIG

SEQ ID NO: 202351 - protein, 279 aa, Oryza sativa
  unsure (1)..(279): unsure at all Xaa locations
  Clone ID: PAT_MRT4530_97639C.1.pep
SDLVPSRKNENGPRVKKATKTTFPLKKGKRRHGDQNSSRRKKISQKTTRSQLRPPAQRKANRHQRRRKFQFPDXAEAVVRNCALQTLDKPWRGWKNTLNNKFVKTGRPPFATFANITXSSGTTVTLKNSLEEIEGSKKYAELAKKNRFPHHLGSGGYAPKVERWSKEEEEMRKAGLPVPMEEWNQRSRNWVKARTPKITEEGKVSFENLELQGVADKIETLSSAXKIGSFKPKREKDVLSTVLGTPDHGGRDEGAQDFERKMMDFCGDPLESTCRHASL

SEQ ID NO: 202352 - protein, 40 aa, Oryza sativa
  unsure (1)..(40): unsure at all Xaa locations
  Clone ID: PAT_MRT4530_9763C.1.pep
FDQSQAQAQAMLALNMPSXCGIYPSYNTAPCSIPPSGIWY

SEQ ID NO: 202353 - protein, 109 aa, Oryza sativa
  Clone ID: PAT_MRT4530_97640C.1.pep
GARPNNNFVRHQYGKGASPFLQTSGFQLKTTQVWQHPALGGHQSPYRAITFVQAKGQQLQPQEFGDPPFDRNLAQAQALLAFNLPPTYGIPPWSYRAPESIPPLGGVLN

SEQ ID NO: 202354 - protein, 107 aa, Oryza sativa
  Clone ID: PAT_MRT4530_97641C.1.pep
HSVRTRVRPNTTQYPTHTLPLCRHGRLLLLPRNRHLIILRQAPRHDTPRGAALNQKYSAASITRPMRLCAYICRYDLASTLGSRPTVWNMRRMPATTRPTWMPRQSS

SEQ ID NO: 202355 - protein, 77 aa, Oryza sativa
  Clone ID: PAT_MRT4530_97642C.1.pep
MAVGGMSRGPSTEPAETSLQSLGRSTTAKRQMSQRQRLWANRRAKPKTFAPKPRDSRPEGANQPMEAHLAAQEEAQG

SEQ ID NO: 202356 - protein, 147 aa, Oryza sativa
  unsure (1)..(147): unsure at all Xaa locations
  Clone ID: PAT_MRT4530_97643C.1.pep
MFLTGIRKFKKRQNMIFGHIXCIGCVRGKNSLRDSHGKLLSINANIGTRECDVFDRYQNVQKMPKHDFWTYWSMLRAFVAKTQFVIRAANFCQLMATMAHEGAMFFDRNKKAQKTPKHDFWTYWSVLRAYVEKTHFVIRTVNFSQLM

SEQ ID NO: 202357 - protein, 160 aa, Oryza sativa
  unsure (1)..(160): unsure at all Xaa locations
  Clone ID: PAT_MRT4530_97644C.1.pep
MFLTGIKKFKNAIFGHFGVXIACVRGKNSLHDSHGELFSINANIGTRGCDVFDRNQKVQKMPKHDFWTYWSMLRAFVAKTHFVIRAANFCQLMATLAHGGAMFFXRNKKAQKTPKHDFWTYWSVLGALMAKTFGPNRGDVFDRNENVQKALKHDFWTYWS

SEQ ID NO: 202358 - protein, 72 aa, Oryza sativa
  Clone ID: PAT_MRT4530_97645C.1.pep
PKRAGSCKVFSWTFLVPPPLVFPQGSFHCLSGGEIGVLKSKKTPLSFPEKPNTPPSPRNGLPLRIVLALFYR

SEQ ID NO: 202359 - protein, 385 aa, Oryza sativa
  Clone ID: PAT_MRT4530_97646C.1.pep
MGRVVVVVAAAAVAVAVVVLLGAAAPAASAMEFGDKDVASEEALWELYERWRGQHRVARDLGEKARRFNVFKDNVRLIHEFNRRDEPYKLRLNRFGDMTADEFRRAYASSRVSHHRMFRGRGERRSGFMYAGARDLPAAVDWREKGAVGAVKDQGQCGSCWAFSTIAAVEGINAIRTSNLTALSEQQLVDCDTKTGNAGCDGGLMDNAFQYIAKHGGVAASSAYPYRARQSSCKSSAASSPAVTIDGYEDVPANSESALKKAVANQPVSVAIEAGGSHFQFYSEGVFAGKCGTELDHGVAAVGYGTTVDGTKYWIVRNSWGADWGEKGYIRMKRDVSAKEGLCGIAMEASYPIKTSPNPAPKKIKKVTDDDEDDDDEEHRHHDEL

SEQ ID NO: 202360 - protein, 38 aa, Oryza sativa
  Clone ID: PAT_MRT4530_97647C.1.pep
GSALFPVLLKGRLVGPTPPPPPPPTPPPPPPPPPAADP

SEQ ID NO: 202361 - protein, 544 aa, Oryza sativa
  unsure (1)..(544): unsure at all Xaa locations
  Clone ID: PAT_MRT4530_97648C.1.pep
MSTSASPSTTPSAEXVEHLSNLVAIPSLSHENHYFLGLIGELDPTEFIIAGTNRIAFRLANPNLGHWKNTFKSWPSLEKTSPEKSWAXWFKRVSASKQAHWDKIXISQALALTIANSAKDEPLMAAVTYFGSNTINAFMSNQGPMTPTLIDITMITGLDVTSSANPMSLNTKNQFVFRTXSIGGWSGYVAAYMGKGPVTPPEHVAFLLMXLEKFLFCGSSCGPTTNXQFLAEALESKRQFPLRKILLGYLYQTLNNASAKIAVGSIVGAGGPXWLLQTWLNLVAMKAVNRPSVTKAEFPRLEPITDNDGEERTHHRCMSYGEYASTPADAGAKLSAELLKDWFRSFYEGFXKDAWVWFPYEDSVSLELLADFRFEGINHERYQKSREVFSVAISPCILPIGIHQGRNIQVFYEFYHPMSSARQFGMGQLPIGLFFADKIQCXGEISSTLMMNRLLNIPGPPLGSIESIELARFRSRNFDRWWGAWKQHIFHQSASMYMTDLFSDVVPRTTESSPPHKSNSGRDIEFSPGLLPNGGGLTPPVIGY

SEQ ID NO: 202362 - protein, 146 aa, Oryza sativa
  unsure (1)..(146): unsure at all Xaa locations
  Clone ID: PAT_MRT4530_97649C.1.pep
LPSYGKCFAGLWSLDNEEIVKXAIEKPDLFVLKPQREGGGNNIYGYDLRETLVRLQKEQGEALAAYILMQRIFPRASLTHLVQGGVCFEDLTISELGIFGAYLRNKDKVVLNNQCGYLMRTKVSSSNEGGVAAGFAVLDSILLTDE

SEQ ID NO: 202363 - protein, 91 aa, Oryza sativa
  Clone ID: PAT_MRT4530_9764C.1.pep
KKISKEKDYVFRIKILTLSSLIASSSIASSKDGDGDITILISGDLTIYTIGDLSRFVAGACCFSIEALRLYPLRYLRRVSLLRHNGQHLQQ

SEQ ID NO: 202364 - protein, 66 aa, Oryza sativa
  unsure (1)..(66): unsure at all Xaa locations
  Clone ID: PAT_MRT4530_97650C.1.pep
LSNVLCYRYTLKLTWPELAINIVIQGTTVILDXQGHDSXIQARAKKVIITASAKGGDITTYELGVK

SEQ ID NO: 202365 - protein, 86 aa, Oryza sativa
  Clone ID: PAT_MRT4530_97651C.1.pep
MLLPRSTSVRAISDSFGAASTDAYTSSDSFTMVSTEATSVGSASFAAVSLAFATAADEVGREVGGVVAAIHGGGSQEMRSHGMRKQ

SEQ ID NO: 202366 - protein, 600 aa, Oryza sativa
  Clone ID: PAT_MRT4530_97652C.1.pep
MAMVVAGSHRPPPPPQSLRLVPPPPPQPPPPPLTYRHHCKVCKKGFMCGRALGGHMRAHGIGDDNDTMDDDDGRDDDHSLSPCDGGGEPSEAAGSPTTTTTKRMYALRTNPGRPRNCRTCENCGKEFTSWKTLLDHGRCGLDEEDGRLDVSLRSPPLHDGGDENDGEEEEEGDDLTLAAGGWSKGKRSRRAKVMAVGTGSVSELQLPAPSTEEEDLANFLVMLSSSSSSSSRVAQPAIVVDDADQESCASAPMMAQMTVIAPQVVPQHISTVPRGMFECKACKKVFTSHQALGGHRASHKKVKGCFAAKLESSRNETSQTQTQQQHVSAAPHDNTRATTSHVITSDISMDANTIGASADADGKAAASGVGAGEIVLAGASSTDMAMMMSVEDFAPTPLAPSAVSPFKKKGKVHECSICHRVFTSGQALGGHKRCHWLTSGATDPLTKLQPVAQDHAMMAAMCHQLTLGRPIFDPTDQRILDLNVPTNPLAEAVAARQQQQQQVAALNDGALCLNAAASVYLQSWTGHSNGSHVNKTTATSSRINDAAGGVTTEDDEADSTSAKRAKIGDLKDMKVAGESLPWLQVGIGISSESKEKNTQE

SEQ ID NO: 202367 - protein, 87 aa, Oryza sativa
  unsure (1)..(87): unsure at all Xaa locations
  Clone ID: PAT_MRT4530_97653C.1.pep
GGGNLATTWKPCGIDAGRLRNRGSPANGGAPAETEGTGRXEGTEAILTTTYTMTHGEGRHRRRAPKGGELGSAQAAAFRRRAAASKG

SEQ ID NO: 202368 - protein, 726 aa, Oryza sativa
  Clone ID: PAT_MRT4530_97654C.1.pep
MAMVVAGSHRPPPPPQSLRLVPPPPPQPPPPPLTYRHHCKVCKKGFMCGRALGGHMRAHGIGDDNDTMDDDDGRDDDHSLSPCDGGGEPSEAAGSPTTTTTKRMYALRTNPGRPRNCRTCENCGKEFTSWKTLLDHGRCGLDEEDGRLDVSLRSPPLHDGGDENDGEEEEEGDDLTLAAGGWSKGKRSRRAKVMAVGTGSVSELQLPAPSTEEEDLANFLVMLSSSSSSSSRVAQPAIVVDDADQESCASGSKDEERNRFLVPQPISMAAPMMAQMTVIAPQVVPQHISTVPRGMFECKACKKVFTSHQALGGHRASHKKVKGCFAAKLESSRNETSQTQTQQQHVSAAPHDNTRATTSHVITSDISMDANTIGASADADGKAAASGVGAGEIVLAGASSTDMAMMMSVEDFAPTPLAPSAVSPFKKKGKVHECSICHRVFTSGQALGGHKRCHWLTSGATDPLTKLQPVAQDHAMMAAMCHQLTLGRPIFDPTDQRILDLNVPTNPLAEAVAARQQQQQQVAALNDGALCLNAAASVYLQSWTGHSNGSHVNKTTATSSRINDAAGGVTTEDDEADSTSAKRAKIGDLKDMKVAGESLPWLQDQTDWHARISSIFVPAQELSRSPRPEQTDWHARISSIFGPAQELSRSPRPRYWMTDLLQKRGIDSHPVCSFCAQELEMTNHILLDCVFAWQVWLRVLSSSGWAALSPPCGVLESSSQKAIYGR

SEQ ID NO: 202369 - protein, 71 aa, Oryza sativa
  Clone ID: PAT_MRT4530_97656C.1.pep
LGGVSGAARRGNGLPLHGSTVQLPPPIAVSPRRHLGFANGEWREGAEPGWDGSWRESERGLSGRVVAKWVN

SEQ ID NO: 202370 - protein, 183 aa, Oryza sativa
  Clone ID: PAT_MRT4530_97657C.1.pep
MDHEKQKLPQICCNTTHSRDGYGQTARRRRLAARGRWQRRTDSGDGDQVVTEKILARRFNSPLHARIERQADELGRRSCETEILGVGGQGEGEVAGAMAVALGRRSRKSATLTLSSSTNITPTPILPAIFPRENKEAGRPYGAACGVDVRTPHRRRSGRHPAGSGEEVDVGLLAQQQAVEETK

SEQ ID NO: 202371 - protein, 435 aa, Oryza sativa
  unsure (1)..(435): unsure at all Xaa locations
  Clone ID: PAT_MRT4530_97658C.1.pep
MAPPPAAHAAGLRVLRTTRVAPAPPAGQPALPKRALPLIFMDVMWLRAQPVERVFFYRLGPDDDVDAVLSRMEESLPRAIHAFYPLAGRVRPTPGETNRYELLYQPGDGVAFTVAEHDGVGVGVDELATDEPRELAKIAPLVPELPEGGAELALQVTVLPPKRRGLALGVIVHHSACDGVGSTHFLHTWAAACAGDRKLPEPPVIDRTLIRDVPEMHDEASRTPSPPRPHVAAFRRLGARPSWRCTASCGTATAAPDGKATTGGAXXPXPPPTLSSPSTTGSRLVPRVPDKYLGNCVGPGFVSAPEEELAGAAVAGGVFTACAAVAAAIDEAVRGEPAYWEGWKERIVEACRDDAPFSVAGSTRFRVYDVDFGFGRPAKVEIVSVAKTGAVSAAEDRSGAGGIEVGIALLPERMDTFRRCLADAMAWFSSSSQCN

SEQ ID NO: 202372 - protein, 467 aa, Oryza sativa
  Clone ID: PAT_MRT4530_97659C.1.pep
MAPPPAAHAAGLRVLRTTRVAPAPPAGQPALPKRALPLIFMDVMWLRAQPVERVFFYRLGPDDDVDAVLSRMEESLPRAIHAFYPLAGRVRPTPGETNRYELLYQPGDGVAFTVAEHDGVGVGVDELATDEPRELAKIAPLVPELPEGGAELALQVTVLPPKRRGLALGVIVHHSACDGVGSTHFLHTWAAACAGDRKLPEPPVIDRTLIRDVPEMHDEFAAPTNEAKDLFKAPDAGKFLATFTLSREHLQGVKDAVAAEAARRGVPPPRCTSLVAMYGLMWHCYRRSRRESDNGGSGRAAAAAHFIFSVDHRSRLVPRVPDKYLGNCVGPGFVSAPEEELAGAAVAGGVFTACAAVAAAIDEAVRGEPAYWEGWKERIVEACRDDAPFSVAGSTRFRVYDVDFGFGRPAKVEIVSVAKTGAVSAAEDRSGAGGIEVGIALLPERMDTFRRCLADAMAWFSSSSQCN

SEQ ID NO: 202373 - protein, 50 aa, Oryza sativa
  Clone ID: PAT_MRT4530_9765C.1.pep
LASTYMIHHVSKLSRAEYENEVKIRCTNTHTHVCPICTTKLRIREEIDQS

SEQ ID NO: 202374 - protein, 66 aa, Oryza sativa
  Clone ID: PAT_MRT4530_97660C.1.pep
NLFYIKSWQAVRLGYAFRVPTVVRENKYIVKRNSNTFLIEIYFGNNVPFEYKHSWKMLKKIFAQKL

SEQ ID NO: 202375 - protein, 334 aa, Oryza sativa
  Clone ID: PAT_MRT4530_97661C.1.pep
MASQPAAHAAGLRVLRTTRVAPAPPAGEPALPERALPLMFMDAMWLRAQPVERVFFYRLGPGDDDDDGGVDAVLSRMEESLPRAIHAFYPLASRIRPTPSETNRYELLYQLGDGVAFTVAEHDGVGVDELATDEPRELAKIAPLVPELPEGGAVLALQVTVLPPKRRGLALGVIVHHSACDGVGSTHFLHTWAAACAGDRKLPELPVIDRTLIRDVPDRHDEFAAPMRSSPTPRAASSRPAPRWPSPLTRRDDAPFSVAGSTRFRVYDVDFGFGRPAKVEIVSVAKTGAVSAAEDRSGAGGIEVGIALPPESMDTFRRCLADATAWLSSSSQCN

SEQ ID NO: 202376 - protein, 96 aa, Oryza sativa
  Clone ID: PAT_MRT4530_97662C.1.pep
MAFAAAYWLDHILASFSWDLGDVGGAMAQPGMRRNFMFPWLECGEAHQRIRDMDETPSGEKSKWKFLEIPRDPFRFRAGSNSSLLEKSAHFHVRSF

SEQ ID NO: 202377 - protein, 100 aa, Oryza sativa
  Clone ID: PAT_MRT4530_97663C.1.pep
LICVSLFYLSVFLFYLSVEIFLKAAGYLECAIQHALPKISPEKRKGLPVDLTEGILKAICMQAQGQIWKINFSNSLVLLHKFLLLAVELLFDSGSRDEFF

SEQ ID NO: 202378 - protein, 148 aa, Oryza sativa
  unsure (1)..(148): unsure at all Xaa locations
  Clone ID: PAT_MRT4530_97664C.1.pep
MNTNFTLYLSYVDYTASLSGRCNGTGIMFAYAITLCHDDDIRIVSSSLGMVSRLPGTIIWGXAQYGYSSVRVYNPKLISXGGYSFVFSPGCMVMTGCRKKLDSQGWLLEVPGGHRKEDMASSMSEDHIWFASTYKLLCAVTIASIHLV

SEQ ID NO: 202379 - protein, 127 aa, Oryza sativa
  unsure (1)..(127): unsure at all Xaa locations
  Clone ID: PAT_MRT4530_97665C.1.pep
INTNFTLYLSYVDYTASLSGRCNGXGIMFAYAITLCHDDDIRVVSGSLGVVSRLLGIIIWGYMLWKSGGPLIVTAQYGYSSARVYNPKLISWGGYSSVFSPGXMVMTGCRKKLGSQGWLLEVPRGHR

SEQ ID NO: 202380 - protein, 34 aa, Oryza sativa
  Clone ID: PAT_MRT4530_97666C.1.pep
QADRTALPRSHRFPAIRQPSFVAMRTISLLWELH

SEQ ID NO: 202381 - protein, 58 aa, Oryza sativa
  Clone ID: PAT_MRT4530_97667C.1.pep
HDGHGMTAAALQRAARCGPCSDDQRLLSLGNIVRTTLTTDGRALDGGDDVGGYDYVRK

SEQ ID NO: 202382 - protein, 73 aa, Oryza sativa
  Clone ID: PAT_MRT4530_97668C.1.pep
SIIITHTNHTHMGGFYCGLIKEGNSPAASVRLLSNIYLPYLQSVQDHLVPHFQPPLSSPAGTLSKWFFLALTI

SEQ ID NO: 202383 - protein, 140 aa, Oryza sativa
  Clone ID: PAT_MRT4530_97669C.1.pep
KGYPRGGTPWRARVYSPTARRLKRVWDPPLVPADPTQTRVNRSTLRIKMQAKPRRAVTYNHNSNPCAAHGRQPSSRDAKNAPAWVDASPTSVRPLRTPPSLLGGPAPPARHASPRPPPPRPYLITLHRATPGRTQRSFRD

SEQ ID NO: 202384 - protein, 114 aa, Oryza sativa
  Clone ID: PAT_MRT4530_9766C.1.pep
MDRVTRLASQKAVVVFSKSSCGMSHAVTRLLRELGVDARVVELDEEPAGADMENALAGMLLAGTAANGGGRGRGVVVPTVFIGGRLVGSTDRVMSLHVAGGLVPLLRDAGALWV

SEQ ID NO: 202385 - protein, 364 aa, Oryza sativa
  Clone ID: PAT_MRT4530_97670C.1.pep
MAAMGVFFLLQVFFFLDWVKYLLNDAKLFKSFLRITLTCVITVGTLALGIGTASGYISPWTGRFYSLLDPTYAKDHIPIIASVSEHQPTAWSSFMFDFHILLFLFPAGLYFCFKRLSDATIFIVMYGLTSMYFAGVMVRISYNKKSDYLVRTKSKSPQTVSGKSSGSKAAAKGAVDQSLPFQQNVAIALLLGAFYLLSRYAVHCTWVTSEAYSSPSIVLAARGHNGGRVIFDDYREAYYWLRQNTPSDAKIMSWWDYGYQITAMGNRTVIVDNNTWNNTHIATVGRAMSSYEDEAYEIMQSLDVNYVLVVFGGVTGYSSDDINKFLWMVRIGGGVFPVIKEPDYLVNGEYRVDKGAAPKMLNCL

SEQ ID NO: 202386 - protein, 197 aa, Oryza sativa
  Clone ID: PAT_MRT4530_97671C.1.pep
MGGVPAEAAGRRPRPPPPDLAGGEAADLGKPMVVEEAGRRIKKNRVILKLDFEKAYDKVDWMFLQQSLRMKDFSSKWYNWIDSTIRAGSAAVKVNDDIGSYFQTRKDMLAILMQRAKDQGRFKGVVPHLVDNGLSILKYANDTILLIDHYLDEARDLKLVLSAFEKLSCLKINFHKSELFCYGKAKCGERVRQIILV

SEQ ID NO: 202387 - protein, 721 aa, Oryza sativa
  Clone ID: PAT_MRT4530_97672C.1.pep
MAAATALDSLPAPLRSLRLKTKQQELLLRVSALALIYVLAFVVRLFSVLRYESMIHEFDPYFNYRTTLFLSDHGFSEFWNWFDFESWYPLGRVVGGTLFPGLMVTAALLHRLLRALSLAVHIREVCVLTAPFFAANTTLVAYAFGREIWDSGAGLVAAALIAVCPGYISRSVAGSYDNEGVAIFALLLTFYLFVRAVNTGSLAWSLASAFGYFYMVSAWGGYVFIINLLPLYVLVLLVTGRYSQRLYVAYNSTYVLGMLLAMQIRFVGFQHVQSGEHMAAMGVFFLLQVFFFLDWVKYLLNDAKLFKSFLRITLTCVITVGTLALGIGTASGYISPWTGRFYSLLDPTYAKDHIPIIASVSEHQPTAWSSFMFDFHILLFLFPAGLYFCFKRLSDATIFIVMYGLTSMYFAGVMVRLILVAAPAVCLISAIAASATIKNLTTLIRTKSKSPQTVSGKSSGSKAAAKGAVDQSLPFQQNVAIALLLGAFYLLSRYAVHCTWVTSEAYSSPSIVLAARGHNGGRVIFDDYREAYYWLRQNTPSDAKIMSWWDYGYQITAMGNRTVIVDNNTWNNTHIATVGRAMSSYEDEAYEIMQSLDVNYVLVVFGGVTGYSSDDINKFLWMVRIGGGVFPVIKEPDYLVNGEYRVDKGAAPKMLNCLMYKLCYYRFGELTTEYGKPPGYDRVRGVEIGNKDIKLEYLEEAFTTSNWIVRIYKVKPPKNRS

SEQ ID NO: 202388 - protein, 271 aa, Oryza sativa
  Clone ID: PAT_MRT4530_97673C.1.pep
MPADDDDASYLLCAEDAGAAVFDVAVDISTCTTEDDECCSVGGEELYSAASIAELIGGEAEYSPRSDYPDRLRSRSIDPAARAESVSWILKVQEYNGFLPLTAYLAVNYMDRFLSLRHLPEGQGWAMQLLAVACLSLAAKMEETLVPSLLDLQASRVLKHISNAMVQNANSDIQFLDHCPSSMAAAAVLCATGETPSLAFVNPELAVNWCIGLAEEGISSCYQLMQQLVIGNVQRSAAAAAAVNLFSDEGLSYDSSSPPPPKRRKRSPPGT

SEQ ID NO: 202389 - protein, 512 aa, Oryza sativa
  Clone ID: PAT_MRT4530_97674C.1.pep
MKLTPTTFLPNRKDQAATKPEAEATAVVRTTASSKPKKRRVERGKNMLLKEVSVLTRMSEIGEPLSPEYSCSKYSNQCGAVVRDIVEITWKDWKKVPESRKNSCWTSLQSKFEYPEGTDDDKAKDYALNWVRARTPVFTPEGDVVFKDQKLKEVAVKMKNIVMQQQAGTFVPDRDRDELIYALGKPEHSGYVRGVSSKTSWKDGFKQDAYTYKKCDRYKEEIDSQARAAARDECNIYWSQNMMHGAAVLEPELSYPFDDAYRMHELDFPTTEQIVYLGDAVDQFILWHKNDIELGSTDGIDRPPRISVSPSRPPVVASPRDSPIASRPRPEPLVASPSGPEPPVASPPRPEPPVASPRNEKDAEEQSVLAKQQSQLAIQEMSPAQPSEPVQAEPTKLAAGEIEAVPEQPMPDQPEQSQSEPSQPEEPKGADVPVMVRTHKHKAKSASKKHYMVTAFRGRDKDIVNAEFDNRKLKGFKQTFDDYLNYINSPDVPHEFENGKPFIYDWQLREGP

SEQ ID NO: 202390 - protein, 636 aa, Oryza sativa
  Clone ID: PAT_MRT4530_97675C.1.pep
MKLTPTTFPPNRSQAATEPEAEATTVVHTTASSKPKKRRGERGKNMLLKEKTDLNKKYVQKGLTPFKDYGRITQAQWDEFVALKTSAEEKEKSQKMAELARRNEYPHHLGSTGYRAGKKILVATGRFIPGHRFHCQDIPDDYVKVEVRTVIEAYRIHELDFPTTEQIVYLGDAVDQFILWHKNDIELGSTDGIDRPPRIPVSQSRPPVVASPRDSPITSPPRPEPPVASPLGPEPPVASPPRPEPPVASARTKKDAKEQLVLAKKQSQLAIREMSPAQPSQPVQAEPTKLVAGEIEAVPEQPMPDQPEQSQPEPSQPEEPKGADVPVMDELRGSRSDEKACRLPKPVQDNDHWIVFLLYLKYNEVIVLDSLDKDSNTYQEFLRIHDLFQNSPSLKNSSMILPFTTFRRTCATSSTGWSVNFYWFQRRIEIHWGRLESVSSLAWFMSNQETSFVTIGQRVLANPLKVRFHYGHPDVFDRIFNITRGGISKASCGINLSEDIFAGARGNASQVHQLVGVRRDKKDMLFSISPKRIPPSFHGPLTEEEMREDQGPEQVGLGYRAVSAVGVTEDVLVRFIVGYDILVDCWERPLYSKYAFLGALRSAAQMVPYEVSIGLILIVRLVSTFGSAKAIARIFP

SEQ ID NO: 202391 - protein, 515 aa, Oryza sativa
  Clone ID: PAT_MRT4530_97676C.1.pep
MALPATVSHTTCAIQRRRRSTAPARRRGPPSRRHPHSGAALTLRAAPPPATQPTLDRVLSDLGSHPRLLTPDLLDSLLAALPLHPSPRRNLARLRRLLSVSLLRRYPALARRLLHLHASLGLVSYAHHLFDHLLPARAREDAFPWNCLIAGYARLGRHEDALALYLQMEEETVPRDRFTFTSALQACAGVGSVELGHAIHRDVVRAGLASDVPVCDALVDLYATFGDVRRALQVFDAMPDRDGVSWNIMLAGCLRHGLSQQALELWRRMLREEHEPDSITLSTMLSILPLVCDNGKWGLEIHAWAIRHGLETELSVANALIRMYSDKNEQSHALLVFESMTMRDLQSWNAIISAHLQDYRILMIFRRMVDSGMRPDETTFALVFSACDNLGLVEGGMRLFSEMENEYRIPPTMEQYTCMVNMLGKAGMIHEAYEFMSKRKPLDNEQTVLRALLQACLMHRNARVGEIIAKRLIELEPDNEHNFVKLMEIYQNVGRLVEAEKVKKTMRDRGLSCQS

SEQ ID NO: 202392 - protein, 658 aa, Oryza sativa
  unsure (1)..(658): unsure at all Xaa locations
  Clone ID: PAT_MRT4530_97677C.1.pep
MDKPTQEQPTGDKGKETQAVIEEEICTQVVAEESSSSSSEPGSRSYHSPSDPHPSPAKKRKGGSDNEVDSDYVPPEPVKNAPRRSKRKSQAATEPEAEATAVVRTTASSKPKKWRGERGKKMLLKEVSVLTRMSETGEPLSPEDSYSKYSNQCGAVTSLQSKFEYPEGTDDDKAKEYALKTMEKLWRNWKIDLNKKYMXKGLTPFKDYGRITQAQWDEFIALKTSAEEKEKSXKMAELARRNEYPHHLGSTGYRQAVKKWXKQDEEMEKAGKPIPMKNHNPRSRNWVRARTPAFTSEGDVVFKDQKLQEVAVKMKNIITQQQAWTFVPDRDWDELTYALGKPEHSGRAVLEPELSYPFDDVTEDTPCKLLIPVGRAGKKILVATGRFIPGRRFHCQDIPDDYAKVEVRTVIEAYWMHALDFPTTEXIVYLGDAVDQFILWHKNDIELGSTEGTDSSPPRPEPPVASPPGSEPPVASPPTKKDAXEQSVLAKQQSQLAIRQMSSAQPSEPVQAEPTKLAAGEIEAVPEQTMPDQPEPSQPEEPKDADVLVMVRTHKHKAKSASKKQYMVTAFRGKEKDIVNAEFDKRKLKGFKHTFYHYLNYINSLDEPHEFENDKPFIYDWKLREGPWQLRRRHDWYIRASTMKGISSFTVAVGENIF

SEQ ID NO: 202393 - protein, 795 aa, Oryza sativa
  Clone ID: PAT_MRT4530_97678C.1.pep
MDKPIQEQPTGDKSKETQLVMEEDICTQVVAEESLSSSSNEPGSGSYHSPSDPHPSPAKKRKGGSDYEVDSDYVPPESVLNAPRRSKRKAQAATEPEAEATAVVRTTALSKPKKRRGERGKNMLLKEVSVLTRMSEIGEPLSPQDSCSKYSNQCGAVVRDIVEITWKDWKKVPESRKNSCWTSLQSKFEYPEGTDNDKAKDYALKTMGKLWRNWKTDLNKKYVQKGLTPFKDYGRITQAQWDEFVALKTSTEEKEKSQKMAKQDEEMEKAGKPVPMKNHNPQSRNWVRARTPAFTPEGDVVFKDQKLQEVAVKMKNIVTQQQAGTFVPDTNRDELTYALGKPEHSGRVQGVSSKTNWKDGFKQDAHTYKKRDRYKEEIDSQARAVARDECNIYWSQKMMHGAAVLEPEPSYPFDDVTEDTPCKLLIPVGRAGKKILVATRRFIPGRRFLCQDIPDDYAKVEVRTVIEAYQIHELDFPTTEQIVYLGDAVDQFILWHKNDIELGSMDGTNRPPRIPTFDDYLNYINSPDVPHEFENGKPFIYNWQLREGPWQLRRWHDWYIRASTMKGIDSFTVAVGENIFWSGPCLLQVYFSDMHSLYHRKRLDANLIAIWCLMNYVEAEAMKKPVAYLNPCRISKSNQTYTLDEKKLPEHIKAMTPEERKAYIAQKHFEKVLDVATAFKRYYQRDGQCKNSRERIFVRNKWPCHKQPVGTVLCGYYCCEFLRVNGKYCTNYDELPKFPKSERELNDTSIQDIQADMCYFIHRECAHQLGRFFDNEGVLALPENESLSNWTRHII

SEQ ID NO: 202394 - protein, 1011 aa, Oryza sativa
  Clone ID: PAT_MRT4530_97679C.1.pep
MSNIIHVEKPPAQKIVGVGVKGRQRKHIFASGLFKKAASEDRMEEMLRHAEPEDVAGSARGLDNFDALKKAANDLLYDEAKGCEKDFTLLRTVLELMRLKARNDARQWKEFDIKYHKFVEDPRNGPQQPGNDMDVFLEPLLEDMRDLWEHGIRVWDEFLREYFTLHAIIFVTVNDLPALFSLLGQIKGKTGCIICVDGTVYRYLKRSKKLVYMRHRRFLRKNHSYRSQAEYFDGTIEKGVAPEPWKGDKVFRMTKNLKVVFGKTKDGLKSRKDLVDMQIRKGLHPVDEAGVSVDNFGLTIVDFENVGHKDDPWAAKISSAAASDNPSAHHRRRLLLHLRHPPFGHSSSIRASTAAAGSFSSRPAAAAARSIRTSSPPPPLDPAPLRPTATASSSSPPPPPRLAHRLYHRRRQIELHLSPGSSFLHLGSCRRHRDSSAGSSSPPPPPTPPPTAAAKTAAGTSSSSAGSSSSTPPPPQESSLPPGPRCRRRRRRVLVVDAGTSSAASSSSAPPPSPPHRNSTVSRDEKPRDIVEITWKDWKKVPESRKNSCWTSLQSKFEYPEGTDNDKAKDYALKTMGKLWRNWKTDLNKKYVQKGLTPFKDYGRITQAQWDEFVTLKTSAEEKEKSQKMAELARRNGYPHHLGSTGTPAFTPEGDVVFKDQKLQEVAVKMKNIITQQQAGTFVPDRDRDELTYALGKPEHSGHVRGVSSKTNWKDGFKQDAYTYKKRDRYKEEIDSQARAAACDECNIYWSQKMMHSVAVLEPEPSYPFDVVTEDTPCKLLISVGRAGKKILVATGRFIPGHMFHCQDIPDDYAKVEVRTVIEAYRMHELDFPTTEQIVYLGDAIDQFILWHKNDIELGSTDGTDRPPRIPVSPSHPPVVARPRDSPIASPPRPEPPVASPLGPKPLVASSRGPEPPVASPPVPEPPVASPPVPEPPVASPRTKKDAEEPSESVQAEPTKLAAGEIEAVPDQPMPDQPEQSQPEPSQPEEPKGADVLVMDKECVYAPYAFE

SEQ ID NO: 202395 - protein, 220 aa, Oryza sativa
  unsure (1)..(220): unsure at all Xaa locations
  Clone ID: PAT_MRT4530_9767C.1.pep
LFLNRKKELLRQRLGFAVDRVHGGGSRKRTAEIDPXSKTDGRDRTVHGQTTRDDDDDVSDDVTTGGGSXARMLTGERRRGGANGEHLRVADGTANSPVTKEEAAATFGXRRRRCSGGRQQRRRGGRGRRRDGDHDGDLPERRRRLERRRRTAGAAATTAARGLTGLGRYGRRETKARVATGVGRQRRRPTVTGDGEGRSXGSEERDRSESNSNPRISKRN

SEQ ID NO: 202396 - protein, 82 aa, Oryza sativa
  unsure (1)..(82): unsure at all Xaa locations
  Clone ID: PAT_MRT4530_97680C.1.pep
PTSRQPSTEQGIMIHIXTQEGSGSREGKTSNPGVHIRCSGFHHISKQQTAITFSFVRNRLIAVLWYFEPLXXCTPVCKHTCG

SEQ ID NO: 202397 - protein, 811 aa, Oryza sativa
  unsure (1)..(811): unsure at all Xaa locations
  Clone ID: PAT_MRT4530_97681C.1.pep
KGLTPFKDYGRITQAQWDEFIALKTSAEEKEKSXKMAELARRNEYPHHLGSTGYRQAVKKWXKQDEEMEKAGKPIPMKNHNPRSRNWVRARTPAFTSEGDVVFKDQKLQEVAVKMKNIITQQQAWTFVPDRDWDELTYALGKPEHSGRVRGVSSKTSWKDGFKQDAHTYKKRDRYREEIDSQARAVARDECNIYWSQKMMHGAAVLEPELSYPFDDVTEDTPCKLLIPVGRAGKKILVATGRFIPGRRFHCQDIPDDYAKVEVRTVIEAYWMHALDFPTTEXIVYLGDAVDQFILWHKNDIELGSTEGTDCPPRISVLSSRPLVVASPRDSPIASPPRPEPPVASPPGSEPPVASPPTKKDAXEQSVLAKQQSQLAIRQMSSAQPSEPVQAEPTKLAAGEIEAVPEQTMPDQPEPSQPEEPKDADVLVMVRTHKHKAKSASKKQYMVTAFRGKEKDIINAEFDNRKLKGFKQTFDDYLNYINSADVPHEFENGKPFIYDWQLREGPWQLRRWHDWYIRASTMKGINSFTVAVGENIFWSGPCLLQVHFSDMHSLYRRKRLDANLIAIWCLMNYVEAEAMKKPVAYLNPCMISKPNHTYTLDEKKLPEHIKVMTPEERKAYIAQKHLEKMLDVATYVAIALESMQDKECVYAPYAFDDQWIVFLLYPKYNEVIVLDSLDKDSNTYQEFLRIIDLAFKRYYQRGEQRKNSRERIFVRNKWPCHKQPVGIVLCGYYCSEFLRVNGKYCANYDELPKFPKSERELNDTSIQNIQADMCYFIHRECAHQLGRFFDNEGVLALPENESLSNWTIRII

SEQ ID NO: 202398 - protein, 126 aa, Oryza sativa
  Clone ID: PAT_MRT4530_97682C.1.pep
MDKPTQEQPTGDKGKETQAVIEEEICTQVVAEESSSSSSEPGSRSYHSPSDPHPSPAKKRKGGSDNEVDSDYVPPEPVKNAPRRSKRKSQAATEPEAEATAVVRTTASSKPKKWRGERGKKMLLKE

SEQ ID NO: 202399 - protein, 104 aa, Oryza sativa
  Clone ID: PAT_MRT4530_97683C.1.pep
MEEDICTKVVAEESSSSSSSEPGSGSYHSPSDPHPSPAKKRKGGSDNEVDSDYVPPEPVLNAPRRSKRKAQAATEPEAEATAVVRTTALSKPKKRRGERGKNML

SEQ ID NO: 202400 - protein, 119 aa, Oryza sativa
  Clone ID: PAT_MRT4530_97684C.1.pep
MATFSGTDRLRDLQAFDNTKAGVKGLVDAGVTAIPYFFRHHPDPLPIAAPSEAAAAILVIDLAKADVDRGHVVSQGPELPGDEHRNFLAVMSSPKLPEFLSPELPGNRDKRKYEKNNRS

SEQ ID NO: 202401 - protein, 178 aa, Oryza sativa
  Clone ID: PAT_MRT4530_97685C.1.pep
MASSVGETQIVAVPGFGGPAPSPGRWWPMDGAHEAWLRVLANLPPRAASDGDGSIVFFTGTGIVSATVASFAFAAAAEQREKGTNSETGPENIITNIEQEPELGPNNTEKWTIISQRTVARFLEEAKAQTAKNITYHAKIFRGFFIKENEKQMVGACVKGKEGELPRPNLYEHHKEKR

SEQ ID NO: 202402 - protein, 56 aa, Oryza sativa
  Clone ID: PAT_MRT4530_97686C.1.pep
LSHNQPLCPLPPNTLLTVLVTPTYDTRTTTSSYANEGKHPGNPLLLSWLRPRFTNL

SEQ ID NO: 202403 - protein, 173 aa, Oryza sativa
  Clone ID: PAT_MRT4530_97687C.1.pep
EGKLTKGHNAREGSLASAARAGQEFKEGAVTATATQTDHRATHAPGPNSTWYARRPCVGTARQKSHPRVKKRPYGRREGSGEDYRHPVSGPPPRTAVFSGAGPPSALVPLLLVAVRRPPPCAAFHRAPPRVAVVRSSAPPCALAPLPLAVVRRPPQSAAVVRPPLRTCACMHE

SEQ ID NO: 202404 - protein, 95 aa, Oryza sativa
  Clone ID: PAT_MRT4530_97688C.1.pep
KARELCRNQRKHHGIKGMVLSTWIDQCSAASQQPPAKLDEINSYTESGFLLQGAVAVRWLWCWLCRVSVMHRWQILSVLLLVFFLEHLPPDVTNH

SEQ ID NO: 202405 - protein, 453 aa, Oryza sativa
  unsure (1)..(453): unsure at all Xaa locations
  Clone ID: PAT_MRT4530_97689C.1.pep
MDAVMSAADDAGAASGREDPPPAVVLVSAGASHSVALLAGNVLCSWGRGEDGQLGHGDAEDRLVPTVLSGFDAAAPGITSVICGADHTTAYSEDEQQVYSWGWGDFGRLGHGNSSDVFTPQPVKALQGIKIKQIACGDSHCLAVTMAGEVQSWGRNQNGQLGLGTTEDSLLPQKIQSFEGVCVKMIAAGAEHTAAVTEDGDLYGWGWGRYGNLGLGDRNDRLVPEKVSSVEGEXMVLIACGSSHTITDSSTGTLYTYGWSKYGQLGHGDFEDHLVPHKLEALKDSSISQISGGWRHTMALTSDGKLYGWGWNKFGQVGVGDTDDHCFPVQVKFPEDQKVAQVACGWRHTLAFTEKKNVFSWGRGTSGQLGHGEIVDRNKPVMIDALSPDGPGCKKLEPSTAVPFAAKVWVSPSERYAIVPDEKVPNSGEGTARGNGADANVPENDVKRMRVHS

SEQ ID NO: 202406 - protein, 720 aa, Oryza sativa
  unsure (1)..(720): unsure at all Xaa locations
  Clone ID: PAT_MRT4530_9768C.1.pep
MELDKSTSTSASLKKLQEEGALPGRRTMEREPGGVEPFLDLFRFYYELRWMESNRVSGCVGFRLRDGLKSRYIPFQCPSSRSKWRVRWLENSDPVLVVPEEQPNNISSWTAKPALTPSLQSFIDVIDDLRVRGLSGYEVAADFIGLNSETVERRVGQVMISGPTTASNVPVALCEKGAAEREATINAAAWLKENVAKEVSDVAAAAATTSGGNIPRRGRKFSSVIGNRRKTPTPSISSPGRSSRSRKASTSHHARYTPGLGCVSPPPRRQRLVTLGENLSQGGAGEGGXDGSGGTSSASPAXEELQVKMGRLLEAGARGISHEIVEARAAAASSANERADRLTHDLAEVCKDLQKMRELVAGNERQRQGLEHRMSELENNLLEICGSLRVTYTGLHQLAGECGVKTTIPANPNEFSLMTSLAELATAMEAIPSKHAARIEEEMSNGIYTGACHVLACVRLAHPELDLRKILDQGVASDARKDVMEEVRDLGESVLPLFEEDVGVENVQQRGQPELLEVASTLELEPYMPRDGIDQDLPKETDVVSTSLDLESVLADHDRRIQYWRTKFEVAELERTILEVKRDRAVEALRGREVWFNSYLRSCCITMAVVCRELRVPRGDPEESAAGYISWLNGACAQLEGIGGCIDEALKQECRPSSRYAGGHILACIRDHRPQLHLEFLHEGFSRSRRNPTEIDNLAKLMAPLAEKIFHSMDWHWPSW

SEQ ID NO: 202407 - protein, 152 aa, Oryza sativa
  unsure (1)..(152): unsure at all Xaa locations
  Clone ID: PAT_MRT4530_97690C.1.pep
MGSSSKATASNPLGGSTILEKLSKTNHALDDNFEPVISSIVSKTEPMINFWERHTPSXLGFEQCLARRQTTEATVNMANRGRGGXQSRHNGNHDHGNNGGYNGANRDRDHGNGATGGCQGGVDTRRKCXLCYKRGHIYQSWNLLFTNTDMWN

SEQ ID NO: 202408 - protein, 83 aa, Oryza sativa
  Clone ID: PAT_MRT4530_97691C.1.pep
MWLAGSTESRRPTKKRAGPSAIGGAAEQRHDGGANRVSEWQVGSGKGRPGRNPKPLLVETACEEIDKDKEVPLFKRVICSPFS

SEQ ID NO: 202409 - protein, 75 aa, Oryza sativa
  Clone ID: PAT_MRT4530_97692C.1.pep
FKQQVQYICKETVRKVSRHIDYKEQSQQILCISVSWISQIHEIHQMYRAESFLQHVNHIIPCPGPMTPIKEGLVT

SEQ ID NO: 202410 - protein, 143 aa, Oryza sativa
  unsure (1)..(143): unsure at all Xaa locations
  Clone ID: PAT_MRT4530_97693C.1.pep
CRAAASRRAPSLSATFAPPSPPPVAVAGNAFACARAVAVATAGRSALSXEPGRRCPSDRPRGRSGPSVPWTGRGPPVWSRSTVNRPXPLSRXRWAPQSTSMCQMKXLRGVGFVRAVEDACGVVFPLQFXPRLNSCCLSFFPLH

SEQ ID NO: 202411 - protein, 161 aa, Oryza sativa
  Clone ID: PAT_MRT4530_97694C.1.pep
MAACQQQIWQEGKQQQHLHHGGYDDLSSVYRGTVVLPRRQGGLAREPPPPRPSSSSGRSAAAQATAMRIHSEAERRRRERINAHLATLRRILPDAKQMDKATLLASVVNQVKHLKTRATEATTPSTAATIPPEANEVTVQCYAGGEHTAAARTYVRATVSC

SEQ ID NO: 202412 - protein, 313 aa, Oryza sativa
  Clone ID: PAT_MRT4530_97695C.1.pep
MAACQQQIWQEGKQQQHLHHGGYDDLSSVYRGTVVLPRRQGGLAPEPPPPRPSSSSGRSAAAQATAMTIHSEAERRRRERINAHLATLRRILPDAKQDSDRNTIVKQRITKHRNCRLIGPQEKRRNQMREIDSEEMFQEMDKATLLASVVNQVKHLKTRATEATTPSTAATIPPEANEVTVQCYAGGEHTAAARTYVRATVSCDDRPGLLADIAATFRRLRLRPLSADMSCLGGRTRHAFVLCREEEEEEDAAAEARPLKEAVRQALAKVALPETVYGGGGRSKRQRLMMESRYSTAVVHTHVDPQYCWYNSR

SEQ ID NO: 202413 - protein, 126 aa, Oryza sativa
  Clone ID: PAT_MRT4530_97696C.1.pep
MAPLSQQGSAPMTWNKFRSDKGKQVMSVEEVQILQKKLQCKIGDDEGFIVSEFYSETKATHSIKGTPPKGFGSSNHSTDTLTIVYEAGGREGYSPGDLVEPFHGRTTRMSRNVELKVERLFWMEKL

SEQ ID NO: 202414 - protein, 48 aa, Oryza sativa
  Clone ID: PAT_MRT4530_97697C.1.pep
PKLMKVLSLSVAKTIVAKTSIKSEANFGHETIIPDEGLPYPRRASQRP

SEQ ID NO: 202415 - protein, 210 aa, Oryza sativa
  unsure (1)..(210): unsure at all Xaa locations
  Clone ID: PAT_MRT4530_97698C.1.pep
GDRSGLGDGGRSGLRDGDNDRGRGGSTWRRRGAXLGDGDRWGLGSATATAGGSATATXGGSMKATAGARLGDSDDDRGRGGLARRRWGARRRRPWRLDNGDRGGSMTATATATAGGSATATAGAWTTATGGGSATVTAGGLATATVDLVVGRAVEADPRPLPARRRLAPPTAPLLARPFSSSVRPPARNIAPLLLAASHRRTSARSPLSR

SEQ ID NO: 202416 - protein, 488 aa, Oryza sativa
  unsure (1)..(488): unsure at all Xaa locations
  Clone ID: PAT_MRT4530_97699C.1.pep
MEIVRSHRQIAAEAAAGVGCGGGAGGLPTYRVAPQLEVRLEEFELFAIDRLRRLLLCWSVLKGIADGLSRGKRPEEMEKLVKELWKAHMRHQDPTETLNKDIISHFVLRLVYCRTEELRKWFLSMETTLFRYRFRLESPESQRMLMSEFRLPYKALPHSEFEHNGASVSAVESVFFKVPFEEVPDLVASRRVFLSKGYAYVAMSQVVSLVVTQFRCNISKALVLTNRKWTATIKEQEKDRLTPIVEALSNAYFGPDYSQLRENHHLKHGGRMQFGLFLKGAGLKLEDALAFWRAEFSQKVGSERFDKEYAYSIRHNYGKEGKRTTNGSSXDYTPYSCQKIISATPGVGDHHGCPYRHFGVVKHLFVLCEDNLRAALNKMGISGHPLEEIMDKVKNRHYQLACTMTFEAEHGVSCDTGINHPNQYFSESQKVLKAKICVNCVIMPKNSMQNFCIQGGVVNTSSVKLRCNVSVIENLFDKTIALPDMQFH

SEQ ID NO: 202417 - protein, 240 aa, Oryza sativa
  unsure (1)..(240): unsure at all Xaa locations
  Clone ID: PAT_MRT4530_9769C.1.pep
TSPLASPPGRTRPAPWRPPRASACAPRTQTSSARTSRTPSTAPAPAPPATSPACSLPLPPSSSPTPPLPLPLPLPLPPPPPPLRRRLPSSQPAWTRDPFHLATTSRPTPPLSPRESTPRRAATPPRRRPTSPRNPPLPGPLLAPELSTPIPFAAARRRSPAARHRRSRRCRAAPPPPLXSPVSPTIPLLSGVVFSPLRSPIXSLTAPIISLGLAGPRPRLRHGRASSDRRSRRLPCRPPP

SEQ ID NO: 202418 - protein, 83 aa, Oryza sativa
  Clone ID: PAT_MRT4530_976C.1.pep
IKKISVMSFLRLLPQRLPQLFRQMEQDVETVINVLQPGPIGIVEHKFTDAEIRNAQAVVRRAVENWQKSSTLERNLGSGSFAK

SEQ ID NO: 202419 - protein, 50 aa, Oryza sativa
  Clone ID: PAT_MRT4530_97700C.1.pep
RPEIRIIQGETKDGKLDFPLAYSALHNKLHWSIWENVLYSTGELGILNSN

SEQ ID NO: 202420 - protein, 376 aa, Oryza sativa
  Clone ID: PAT_MRT4530_97701C.1.pep
MAEEDIQPIVCDNGTGMVKAGFAGDDAPRAVFPSIVGRPRHTGVMVGMGQKDAYVGDEAQSKRGILTLKYPIEHGIVNNWDDMEKIWHHTFYNELRVAPEEHPVLLTEAPMNPKANREKMTQIMFETFNCPAMYVAIQAVLSLYASGRTTGIVLDSGDGVSHTVPIYEGFTLPHAILRLDLAGRDLTDNLMKILTERGYSFTTTAEREIVRDIKEKLAYVALDYEQELDTARSSSSIEKSYELPDGQVITIGAERFRCPEVLFQPSFIGMEAPGIHEATYNSIMKCDVDIRKDLYGNVVLSGGSTMFPGIGDRMSKEITALAPGSMKIKVVAPPERKYSVWIGGSILASLSTFQQMWISKAEYDESGPGIVHMKCF

SEQ ID NO: 202421 - protein, 190 aa, Oryza sativa
  unsure (1)..(190): unsure at all Xaa locations
  Clone ID: PAT_MRT4530_97702C.1.pep
MGGRVFMSFTVSXEREKTSGEHSSGVAAGSRGTAAGAWTRDGGGGLDGGGGGGTRGTRGGWRGLDAAGSRGTAAGXGRAAAGAAGCTAPASGWMRDSGGWMRDASGRLDARRRRQPRLATTTTAGWMGDDDDGDDDDGGLDGRRRRQVAGWMHDGGGGLNWRRRRRAGWATAAYTCFFSPIIPLLNQRLD

SEQ ID NO: 202422 - protein, 96 aa, Oryza sativa
  unsure (1)..(96): unsure at all Xaa locations
  Clone ID: PAT_MRT4530_97703C.1.pep
PSPSPYIEPPKSSPPPVKFPLPPVPVSYPPPPVKXPPPPAPVSSPPPAPVSSPPPPLKSPPPPAPVSSPPPPVKSPPPPAPVSSPPPPVKXPPTPA

SEQ ID NO: 202423 - protein, 58 aa, Oryza sativa
  Clone ID: PAT_MRT4530_97704C.1.pep
LPTPPVFVWNMGVFLGRGYPIPHVLSTKCRCLSPFFSLAIFISVTNAHPDSNLGTSLG

SEQ ID NO: 202424 - protein, 130 aa, Oryza sativa
  Clone ID: PAT_MRT4530_97705C.1.pep
MGEQGGRASSNKIRDIVRLHQLLKRWKRAALAPKAGKNNNGGGASVPKGFFAVCVGEEMRRFVIPTEYLGHWAFEQLLRKAEEEFGFQHEGALRIPCDVEVFEGILRLVGRKDEKAAMCYSSSEHEILCR

SEQ ID NO: 202425 - protein, 150 aa, Oryza sativa
  Clone ID: PAT_MRT4530_97706C.1.pep
RCLRVCSVPRTRRHLKKRKQFQTVEMKVRIDCEGCERKIKKALEDMKGVSSAEVTAKQNKVTVTGYVDAGKVMRRVAYKTGKRVEPWPYVPYDTVAHPYAPGAYDKKAPAGYVRNVVSDPSAAPLARASSTEVRYTAAFSDENPNACSVM

SEQ ID NO: 202426 - protein, 58 aa, Oryza sativa
  Clone ID: PAT_MRT4530_97707C.1.pep
PIYRRRIRVVFYKDELFYHIYMVTTKYNGLIYLTGLQSTLLICTNVFFFFSLVVTKSP

SEQ ID NO: 202427 - protein, 155 aa, Oryza sativa
  Clone ID: PAT_MRT4530_97708C.1.pep
MGIVDVVSEFCSVPRTRRHLKKRKQFQTVEMKVRIDCEGCERKIKKALEDMKGVSSVEVTAKQNKVTVTGYVDAGKVMRRVAYKTGKRVEPWPYVPYDTVAHPYAPGAYDKKAPAGYVRNVVSDPSAAPLARASSTEVRYTAAFSDENPNACSVM

SEQ ID NO: 202428 - protein, 46 aa, Oryza sativa
  Clone ID: PAT_MRT4530_97709C.1.pep
CKPHANICVELFCCPLGGTCRRALGTGRGKASIASLVSAAQKAKTI

SEQ ID NO: 202429 - protein, 123 aa, Oryza sativa
  Clone ID: PAT_MRT4530_9770C.1.pep
FASVAHPQSNGAAERANGKILEALKKRLEGAAKGKWPDEMLSILWALQMTPTRPTKFRPFMLLYGDEAMTPAELGANSPRVMFSGGENGREVSLELLEEVRVEALEHMRKYAEGTSATYNRKV

SEQ ID NO: 202430 - protein, 227 aa, Oryza sativa
  unsure (1)..(227): unsure at all Xaa locations
  Clone ID: PAT_MRT4530_97710C.1.pep
MAGCSDHAARLDTKRSNTVIIPSIELVNYHXFIAQLIMIYDIIRGIGGTVKWAPPVGASRETGARWTXSTRALPRGRTTWQPRGGHGGRGGXGGANVAPRGHRCRAARGGXHVDDPDRPDGDQAATGEREXGSRPAGRPGGGSRRDAGAPMVERPQQRRPSVFPSDTHPGKWSPSEGVRGGGRNGDGRSSTPAIREGGGGGLSQGGGRGERGKMDSPRRGKRYGARK

SEQ ID NO: 202431 - protein, 312 aa, Oryza sativa
  Clone ID: PAT_MRT4530_97711C.1.pep
EKQSVQVELGRSRLTHKEDLLDDKPVEEVTLFDVQKVKFVRRSGGSNDSAVCALINVTEVAVWWEPDPYLELLEVATRLKSIMHRIKHQNSANEIKDDTVYTDTLAKKDSLTEHGQQEKPQKKQELVIAVDVESLKISGELADGVEAMIHVGSIFSENAKIGVLIEGLVVSFCGARIFKCSRTQLSRIPVSISDSLPDKKLQSAATCDWVIQCRNAYVCLPFRLQLRAIDDAVEDTLRAIKLISAAKMSVLFPEKKSSGSSSSSKKSKSKSTEFRYVRVIVRDLVAEIEEEPIQGWLDEHIDLMKSVFNEST

SEQ ID NO: 202432 - protein, 504 aa, Oryza sativa
  Clone ID: PAT_MRT4530_97712C.1.pep
MDHLPLAAAAAAASAPSPAAGAQHGRVLDAYKKALATAASVAAYAVLARSMARELLPDELRAAARWGAAFVRARLGASEKERHTVVIRRQLDGGYSENQLFEAARAYLATKIDPRALRRLSLARSRCKEADGSSSWTTLLCLEPGDSTTDVFDGVEFRWTSMETGGGDYCKRGGKGGGDRGHRAPRECLELSFDAEHTDTALERYSPFVMATAEQLQRRERVLRIFMNKKSIVDDLDRFLKRKEYYRRIGKAWKRGYLLHGPPGTGKSSLVAAMANYLRFNLYDLDLSEVRVNAALQRLLISMPNKSILVIEDIDCCFDANPREAHKITTAALDQAEDFDFSSSDSDDAVGAPPRARRAGDLQQQKLTLSGLLNFIDGLWSTSGEERVIVFTTNYKERLDPALLRPGRMDMHVYMGYCGWEAFKTLAHNYFLVGDHPLFPEIRQLLAGVEVTPAEVSEMLLRSEDADAALRGLVEFLRERTRRRARQEAAIDDNQVVAEKGNAA

SEQ ID NO: 202433 - protein, 413 aa, Oryza sativa
  Clone ID: PAT_MRT4530_97713C.1.pep
VPHRAPLRPPPPAPPRASGGSGPPLFRPPPPPPLTPPARLLVPPPSAPRRNGGGPPGTGSGASPSLLAADPGHRDAVLLAARGAMANCLGETSLHLAVPGLRLAAKGKVRDVYESGEHLVLVTTDRQSAFDRVLASIPFKGQVLNETSLWWFDRTRHITPNAVVSSPDKNVTIAKRCSVFPVEFVVRGYVTGSTDTSLWTVYNKGARNYCGNVLRDGMVKNQKLSANILTPTTKAADHDVPVTPEEIINSGLMSKEDFDEARSKALSLFAYGQEVALENGLILVDTKYEFGKTADGTIMLIDENSKFPLFDKQVHTPDSSRYWIADSYEERFSSGLEPENVDKEFLRLWFKNNCNPYEDAVLPEAPEELVCELAWRYIFLFETITNTKFEIPKTQEPIHERISRNVAQALQNL

SEQ ID NO: 202434 - protein, 529 aa, Oryza sativa
  Clone ID: PAT_MRT4530_97714C.1.pep
MDHLPLAAAAAAASAPSPAAGAQHGRVLDAYKKALATAASVAAYAVLARSMARELLPDELRAAARWGAAFVRARLGASEKERHTVVIRRQLDGGYSENQLFEAARAYLATKIDPRALRRLSLARSRCKEADGSSSWTTLLCLEPGDSTTDVFDGVEFRWTSMETGGGDDGKRGGKGGGDRGHRAPRESLELSFDAEHTDTALERYVPFVMATAEQLQRRERVLRIFMNEVRSWHGFNHHHPATFDTIAMEPDLKKSIVDDLDRFLKRKEYYRRIGKAWKRGYLLHGPPGTGKSSLVAAMANYLRFNLYDLDLSEVRVNAALQRLLISMPNKSILVIEDIDCCFDANPREAHKITTAALDQAEDFDFSSSDSDDAVGAPPRARRAGDLQQQKLTLSGLLNFIDGLWSTSGEERVIVFTTNYKERLDPALLRPGRMDMHVYMGYCGWEAFKTLAHNYFLVGDHPLFPEIRQLLAGVEVTPAEVSEMLLRSEDADAALRGLVEFLRERTRRRARQEAAIDDNQVVAEKGNAA

SEQ ID NO: 202435 - protein, 136 aa, Oryza sativa
  unsure (1)..(136): unsure at all Xaa locations
  Clone ID: PAT_MRT4530_97715C.1.pep
GRRRPARLETKTQWQPTGSRRRATSGGTRHKRTVGRGGAXLAEPREVAAQEGDGRGDDKRRLERLPAAEREDERGEVARVRKNLGKKGGNERGGRGSAIYSRKRERSARERMNSVKEDSGLSRVHPDKNGQNSWDR

SEQ ID NO: 202436 - protein, 36 aa, Oryza sativa
  Clone ID: PAT_MRT4530_97716C.1.pep
ASWVWHLASGIQGVALGIRFWHQAFSSGCVWAHRHF

SEQ ID NO: 202437 - protein, 574 aa, Oryza sativa
  Clone ID: PAT_MRT4530_97717C.1.pep
MGKSPAKWIKSVLFGKKSSRSGSTKAKDLSKGSNNKGYAAAGKDAGFESSPVISEPVLVTPHNNEAVQEVGRGENSSLQGEVVVRDVSQDLEKQNTVVSDASNDPERLREEQAAVKAQAAFRGYLARRAFRALKGIIRLQALIRGHLVRRQAVATLRATWLIVKFQALVRGRNVRLSTNTIQVNWKLVQQQSGSGKRDAWKEKLSSNAFARKLLASPILVEALHFQYDERDPNSAFNWLERWTIGRVWRPISHPKRAAVTDAKPHTRKASYAMETESGKLKRNSRRSSAAPVESSQTNIAMETEKSRRNPRKFTSSTADSVPESQLTELEKVKRNLRKVTNSMAEASKVSTPATEIPERQEVQCEKPQRTAEEVPNYPEIQEPQNGNLLENAKTDILVPDLQPEPEVPSYQVETEEKVAELTVADPTVETMPLQDIHNEENALVNDMEQRSKEEPLSTESLKSSKRRSSFSTKTEYPENGSKNSPAVPSYMAATQSAKAKLRGQNSPRLSSDSAEKNGFTRRHSLPSSNGKLNSHSPRTQRPTHAGGKEGVKADKSMLSSRDASERPAKAEWKR

SEQ ID NO: 202438 - protein, 47 aa, Oryza sativa
  unsure (1)..(47): unsure at all Xaa locations
  Clone ID: PAT_MRT4530_97718C.1.pep
IYKCYVTRDKXPIWXTXXKHSIIXREEXPXRKRRTPXQXRDIPIATH

SEQ ID NO: 202439 - protein, 465 aa, Oryza sativa
  unsure (1)..(465): unsure at all Xaa locations
  Clone ID: PAT_MRT4530_97719C.1.pep
MSALTTSQLATSATGFGIADRSVPSSLLRHGFQGLKPRSLAGGDXATSLSVTTSARAXPKQQRSVQRGSRRFPSVVVYATGAGMNVVFVGAEMAPWSKTGGLGDVLGGLPPAMAANGHRVMVISPRYDQYKDAWDTSVVAEIKVADRYERVRFFHCYKRGVDRVFIDHPSFLEKVWGKTGEKIYGPDTGVDYKDNQMRFSLLCQAALEAPRILNLNNNPYFKGTYGEDVVFVCNDWHTGPLASYLKNNYQPNGIYRNAKVAFCIHNISYQGRFAFEDYPELNLSERFRSSFDFIDGYDTPVEGRKINWMKAGILEADRVLTVSPYYAEELISGIARGCELDNIMRLTGITGIFXAPCACASTGGLVDTVIEGKTGFHMGRLSVDCKVVEPSDVKKVAATLKRAIKVVGTPAYEEMVRNCMNQDLSWKGPAKNWENVLLGLGVAGSAPGIEGDEIAPLAKENVAAP

SEQ ID NO: 202440 - protein, 121 aa, Oryza sativa
  unsure (1)..(121): unsure at all Xaa locations
  Clone ID: PAT_MRT4530_9771C.1.pep
WGGDRRRKXMAAADTGGDGNGGPTTPDHGGAAAEGRQDLGKLLERLGREIGDRSGENTTPERRGMVGLTGDREVPRSGGFPAMNNGDRGAARRCEARAVVGEXRRRRKRKRKRKRKRRSGR

SEQ ID NO: 202441 - protein, 35 aa, Oryza sativa
  Clone ID: PAT_MRT4530_97720C.1.pep
MSIPTGTNNLMGMGMGRHYPCPSRPISIPSPGADY

SEQ ID NO: 202442 - protein, 276 aa, Oryza sativa
  Clone ID: PAT_MRT4530_97721C.1.pep
ATSRSRRAHRSPPEPCNATTRSHPAQPAALAPSPAPRHCPSQAGDVRAAATSVVTRRRGRTPTPTTRARRERAAVASRETDARPPRRRPCLSPVSGRPARSGRSQPGSGRGSCRHRRLPGIRKRVPAPTSRRHSASPCTPCRLLTSPDGRPLPTPAPPSSSAARSSGGGPDPAAWSRDRRRRHRLPATRGATARFPGTPRHLLALETGHRRVLAPPPPSRRAAQFPAARSGGGEVGERRGGWRRPRSRVRPWSPARGRPWASVHGITFTLNMNKLK

SEQ ID NO: 202443 - protein, 617 aa, Oryza sativa
  Clone ID: PAT_MRT4530_97722C.1.pep
MSALTTSQLATSATGFGIADRSAPSSLLRHGFQGLKPRSPAGGDATSLSVTTSARATPKQQRSVQRGSRRFPSVVVYATGAGMNVVFVGAEMAPWSKTGGLGDVLGGLPPAMAANGHRVMVISPRYDQYKDAWDTSVVAEIKVADRYERVRFFHCYKRGVDRVFIDHPSFLEKVWGKTGEKIYGPDTGVDYKDNQMRFSLLCQAALEAPRILNLNNNPYFKGTYGEDVVFVCNDWHTGPLASYLKNNYQPNGIYRNAKVAFCIHNISYQGRFAFEDYPELNLSERFRSSFDFIDGYDTPVEGRKINWMKAGILEADRVLTVSPYYAEELISGIARGCELDNIMRLTGITGIVNGMDVSEWDPSKDKYITAKYDATTARMSDKFQAIEAKALNKEALQAEAGLPVDRKIPLIAFIGRLEEQKGPDVMAAAIPELMQEDVQIVLLGTGKKKFEKLLKSMEEKYPGKVRAVVKFNAPLAHLIMAGADVLAVPSRFEPCGLIQLQGMRYGTPCACASTGGLVDTVIEGKTGFHMGRLSVDCKVVEPSDVKKVAATLKRAIKVVGTPAYEEMVRNCMNQDLSWKGPAKNWENVLLGLGVAGSAPGIEGDEIAPLAKENVAAP

SEQ ID NO: 202444 - protein, 133 aa, Oryza sativa
  Clone ID: PAT_MRT4530_97723C.1.pep
MASKPPGCGTGQNTCPPLPQPPWLSSLWSDPIGLPGPGLTRLHGRSISPPAAPAPTYVAVAVVSSAPAAAPARAPRGRRVGCPRREAKMAHVLHPRKCNDLSNFKPTSENTHQTLLPLLEMEHPDRPIHVYTD

SEQ ID NO: 202445 - protein, 587 aa, Oryza sativa
  Clone ID: PAT_MRT4530_97724C.1.pep
MASHALRLHPLLFSAAAARPAPLAARPGGGARRVHRRHSLAVVRCSSSAAQALKVKVFQQENYLANWIQALFNSLPPEDYVGGTLVLGGDGRYFNKDAAQIITKIAAGNGVGKILVGRNGLLSTPAVSAVIRKRQANGGFIMSASHNPGGPDNDWGIKFNYSSGQPAPETITDQIYGNTLSISEIKTADIPDVDLSSLGVVSYGDFTVEVIDPVLDYLELMENVFDFQLIKGLLSRPDFRFVFDAMHAVTGAYADPIFVEKLGADPDYILNGVPLEDFGNGHPDPNLTYAKELVFTMFGSGAPDFGAASDGDGDRNMILGRRFFVTPSDSVAIIAANAQAAIPYFQSGPKGLARSMPTSGALDRVADKLNVPFFEVPTGWKFFGNLMDAGKLSICGEESFGTGSDHIREKDGIWAVLAWLSILAHRNKDKKAGERLVSVEDVAREHWATYGRNFFSRYDYEECESESANKMMEHLRDVIAKSKPGEKYGNYTLQFADDFSYTDPVDGSTVSKQGLRFVFTDGSRIIFRLSGTGSAGATIRIYIEQFESDASKHDLDAQIALKPLIDLALSVSKLKDFTGRDKPTVIT

SEQ ID NO: 202446 - protein, 142 aa, Oryza sativa
  Clone ID: PAT_MRT4530_97725C.1.pep
MERYKFSTDALAGNLRDYIQHWLVDIMDTNNYTLLGTLVSDHHGALAKRIVKRLSDALHAVVPKSFCRFGGFRKNMMECPKIQICSIDCAFYIMRFMEAYDGNMESIENLSIPTDSVIVRSSTLHQLMFSEYNQAAPLHSDI

SEQ ID NO: 202447 - protein, 145 aa, Oryza sativa
  unsure (1)..(145): unsure at all Xaa locations
  Clone ID: PAT_MRT4530_97726C.1.pep
PRVRPRVRPRVRPRVRPRVRPRVRPRVRTMFGSGAPDFGAASDGDGDRNMILGRRFFVTPSDSVAIIAANAQAAIPYFQSGPKGLARSMPTSGALDRVADKLNVPFFEVPTGWKFFGNLMDAGKLSIXGEESFGTGSDHIMEKDG

SEQ ID NO: 202448 - protein, 155 aa, Oryza sativa
  unsure (1)..(155): unsure at all Xaa locations
  Clone ID: PAT_MRT4530_97727C.1.pep
MASHALRLHPLLFSAAAARPAPLAARPGGGARRVHRRHSLAVVRCSSSAAQALKIKSIPTKPVEGQKTGTSGLRKKVKVFQQENYLANWIQALFNSLPPEDYVGGTLVLGGDGRYFNKDAAQIITXIAAGNGVGKILVGRNGLLSTPAVSAVIRK

SEQ ID NO: 202449 - protein, 81 aa, Oryza sativa
  unsure (1)..(81): unsure at all Xaa locations
  Clone ID: PAT_MRT4530_97728C.1.pep
TDEQKRLEETYLKNNTREYDEAPEVXKLLKGIQTHTLMGHLGGGFWGIISDNVNDVDCEYLADARMSYMQPGQWKNALATS

SEQ ID NO: 202450 - protein, 32 aa, Oryza sativa
  Clone ID: PAT_MRT4530_97729C.1.pep
HQPSYPIARVIFSSILVSRRIKLAWGLLHMAG

SEQ ID NO: 202451 - protein, 163 aa, Oryza sativa
  Clone ID: PAT_MRT4530_9772C.1.pep
MAKSAWGRGGGGRVGAEAKKAVLAKRRAEARWWSRGRGAGCGPDDDGGRQRQQPRWGDNEREATTTRRHMVNRGFFYYRAPRIRKEEQKDLYGIAPCISLCCTSRSGVYVICIQSRRHSPRRRHFSKPPVVVVAVAAVLVLVVAMGAYGWSVLMENTRPGRSA

SEQ ID NO: 202452 - protein, 1032 aa, Oryza sativa
  Clone ID: PAT_MRT4530_97730C.1.pep
MDPSGSGPRHGRLLISPSLSSPTFSTSSPSRSPAPHHDRRNSTSSPQPLLPFPSASSSRSGGGGGAAGGPRAAGALSSASQPAFAHNARVAAALAPAAAFLLDLGGLPVFAVLAVGLAAAYLLDALRQRQGAFFTVWAALIAADVAFFFSASLSSAASASVPLTVLALLLCAETSFLIGVWASLQFRWIQLENPTIVAALERLLFACVPIAAPAIFTWAVVSAVGMANASYYLATFSMVFYWLFSIPRPSSFKNRKQDAPWQDTDGILGPLESCVHALYLLFVPVLFHAASHHATLFASWANVCDLLLLFFIPFLFQLYASTRGALWWITRDVRTMDQIRMANGLVALVVVVLCLEVRVVFHSFGRYIHAPPPLNYLLVTVTMLGGALGMAAHAAGKVGDAVSSVAFTGLAVLVSGAGAIVIGFPVMFLPLPMISGYYAARFFTKKSLSSYFTFVAIASMMVLWFVVHNYWDLNIWIAGMPLKSFTKYVVAAVIMAMTVPGLALLPTKLRFLVELGLTGHALLICYIENRLFNYATMYYFGFEDDVMYPSYMVLFTTFLGLALRFCYSLSLPPCFFTGLACIPIVALHFPHAQSAKRFLVLVVATGLLFVIMQPPIKLSWVYRSEFIKAAHLSDDDTSIYGFIASKPTWPSWLLIATVVLTLAAVTSIIPVKYVVELRALYALGVGITLGIYISVQYFFQAVVLYPLLVATIVLAAVFIVFTHLPSESSTRVLPWVFSFLVVLFPITYLLEGHLRAKNFVDDEEAENFTNMLAIEGARMSLLGLYAAIFMIIALEIKFELALLLREKAADKGVTHGPPGRSSAFPPKARLLQQRRAHAAPTFTIKRLAAEAAWMPAIGNFSTVLCFIICLILNVTLTGGSNRAIFFLAPILLLLNQDSDIIAGFGDRQRYFPVTISISVYLVLTALYRLWEETWPGSGGWALDIGGPGWFFAVKNVALLMMTLPNHILFNRFMWDYVRQTDAKLLLTLPLNLPSIIMTDILTVRVLGLLGAIYSLSQYVISRRIRLAGMKYI

SEQ ID NO: 202453 - protein, 90 aa, Oryza sativa
  Clone ID: PAT_MRT4530_97731C.1.pep
ASHDRKQKSSYRVFRKKITNLEAENTACIRTLELRKKQLSLLLHVVEELQISIEDEQRSIADELRAGAEEQQNMSTDEGSGDASDAMALD

SEQ ID NO: 202454 - protein, 499 aa, Oryza sativa
  Clone ID: PAT_MRT4530_97732C.1.pep
MEEEAAAAACEIARLPEELLVAALSLTSPWDACSAAPVCRYFRAALRGTRRGGEKGSDAVWSRFLPRDLPRLADGELSPPPPSTKGLFLRLSAAPLLLPHELTSMWLEREKGGKCYMLSARALQITWGDTPRYWRWIPLTDSRLEGAELLSVCWLEIHGKILSKMLSRNTNYAAYLVYRIADRSYGLDFPFQEASVSIGGSTTTRQVGSVERRLKRRCSHALVLAEDIEHPQKRSDGWMELKLGELYNEEGDDGEVCISFRETEGHWKRGLVVQGIEIRPKKTLTSNCLACSHEKPSYSLLTTSRSSKEEIFLTDGLTSMWLDMETGFKCYMLSARALQLANSTDTWRLISLTGASRLFNYAPTLFAELSFIKFTKLLYSKSLMLLKGIPWFSEVIELPACYELVICGKIPCKMLPGNTNYAAYIVFVVVDDSFGLATILDASVSVGGSLCTTRQVCFDSTSSLSADEHFVEDNIEVPQDGSVILPQERDDGLDGAGGG

SEQ ID NO: 202455 - protein, 89 aa, Oryza sativa
  Clone ID: PAT_MRT4530_97733C.1.pep
TDAQGNLEMIFHSDIDNCKLMRFIKIKSPLPYLNMQIYVKLSWPYVTVDEKENKSTKKVDTTHQFPRVRPRVRPRVRPRVRPRVRPRVR

SEQ ID NO: 202456 - protein, 100 aa, Oryza sativa
  unsure (1)..(100): unsure at all Xaa locations
  Clone ID: PAT_MRT4530_97734C.1.pep
RSRGAXSLXRARRDKRAAXAEPETTAGRAAITPLLLRLLPPAGRRRLRXXSGPVQLVVAQEQXRXGRGHXFLSLRNLGXCGGXXAGXFRCCWFGLLRXNX

SEQ ID NO: 202457 - protein, 311 aa, Oryza sativa
  Clone ID: PAT_MRT4530_97735C.1.pep
MSSSFSFPSSSFIPSSLSLLLSLSPGLSLRWGAAAAVAAGGGGGGGRERQRRRRRYMGELKRALDARCHMLLEMPTGTGKTAASSSPYKRHVDDTLDEDRSTPPRGRHKKLATCRTKQIGAIFMYANSEVLKCYTTGYTVPSAWDGIASSCTISLSHVFSACVTAADDSFMVAVIACSSLPPVTAPMRTLDDDVGMWTVEDAASATSSGMRHGWWRTRPLTMSPAWGVAEEDAATGDELRRGTWMAEDVAAPATISGVDRGGCRCRRQALARDVDGGITGDDLRRGSWRMPPPATSSGTIRGQWDHRRRRF

SEQ ID NO: 202458 - protein, 50 aa, Oryza sativa
  Clone ID: PAT_MRT4530_97736C.1.pep
MRAMAMESQDPNAAPAIPAGFRRVEDFSTEWWEPAKTTAWLRDHWIREHQ

SEQ ID NO: 202459 - protein, 228 aa, Oryza sativa
  unsure (1)..(228): unsure at all Xaa locations
  Clone ID: PAT_MRT4530_97737C.1.pep
TTLLLLPLHPSTHSTISSSSSSISHGFRPSIIRARSGAMDGEEDSEWMMMDVGGKGGKGGGGGGAADRKKRFSEEQIKSLESMFATQTKLEPRQKLQLARELGLRPRQVAICFRSKRARWKSRELERAYFPLRDAYDALLWTYESLNKEKLALIKQVGKLVEKLEEARGKHGDRAGDDARSGGLAGIQKQELVPPDGAASLHXSAEGGGTSSTEQTCSSTPWWEFESE

SEQ ID NO: 202460 - protein, 105 aa, Oryza sativa
  Clone ID: PAT_MRT4530_97738C.1.pep
GPPELKGSSPAITQHIPPGGGYGAPTPTTSPSSCLRRTSPRIKAGINKKTRGPGAPQRTTSGASRDPTFSPGDSEPIISFLEKKNPRRGVCLPPHTPSMPARAPK

SEQ ID NO: 202461 - protein, 126 aa, Oryza sativa
  unsure (1)..(126): unsure at all Xaa locations
  Clone ID: PAT_MRT4530_97739C.1.pep
AQGCVREVQGMYAIELGAKRAPLLLEGEYLYSYQPKLAVGGEIPQXLCSAGLTGGMWPVRPCYSTTARKLAVVALSEGPXGLATGWSDRACAAGXDLRSMAGQIGQGTPVRLALCGRSDRPCQAEP

SEQ ID NO: 202462 - protein, 65 aa, Oryza sativa
  Clone ID: PAT_MRT4530_9773C.1.pep
MVLSSIGGEVHLSLRINGGPTRQTMIKQVPSPVWVKPLLNRLEVHNSDENRSNSMKFRRFDTARN

SEQ ID NO: 202463 - protein, 53 aa, Oryza sativa
  Clone ID: PAT_MRT4530_97740C.1.pep
NLDCFLLILFFIAKFLLFLILFAILTAKLHALRYYLFFNFKFKLFLNCFLYGL

SEQ ID NO: 202464 - protein, 128 aa, Oryza sativa
  unsure (1)..(128): unsure at all Xaa locations
  Clone ID: PAT_MRT4530_97741C.1.pep
AQMCVREVQGVYAIELGAKRAPLLLEGEYLXSHQPKLAVGGEIPQXLCTAGLTGGMWPVRPCYSATARKLAIVALSEGPIGLAGSRSDRTSAVGQTDLVRRSDCLLRASQTGQGPPVRPPQGGRSNRP

SEQ ID NO: 202465 - protein, 87 aa, Oryza sativa
  Clone ID: PAT_MRT4530_97742C.1.pep
MESQGSSVGKQLNWRAEGLVYWQTLQDGLALNYCYLKVTVANMLIAAFHVVHRHLYIHHMQEHDSKYEGKAIRELDGNVTFSVRILH

SEQ ID NO: 202466 - protein, 166 aa, Oryza sativa
  unsure (1)..(166): unsure at all Xaa locations
  Clone ID: PAT_MRT4530_97743C.1.pep
MWDPPVSSLFSLISSLSSTAPLREKAASVEPVPTGSCGAPSPPSRPLLAAAEPSSSSSDPTVTAPTPGSPPSXPPCTPAVPPLPSVLWPPPPXLPDPGARAPPPGMPASFLRASAVPPLPSARWPPPPPTSRTPPSCAVKATRDPPSRLGAGADPLHERAPARVSF

SEQ ID NO: 202467 - protein, 64 aa, Oryza sativa
  Clone ID: PAT_MRT4530_97744C.1.pep
HTTEMRYTDGTSGLGSMLMAHNPANVVHRPKYSTSCWAHTASDRMRRDSRCLNTCSLWNRISST

SEQ ID NO: 202468 - protein, 95 aa, Oryza sativa
  Clone ID: PAT_MRT4530_97745C.1.pep
TRIYYQSRFLFFPLLGLAIGVAFASSKNIGGCLSRSPIVRNCLFFDLFVLCGSVDFNYSSNCLRKRKIENTLSRHHLLLYFKTPFSFFLIKSLKL

SEQ ID NO: 202469 - protein, 316 aa, Oryza sativa
  Clone ID: PAT_MRT4530_97746C.1.pep
MSSARSVASPSAAQVGGGSSARDVEQQKSVVAVGASSPVSSSKQHNLAKEENGTITANGDKQQKPAADRGSYQSPCWTETIFTEIGMEEEGWPEKEFEKAWMWDMKKKWAPAYFREFFFARMSTTQRSESMNHHVLQLVHIETYEKTLEVLTKLIGELQVMCTSQVVNNKEIHCGDRTIGKKPTGVQLDDSVDSSDSEHGMPDDFCVADEDGIGQDVSAGEDSVDVDMTDVNEEDILPPEVRRSRGRPRSTRLMSKGETSSKAKKKASESTSKDESKNHAKGKKESTKQIRYCKQCGGHGHYKITCGQKSSYERKK

SEQ ID NO: 202470 - protein, 322 aa, Oryza sativa
  Clone ID: PAT_MRT4530_97747C.1.pep
MQWYLVAALLTVLTSSQGILTTLSQSNGKYKYDYATIPFLAELFKLSFSSFFLWKECQSSSPPRMTKEWRSIRLYLVPSVIYLIHNNVQFATLTYVDPSTYQIMGNLKIVTTGILFRLVLKRKLSNLQWMAVVLLAVGTTTSQVKGCGDAPCDSLFSAPFQGYMLGILSACLSALAGVYTEYLMKKNNDSLYWQNVQLYTFGVIFNMGWLIYGDFKAGFERGPWWQRLFNGYSITTWMVVFNLGSTGLLVSWLMKYSDNIVKVYSTSMAMLLTMVLSVYLFNVRATLQLFLGIVICIISLQMYFMPVNMLVELPQALPVTSK

SEQ ID NO: 202471 - protein, 166 aa, Oryza sativa
  Clone ID: PAT_MRT4530_97748C.1.pep
ELMGQCEMGTFKASGPGGQHRNKRESAVRLRHRPTGIIAQAVEDRSQHMNRASALSRLRTLIALKVRKPINLEDYTPPVELLQILPLKSTIRGKDIGPQIGPNNSKFAPGMQALLDLLFAVEGSVSEAAKLLGLSTGAVSRLILSDDSLRAAANELRAAKGLKPLR

SEQ ID NO: 202472 - protein, 337 aa, Oryza sativa
  Clone ID: PAT_MRT4530_97749C.1.pep
MDFFSDPNKGLSFHRMDDSIQRPVLIITPNSLLIPLFQEDIALVELGSPKALSPFPFPASSSESELRESSEETSSGSSHGAALFIPSRTRPPPHLGGFLMEQKLSGGKGRMSSARSVASPSAARVGGGSSAPDVEQQKSVAAVGASSPVSSSKHHHMAKAEDGTITVNGDKQQNPAADSYQNPIEAEDAEEHDTYNAMVQYGYTEIPKKYILKRWTKDARDSIPKHLEESYLKDKEAALSRTYRNTLLHKSALDMVRLGGTSSETYEKTVEVLTKLIGELQVISDSEHGMSDEFCVADEDGIGQDVSAGEDSVDVDMTDVNEEDILPPEILLDNFRQ

SEQ ID NO: 202473 - protein, 92 aa, Oryza sativa
  Clone ID: PAT_MRT4530_9774C.1.pep
MEATLEGGDVVLGVGGEAEARKRRWGEASWETRAGKVGAAGGRGRWTSPMPAWTAWSAMTGSSGGAGSGEEGKRRPRRNELIFLFDWRKEQS

SEQ ID NO: 202474 - protein, 860 aa, Oryza sativa
  Clone ID: PAT_MRT4530_97750C.1.pep
MSSARSVASPSAARVGGGSSAPDVEQQKSVAAVGVSSPVSSSKHHHMAKAEDGTITINGDKQQNPAADRGSYQNPCWTETIFAKIAMEEEGWPEKGGEDHSGQPMDVVPLERIVVEGEEDSDLLPISLSDPAILLPKIGQTFNEDSDGYAFYNLYARFTGFGIRRSKNRYKDGGVKSMQEFCCIREGRDNSVTGPPTRIGCKAMVRLNRSSESQKWRVSAFVSEHNHEMKRDLQHTKHFRSHNFIDEGTKRNIKEMVDNGMTPTAMYGLLSGMHGGPSLTPFTRRAVTRMAYAIRRDECSNDVQKTLNFFREMQCRSKNFFYTIQIDGASRIKNIFWCHSLSRLSFDHFGDAITFDTTYQTNRYNMPFGIFVDVNNHFQTAIFGCALLREETIEAFKWLFQTFTDAMHGNRPAAILTDNCHQMEVAIKAVWPETIHRVCKWHVLKNAKENLGNIYSKRSSFKQEFHRVLNEPQTEAEFDKAWSDLMEQYNLESSVYLRRMWDMKKKWAPAYFREFFFARMSTTQRSESMNHVLKKYVKPSSSLHGFAKRYENFYNDRIEAEDAEEHDTYNLVHIGDDTLQSWGSKEFKVQVDLTEQDLSCGCKLFEHLGIICSHIIRVMVQYGFTEIPKKYILKRWTKDARDSIPKHLEESYLKDKEAASSRTYRNTLLHKSALDMVRLGGTSSETYEKTVEVLTKLIGELQVMCTSQVVNNKEIHCGDRTIGKKPTGVQLDDSVDSSDSEPGMSDEFCVADEDGIGQDVSAGEDSVDVDMTDVNEEDILPPEVRRSRGRPRSTRLMSKGETSSKAKKKKASESTSKDESKNHAKGKKESTKQIRYCKQCGGHGHYKSTCGRKSSYERKK

SEQ ID NO: 202475 - protein, 178 aa, Oryza sativa
  unsure (1)..(178): unsure at all Xaa locations
  Clone ID: PAT_MRT4530_97751C.1.pep
MVRGSHPLISAGVRPPALVKARLPFPGGAFVIFEVLSSAGVVSVAPPLLGKAQHPQECRATPGRGQGPPHPHQPCLTEKYDDGADPSESLQICTAIIEVAGGGDRVMANVIPMALRGQARGWPMNLLXASVHSWEDSCSFELRVFGGAEPLRWKGQNVVGEVCCVAFRGASRRRLVGA

SEQ ID NO: 202476 - protein, 76 aa, Oryza sativa
  unsure (1)..(76): unsure at all Xaa locations
  Clone ID: PAT_MRT4530_97752C.1.pep
MSFGVGDLDEEGGAAAASDEIRRLPAEVNWEMLDKSLFFVLGAELFXVVSEVLYPSVVVKTHLQVAPPPQAVTATA

SEQ ID NO: 202477 - protein, 61 aa, Oryza sativa
  Clone ID: PAT_MRT4530_97753C.1.pep
HTDSSKIQTNCRVQLTVVSYACSPPTGGQNPWDALPSSQANSEAILQDPVLEWLIQNCRWL

SEQ ID NO: 202478 - protein, 46 aa, Oryza sativa
  Clone ID: PAT_MRT4530_97754C.1.pep
TLRDTLLRSSVNLPCSTSTDAIYMILITHYLHTMNEFGMSSKASST

SEQ ID NO: 202479 - protein, 998 aa, Oryza sativa
  Clone ID: PAT_MRT4530_97755C.1.pep
MATARVVFLLLFLVQIVGVLAAAARPLEENGVDGIATQMLAAEAYILLPGVATPIVTIGHLSNSHQGFGLQLTNGLFLMEQKLSGGKGRMSSARSVASPSAARVGGGSSAPDVEQQKSVAAVGASSPVSSSKHHHMAKAEDGTITVNGDKQQNPAADRGSYQNPCWTETIFAKIAMEEEGWPEKGGEDHSGQPMDVVPLERIVVEGEEDSDLLPISLSDPAILLPKIGQTFNEDSDGYAFYNLYARFTGFGIRRSKNRYKDGGVKSMQEFCCIREGRDNSVTGPPTRIGCKAMVRLNRSSESQKWRVSAFVSEHNHEMKRDLQHTKHFRSHNFIDEGTKRNIKEMVDNGMTPTAMYGLLSGMHGGPSLTPFTRRAVTRMAYAIRRDECSNDVQKTLNFFREMQCRSKNFFYTIQIDGASRIKNIFWCHSLSRLSFDHFGDAITFDTTYQTNRYNMPFGIFVGVNNHFQTAIFGCALLREETIEAFKWLFQTFTDAMHGKRPVAILTDNCHQMEVAIKAVWPETIHRVCKWHVLKNAKENLGNIYSKRSSFKQEFHRVLNEPQTEAEFEKAWSDLMEQYNLESSVYLRRMWDMKKKWAPAYFREFFFARMSTTQRSESMNHVLKKYVKPSSSLHGFAKRYENFYNDRIEAEDAEEHDTYNEKVSTLTSSPIEKHASRVYTRGAFSRFKEQFKLSFSFMVYHTSDQHVLQLVHIGDDTLQSWGSKEFKVQVDLTEQDLSCGCKLFEHLGIICSHIIRVMVQYGFTEIPKKYILKRWTKDARDSIPKHLEESYLKDKEAASSRTYRNTLLHKSALDMVRLGGTSSETYEKTVEVLTKLIGELQVMCTSQVVNNKEIHYGDRTIGKKPTGVQLDDSVDSSDSEHGMSDEFCVADEDGIGQDVSAGEDSVDVDMTDVNEEDILPPEVRRSRGRPRSTRLMSKGETSSKAKKKKASESTSKDESKNHAKGKKESTKQIRYCKQCGGHGHYKSTCGRKSSYERKK

SEQ ID NO: 202480 - protein, 37 aa, Oryza sativa
  Clone ID: PAT_MRT4530_97756C.1.pep
KMALSVEGCLCKMAPSAHQHVTDVTIPEKSIADGWHR

SEQ ID NO: 202481 - protein, 208 aa, Oryza sativa
  unsure (1)..(208): unsure at all Xaa locations
  Clone ID: PAT_MRT4530_97757C.1.pep
DGCCLLLHRWSSGVLSSYEYLSQGLRTYDFDNTMGGFYIAPAFMDKLVVHISKNFMTLPNIKVPLILGIWGGKGQGKSFQCELVFAKMGINPIMMSAGELESGNAGEPAKLIRQRYREAADIIKKGKMCCLFINDLDAGAGRMGGTTQYTVNNQMVNATLMNIADNPTNVQLPGMYNKEDKPRVPIIVTGHDFSXTLYAPLIRDGRME

SEQ ID NO: 202482 - protein, 70 aa, Oryza sativa
  Clone ID: PAT_MRT4530_97758C.1.pep
CLSTFFKEIENSLEHLNNVLILSSGIINKTSLLSEDLLPSLLQICTPSTYATLHSDQHHASLVHQHCQDK

SEQ ID NO: 202483 - protein, 467 aa, Oryza sativa
  Clone ID: PAT_MRT4530_97759C.1.pep
MAAAFSSTVGAPASTPTNFLGKKLKKQVTSAVNYHGKSSNINRFKVMAKELDEGKQTDQDRWKGLAYDISDDQQDITRGKGFVDSLFQAPTGDGTHEAVLSSYEYLSQGLRTYDFDNTMGGFYIAPAFMDKLVVHISKNFMTLPNIKVPLILGIWGGKGQGKSFQCELVFAKMGINPIMMSAGELESGNAGEPAKLIRQRYREAADIIKKGKMCCLFINDLDAGAGRMGGTTQYTVNNQMVNATLMNIADNPTNVQLPGMYNKEDNPRVPIIVTGNDFSTLYAPLIRDGRMEKFYWAPTRDDRVGVCKGIFRTDNVPDEDIVKIVDSFPGQSIDFFGALRARVYDDEVRKWVSDTGVENIGKRLVNSREGPPEFEQPKMTIEKLMEYGYMLVKEQENVKRVQLAEQYLSEAALGDANSDAMKTGSFYGGQGAQQAGNLPVPEGCTDPVAKNFDPTARSDDGSCLYTF

SEQ ID NO: 202484 - protein, 508 aa, Oryza sativa
  unsure (1)..(508): unsure at all Xaa locations
  Clone ID: PAT_MRT4530_9775C.1.pep
PATAKEGLDKSTSTSASLKKLQEEGALPGRGTMEREPGGTEPEPVLGRMVAVEDYILCGFLPPPSEFLLLVLNFYGLSLLHLNPNSITFLSIFSHLCEAYIGVELFRDLFRFYYELRWMESNRVSGCVGFRLRDGLKSRYIPFQCPSSRSKWRARWFYLQIENSDPVFVVPEEQPDKISSWPAKPALTPXLQSFIDVIDDLRVRGLSEYXVAADFIGRRIQPLQAXAHPAFDYSXGLNSETVEHRIGQVMISGPTTVSNVPVALCEKGAAEREAAINLKEGVAKEAFDVAAAAATTSGGNVLKRGRKFSSMIGNRRKTPTPSVGARGISRKITEARAAAASSANERADRLMHDLAEVRENLQKMRELVAGNERQRQGLEHRMSELENNLSEIRGSLRVTYTSLHQLAGEYGVKTTIPANPDELWLTTSLAELATVMEAILSKHAARIGEETSNGIYTGACHVLACVKLAHPELDLQKILDQGAASDARKDVMEEVGDLGESVLPLFEE

SEQ ID NO: 202485 - protein, 466 aa, Oryza sativa
  Clone ID: PAT_MRT4530_97760C.1.pep
MAAAFSSTVGAPASTPTNFLGKKLKKQVTSAVNYHGKSSNINRFKVMAKELDEGKQTDQDRWKGLAYDISDDQQDITRGKGFVDSLFQAPTGDGTHEAVLSSYEYLSQGLRTYDFDNTMGGFYIAPAFMDKLVVHISKNFMTLPNIKVPLILGIWGGKGQGKSFQCELVFAKMGINPIMMSAGELESGNAGEPAKLIRQRYREAADIIKKGKMCCLFINDLDAGAGRMGGTTQYTVNNQMVNATLMNIADNPTNVQLPGMYNKEDNPRVPIIVTGNDFSTLYAPLIRDGRMEKFYWAPTRDDRVGVCKGIFRTDNVPDEDIVKIVDSFPGQSIDFFGALRARVYDDEVRKWVSDTGVENIGKRLVNSREGPPEFEQPKMTIEKLMEYGYMLVKEQENVKRVQLAEQYLSEAALGDANSDAMKTGSFYGQGAQQAGNLPVPEGCTDPVAKNFDPTARSDDGSCLYTF

SEQ ID NO: 202486 - protein, 466 aa, Oryza sativa
  Clone ID: PAT_MRT4530_97761C.1.pep
MGEFCGEERLRSRSKSCYAVDRPAEIAPRVQNPIFSVWPVEDLEADPQGRASTPTNFLGKKLKKQVTSAVNYHGKSSNINRFKVMAKELDEGKQTDQDRWKGLAYDISDDQQDITRGKGFVDSLFQAPTGDGTHEAVLSSYEYLSQGLRTYDFDNTMGGFYIAPAFMDKLVVHISKNFMTLPNIKVPLILGIWGGKGQGKSFQCELVFAKMGINPIMMSAGELESGNAGEPAKLIRQRYREAADIIKKGKMCCLFINDLDAGAGRMGGTTQYTVNNQMVNATLMNIADNPTNVQLPGMYNKEDNPRVPIIVTGNDFSTLYAPLIRDGRMEKFYWAPTRDDRVGVCKGIFRTDNVPDEDIVKIVDSFPGQSIDFFGALRARVYDDEVRKWVSDTGVENIGKRLVNSREGPPEFEQPKMTIEKLMEYGYMLVKEQENVKRVQLAEQYLSEAALGDANSDAMKTGSFYG

SEQ ID NO: 202487 - protein, 749 aa, Oryza sativa
  Clone ID: PAT_MRT4530_97762C.1.pep
MAEKTIREFAAPSAENVLIGPQINLGDTDFDLKSSLITMAQASSFCGKPNENASVHLQQFLEICSTYTVKGVSPDAVRIRLFPFSLLGKVKQWSYANRATINTWDMCSTTFLSKFFPMGKTNALRGKISVFQQTRDELIPKAWERLQEYVAACPHHGMDEWLILQSFYNGLTPTSRDHLDVAAGRAFFSKTCEVCGSTGHFGNDCPETREETMYMGNDNNGFRPQGGQGWNSPAHISKEATIMVSTVNKSSNFKRPTTGSSKGPISNAESLNVVPVKSVFDRLRFPEIAAGKAPARDQGVRCASCHKLDHRALACWNKKKAQVWRPKKDSMPAAKKSIVERAVLGKEIICFKNQGSPSSSSQQLQSVPLLLSTSSPSAPMAVLLEPWDHQLERADLCLQEDPPKRNEGMAVACIEPPPTPEQYEGFRHLVINYVQNVLGYHVLEASRHPIEFMYVRVASALLRDTLIAGGPYEVDNQFMLRFVPHDLTSSCRNSPFTSEGWIMFLDFPLDFKTPAIIDKAVSLFGKVIKVQLDDNVRGRLMVKALYSSTLEVPRRIVVKRAIAFGGVGRSWTVSVFLCHEELPDVMPGDEDLPPVNHIPIPDPVQLLAPQVDAFGDNMEEDAPAVEQNSQPLSAVSVVAGNQNFALLAAVLLVVGNETEVEQAEGDLGHEYMNEAHIEDAEMVEPISCVLPEQQVLPQDPFQQSASSCLPSLKKSRKTKAKIVAIVDTDRRRNSRINKLTGGYMSPDPK

SEQ ID NO: 202488 - protein, 90 aa, Oryza sativa
  unsure (1)..(90): unsure at all Xaa locations
  Clone ID: PAT_MRT4530_97763C.1.pep
CSSWGRSISVEEIRETLPEVATVRWHLFNMVFQMLSPILCGLGVNSMLVRLYVLGPGKCHXEHQVXCEERGEPTCVDPPHSVCWDGVQLT

SEQ ID NO: 202489 - protein, 51 aa, Oryza sativa
  Clone ID: PAT_MRT4530_97764C.1.pep
KTHGCTLHLTYATGGGATAETKLPYVNFNSYYSITISAQLCSKVVLLPHNQ

SEQ ID NO: 202490 - protein, 1722 aa, Oryza sativa
  Clone ID: PAT_MRT4530_97765C.1.pep
MAQPLRAEAGLLLLLHPSSSCGRRDGGGDRRGGAVEPAAAVRAGAAAVEADTDAASSASSPAATSSCRLRGVVVGRRGRGGGCVRGESVRQREAAADAGRFHAFEKAHMMDPRSTGRGVRQFKTALLQRLEQDEKSTFTKRMAKSDSQEIRLFYEKKEKADERELLPVLAEVLRAVQIGTGKEKQKRIASETFADKSALFRYNILPLYPGSTKQPIMLLPEEKKGNVANQREHLILLLANMHARLNPKSSSETMLDDRAVDELLAKTFENYLTWCKFLGRKSNIWLPSVKQEIQQHKLLYISLYLLIWGEASNLRLMPECLCYIFHHESLKNKNGVSDHSTWRNYDDLNEFFWLDTMLYWVIAFANCFKLGWPMRLNNDFFFTSNKNKNSRLPIVPPVQQTEQQINQLRTSQQTDQQNTQLRTSQQTEQRNTQLRTPNGSSSFQNMLNPEAPGQTQQQTTSDTSQQKWLGKTNFVEVRSFWHIFRSFDRMWTLLVLGLQVLIIMAWHGLESPLQLLDPIIFQDVLSIFITNSVLRVIQVILDITFSWRTKRTMRFSQKLRFAVKLSIAVAWAIILPIFYASSQNYLSCSARRPKTFLGIFCLSKYMVVVALYLTSNVIGMALFFVPAIKPLVEPTKEIMKVYFMDTQIWYSVFCTIFGEMDLMTMPMSLEHRSGSIRWPMFLLAKKFSEAVDMVANFTGKSTRLFCIIKKDNYMLCAINDFYELTKSILRHLVIGDVEKSFSSACPCEYYYDVLQILSRVIAAIYTEIEKSIQNASLLVDFKMDHLPSLVAKFDRLAELLYTNKQELRYEVTILLQDIIDILVQDMLVDAQSVLGLINSSETLISDDDGTFEYYKPELFASISSISNIRFPFPENGPLKEQVKRLYLLLNTKEKVVEVPSNLEARRRISFFATSLFMDMPSAPKVSNEWRNFLERLGPKVTQEEIRYWASFHGQTLSRTVRGMMYYRKALRLQAFLDRTNDQELCKGPAANGRQTKNMHQSLSTELDALADMKFSYVISCQKFGEQKSSGNPHAQDIIDLMTRYPALRVAYIEEKEIIVDNRPHKVYSSVLIKAENNLDQEIYRIKLPGPPLIGEGKPENQNHAIIFTRGEALQTIDMNQDNYLEEAYKMRNVLQEFVRHPRGKAPTILGLREHIFTGSVSSLAGFMSYQETSFVTIGQRFLADPLRVRFHYGHPDIFDRMFHLTRGGISKASKTINLSEDVFAGYNSILRRGHITYNEYIQVGKGRDVGLNQISKFEAKVANGNSEQTLSRDIHRLGRRFDFFRMLSCYFTTVGFYFNSLISVVGVYVFLYGQLYLVLSGLQRALLIEAETQNMKSLETALVSQSFLQLGLLTGLPMVMELGLEKGFRVALSDFILMQLQLASVFFTFSLGTKAHYYGRTILHGGAKYRPTGRKFVAFHASFTENYQLYSRSHFVKGFELVFLLIIYHIFRRSYVSTVVHVMITYSTWFMAVTWLFAPFLFNPAGFAWRKIVEDWADWTIWMRNQGGIGVQPEKSWESWWNAENAHLRHSVLSSRILEVLLSLRFFMYQYGLVYHLKISQDNKNFLVYLLSWVVIIAIVGLVKLVNCASRRLSSKHQLVFRLIKLLIFLSVMTSLILLSCLCQLSIMDLIICCLAFIPTGWGLLLIVQVLRPKIEYYAIWEPIQVIAHAYDYGMGSLLFFPIAALAWMPVISAIQTRVLFNRAFSRQLQIQPFIAGKTKRR

SEQ ID NO: 202491 - protein, 61 aa, Oryza sativa
  Clone ID: PAT_MRT4530_97766C.1.pep
LILGDDKPGHVRGLGLVPGAKQVLDGSNSRRLKNINVTRLGDNWREDVAGAKLHLEKIENH

SEQ ID NO: 202492 - protein, 43 aa, Oryza sativa
  Clone ID: PAT_MRT4530_97767C.1.pep
CYGIAVSLFPHLCLRLAPCSMSHAINAHRWPSGHGNNVQRHLS

SEQ ID NO: 202493 - protein, 507 aa, Oryza sativa
  Clone ID: PAT_MRT4530_97768C.1.pep
MNPGARPPALQTLSARLWPRRRLCGVHAGSRSGGEGPGARESGGGDVRIGRGEEEEEGGLDGGRVPQEVLLRLPTPPGRAETDDDDGENLSPGAGSGSRRRFFEELRLKADRIVKILLQDGPGFNTRQALDEMRPRVSNALVREVLLKFVVSIDGVNRARYPRLAYKFFLWAEEQEGYRHGTSMYNLILKIFAECGELKAMWRLLEDMTDKGLPVSSRTFHLLVCTSGRAGLRRRLVERFIKSSNFNYRPFRNSFNAILHTLLTIEQYSLIEWVHQKMIAEGHSPDVLTYNVVMRAKYMLRKLDQFHKLLDEMGKNGLAPDLYTYNLLLHVLGKGDKPLAALNLLNYMSDVGCVPTVLHFTNLIDGLSRAGNLQACKYFFDEMVKKGCQPDVVCYTVMITGYVAAGEFDEAQKFFDDMLLRGQLPNVYTYNSMICGLCIVGEFDKACSLLKDMESRGCTPNFTVYSTLVSRLRNAGKDSEANNIIQYMTNKGHYLHLLSRFRRYRRC

SEQ ID NO: 202494 - protein, 109 aa, Oryza sativa
  Clone ID: PAT_MRT4530_97769C.1.pep
MAKAGKPRRYSESKGISGKLQRLRHDEFGIKEAQQAAPGLLGPSSTASAMTVEGEGVEQEGWRLMGPGIIALSLCSCGVGVSTELDLANSILFGRRKELGAGGGELVLE

SEQ ID NO: 202495 - protein, 194 aa, Oryza sativa
  Clone ID: PAT_MRT4530_9776C.1.pep
PRVFHQHRPPIRPHGNNEDEDSGDGDNDDRRLREMTSTRRVATALDADDIGLDFITTRLLAIVRLPLTVAQGLHYRRYRVGHIPRLSLDSTTAPPRASSPTRPSSPPPLRGLHRLCPTRIWPLAWIWGATAASASASIGVEEARGDNRVGCGHEAASSSATMPICPTSSSRMGMGSRSSGRRGRGEKGEERKGL

SEQ ID NO: 202496 - protein, 35 aa, Oryza sativa
  Clone ID: PAT_MRT4530_97770C.1.pep
MEDGGWICTVCSHRTDKLTDLQLIYQILSNNKATN

SEQ ID NO: 202497 - protein, 192 aa, Oryza sativa
  Clone ID: PAT_MRT4530_97771C.1.pep
SIIISLSYTRHHPIAVPPPNLGGHLAAMVGSADGSDVSFSVGGETLIRAHRAVLAARSPVFSAELLGSMAEGTMPCVTLHDIEPATFRALLHFVYTDALPPRDILSPSFFKKLFAAADRFALDRLKLMCAQKLWESVTVETVAETLACAEMHSCPELKSRCLDFFVEENNFRKVVVTGGYLRLMQGFPSVID

SEQ ID NO: 202498 - protein, 265 aa, Oryza sativa
  Clone ID: PAT_MRT4530_97772C.1.pep
MAWGKTDREGCKWRRPTLIPVYRLPAACRFLSSATPSLCGKKNNQLQCCRLKKESEKSRARSLERQSFAAPSAMPIDYLSLSPALAASPTSSPSTASPSGAGHSAIILALPVVNHDSVHPPNELFGSEHKLVFQFHVVSVLLLRCIRSCRLFLSCRTSAVFARQCLNVVPVACSHQPFFRAAIDAGNGTLVSSRNASSDGLEEDAQSAISSTVELSIFGERSVCAAQQLDEEDSEAWTLWPCGVVARWPLDLFIIDSFLRKNHFR

SEQ ID NO: 202499 - protein, 157 aa, Oryza sativa
  Clone ID: PAT_MRT4530_97773C.1.pep
MLNSTVELIALWASSSSPSLLAFCVSHLIIALLLLAGSGAGAAPEISSRADGDRSLEADAVVQGREMNPGGHKGPVAGVNGRAEEWLVRAGDGDNVETLASENGRSAAREEEPAATDASQEKHGDDVELEDELMLRAEEFIRRMNRVWMAENLRVLC

SEQ ID NO: 202500 - protein, 122 aa, Oryza sativa
  Clone ID: PAT_MRT4530_97774C.1.pep
MDCHRNESQRELEMGTKPHFVVIPWLATSHMIPIVDIACLLAAHGAAVTVITTPANAQLVQSRVDRAGDQGASRITVTTIPFPAAEAGLPEGCERVDHVPSPSLMPSFFLTGMQFGDAVAQH

SEQ ID NO: 202501 - protein, 267 aa, Oryza sativa
  unsure (1)..(267): unsure at all Xaa locations
  Clone ID: PAT_MRT4530_97775C.1.pep
MPAIVADLWTTXKTWDNQKRNNLFEYRAVNKILQVPXIQNNEEDMLCWKFTPNGICNTKSAYKEIYKREMQSCTQVNDQQESITRKMDRIPQGNRCYVDASWEDHVTGIGIFFHFPSTHNALFIKASTNSAQSPLQAELIALQLALEIAFFLNFAGTNFLTDSATIADEVKTRNFSEQPGHWSLRPLWSQITTTIPNHLLKVFWISREINIIADKLAKEAKADALIKPIYNCQNISHIAYPSRDCHASSLNAHFSSLNCKINHVLCS

SEQ ID NO: 202502 - protein, 66 aa, Oryza sativa
  Clone ID: PAT_MRT4530_97776C.1.pep
LAPKTWDCKKTNSPSSSKNLGMNPCQQTKSPSTSTCWCYNPPRGGPFPHKFKRGYRPGASPFPGRV

SEQ ID NO: 202503 - protein, 65 aa, Oryza sativa
  Clone ID: PAT_MRT4530_97777C.1.pep
LQENRAHRKLKCTKESAESKCKILENSMQSEPTVLSKILGELWKMTFLNIDIYPEVLTQNILFEV

SEQ ID NO: 202504 - protein, 152 aa, Oryza sativa
  unsure (1)..(152): unsure at all Xaa locations
  Clone ID: PAT_MRT4530_97778C.1.pep
MADGGGDGAMPDPTVRNLLEQESLKWVFVGGKGGVXKTXCSYILSILLDCARQSVLVIFTDPGHNLSDAFQLRLTKVHTLVLGYNNLYGMEIDPKAENDDLSIEGMEGXFSXLTNAISGDDETMSFAALLKLVQTMDYYREIFDTGSTGHTL

SEQ ID NO: 202505 - protein, 460 aa, Oryza sativa
  Clone ID: PAT_MRT4530_97779C.1.pep
MGADLDFSPPPPPPEPALSPEPEILAPDHQSWKAEMMSALGESVSFGRFLAEPLEWGKWSAFAHNRYLEEAAHQSRPGSVAQKKAFFEAHYARKRKTDADADATGSDVDPDEDAAAAVSSARSSSSSCMTDEPAAEETTSCVVGSGVVAAGPVEEMEELDVIADGGVGSSCGVDADGAAHHKQDGVHAGESREVLQAMEKQEAATPDPCADNSVPADADDKQPLKESSIVNQGSAESVKRRRLPSLLQKPAKFSSPSSGSKGPTSSAKRRSRLHSAKENSSPPNNESDQQATSSVPQNRSILEAFQKSKNFGRCETGNAASSSKNLGTTIAARISQLESATGPVKHTDSALSQVKPPIEAFPKDVPEITSRTSQLEEQRSSHVTRVKEKLFGFTSQSAHQKANTPRKEKGKTQNESFKARPLPNFYRRNKQAKDSIHQVKGTSTVPNIERTRDRSTSLYR

SEQ ID NO: 202506 - protein, 140 aa, Oryza sativa
  Clone ID: PAT_MRT4530_9777C.1.pep
MAAAGTGGDGNGVPTTPDHGGAAAEGRQDLGKLLEWLGREIGDRSGENTTPERRGMVGLTGDREIPRSGGFPAMNNGDRGGSGCTVKGWLRWWNGETERRPGGRLKAVAAAQRGSDGSGGGGRLEIAGERRRRGSAWRAR

SEQ ID NO: 202507 - protein, 592 aa, Oryza sativa
  Clone ID: PAT_MRT4530_97780C.1.pep
LITSCSSSNRRKRRCSHLRMRLEKDREEKERRKKEKAEAHLYTIIKVARDDDLTTQIGKDIYFDLVDHDKVPSFRIQKQMPFTQFKEEVAKEFGIPTQFQRFRLWAKRQNHTYRPNRPLTPQEETHTVGQLKEAANKAHNAELKLFLEVELGLDLKPLPLPDKTSEDILLFFKLYDPEKEQLRYVGRLFVKASGKPQDILPKLRKMAGFSQDEEIELCEEIKFEPNVMCEYIDNRLLFRACQLEDGDIVCFQKSPKPDTADQYRYPDVPSFLVYIRNRQVVHFRSLEKPKEDDFCLEMSKAFTYDEVVEKVAQKLGVDDPTKIRLTSHNCYSQQPKPQPIKYRGVERLLDMLIHYNQTSDILYYEVLDIPLPELQALKTLKVTYHHGTKDEVSVHSIRLPKNSTVGDVLNDIKSKVELSHPNAELRLLEVFYHKIYKIFAPNEKIENINDQYWTLRAEEVPEEEKNLGPFDRLIHVYHFTKDTQNQTQVQNFGEPFFMVIREDETLSSIKERIQKKLKVPDEDFSKWKFAYISLGRPDYFEDSDTVASRFQRNMYGAWEQYLGLEHPDTAPRKTHNANQNRHSFERPVKIYN

SEQ ID NO: 202508 - protein, 90 aa, Oryza sativa
  Clone ID: PAT_MRT4530_97781C.1.pep
MATRARPLLLCLCLCFASSCLSSAVDAAAAAGNGYRTTAFLVDDEGRRLRAELVAGGGGGNTAYGGDVQRLDVYARGGFPTPPKEVWRGQ

SEQ ID NO: 202509 - protein, 238 aa, Oryza sativa
  Clone ID: PAT_MRT4530_97782C.1.pep
SVHSASIESDPQCTTLPNQSPNSYLITQPAAPSSLRWRLLPSPRRQLLPSPSPRGGGGGEGGWGRGGGSRRPRRWHATSSASCERWRGGDDRSTVLWRLGTRRIEETEAGAAELGVERLDARGGGGSRTGIEEEAGEVSAGRFLAAGASSGSWRRVRPAVLGGGGSRTGVEEEAGEVSAGRVAGGSWRQNASPAASFSSLPRRRASPPTPRRHAGDAAAVRLASPSTVPPVPLDLLIC

SEQ ID NO: 202510 - protein, 66 aa, Oryza sativa
  Clone ID: PAT_MRT4530_97783C.1.pep
GTGNKFYSGCGHDVNISDHCTSTQPFPLAAFAMEQEVAVQQKMVQEALNLDVGLGNDVVVGDRDAG

SEQ ID NO: 202511 - protein, 71 aa, Oryza sativa
  Clone ID: PAT_MRT4530_97784C.1.pep
MANVLKSFFGTPGVEPHEKLALRRCPRLPYDVPDFLKINAVAPYWHYLCLLKEDGNIVSIEGGPESRQAPV

SEQ ID NO: 202512 - protein, 119 aa, Oryza sativa
  unsure (1)..(119): unsure at all Xaa locations
  Clone ID: PAT_MRT4530_97785C.1.pep
GDRGGSGGARRRKARRAWRRRLKNGHRGGSGRGERRAVLGGGMRPRLPPSPLSHAAAPXSHAAAACRGRRRCAPRLSVDRAARATRFVDLLPICCRVCCRDLCRFVAKHGRCEDTSSTV

SEQ ID NO: 202513 - protein, 113 aa, Oryza sativa
  Clone ID: PAT_MRT4530_97786C.1.pep
PPPPPREDPGAPPSGGGVSRRPLSKNKDSKPLDNKRGQSGSKKKGFQGPKLHKKGKRSGKKNPGGVVKRNINGGSKKQGSSKRGSQPGFYGAFGASDDSPPETPKGKKKGFGS

SEQ ID NO: 202514 - protein, 52 aa, Oryza sativa
  Clone ID: PAT_MRT4530_97787C.1.pep
MSNTGNDINTGDKEKEAPVNTNGGNTTSNTSGGPFSWDSLALLLPTLEPDLE

SEQ ID NO: 202515 - protein, 71 aa, Oryza sativa
  unsure (1)..(71): unsure at all Xaa locations
  Clone ID: PAT_MRT4530_97788C.1.pep
GKWKPLRLGIVSTPFXGLLFNSVPDIPSNXXFLQIXLPTFLPXEITXXXXITSEAKXXXKXXGTXIGSXTF

SEQ ID NO: 202516 - protein, 76 aa, Oryza sativa
  Clone ID: PAT_MRT4530_97789C.1.pep
MNLSSSLASAYTEASTPIRARRAPSLFAKALSSFPCASQLFPGTPHSSAVTSCTCKITCLPLCLSFSIPLLHSTVI

SEQ ID NO: 202517 - protein, 175 aa, Oryza sativa
  Clone ID: PAT_MRT4530_9778C.1.pep
DVKPIPESTKIEVEPLPSPVAVSLKPPPKIERNQSFDDDDDDFSNKPVAKKSNSASVKATVYSVADLQMATDSFNMDNLVGEGTFGRVYRAQFSDGKVLAVKKLNSTVLPSQSLDDVFDLVSNISKLHHPNLNELVGYCMEHGQHLLVYDFHRNGSLHDMLHLPDEYSKPLSWNS

SEQ ID NO: 202518 - protein, 244 aa, Oryza sativa
  unsure (1)..(244): unsure at all Xaa locations
  Clone ID: PAT_MRT4530_97790C.1.pep
GMMIVENSTNDLIPQQTVIGWKMCIDYKKLNKATWKDHFPMSFIDXMLERLANHSFFYFFDGYQRCMLSICSDMIKKIMEVFMDDFSIYRKTFDHYLKNLDKVLQRCQEKVHNILGHVEFDXRFIKDFSQVDRPLSCLLAKDVPFDFINECLKSFKVLKESLILASSIQSXNWSLSFEIMCDANDCVVRAVLGQTTHAIAYASKTLTGAQINWTDTYMEIESCIFLFLGYWALISNRLQSFFPL

SEQ ID NO: 202519 - protein, 71 aa, Oryza sativa
  Clone ID: PAT_MRT4530_97791C.1.pep
ALVHLILLYCPYTEDGCREHWSFKTGRGLIPDEYAQDDYHHLRPCDWMEHYDWEHVGYTARLKELCSLHTN

SEQ ID NO: 202520 - protein, 224 aa, Oryza sativa
  unsure (1)..(224): unsure at all Xaa locations
  Clone ID: PAT_MRT4530_97792C.1.pep
AVCALLFSSSGNPLQTSAYIAENTFAIAIGALSLVLFAQLIGNMQTYLQSISKRLEEWRLRQRDMEEWMRHHQLPDELQDRVRRFVQVKWLATRGVEEESILQALPADIRRDVQRHLCLDLVRRVPFFSEMDYQLLDAICERLVSFLCPERTYISREGDPVNEMLFVIRGKLESSTTNGRASNFPFFIILRPGDFAGEELLTWALLXKTNVHFPLSTRTRQSLT

SEQ ID NO: 202521 - protein, 375 aa, Oryza sativa
  Clone ID: PAT_MRT4530_97793C.1.pep
MEAVASTSRVRGWSSLPTDVLVRILGSLRWSSHPNAALVCRQWRSAVSLSSFYPAWITPLLLSTAGVGTANIRYYSPYYDKNFEVDGLLKVPGAKICCSTGRHLSMCVDQSLVFDIDLVTGALVEVLPPKPHALFNFVVSDGDERLFGVEAILTIKVASSIRNSSGEWEDWKLTEYHPDLPRIRVSPDTNPVLHNGLLYLLAQDGRLLVYDPCRHDNGFEILDKPDGFGFKCEDSYLLRSSQYGLMVVLIERRGKAVHVLKLNEETMEWEKVESLHGQVVFTGSLTTIIKKPKFKWMENKVFLPRFYNWPETIHVDLVTREGEMAFVPKSSSYSNTLDASITNIWSYELGCGTPTMEYWGTERPDYSIWVDFAGN

SEQ ID NO: 202522 - protein, 472 aa, Oryza sativa
  Clone ID: PAT_MRT4530_97794C.1.pep
MANKPSLAVAAASRQRWALATSLCALLCLSLVVSAGLLLLGSTRPFRRPLFAAPQQQREVVGEAPWERYVKLAQAASPGGARDRAPDLGGDEGAEGDDDDAISTAPAPAPSPAAEEGGDEESCDLFQGRWVRDGAAAGGYPLYEAAECPFLSDQVTCRRNGRPDAEYEQWRWEPRGCGGGGGGGGGSREAALALALEQCRNRRVVFVGDSLNRNMWESLACLLYTAVPDRSRSRVLDVASDYRIFRAMDYNCSVEFFWSPFLVTLETKQDRTRALKLDQLPATLEKLRGADVLVFNTGHWWTHTGNLRAWDHLEADGKPVEMGGEEAFNQALGTWASWVDQNVDSARTRVFFRSISPEHKSENWCYNQTSPITDETKIVPWFPRGLVSIVERNIRSTRTPVTYLNITRLSELRVDAHPSVYTITREGKPLSTEQRQQPLVYADCSHWCLPGLPDTWNLLLLASLARSPVNVH

SEQ ID NO: 202523 - protein, 78 aa, Oryza sativa
  Clone ID: PAT_MRT4530_97795C.1.pep
VEFAHAPPWRRPSLNPMLPMRPRASQAAAPETAAAAESLREEETEDGWVFLAGRSRATRPPPPPPSPMARAVASGSSG

SEQ ID NO: 202524 - protein, 1623 aa, Oryza sativa
  Clone ID: PAT_MRT4530_97796C.1.pep
MSGQAPQTNQVGGSGVGGADGLPQQMQDVVGLGGLDTQFLLMRNTMRDRIFEYIGRKQSSTDWRRRLPELAKRLEEILYRKFLNKADYLNMMRGPVEPQLQFAIKTLSAQNQQNQQNQQMPRQMASSSGYGTMIPTPGITQSATGNSRMPYVTDNTGLPSSGATMVPQGANTGTSLPGSMSNGYQHLTTSVPLNSTTSSIPSTMGPVGIQRQVTHMIPTPGFNNQQNVPVNPDFSNGAGYFNGEPTVTSQMQQQKQFPSNQNSHQIQHIGGHSNSGMHSNMLENSSAYGLSDGHVNGGMGVHGSNMQLTNRSAASEAYINISTYGNSPKPVQQQFNQHPPQRIPTPVDISGSGNFYNTGSSALTAANNHSMGATNLPSRSRMNSMLHTNQLNMQSIQPQPQIKTEVLDQPEKMNFQSSQLTHEQLIRQQHSMQQHQMQPSSQFVQNQYHLNQQQPNSQHQQSILRSNSLKQPQLSSSHSMQLSEQGALPHTELISSQATEHADIPIYQGQYQQRSAHDNVKGGQVFGHLSSSQNFHSNASHDSQQLLPTNQQLDDSSNDVSYVLKGSQPEQMHQAQWRPQTMEKAPVTNDSSLEKQIQADLCQRTMSQDGAQQPFSSDWRLPGCTVTPADPALPKLPSGGLEQAAGNIYYFRQMKWLLLLFHAKSCLTPVGSCKFHRCFQCPVCSNAKKLLQRSAELASKQKPPEPRKIAQQNTAQRIMNGVEGDIMDIDLVSDEIFDSQPSVPKRLKMQPVSPSTAEREVSMPSNAGLILQETHSELPDQNNKVGQLKMDVKIDPRPLQKPAKIGYGTDGNVPTARHNVAPGGSNEIKTHVKQEIMPIDKETSETAPEVKNEANDSTDITVSKSGKPKIKGVSMTELFTPEQIQEHINSLRLWVGQSKAKAEKNQLMGHNENENSCQLCKVEKLTFEPPPIYCSPCGARIKRNAPYYTVGTGDTRHFFCIPCYNESRGDTIEVEGQNFLKARFEKKRNDEETEEWWVQCDKCECWQHQICALFNGRRNDGGQAEYTCPNCYVEEVKRGLRMPLPQSAVLGAKDLPRTVLSDHIEDRLFKRLKQERQDRAAQERKSIEEVPGAEGLVVRVVSSVDKKLEVKPRFLEIFQEDNYPTEFPYKSKAVLLFQKIEGVEVCLFGMYVQEFGAECSYPNQRRVYLSYLDSVKYFRPEIRTVSGEALRTFVYHEILIGYLEYCKQRGFTSCYIWACPPLKGEDYILYCHPEIQKTPKSDKLREWYLSMLRKATKEEIVVELTNLYDHFFITMGECKAKVTASRLPYFDGDYWPGAAEDMINQLRQEEDDRKQQKKGKTKKIITKRALKAAGHTDLSGNASKDAMLMHKLGETIYPMKEDFIMVHLQYSCSHCCTLMVSGKRWVCHQCRSFYICDKCYDAEQQLEDRERHPSNSRDTHTLHPVDIVGLPKDTKDRDDILESEFFDTRQAFLSLCQGNHYQYDTLRRAKHSSMMVLYHLHNPTAPAFVTTCNVCCHDIETGQGWRCEVCPDFDLRKMLDLLVHASTCRSGSCQYPNCRKVKGLFRHGMQCKTRASGGCVLCKKMWYMLQLHARACRDSGCNVPRCRDLKEHLRRLQQQSDSRRRAAVNEMMRQRAAEVAANE

SEQ ID NO: 202525 - protein, 118 aa, Oryza sativa
  Clone ID: PAT_MRT4530_97797C.1.pep
MGLKHAQDYNCSGEFFWSPFLGTLETKQDRTRALKLDQLPVTLEKLRGADVLVFNTGHWGTHTGNLKAGDHLEADGKPVEMGGEEAFNQALGTWASWVDQNVDSARTRVFFRSISPKT

SEQ ID NO: 202526 - protein, 73 aa, Oryza sativa
  unsure (1)..(73): unsure at all Xaa locations
  Clone ID: PAT_MRT4530_97798C.1.pep
KAAGMAIAAGAKAAAVVPTQRRRGARRRXPQICASWLDLEGGRRWSSATAADLRRLVTAATVVVAAVGGDGVG

SEQ ID NO: 202527 - protein, 394 aa, Oryza sativa
  Clone ID: PAT_MRT4530_97799C.1.pep
MKQYYKAALLRYWVVVPFLLWLVATEEQLAAGAVAGAAAESSSTWGGQGQLQLPLWVRPGDRRLLGMSVAGMAVDAVVAADGTGQYTTIKQAVKAAEADTSGRRYTIHVKAGKYVEDVEIWRPNITMIGDGIGRTIISGMKSKNKNRGTACTGTLNVQKDGFIARELTVENTAGPQAMQAAAVVVKSDRAVFFRCEITGYQDTLLADVYRQFYRECVISGTIDFVWGEATAVFQMCHLLVRRPLEGSHNTITAQGRNHSEPVVARSGFVFQECNVSTKEDLRGVDTYLGRPWHPDSRVIFMSSYLDGNVVNPKGWVAWRINNATDERSTASTVYYAEYNNTGAGANVTQRVNWHGFHLLAPHEVRNFTVDSFIDGGSWLPETNVPYHLDLDLGL

SEQ ID NO: 202528 - protein, 245 aa, Oryza sativa
  unsure (1)..(245): unsure at all Xaa locations
  Clone ID: PAT_MRT4530_9779C.1.pep
KKKKNKTKQKKKQKKKKQKKKKKKKNKKKKNKKXKTKKQNKTKKKQKKNRNXKKNTKTTRKTXKKKPQXTKKKTKKKKTKRHKKKKKKKKKKKKKKKKKTNKSKQKNKHQHQPTQKEKGKQKQQTTEKNDDEKKQEXSERQXRRARQARHQERTGPKRPGNTSRRRRGRRLNPSSPPSPRPPPPASPSSTFFSFSASTGAFSATATSVVAATAAGAASGCGSSAISPPKNALAKGGEHEIEREKG

SEQ ID NO: 202529 - protein, 217 aa, Oryza sativa
  Clone ID: PAT_MRT4530_977C.1.pep
MSSGDSGRKAADALTNNRGHHPSSREGGNRHVYLVLLDPSLASQATKADASWGQVMRERAIEEFTDGCIDRKALFASLVHVRLGPQLGRPDPIIAGLSSRIHRGRGPELALLCLLFARRRHSLVWRATSTKPDRLACEITQAAKRNLFVCNCFYFHLWRVGLAFHWGTARDAVYEAESMTRYRKIAWIWTLLYCTSTYNWHGCRHVSCLNAPLVIQP

SEQ ID NO: 202530 - protein, 117 aa, Oryza sativa
  Clone ID: PAT_MRT4530_97800C.1.pep
PRRSLTPPAAAPSASPSPPAPSPHPASPPSPPPPSPSVFPARVAFSAPLHHCPPPPPSPPPSPPSSPSVSPGRVAFSAPLRRRPSPQPSPPSPLPSSPSVFWLIYAQVYGALEWGSA

SEQ ID NO: 202531 - protein, 312 aa, Oryza sativa
  Clone ID: PAT_MRT4530_97801C.1.pep
MELLLPTAAASAPPPPPAFPADPHLVDRAARFSAFASPSPPSPPPPPPPPPSSSSKRKPDPASKGKAAAKKGKTAASGEDGGDGGEDEKPAYVHVRARRGQATDSHSLAERARREKINARMELLKELVPGCTVSVRSKGTLGVQQRVMPSVGVQQQQHVVAPFFISKTEVSGTALVLDEIINHVQSLQRQVEYLSMRLAAVNPRVDFGGLDNFLTTECGRITGLNYKNGMDLEQVTWPDMGVHGARNLMQLQQQFWHGDLAHPLQPPSQWEKRTDTNPPVFSNSSSSLFGYDLASSALIGPQLLSLSLFQSV

SEQ ID NO: 202532 - protein, 43 aa, Oryza sativa
  Clone ID: PAT_MRT4530_97802C.1.pep
MTLNGFNGEPTEAKGIFSVELTVVKKTLPTAFFIVDVQDFIGF

SEQ ID NO: 202533 - protein, 61 aa, Oryza sativa
  Clone ID: PAT_MRT4530_97803C.1.pep
MARDSDDGRAHAQWTGDAGRELSPVDRPRATHGFRLSDSGRDVGMGASLWPLQKWRLSSIR

SEQ ID NO: 202534 - protein, 546 aa, Oryza sativa
  Clone ID: PAT_MRT4530_97804C.1.pep
MSPATAAADDLRAEEEGKGGRSSSRQEEANVLLAVDAAEGGGAWSPVGWFRMLGRELHWSFVAGVVATYGASQGLGGGVMRVASDYYWKDVQRVQPSAAQVYQGVTSIPWMVKPLWGLLTDVLPIAGYRRRPYFVIAGFMGVVAMLVLSLHSKLHVLFALLALMAGSASVAIADVTIDACVAENSIVHPHLAADMISLNGFCASVGGLIGFSISGFLVHAIGSQINLVFLKGALGMLAIPSALVILAGMMIKDVHMPNFPYELAHMKFVEASRTMMATLKCPEVWRPCVYMYMSLALSVDIQEGMFYWYTDRNAGLSFSEGLIGFIFAVGSVGSLIGVILYQNILKDHSFRSVLCLSQLLLSLSGMLDLILVLRLNLKLGIPDYYFAVIDEGVSKMINRIKWMPLLVLSSKLCPPGIEGTFYALLMSIDNVGLLSGSWAGGLILHVLNITRTEFKNLWAAILIRNAMRLLPLALLFLVPRSDQNSNLLPADLLPEDDAAQYQMDNVELTSLTVDGKSSTGSLHQECKNQDVVENDDDEASLLANRS

SEQ ID NO: 202535 - protein, 326 aa, Oryza sativa
  unsure (1)..(326): unsure at all Xaa locations
  Clone ID: PAT_MRT4530_97806C.1.pep
DRTVHDRLTGDGDDDVSDDVTTGGGGSXTAHARRRTAALRHKRRAPRRRSRRGELTDDQNVGGRPTDGGGDEEEAAATFGSTAATALRRSSAVAKRXTGTATTLRTRWWRRRPTTAAATAARRGLKQKSECDTGPGEPWYGGGTRPLAARDDGEQPCSRNGEKTMGKRRQAPRGGAATAIWRHSASGNWRTAAGRTLDGGKRSPAMVREEGGVDGLRTVAAVLGKATTQRDVDMRGGAAWLEVAMVEVARVLGAEVVPAGIRGEVERMPRCGSAWRRQWWRWRGLAVTLAAVACVQRSMASDDACARVGRTGECGGKPGGEGKRES

SEQ ID NO: 202536 - protein, 110 aa, Oryza sativa
  unsure (1)..(110): unsure at all Xaa locations
  Clone ID: PAT_MRT4530_97807C.1.pep
DVSDDVTTGGGGSXTAHARRRTAALRHKRRAPRRRARRGELTGDQNGGGRTTDDAGDEEEAAAEIGSTTETALRRSSAVAKRWTGTATTLRTRWWRRRPTTAAATAARHG

SEQ ID NO: 202537 - protein, 257 aa, Oryza sativa
  unsure (1)..(257): unsure at all Xaa locations
  Clone ID: PAT_MRT4530_97808C.1.pep
MLHITTPRRRPIPSHPTSIPHSCAHEKHPPTMLSRFPSPPGFPPHSPVLPTRAQASXSPSTSGRTPPPLGSPPSHATATIVSATPSHTSASAPPLPVSLPEPPPHRAPEPPPPSPPPATPRRLSCPHRAASSPSPAPQPPCAARPPLPPREPSXRPLPSVQGELCRSLPLPGAISLGAVPPPRSLNPLSPSPGSSGRCPPVPARGMPPXLPLPRLPEEPAAAFPSSSRRCASTVSTPPSPSISPSLAASCAPPPQVA

SEQ ID NO: 202538 - protein, 473 aa, Oryza sativa
  unsure (1)..(473): unsure at all Xaa locations
  Clone ID: PAT_MRT4530_97809C.1.pep
EDRTSKEDCLDLALLFHPWAPCPPPRESFQALPLPPPPPPPPIKPPLPPEADSDEFLSSRSPXRNNRIVPPEPPPIPPPINPPPAVLSVDSEEPLPLPSSHGRSALPYCGPPSLLIPLXIPMPPRPPCPAPPPAPPPPPPPHPLPPAALIVPFPPPDPPPPLRLPTPPSASTSPSTFMNSLALSMTRPPPSPPKPRPRRVAPARELPPXAPPSKERPPAPPPPPPSSAXPAPTRGTRQPTPPPPRRPRAPPPTIPPASSPPPPRTTSPPSPPPXLPDPTSSPPPPXPSSPPSISPPPPPPTCAPPRRCSPPRRGAPSSTASTCSPSPPPTTSRSPSTTTSSPSGASPPSWRASSSAPAPGTPARPPRQSPTARPLPSPPPDSXTRAPRPPRRPSRRGEPRAPSPGRTPTPPPPAGRRRPRPPPPLPPTMSPPSSSTPRSPPSGRSTGSPPPGLPPPARDPASLPSPSFPPSPP

SEQ ID NO: 202539 - protein, 113 aa, Oryza sativa
  Clone ID: PAT_MRT4530_9780C.1.pep
TELSTPIRIAAARRRSPAARHRRSRRCRAAPPPPPSAGRVVHRRKPTGTWYLSVAGEPHHSSPAWYSRRSGRLFPSLTAPIISPGLAGPRPRLRHGRASSERRSRRLPCRPPP

SEQ ID NO: 202540 - protein, 1343 aa, Oryza sativa
  Clone ID: PAT_MRT4530_97810C.1.pep
MRRVGLWVVVLVVAAAVAGLVGASPASGLVLADEGGGGGGAGGRSFDGGAVRGEFPCGSHTARSRSCEEMNGSGSFDTTCVIGSSSSLDGDLCVYGDGSVVISPHVKIICPVAGCYIAINVSGSITIGEHVDLIAGSVSLYATNVSLDQRSTVNTTGLAGEPPPQTSGTPHSLEGAGGGHGGRGASCKVSNDTNWGGDVYAWSTLAWPWSYGSKGGSMAADHQFGGDGGGRVMLRASEFMNVDGDVLAEGGVGSLKGGGGSGGSIMIYAFKLYGNGTISAAGGNGWGGGGGGRISLDCYSIQQDLEITVHGGQSFGCPQNAGAAGTIYESSLQTLKVSNGNYTTHTETPLLGFPMTRLWSNVLVECNAKVLVPLLWSRVQVTGQIRLLSKGSISFGLSENPISEFELVAEELLMSDSVIKVYGAFRMYVKVLLMWDSEIQIDGGGKDVVLASMLEARNLVVLRHGSVISSNAALGVYGQGLLNLTGPGDGIKARRLFLSLFYNIEVGPGSFVQAPLDDAVQSSLDALSRCESKTCPSELITPPDDCHVNNSLSFTLQICRVEDITVSGIVRGIIIHIHRARTVTVTNNGTISASELGCKEGIGKGKFLKYGAGGGAGHGGRGGIGIYNGMRSEGGPQYGSADLPCELGSGSGSSESTDNTAGGGLIVVGSMKWPLSKLLIYGSLSSDGESHRGTKKNSNGTYKGGIGGGSGGTILLFLQGLLLERNSSLSASGGNGGLIGGGGGGGGRIHFHWSNIATGDEYVQIASVNGLVASSGGSGNDDGHFGETGTVTGKKCPVGLYGTFCTECPIGTYKNVVGSDSSLCMPCSLDSLPNRADFIYVRGGVTEPSCPYKCISSKYKMPNCYTPLEELIYTFGGPWSFAIILSFTIILLALVLSALRVKIGESDITYRSTNAIHNDGCASFPFLLSLAEVPGASRAEETQSHAHRMYFMGPNTFREPWHLPYSPPDAIIGIVSRALYKGLKVGSTPDLMVAYIDFFLGGDEKRLDVTSTIQKRFPMCLIFGGDGSYMSPYYLHSDTLLSNLLGQYVSTAIWNRLVAGLNAQLRTVRQGNIRSTLGPVVSWINSHGNPQLERHGVRVELGWFQATASCYYQLGIVVAVNEHFYKSLHQHDHVSEFIDRSRKNISSKKLNQDQPCTSYAVSRKRLTGGVNGGIINEGTLKSLECKRDYLFPFSLLLQNCRPIGYAYYWISVGAFLAVLLIPPLALLSPFLAGLNALFSRGPKRSSVTRIFALWNTTSVINIIVAIIYGALYSGLSSLSVSSVPHALNTKSFKSREDNEWWILPIILFVVKSLQAGFVNWHLANLEIQDYSLFSPDPDRFWAM

SEQ ID NO: 202541 - protein, 130 aa, Oryza sativa
  Clone ID: PAT_MRT4530_97811C.1.pep
LAVGHARLELTHTQPYVHARPKPIYARSIEGPTCQPQDKVGSEWWSPWFGQTRGVPLATVFHVVPPPALLIAVMLYLYTIIFHARVNHAHPVHARFRCTSRFNSTCARLKLTNANRRSVPLPLPLPSLSH

SEQ ID NO: 202542 - protein, 47 aa, Oryza sativa
  Clone ID: PAT_MRT4530_97812C.1.pep
KKSISINQENCDSAHIMLETKVLNKFIIKKNIMGTIIISLSMLKTHY

SEQ ID NO: 202543 - protein, 113 aa, Oryza sativa
  Clone ID: PAT_MRT4530_97813C.1.pep
MAMTTRTLLLAAVCAAAALPRGWSPIKNIDDPHIQELGRWAITENNRVSPSDELTFHRVTGGEQQVVSGMNYRLEIEAASGGGDVTGSYGAVVFEQEWSNTRKLISFDKNHNF

SEQ ID NO: 202544 - protein, 68 aa, Oryza sativa
  Clone ID: PAT_MRT4530_97814C.1.pep
SSATLPCPPHSAPRRLEEERRGGRTRRRDARRRKSEGEREATERQRSSSMRSRPTLIRSWHRCCSGCP

SEQ ID NO: 202545 - protein, 69 aa, Oryza sativa
  unsure (1)..(69): unsure at all Xaa locations
  Clone ID: PAT_MRT4530_97815C.1.pep
QCRXKIIAPYYKLSNSLHPLALEAESNKVKNTINLLQPPALEPESNSKRTPEIIDINELASQHEENQRC

SEQ ID NO: 202546 - protein, 71 aa, Oryza sativa
  Clone ID: PAT_MRT4530_97816C.1.pep
SVGRTVGVRAIASCICYPRRPARFHENTAAKHASHSHASPTLRRERMAWRRDLMRVHACVIVELTWERRGP

SEQ ID NO: 202547 - protein, 183 aa, Oryza sativa
  Clone ID: PAT_MRT4530_97817C.1.pep
VGWVPIQPLPESLQLHLLELYPVLETIQKYLWPRLCKLDQQTLYELHYQMITFGKVFCTKSTPNCNACPMRSECRHFASAFASARLALPSPQDKRLVNLSNQFAFHNGTMPTPNSTPLPQLEGSIHARDVHANNTNPIIEEPASPREEECRELLENDIEDFDEDTDEIPTIKLNMEAFSQNLE

SEQ ID NO: 202548 - protein, 335 aa, Oryza sativa
  Clone ID: PAT_MRT4530_97818C.1.pep
MLKLEPEFPGLPQRCDSCRSAPCAFYCLADSAALCATCDADVHSVNPLARRHRRVPMGVVAAPGAGGAFVVRPAGGVNSSWPIREGRRCDYDDDDADAAGEEDEEATSWLLFDPLKDSSDQGLPPFGDALVADFLNLGGGAGEKEDASSSKDCSSSHGKSSEGSHEFAVPGEPVPERQGFGAVSMDITDYDASNFRRGYSFGASLGHSVSMSSLENMSTVPDCGVPDITTSYLRSSKSTIDLFTAAAGSPVAAHSIMSPPQFMGAIDREARVHRYREKRKTRRFEKTIRYASRKAYAETRPRIKGRFAKRSDTDLEVDQYFSTTADSSCGVVPTF

SEQ ID NO: 202549 - protein, 458 aa, Oryza sativa
  Clone ID: PAT_MRT4530_97819C.1.pep
MATGQCMQALPMEVWNSWLLEKAVLPALDVAPPVKIGGPRRTSVLRNPNMEKLQKGYLFPEISIKREEHLKKYPDAKVISLGIGDTTEPIPSIVTSAMAEDVPFPFCRYALALSTPEGYQGYGPEQGHKNLRKEIADKVYPDMGIKESEVFISDGAQCDIARLQTLFGPNVTIAVQDPTFPGYVDNGVIMGQTGKADDGGRYAGIEYMRCAPENAFFPDLSRVRRTDVIFFCSPNNPTGHAASREQLRQLVELARRNGSIIVFDSAYSSYISSSSSSSTPRSIYEIPGAREVAIEVSSFSKFAGFTGVRLGWAVVPDELLYSDGVPVARDFDRVVCTCFNGASGIAQAGGVACLSTEEGRGAVARVVGVYRENARVLVETFRSLGKEVHGGGDAPYVWVRFPGRRSWDVFAEILEKTHVITVPGSGFGPGGEGFIRVSAFNSRDKVLEACQRLKSFLA

SEQ ID NO: 202550 - protein, 304 aa, Oryza sativa
  Clone ID: PAT_MRT4530_9781C.1.pep
NQSPWTPLPFSPFSRVPHALYRALHADPLRRRSPAISSRPPPPLPSLPRCAAATNSITAPRRTPASTPSPSSTAGTTFPSRGRATTATHRLQPAAAAALVVAAPRRLRRRQRRAKIYPGLRSVSPFHHRNHPSTVHPEPPPPYAASSPPCSTSVTIVHRRKPTGTWYLSVAGLAGPRPRLRHGRASSERRSRRLPCRPPPSFPPPVASPWSSRRRRSSVRTPSVSSPFSLFSPPPARAFAPVVVAGDHRAVRRRSRPADRRPSWPPRVCHVVRPRTSACVDSVHGAPATRESPTGGTRSKLLAR

SEQ ID NO: 202551 - protein, 124 aa, Oryza sativa
  unsure (1)..(124): unsure at all Xaa locations
  Clone ID: PAT_MRT4530_97820C.1.pep
SVAEPAGVIASSSGVPPLPSSSSAPPAVSATTDTPGSTGKKATPSLGLAAGSAATCKPSSSSRAGRRHRVTTTLAPSPAPGPAPAAFPLFXPAIPSHSGRGIGQEEQHKATTELDLHELGVVVH

SEQ ID NO: 202552 - protein, 113 aa, Oryza sativa
  Clone ID: PAT_MRT4530_97821C.1.pep
MASSSNPDTMDTDPPGGGGTLSIAVERNPPESRLLQLGVKSWPKWGCPTGKFPVKFDARETCYLVKGKVRAHIKGSSECVEFGAGDLVVFPKGLSCTWDVLAAVDKYYKFDSS

SEQ ID NO: 202553 - protein, 78 aa, Oryza sativa
  Clone ID: PAT_MRT4530_97822C.1.pep
ACRICKKDSNLTPRKNLCTSGYQIRMRQSIINGSKHLPPYHDMMASPNPSSEFGPPGGSILKIFPSPLIQYDKHPPPP

SEQ ID NO: 202554 - protein, 63 aa, Oryza sativa
  Clone ID: PAT_MRT4530_97823C.1.pep
FILTILCTSPPGGIIDDDRDKLHILRAERVESWRGDSVNATRSGQLYMGGEYPFNFTPNYHLI

SEQ ID NO: 202555 - protein, 207 aa, Oryza sativa
  unsure (1)..(207): unsure at all Xaa locations
  Clone ID: PAT_MRT4530_97824C.1.pep
MCIIWNNMQKEKEKKSNLAEGGARSTVADPASPLPSGGGSRHPTAWRRRIRPPRGLPPAPERRRARARARRAXLPPPSPTRLPSPPRTRLASSSVEKRGRREGEKGXSWREGAGGWWTGGGDRLRYVNGKQGRARRRRRRREKGKQRRPXCGSRNDDAELAHQAMPEPPSSSHFGPHRLHARSRHPAHEGFRLHCSTRVGGGGGDLI

SEQ ID NO: 202556 - protein, 92 aa, Oryza sativa
  unsure (1)..(92): unsure at all Xaa locations
  Clone ID: PAT_MRT4530_97825C.1.pep
MSSTRGGERYRLGPAVSGEGXKRNHMGEGHKAKAEDLEYASFAERRPRXRAARMEMVRRRPRRQGTGFAKKCRTTLPGGPTSRYALGGTSVN

SEQ ID NO: 202557 - protein, 84 aa, Oryza sativa
  unsure (1)..(84): unsure at all Xaa locations
  Clone ID: PAT_MRT4530_97826C.1.pep
LVSXSVSRAHALAGSSXXSARCSTSATVLLPXAQAXGAGXVXKRXVDDDCRRKSRYFIDMDPXDLXXMRWTAXGTDFDFDFDLP

SEQ ID NO: 202558 - protein, 512 aa, Oryza sativa
  Clone ID: PAT_MRT4530_97827C.1.pep
MDVASLLPFALALVAIPISLALLDRLRLGRIPPGPRPWPMVGNLWQIKPVRCRGFLEWAERYGPIVSVWFGSSLNVVVSTSELAKEVLKENDQLLADRPRNRSTQRFSRNGMDLIWADYGPHYIKVRKLCNLELFTPKRLEALRPIREDEVTAMVESVHRAVTQPGSEHKPIVVRNHLAMVAFNNITRLAFGKRFMNANGDIDEQGREFKTIVNNGIKIGASLSVAEYIWYLRWLCPLNEELYKTHNERRDRLTKKIIDEHAKALKESGAKQHFVDALFTLREQYDLSDDTVIGLLWDMITAGMDTTVISVEWAMAELVRNPRVQKKLQEELDRVVGRDRVMSETDFQSLPYLNAVVKESLRLHPPTPLMLPHKASTNVKIGGYNIPKGANVMVNVWAIARDPKVWSNPLEYRPERFIEENIDIKGSDFRVLPFGAGRRVCPGAQLGINLVASMIGHLLHQFEWSLPEGTRPEDVNMMESNGVVTFMSTSLQVIAKPRLDNPDLYKRFPVEM

SEQ ID NO: 202559 - protein, 128 aa, Oryza sativa
  Clone ID: PAT_MRT4530_97828C.1.pep
MASDLSQSLDLNIYRYKDYILLISTADRNQINWHAHTSEGDLWTCTGVKQISQASCFLSTRFWHARWDTLEVRITAAVFLIAEKPPASPSSAGEPGSVKAKMLKLGLPEVDESNIIVTPRFSFGIKNH

SEQ ID NO: 202560 - protein, 447 aa, Oryza sativa
  Clone ID: PAT_MRT4530_97829C.1.pep
MAPWPPIEEQRAGLAPRHPRSPNFTKPDTGGPSAVFNPVLFDVAAESAWDPRGPHMSAGHGRRRGGGREGAAGHAVDAAAKEEEDAGGERRWLARSSAGRGRRGGPIHDGEHGGGGGPIPLEAPPPMRPSVVSLPGAADDDEAERCHSPSAAAARGRRTRRRGDAGAGGGISPAGRAPPLPIRSPLAGRRAPPTVPRPPLFFSPAYSRLAAALLAHITAHLAVLGHCHHELLPDASLPPPIWVSADLTHGSLSPERRGRGRPPPPPLPPCSPANRDKTVTSDKTELKTAEGPQVSAHGGGEQPRRLVEGGRKWRRRQLGARNEGGGGGGAGAGAGGWKEGEGGGSGPDAGARVEGGGGSGGPGAGAWVERGGGAAAAGSADRSSSSTPRTRRCHSSSSSSSAGPMPARHLAIHCLSCGEIAIVTATLAVAPDLTIHEASDVYESTTL

SEQ ID NO: 202561 - protein, 197 aa, Oryza sativa
  Clone ID: PAT_MRT4530_9782C.1.pep
VSTAVLTLIYVAQTSLRGLWCLGPRGRASATRPPPLGGNQEEGGHLTLGPDVPEGARPRGRLRLPQASGHDTPGPISPTGVEPFLDLFRFYYELRWMESNRVSGCVGFRLRDGLKSRYIPFQCPSSRSKWRVRWLENSDPVLVVPEEQPNNISSWTAKPALTPSLQSFIDVIDDLRVRGLSGYEVAADFIGRRIQPL

SEQ ID NO: 202562 - protein, 147 aa, Oryza sativa
  unsure (1)..(147): unsure at all Xaa locations
  Clone ID: PAT_MRT4530_97830C.1.pep
MKKINFLDIWNIFGYFGIFPILSKKKISSGFLQVDVLPKIKSLGGFYTLLRSXIMGRVFSNSILVPRHTTNKSVSRGLLLTIXVSSTTKSNKCXRDFLAMNRVLNKSSRSQHQALKQTQINHSRTHTKSEIEDRWRGRSEKAKAQTE

SEQ ID NO: 202563 - protein, 132 aa, Oryza sativa
  Clone ID: PAT_MRT4530_97831C.1.pep
MLPIMDRAASPASPRRAPGQPPPFTAGVLLLLRRRIDSVPRCSLPAASAASSLRVRAKSERKEREIEKEKGGRERLTWPADMWGPRGSHADSAATSNKTGLKTAEGPPVSGFVKLGDLGCLVLRFKDVFVSR

SEQ ID NO: 202564 - protein, 92 aa, Oryza sativa
  Clone ID: PAT_MRT4530_97832C.1.pep
SIMFAGGGGGLVVMPGRSGLSIPSLPCGADPGAANFFERVFFFFLLFGPCCSQRQRGNRSINLCIQFSPFCVQGLEAVVLAIASCFLAAHGV

SEQ ID NO: 202565 - protein, 73 aa, Oryza sativa
  unsure (1)..(73): unsure at all Xaa locations
  Clone ID: PAT_MRT4530_97833C.1.pep
DNRPSHKLWTGHTNDKDVYKTLLASPHWNGTDMIITYDEPGGNYDHVSTPLVWVPQXEGSVGPDPYYFNTRSG

SEQ ID NO: 202566 - protein, 84 aa, Oryza sativa
  unsure (1)..(84): unsure at all Xaa locations
  Clone ID: PAT_MRT4530_97834C.1.pep
MSCCGGNCGCGSGXECGGACGRCTMIPDVEATATTKTFFLAAPSTMASSGGMHMAMESGENGGCCCNTCMSXTSWRGCSCWYCN

SEQ ID NO: 202567 - protein, 106 aa, Oryza sativa
  unsure (1)..(106): unsure at all Xaa locations
  Clone ID: PAT_MRT4530_97835C.1.pep
DFQRSLTKTFPGVWAPLPPATTHGAPRKPRSSGPSPRGAHALTRASSRRHVAQASQFAADCREGFFLTSFPTSIHPRTXPPTLGETKGGTLIELLLGILGKVKQHE

SEQ ID NO: 202568 - protein, 664 aa, Oryza sativa
  Clone ID: PAT_MRT4530_97836C.1.pep
MGIWYHKTREHTKLWVANRQAPLTDPESSQLSISSDGNMVLLDRATRSPVWSTNITGIAAAANSTVGVILNTGNLVLADASNTSAVLWQSFDHLDNTWLPGSKLRRNKLTGEATRLVAWKGSNDPTPGMFSLELDAGGGGASQHLRLAWNGSHQYWRGGGGNWTTAPEESGPEGQSPYTFLYVDAENESYVVFEVKDEALLSRIVVGVAGQIMLWGWVESAATWVLFWSEPTLCDVYSLCGSFSVCTDGSVPECGCLQGFVERQPRQWLISIRLGVASDLSGTGNTKKMTIGLVVAGVVAAAVTLAVLVAVLVMRSRRAKALRRLEDSSSFLTVFTYRDLQLVTNNFSDKIGGGAFGSVFKGALPGDATPVAVKKLEGVGQGEKQFRAEVSTIGMIQHVNLIRLLGFCTDRTRRLLVYEHMPNGSLDRHLFGSGSGHGGGVLSWKTRYQIALGVARGLHYLHDKCRDRIIHCDVKPENILLDGAFAAKVADLGLAKLMGRDDSSRVLTTTRGTVGYLAPEWIAGTAVTAKADVYSYGMMLFEIVSGRRNVEQRRRQAEAADDDEYDSGAGGTVEADFFPLTAVRMLFDGDGDLRDAVDGNLGGEVDMGEVERACKVACWCVQDAESARPTMGMVVKALEGLVDVNFPPMPRLFMVGLSTGSSHT

SEQ ID NO: 202569 - protein, 239 aa, Oryza sativa
  Clone ID: PAT_MRT4530_97837C.1.pep
MVVAIATEAWALAGCGAAAKSAAAAAQEAPVQLQQHSLSAARAKKPISFRAVAAAAVSSQCHQERRAVVVGRRSGMASCLLAAVAASLSGAGEARAAVLEADDDIELLERVKEDRKKRLQKQGVISSSGTETGYLQDLIYKLSKVGQAIDKNDLPAASSVLGPNSDAQWVQNINVAFTKFSSSPEEKNMVDSFNSSLASLITSVNKSDVDSSKSAFVSSATTLEKWIASAGLSGQLKGF

SEQ ID NO: 202570 - protein, 141 aa, Oryza sativa
  Clone ID: PAT_MRT4530_97838C.1.pep
FIVEHRDDSIGSVEIVPLTLFVDGSVCTHDCGISLVIISPRGASFEFAYTIKPYATNNQAKYEAVLKGLQLLMEVEAHAVEIMGDSLLVISQLAGEYECKNDALMIYNEKCWELMNSFRLVILKHVSREQNVEACMPAGRL

SEQ ID NO: 202571 - protein, 256 aa, Oryza sativa
  Clone ID: PAT_MRT4530_97839C.1.pep
MSSSSSSSAVFPLDHLAAPSPTEQLCYVHCNCCDTILAVGVPCSSLFKTVTVRCGHCANLLSVNLRGLLLPAPAPAPANQLHFGPSLLSPTSPHGLLDEVAFQTPSLLMEQAASASLSSITGRSSSSCASNAPAMQMPPAKPVQQEPELPKNAPASANRPPEKRQRVPSAYNRFINDEIQRIKAGNPDISHREAFSAAAKNWAHFPHIHFGLMPDQGFKKTFKPQDGSEDILLKDSLYAAAAAAAAAAANMGVTPF

SEQ ID NO: 202572 - protein, 72 aa, Oryza sativa
  Clone ID: PAT_MRT4530_9783C.1.pep
MSTSSLQSSSLRTCHQCSSVVFMGASRTRGHHPAPTTAVETVGAVEAQGDVTRTAGRVAVVPRRSRSPPPPG

SEQ ID NO: 202573 - protein, 85 aa, Oryza sativa
  unsure (1)..(85): unsure at all Xaa locations
  Clone ID: PAT_MRT4530_97840C.1.pep
SSSIGTPLFNVKAYLPVKESFGFTADLRPPLVPGLPTQVFDHWQILEGGSPLDXTTMVGKVVADMRKRKGIKVDVPDVSNYYDKL

SEQ ID NO: 202574 - protein, 120 aa, Oryza sativa
  unsure (1)..(120): unsure at all Xaa locations
  Clone ID: PAT_MRT4530_97841C.1.pep
ADGDDKRRGAGGGRSCGRAAGEGRRGXRSGVQAPPLAATHEAHEAAXGGGATGGRRRAAGGGKRDGESEDVAAVVVHGRRSRASALNRAWGVWRWWLASTSRRARRHRGGTTRGSSAGWN

SEQ ID NO: 202575 - protein, 55 aa, Oryza sativa
  Clone ID: PAT_MRT4530_97842C.1.pep
FLFFEKKRSNIAFFKNPSKSGGFTYIGKMLDQPHSEQITIKQNPYQRLKNCPGPA

SEQ ID NO: 202576 - protein, 93 aa, Oryza sativa
  unsure (1)..(93): unsure at all Xaa locations
  Clone ID: PAT_MRT4530_97843C.1.pep
IXXXXFIXIXXLGFTPXYWVLPLXFIPPALKGPFKTLXPFWEKRXXXXKRGXXXNLKNLGLGFGKLXPLGGFLGPGETPXKXXXKXXXXXXXK

SEQ ID NO: 202577 - protein, 251 aa, Oryza sativa
  Clone ID: PAT_MRT4530_97844C.1.pep
SKDGESIKIAEPLDGPIMQRYCSLAKLFKDQCALVVLILKATANKESSMWLSLGGFQEKGPDDSHQYNTHVLIDDSGEIRSSYRKIHLFDVDVPGNMVYKESRFTTAGDTVVAVDSPFGRLGLTVCYDLRFPELYQCLRFKHQAQVLLVPSAFTKVTGEAHWEILLRARAIETQCYVIAAAQAGKHNEKRESYGDSIIIDPWGTVIARLPDRLSTGFAVADVDLSKVEAVRTKMPISEHRKFDSVWKTSSL

SEQ ID NO: 202578 - protein, 55 aa, Oryza sativa
  Clone ID: PAT_MRT4530_97845C.1.pep
LMKYMRLTYIPAADYAATQSHSYGTEEKRLRRYAIGCQLHHRSNLPAGDHYPYSE

SEQ ID NO: 202579 - protein, 426 aa, Oryza sativa
  Clone ID: PAT_MRT4530_97846C.1.pep
MEISFEAWEGVQRHGQDIADRLAQGFTGLLQAQPPQFPWPAASHKRIPFEIDLPVVPFGASRGARAGKEFFPAAAVASVIDIGGRLGQAGVEIGASVGGAVQHAVRQLPLPFRNGQIRRRKLPPQPQAPSPAAAVGEAAVGLSVERAVDRCPLEAAAAAAAAATGSAAASTVSGAVGGDDVDEEDEGFGCEIGTFGNFKKSKGTVNVSASYNTRNHDIESSVVARGDLWRLEASRSSSTSGNDSSPLYLVQLGPLLFVRDSTLLLPVHLSKQHLLWYGYDRKSFMDLQFPNGQLTYVAGEGITASGFLPLFGGLLQAHGKYPGETRVSFSCKNKQGTRFTPMFQWPDKSLSFGVTQALAWKRSGLMVRPSVQVSLCPTFGGNDPGIGRSKWNGQMGSSGVVVTLETPLNNIGRPSLSVQLNGGFEI

SEQ ID NO: 202580 - protein, 466 aa, Oryza sativa
  unsure (1)..(466): unsure at all Xaa locations
  Clone ID: PAT_MRT4530_97847C.1.pep
MEISFEAWEGVQRHGQDIADRLAQGFTGLLQAQPPQFPWPAASHKRIPFEIDLPVVPFGASRGCPGREGVXFPAAAVASVIDIGGRLGQAGVEIGASCRXAVQHAVRQLPLPFRNAAVGLSVERAVDRCPLEAAAAAAAAATGSAAASTVSGAVGGDDVDEEDEGFGCEIGTFGNFKKSKGTVNVSASYNTRNHDIESSVVARGDXWRLEASRSSSTSGIDSSPLYLVQLGPLLFVRDSTLLLPVHLSKQHLLWYGYDRKNGVHSLCPAFWSKHRKWLMMSMVCLNPVACSFMDLQFPNGQLTYVAGEGITASGFLPLFGGLLQAHGKYPGETRVSFSCKNKQGTRFTPMFQWPDKSLSFGVTQALAWKRSGLMVRPSVQVSLCPTFGGNDPGVRAEVIHSLKEELNVMCGLSCSRHPSAFTALSIGRSKWNGQMGSSGVVVTLETPLNNIGRPSLSVQLNGGFEI

SEQ ID NO: 202581 - protein, 41 aa, Oryza sativa
  Clone ID: PAT_MRT4530_97848C.1.pep
VMLWSICGVKTKEEMEHNWEFCRMDTAQPTQCPFCTTPSYA

SEQ ID NO: 202582 - protein, 120 aa, Oryza sativa
  Clone ID: PAT_MRT4530_97849C.1.pep
VRRAVAPQVIPGRRPPMTAPSGGVGHHRLGAPTPMHTPRTARPRPRVGTRSALIHLRRRVRPCHSPFFRVSAGLVQPSGTCAVAPQVREEVTSDQSCWPLRRTTPTYPLASSAKLCNSFR

SEQ ID NO: 202583 - protein, 87 aa, Oryza sativa
  Clone ID: PAT_MRT4530_9784C.1.pep
MAAATICKLGHGRTSAADEVGNSDDGGGEAWGRSPTSSELRQRVDAAATATAAAGEGKAEASGNGDDGGGEAWGRSPTSSGAATAAT

SEQ ID NO: 202584 - protein, 463 aa, Oryza sativa
  unsure (1)..(463): unsure at all Xaa locations
  Clone ID: PAT_MRT4530_97850C.1.pep
MDRIVGGKFKLGRKIGCGSFGEIYLATHVDTYEIAAVKIESSKTKHAQLFYEAKLYNALQAGTGIANVKWCGVDGEGKVLDIDLRGPSLEEXFVFCGSSATLXTVLMSPDPGTTRCNLKXNKDXASRDIDPNNFLVGLGRKANQVYIIDFGLAKXLMDSTTNRHIPYRENXKLTGTARYASCNTHLGVEQSRRDDLESLGYVLLYFLRGSLPWQGLKAATKKQKYDKICEKKISTPIEVLCKSCPVEFASYFHYCHSLTFDQRPDYAFVKRLLRDLFTRQVYEFDYVFDWTVLRYKQGQKVQHGSGATITRATPGDLDKTAGVNGAFPHNEAREQTGPSHLAGSAAQLQVKRSTERGPHPNIQHTENITQDMTARKHLAASVLPGAEWRKDGHLLYEAAGKCSEDAPSISSGSESYIWYGHIAIMMIQTSSGMMLQMLYLGLSPVNLLNSQKGKKALAPGDEE

SEQ ID NO: 202585 - protein, 88 aa, Oryza sativa
  Clone ID: PAT_MRT4530_97851C.1.pep
GSAAQLQVKRSTERGPHPNIQHTENITQDMTARKHLAASVLPGAEWRKDGNSRQLGQLDALHQKQSFVSNTGSSSGRFPTFLHDSPAN

SEQ ID NO: 202586 - protein, 52 aa, Oryza sativa
  Clone ID: PAT_MRT4530_97852C.1.pep
DGRWKKTRHRLKKKRNLFGDGPMGYRLGIKPLFPGLYFWGGGGTKKRGGPQT

SEQ ID NO: 202587 - protein, 82 aa, Oryza sativa
  Clone ID: PAT_MRT4530_97853C.1.pep
CVVMAETKSLRQSASWFGLNAGCLPHPQLPVSLRLHDSVGSAWAPALSTGVQPRLGERAPTDTAPGGKVPTKESRPNSSAAP

SEQ ID NO: 202588 - protein, 89 aa, Oryza sativa
  unsure (1)..(89): unsure at all Xaa locations
  Clone ID: PAT_MRT4530_97854C.1.pep
NLSDKHTSKLNPNTKSLLGXNTLPNFTAETFFHPSYLKEDCQRKQSSTSCMPCSLFIGLRLPKTLSQIPLGRNPNSEGIWSTHSSLEPK

SEQ ID NO: 202589 - protein, 58 aa, Oryza sativa
  Clone ID: PAT_MRT4530_97855C.1.pep
MNCETCQLKELELEPREIKDVLRCILHTIFFHRTLSLVRPKDFDCDFFEITYVSIYPV

SEQ ID NO: 202590 - protein, 232 aa, Oryza sativa
  Clone ID: PAT_MRT4530_97856C.1.pep
MGKTASPTAASRVAGGLRARAAATTISSVAASPPVVRVMPRAPSRTSKQPIGPHHPPSIGETKNDFIREAAAAAAAAWNDTRKSTTTTPDYSTGKNTHVDPSLHAGLVRVLQQLTYESIDQLRARLIFPVAGTLGPYVAQFHAAGDAESARAVEWKHRSCGPRGAFLPGRGGPAAARAQCAHSQLLMSRYSLATPRARAIGWFQLVSSRETEYGRPRRDPTRPRLAGRDVSI

SEQ ID NO: 202591 - protein, 58 aa, Oryza sativa
  unsure (1)..(58): unsure at all Xaa locations
  Clone ID: PAT_MRT4530_97857C.1.pep
VFQLRNCQVMQQQCXQLXMIAQQSHCQAISSVQAIVQQLPADNSXLSVXFDQSQCYHT

SEQ ID NO: 202592 - protein, 40 aa, Oryza sativa
  Clone ID: PAT_MRT4530_97858C.1.pep
YRQAIGSFKQMKTRDQCYEKYIFNTRILCFYSYRSQVKTE

SEQ ID NO: 202593 - protein, 70 aa, Oryza sativa
  Clone ID: PAT_MRT4530_97859C.1.pep
MNNADELNLEYIKRRSVRQVGPTSKIPPKKDIDKVLFRAIYWLRGWAQVQIYDDDDIKLINNDGPRKLFF

SEQ ID NO: 202594 - protein, 480 aa, Oryza sativa
  Clone ID: PAT_MRT4530_9785C.1.pep
MVQGCRCEVVDACVREVRLASPYRIHQIFRFTTPRRLALAHRGDTYKARDEGQCHWRDKAGSATRREGGESEGGERRRRRLMASPAVVAFAVAVAVAALAAFCGTDPLRTGSMVDFPGFVPHVVELPDASEMPPHADTRERLRGAEIRFRGEVQGPESVAFDPLGRGPYTGVADGRVVRWDGARWVYFAHSSPNWTAELCGHKASPLDYLKDEHICGRALGLRFDRRTGDLYIADAYFGLLKVGPDGGLATPLATEAEGVRFNFTNDLDLDDDGNVYFTDSSIHYQRRHFMQLVFSGDPSGRLLKYDPNTKKATVLHRNIQFPNGVSMSKDGLFFVFCEGSRGRLSRYWLKGEKAGTVDLFAILPGFPDNVRTNDKGEFWVAIHCRRSIYARMVSRNVRLRKFLLSLPIPAKYHYLMQIGGKLHALIIKYNPEGEVLDILEDTTGQVVRAVSEVEEKDGKLWIGSVLMPFIAVFDYANAS

SEQ ID NO: 202595 - protein, 54 aa, Oryza sativa
  Clone ID: PAT_MRT4530_97860C.1.pep
MGSRMLVFSTKFSRDVWNDPSCGYVAKKPEVMSQECCLAGDRHFSPAKPLNFMC

SEQ ID NO: 202596 - protein, 56 aa, Oryza sativa
  Clone ID: PAT_MRT4530_97861C.1.pep
MGRPDSSPAIAGRLDSSPATAGMTASGLGQGGDNNGGGSDDDSGDGGGGSRWIRII

SEQ ID NO: 202597 - protein, 543 aa, Oryza sativa
  Clone ID: PAT_MRT4530_97862C.1.pep
MPPPLQAQRLLLSHRRLPSPHRRRFTAVSSLPSSPAKTVAAAAAHAPSSILSIRESLLSGERTAAEITAEYLSRLRRTEPSVRSFIHVADAAAEREAEELDRRIATEGLDAVGPLAGVLVGVKDNLCTANMPSTGGSRILDGYQPAYDATAVRRLREAGAIVVGKTNLDEFGMGSTTEGSGFQVTTNPWDDSRVPGGSSGGSASAVSARQCVVSLGSDTGGSVRQPASFCGVVGLKPTYGRVSRFGLMAYASSLDVVGCFGSSVVDTATILSVIAGHDKMDSTSSSHDVSDYKSELVPLDLLESKPLNGMRIGIIQETLGEGVETGVISSIKDAASHLEQLGSVVEEVSLPSFSLGLPAYYILASSEASSNLSRYDGIRYGRQVSGDDLNELYGGSRANGLGHEVKMRILMGTYALSAGYYDAYYKRAQQVRTLVKKSFKEALERYDILVSPAAPSAAYKIGEKINDPLAMYAGDTMTVNVNLAGLPALVVPCGFVEGGSAGLPVGLQMIGSPFSEGNLLRIGHIFEQTLQNYSFVPPLLAES

SEQ ID NO: 202598 - protein, 89 aa, Oryza sativa
  Clone ID: PAT_MRT4530_97863C.1.pep
MQAAAELEKQLKWPQPDRGCGRRRSRSPWHGRSAWAHAYSMRPRGGAGCHVAYTFFCQPNRLGPDRLHGSSQGKVLEMAAAAGSGWTGV

SEQ ID NO: 202599 - protein, 385 aa, Oryza sativa
  Clone ID: PAT_MRT4530_97864C.1.pep
MMMSSSADHFSNNNNNQAMYLEQDEDFSQMIMELCDFDASSTTQARHGGEAAAAAAGNARAVLTYLTFLEQKIGHLRGIISSTPNPPPQIVAAELSCIVVQLVSISKNLAAARRGGDDADADAKHDGSSDADEGADGDGERAPPRGSYEVVQIEKEEILAPHVHFCGVCGKGFKRDANLRMHMRGHGEEYKSAAALAKPGGSPSRSPAAADAAARRRFYSCPYVGCKRNREHKSFQPLKTPTCVKNHYRRSHCDKSFTCRRCNVKRFSVVADLRTHEKHCGRDRWVCSCGTSFSRKDKLFAHVAIFDGHSPALPPEDYDDDAASGQLPHAAGEAVGRTVDTNRFFSDGLMIKGSMEDERGSLSPMGLDYCEFDGIDLFAAAAFDF

SEQ ID NO: 202600 - protein, 60 aa, Oryza sativa
  Clone ID: PAT_MRT4530_97865C.1.pep
EEPSAPTMPTQMRVQRNRRRAWMPTRETVRTIPGRHLGQCKHTRPPRVYSLGLPRQTWLP

SEQ ID NO: 202601 - protein, 70 aa, Oryza sativa
  Clone ID: PAT_MRT4530_97866C.1.pep
LRSMEGVAKFTTVIGFIKVIQSTKPLGKPAKLEKRKPKVQFSANLFEFYPLFVFVSNRSETTVTGRAKST

SEQ ID NO: 202602 - protein, 212 aa, Oryza sativa
  unsure (1)..(212): unsure at all Xaa locations
  Clone ID: PAT_MRT4530_97867C.1.pep
KREKTKNRAKKSNLSDQKKLGEKKPKPVQSKKEKKTDLSIKEKRIRLRVKRRTKKIKKKKKIKGRXQRKKVHKNKRKSRKKXKKKEKQQQQQQKSVSPKWKKKKKNRMEKMYEKIKMVQKMREKKVRKKRKKTXKKRARKKKAKKNIRKYKQKNTRENNYLKKXKKHARKKAKKGEKNMVFVVSKKSKKNMLRKNIRKKCAISKKWFEKIAN

SEQ ID NO: 202603 - protein, 83 aa, Oryza sativa
  unsure (1)..(83): unsure at all Xaa locations
  Clone ID: PAT_MRT4530_97868C.1.pep
VHQHRSISVPLFRIRLSEYFGPFSVELSSYLTGELSSDYGXVTAALFGDSETLDRNCDLXVIHRIWAILXALGCVFPDLLANY

SEQ ID NO: 202604 - protein, 72 aa, Oryza sativa
  Clone ID: PAT_MRT4530_97869C.1.pep
GCCCCLGGPDGGACMTCQEMTTATYSFLGAATNKGSGAASGGSEMGAVNCSCGCNTCKCGSSCRCSLLHLLL

SEQ ID NO: 202605 - protein, 62 aa, Oryza sativa
  Clone ID: PAT_MRT4530_9786C.1.pep
RVPHHQLHLHTLNHTPTGPARRALASLPLAARFAVCAQRFILHSSTQFLNGFSNTMSTGEPP

SEQ ID NO: 202606 - protein, 104 aa, Oryza sativa
  unsure (1)..(104): unsure at all Xaa locations
  Clone ID: PAT_MRT4530_97870C.1.pep
MVRGGSRRSNTVKTASGASTSSAESGAVEAGTEKSDTYSTNMTQAMGAVLTYRHELGMNYNFIRPDLIVGSCLQSPLDVDKLRDIGXKTVFCLQQDPDLEYPYY

SEQ ID NO: 202607 - protein, 51 aa, Oryza sativa
  Clone ID: PAT_MRT4530_97871C.1.pep
SERWLFEHSILQVRAEATGSSRSVAERSSRSVLAVRRTGRPGPSPTTSFLT

SEQ ID NO: 202608 - protein, 101 aa, Oryza sativa
  unsure (1)..(101): unsure at all Xaa locations
  Clone ID: PAT_MRT4530_97872C.1.pep
MVYLRVYGRLRYTLRKFAMEFTDGKSPTWTRLGRHCIVPSPMSSSPTWRPVDLRYKRDPXEDLRHRISXPTHPPQPTELKPTGAKSPGDLIGPSRLRSRRY

SEQ ID NO: 202609 - protein, 107 aa, Oryza sativa
  Clone ID: PAT_MRT4530_97873C.1.pep
VGGAVLGEAAVEDNVGAGGDGKSAPAAAADLGSGGGGWGRGRNRTRRLWRRGRSSGSGGGDAAAVHAGKKHRLRRRRRIRGSGGGSPRGEDEVFTRGAMSSRVEEEE

SEQ ID NO: 202610 - protein, 111 aa, Oryza sativa
  Clone ID: PAT_MRT4530_97874C.1.pep
GQSPITSPRLTTIYPLIARHGKGDLPGPCNQTKGAMNPKASNYAKSGTSRDLGASSTMHGPPRESPSNVGWPLWRKNTWTSLVVVGGGYTNMVLTGLDTSRGTGTGSSVLS

SEQ ID NO: 202611 - protein, 55 aa, Oryza sativa
  Clone ID: PAT_MRT4530_97875C.1.pep
KWLISAPLNIFVKQPPAARCYFSSENLWCFIFSLKQLYVVLFPLCHKTKENIKKM

SEQ ID NO: 202612 - protein, 452 aa, Oryza sativa
  Clone ID: PAT_MRT4530_97876C.1.pep
MGNCVARSGTAVDAGGDGGEDGKRRRRRWKAPREDQLGMVPGRIFSNDGRSRTATVYTQQGRKGINQDAMLVWDGFGGEDDGVLCGVFDGHGPHGHVVARRVRDSLPLRLMSAARDSGADMPAAAWRKAFARAYKAMDKDLRSHPSLDCFCSGSTAVTVLKLGSDLYMANIGDSRAVLGSREATGGGMVAVQLTVDLKPDVPSEAERIKKCRGRVFALQDEPEVPRVWLPFDDAPGLAMARAFGDFCLKDYGVISVPEFFHWSLTEKDQFVILASDGFLLKLHKLCTYLAAFVEFALTKILQVWDVLSNQEAVDIVSASPSRSKAAKSLVEAATREWKTKYPTSKIDDCAVVCLYLDGKMDHERDSTASLDNISIEEGSVADPNEPQEQEPTLTRNFTVRTVAGSTQEKTLAGVDARIAGVANDQNWSGLDGVTRVNSLVQLPRFSEERAIG

SEQ ID NO: 202613 - protein, 118 aa, Oryza sativa
  Clone ID: PAT_MRT4530_97877C.1.pep
NKIAATALALTPHPRRRTEPPIIRSDTFPTPRPRKPNPPPPTPPYTNDPGARVNPTDLGQRAEAGVSRAFLPAPAALAAASAGPGECAAATAAAAAAGGWRWRRRKGREGNMDWGIAI

SEQ ID NO: 202614 - protein, 133 aa, Oryza sativa
  unsure (1)..(133): unsure at all Xaa locations
  Clone ID: PAT_MRT4530_97878C.1.pep
SPPPSSRAPPPPPPXPRPSLPPPSRARPPPPPPSRAHPPQASTPRPSPTGTASAPLPHQRCLSTPLPTSGATPPHRGDAGAPAPRQIRRLLGAAAGRRLPGGAAAAQWIPAQWRVGGGGGPSRRSGGLPLSPP

SEQ ID NO: 202615 - protein, 205 aa, Oryza sativa
  Clone ID: PAT_MRT4530_97879C.1.pep
FDTPLRLIPSATARRPAGASMAAAGSIGVYRAVFAALGALMLGTLVYTCVTDGSPFRLELLTPWLVATLIDFYVNVTAISTWVIYKEVNWISSFFWVVLLYCFGSIATCAYVVVKLFEIKTSGPSQDPLDLLFLRQGDLSERKSSFVIIGRIIFSILGAMMAAVVIYTVITDGLPFRKDLLTPWMAATLIDFFINVVAISVNYLL

SEQ ID NO: 202616 - protein, 270 aa, Oryza sativa
  unsure (1)..(270): unsure at all Xaa locations
  Clone ID: PAT_MRT4530_9787C.1.pep
PGARCRGGRGARSGGIPMAIALHPERGAVESKKPDIKQRRVVVTGMGVVTPLGHDPDEFYNNLLQGVSGISEIEAFDCSKYPTRIAGEIKSFSTDGWVAPKLAKRMDKFMLYLITAGKKALENGGITEEVMNELDKSRCGVLVGSAMGGMKIFSDAIEALRVSYKKMNPFCVPFATTNMGSAILAMDLGWMGPNYSISTACATSNFCILNAANHIRRGETDVMLCGGSDAPIIPIGLSGXVACRALSQRNNDPAXASRPWDVDRDGFVMG

SEQ ID NO: 202617 - protein, 659 aa, Oryza sativa
  Clone ID: PAT_MRT4530_97880C.1.pep
MALALPTRPANFVQARPPFVKLATCTTYMAYFYLAAAACLVGVFLNAPHATDAQPMPWHRCNTSSGNYTANSTYQSNIQYLATSLPAYASSSPSLFASGSSGAPPDAIYALALCRGDTTNASSCATCVAAAIQAAQKHCALVKTVAIYDDPCIVRFSNLVFPVSPPYNKGMFVAWDDNNVSAAAAAAFDAAFARLANATAEHAAADSVRRFATGEEAALAVAGEVYPKIYSLAQCTPDMSADACRSCLEDILVRMVPTYLAGRKGGRVLGVRCNFRFETYPFFFGQPLLQLPGSPASSSAPVNGGPSEARAGDMQSIGSLILDLSTLRVATDDFSEHKRLGEGGFGVVYKGDLPKGQEIAVKRLAKTSKQGIEELKTELLLVAKLNHNNLVKLIGVCLEENEKILVYEYMPNRSLDTILFDAQKIKELNWGQRFKIINGIARGLQYLHEDSQLKIVHRDLKASNVLLDSAYNPKISDFGLAKIFERDQSKVITHRIAGTYGYMSPEYAMRGQYSIKSDVFSFGVLVLEIITGRRNFGSYGSDQQDYDLINATWEHWTSDKALELIDPSLGNHYPVDKVLKCIQIGLLCVQPKPADRPLMSAVNVMLTGTIRLPSLSRPAFWFQEIGASSDVNSEQNLLDPHNSTKMYQSEAPITELEPR

SEQ ID NO: 202618 - protein, 140 aa, Oryza sativa
  Clone ID: PAT_MRT4530_97881C.1.pep
MEFGWALRRPMRLPDSPRHERGLPAALRGVGVKPEWVVLSLALFSPTPELKSFSVEDVSKRHGVGSGRIRLMWGRLTLGFDSAERCPPQHDFITDGLLAAALTWSYNCVIPLDHSVTALVVSIAARTSTSSSSALVIFSC

SEQ ID NO: 202619 - protein, 102 aa, Oryza sativa
  unsure (1)..(102): unsure at all Xaa locations
  Clone ID: PAT_MRT4530_97882C.1.pep
RARRGGEGQDFISSLKKSHSSDEDTQIIDSEIYYYAXXFYEKLLAGEYKGTDGQSYSCPFCXGXKXXDFXLLXLIHHVFGEGPPSKRRARLLGSNPPLAKPL

SEQ ID NO: 202620 - protein, 117 aa, Oryza sativa
  Clone ID: PAT_MRT4530_97883C.1.pep
HQLQTDLAADLDGISRPISTCWKAYVVYFHMVLVPRQNSYRSAKNLQNKPRIGLLSEVIWVLARLITRGDVVLRLRGSVVCSFRSQIKLCRDSTQIDCLSIPIGRSGLNNLIRLPPP

SEQ ID NO: 202621 - protein, 100 aa, Oryza sativa
  Clone ID: PAT_MRT4530_97884C.1.pep
MTRRRLFLPPPIQTATAATNPDCQEMLVLRRSPPPPPEARHRTHVRGFVLEGPDRGAAFRRRRLRLSTPPRKFGSGNSFDGDDKPCDSFNGNWQAPRRQL

SEQ ID NO: 202622 - protein, 254 aa, Oryza sativa
  Clone ID: PAT_MRT4530_97885C.1.pep
MVHLRVYRRSLYTLRKFITESTNEKIPTRIGLGRHCIVQGPMSPSPTWIPPDLRYKRDPPGGPKASNLIANTTTTTYEAEVYRSQVAGWSSRTNSTTISSILVHLNTLYIRSTGLVHLIYKSTLINQRLLPQMCCTDIYLGPSYLPPNNYLRRRPRARARTPYVRTYVPTNVSIEFNSTTVHCVLLTGSGGGVPNWTVPRLHGRCPPRLLLHRPAGRRRNTYMIDRSISVTGSLTVVTGPVTLAPHTLHALQDN

SEQ ID NO: 202623 - protein, 164 aa, Oryza sativa
  Clone ID: PAT_MRT4530_97886C.1.pep
MPQAAYNQGQQEPISQAAYNQSQQPAQAAGAYNQGQQPPVSQASYNQSQQSTQAAGAYNQGQGPSMPQASYNQVQPPQMPHATYNQGQQPPGMRIPQGQVQPQQSPSFHQPAQVSQVLQGSQSQGLQMPSQQGQLQHGFHLTTPQGKQPHHGHVGPQLSQVSLG

SEQ ID NO: 202624 - protein, 136 aa, Oryza sativa
  unsure (1)..(136): unsure at all Xaa locations
  Clone ID: PAT_MRT4530_97887C.1.pep
MNGKELDXRNITVNEATVAARSGAEAPGGYGQQRRSGGYGAGGYGCVGRQAGGYGQAASEVQATGGARWLQVQASGDXAATVVATAASRQAGKLRQGTGGTEQARGPHGQVIXYLSNRATIIIIRSLSSLVLCGTI

SEQ ID NO: 202625 - protein, 84 aa, Oryza sativa
  unsure (1)..(84): unsure at all Xaa locations
  Clone ID: PAT_MRT4530_97888C.1.pep
GGESPWLAAMVGASVIXSAARTPHAPPPRGIYRARIAIXPLPFWVFXLARQGSRLITPPRSPEPGGRRPXRPXSTQRLNWSTRW

SEQ ID NO: 202626 - protein, 107 aa, Oryza sativa
  Clone ID: PAT_MRT4530_97889C.1.pep
DSSVQQLSYNRARKVVFLSPRVSGSTTASLCSRTRQPPLCCRIISAGTAAGSGSCLHQGPLHGGHSPHIRAGTVGSSMFRSLGSPLDSRPEAAAFASSSATSPPLPP

SEQ ID NO: 202627 - protein, 245 aa, Oryza sativa
  Clone ID: PAT_MRT4530_9788C.1.pep
ICQSPHLPIVSAASPQAKMATPANATTFSGEVWAELRLADSSDVPHIHALIHQMAEFELLTDLFAATHELLTSTLFPSPPRPPFTSFTALILDLSPSPLPASGPSTIASHCLDLSASPLADPEAAAFASPRGGGRVTAGFVICFPNYSTFLSKPGLYVEDIFVRAPWRRRGLGRMMLSAVAGKAAELGMGRVEWCVLDWNKNAIDFYEGMGAEVLPQWRICRLTGAALDKYKGNQEEGGGSKAAE

SEQ ID NO: 202628 - protein, 77 aa, Oryza sativa
  Clone ID: PAT_MRT4530_97890C.1.pep
YLIESSRSPLSNGSSLIVKFHPNHPQLKKQGVASPVMGLWACNFVWDPGPSGAYVGCDPTRWSTTLGSPWSSSHLFK

SEQ ID NO: 202629 - protein, 140 aa, Oryza sativa
  Clone ID: PAT_MRT4530_97891C.1.pep
MAKAEVGHRVCVTGAGGFVGSWVVKELLHRGYVVRGTARDPSAQKYPHLQTLEGAAERLSLCYANVMDYNSLRVAFDGPPGRFVPVAVEGTKNVINAAADVGAGRVVFTSSYGAVHMDPNRSLDTVMDESCWSNLDFGLR

SEQ ID NO: 202630 - protein, 81 aa, Oryza sativa
  Clone ID: PAT_MRT4530_97892C.1.pep
KSKKEKKQRRKEEEKMKKKEREKKKKRKRGIKQKTYPDGPKLQPPRPRAKRRHRTVEEGARRDRTRKEDGRRKRRAMAIAA

SEQ ID NO: 202631 - protein, 106 aa, Oryza sativa
  Clone ID: PAT_MRT4530_97893C.1.pep
MARKALLALTLSQQMICWLEEKETAEGRRTRKEEHGGFSAETAVEIGERIRGGDSGIEIRAVWGLRLQWPMKSSGSGLINGCVSTLVLPCSARPDGAGTTSCIYNY

SEQ ID NO: 202632 - protein, 96 aa, Oryza sativa
  unsure (1)..(96): unsure at all Xaa locations
  Clone ID: PAT_MRT4530_97894C.1.pep
KQKKKQNSGNXAAAEAXXRWXRRRRQXRREXLPLRTTATTTRRRPQLPGRRPQXPRPNLLHPPXPNXIRXHXRGLWLGDGPKDKQQQQQQKYRVDG

SEQ ID NO: 202633 - protein, 96 aa, Oryza sativa
  Clone ID: PAT_MRT4530_97895C.1.pep
RRLYNLLQAHKFQRLITNSTAFRKRHNLLQPRKVVAARGMCHLPDITRNSQFSPKISDPRSKRFQAPKKTCLRFNLRVLFSVQYICLDRLITFNWI

SEQ ID NO: 202634 - protein, 66 aa, Oryza sativa
  Clone ID: PAT_MRT4530_97896C.1.pep
MAGKGLNATGEFFRRRDDWRRHPMVGNQLRHATPGLGIAIVAFGIYLVGEAAYNRLYRPSGDHHHH

SEQ ID NO: 202635 - protein, 129 aa, Oryza sativa
  Clone ID: PAT_MRT4530_97897C.1.pep
MGCTHTRHSRKRYQRRVTTRRAEHLQDGHPVVPDGTYPYASNCHTPEVTFTAHPLRACWPAVLSSPRPPRAAAGARMPSCNGKCSDSTPATTHVHLQMAAARQEDVRQRQDVQRAGGVYIRIQGAAAAA

SEQ ID NO: 202636 - protein, 1936 aa, Oryza sativa
  Clone ID: PAT_MRT4530_97898C.1.pep
MEFYSDLLRTSAEPSSAFLPYQGIHTFRPVPGSFPFGFFVFQYGRNRRSVLQRFPTWSIMNYGMKIGSAIFWFGITGFDLGKQESLGPKVYQDILGLDVLRKISVTISFPSLWQYIPAEVREAITQNSRSRHTPRSGSNLGFFLRVLASLPMAATGGGGDKGTINAIVTRPKLLGAAMATSKNMRNYEDLAIQVVQSENLEEQSSDLKTQNPARDKSLTGGDHENTSSSQRPTAFMQGEITVEDDDAVEIELEEDEVKKAGQWTVLARFYSLKFPNQCRRRSQVRSWLHRGDALLVADFNGLVSPSMVPLETVPIWVRIYDLPLVMMNKERGVIYGSKLGKVREVDVQEDGCNKHDFFRIRVDLPVNRPLKRMLAIKIKVKGAEEIRRFNLRYERIPHFCFFCGFIGHSDKECEKRLANEEDPLMFSVELRCSPLKPFERKVSKVKAFQSYGVQRKLSFRGAGSASSSSAGQMQRVNIHEDTLPRVDAFDGFDSKEGKGEESVDAQLADKANLLSVSEQNSSKKRSEHKVGPVEESASLPSMEMIPAIRNLNSHQESLEESSSADCISPTKRKALTAPVAKGLGTVKQAILEYDQTNTGAVSGVTPRALKRLKKGADMNANGKDMEATSPGAAGAMSCLAWNCRGLGNTATVQDLRALIQKAGSQLVFLCETRQSVEKMSRLRRKLAFRGFVGVSSEGKSGGLALYWDESVSVDVKDINKRYIDAYVRLSPDEPQWHITFVYGEPRVENRHRMWSLLRTIRQSSALPWMVIGDFNETLWQFEHFSKNPRCETQMQNFRDALYDCDLQDLGFKGVPHTYDNRRDGWRNVKVRLDRAVADDKWRDLFPEAQVSHLVSPCSDHSPILLEFIVKDTTRPRQKCLHYEIVWEREPESVQVIEEAWINAGVKTDLGDINIALGRVMSALRSWSKTKVKNVGKELEKARKKLEDLIASNAARSSIRQATDHMNEMLYREEMLWLQRSRVNWLKEGDRNTRFFHSRAVWRAKKNKISKLRDENGAIHSTTSVLETMATEYFQGVYKADPSLNPESVTRLFQEKVTDAMNEKLCQEFKEEEIAQAIFQIGPLKSPRPDGFPARFYQRNWGTLKSDIILAVRNFFQSGLMPKGVNDTAIVLIPKKDQPIDLKDYRPISLCNVVYKVVSKCLVNRLRPILDDLVSKEQSAFIQGRMITDNALLAFECFHSIQKNKKANSAACAYKLDLSKAYDRVDWRFLELALNKLGFAHRWVSWIMLCVTTVRYSVKFNGTLLRSFAPTRGLRQGEPLSPFLFLFVADGLSLLLKEKVAQNSLTPLKICRQAPGISYLLFADDTLLFFKAEKKEAEVVKEVLTNYAQGTGQLINPAKCSILFGEASPSSVSEDIRNTLQVERDNFEDRYLGFPTPEGRMHKGRFQSLQAKIAKRVIQWGENFLSSGGKEILIKAVIQAIPVYVMGLFKFPDSVYDELTKMTRNFWWGADNGRRRTHWRAWDSLTKAKINGGLGFRDYKLFNQALLTRQAWRLIEFPNSLCAQVLKAKYFPHGSLTDTTFSANASPTWHGIEYGLDLLKKGIIWRIGNGNSVRIWRDPWIPRDLSRRPVSSKANCRLKWVSDLIAEDGTWDSAKINQYFLKIDADIIQKICISARLEEDFIAWHPDKTGRFSVRSAYKLALQLADMNNCSSSSSSRLNKSWELIWKCNVPQKVRIFAWRVASNSLATMENKKKRNLERFDVCGICDREKEDAGHALCRCVHANSLWVNLEKGKYVVSVNFPKTTAIKHTPGAENRRWERPRNGWMKLNVDGSFDINSEKGGIGMILRNCLGNVIFSSCRSLDSCSGPLEAELHACVEGLHLALHWTLLPIQVETDCSSVIQLLNHPDKDRSVLANIAQEAKSLMAGDRQIAISKVQRSQNVISHFLANKARAESLSSFWLGENCTFISHFVGEDCD

SEQ ID NO: 202637 - protein, 89 aa, Oryza sativa
  Clone ID: PAT_MRT4530_97899C.1.pep
PCGRRSRPPRLPPPSGTIIPGYFSMAGYSRGHRLGVTGRRSLLPNCREPRLATLRPCLHIATAAFDFGRTALDRNKFTYCREPSFFSYH

SEQ ID NO: 202638 - protein, 355 aa, Oryza sativa
  unsure (1)..(355): unsure at all Xaa locations
  Clone ID: PAT_MRT4530_9789C.1.pep
MSSKDRFFDNKILDDFAVGRSNLTGXMSPDKIGIIVINNLIYRDHPTSTPRRINCQDLRLRHQLEQLSTRLGRGRVHRIIENDLDKCRVVAPNLPTKTDDLSHSTGRGWTTREKYVAISRTANFHWCLRDDSTHSLVPEPXVAISRTXHLYWCPRDNSTRSLVLEPWSRYDYDWFSTSXIVAIXVQLLLVVEFRLHQVLDQRCSDSPTTLTSSGRVXDYTRSSTSGVAILPLFPLQVVELRLLPSPRPXYSDSPITSTPTKLISGTQDRQVFYPEIPYHDXHLALKPILLSLDAVLTRPPRNLRKLRLGTPRADKALSDPVEIKDHTLRLLDHSRTVXGGSRQGIRNEEMVYPPR

SEQ ID NO: 202639 - protein, 137 aa, Oryza sativa
  unsure (1)..(137): unsure at all Xaa locations
  Clone ID: PAT_MRT4530_978C.1.pep
STLSQSTRSLWKYRARLNCNVTMDAIETTAAHIKNKLNKFWNPIQLPATMLISNDCQMCIRPSFWVHXYLVESFRSPLSNGFSLIFEFRLVWPESXEQGDASPIIGLWVCNFVWDPGPSRAHVGCTPTRWSTTLGTP

SEQ ID NO: 202640 - protein, 95 aa, Oryza sativa
  Clone ID: PAT_MRT4530_97900C.1.pep
NIPVPLRHQFTAIQHSPIDIPAQDVKYVINHLRLLHNLLGVMGLFNQVRRHVNQEHHGPKIIQIGHGLGGIPPMALAPHSAEQDIIQHGLAFPKM

SEQ ID NO: 202641 - protein, 282 aa, Oryza sativa
  Clone ID: PAT_MRT4530_97901C.1.pep
MSTVTAPFRGTVVVLRRMVTCCRAVSCGYSAPGLEWYIPGLEIDLCSRVLADLFSFDIKDYFDETKEDTTSKALAPLSDDVKRTLDDISHRMEASSLDSLVVDCGPIRTRLHEVQALIPDELADVLTPAVYLKQQQFKLEKAKLRLAERRERKDIEATIQANRQLVHEEKAKLDQLSEGPIKSNIDRLEARKIELLAQLQECNTELDMEHKKLADLPQAVEEQKARLKSAIKNVADMTKSLKVIPGTDAQDAQAIEESAATITRSVVIWHTATRAQRRASAP

SEQ ID NO: 202642 - protein, 83 aa, Oryza sativa
  Clone ID: PAT_MRT4530_97902C.1.pep
SRWLRCRWEHSASIVRLLRCRRQSARMVYADVEVIVPSILQYVCTACLQYGRSSWCSSPRRPVGGRWEELAAWVSDNHHAIGC

SEQ ID NO: 202643 - protein, 524 aa, Oryza sativa
  Clone ID: PAT_MRT4530_97903C.1.pep
MENLGSVSTLWSALVSVLLFWPVVNNHVPAGLRQWLSTMVDKLTSYLSPYLHVTISEYGHQRFRRSDFFLAVEAYLSHACARRARKLRADLGKDARTVQITVDDHQEVTDSFRGATIWWYPSKKPPRTNVISFYPRDDDARFYRLVFHRRHRDLVLDAYLPHVLAEGRAVTIRNRQRRLFTNNAPGASTSYYSRKSVWSHVPFEHPATFDTLAMEPADKDAILDDLTAFRDSKDYYAKVGKAWKRGYLLHGPPGTGKSTMIAAMANFLDYDVYDLELTAVKTNTDLRKLYIETTGKSIIVIEDIDCSVDLTAKRSNDKKKKKSSDEDDDDKPKLPTEQEKDEASKVTLSGLLNFIDGLWSACGGERIIIFTTNHKEKLDPALIRRGRMDVHIEMSYCRFEAFKVLAKNYLGVEQHEMFVEIRRLLEEIDMSPADVAENLMPKASKGKKRDPDACLAGLIEALNKAKVEAAEAAKAKEEEEAAAAKAKEEEEAAKAKAAKEKEKDDEAAGTKVDETVNNKSNGTI

SEQ ID NO: 202644 - protein, 96 aa, Oryza sativa
  Clone ID: PAT_MRT4530_97904C.1.pep
MWRLHQALLRRISPLKHPAGWPARGIRCYYATEPKGRKPKTAPLQVIAEIRVSYLESFGDELYICTKYFRQDIDSENNGLNTLFTTAAQQHNKNFS

SEQ ID NO: 202645 - protein, 124 aa, Oryza sativa
  unsure (1)..(124): unsure at all Xaa locations
  Clone ID: PAT_MRT4530_97905C.1.pep
VKFRCCINGAFGEMGGVALALPCLGLRRRRVEIDGTEPPMVTTAAAATAGDGFWTKGVKWWIAXRRWHQSTCCSVVCPATPWTIFLGDIISELSGCFYSFLLVTATRILSLCNRLSLFSCALLL

SEQ ID NO: 202646 - protein, 100 aa, Oryza sativa
  Clone ID: PAT_MRT4530_97906C.1.pep
SVEDRAPAVDVHGRPQSSLSSSPVEEETSGIGCLCFNQVTAVMHVASRVPDGETVMWSSHQIDDESKGTATLILLMRECHAANRTTLSRKFRAVGISSEH

SEQ ID NO: 202647 - protein, 95 aa, Oryza sativa
  Clone ID: PAT_MRT4530_97907C.1.pep
LFFSYGAINIDSPYRKHIEHIYIYIYIYIYIYIYIYIYIYIYICIYIHIYIYMYIYIYMYMYIYMYIYMYMYIYILMNLGTHICLDSLTYIYERG

SEQ ID NO: 202648 - protein, 43 aa, Oryza sativa
  Clone ID: PAT_MRT4530_97908C.1.pep
MADTMRRTSINRNPFGPTEDNHLQHLCFKQTISCSRYLKYTGS

SEQ ID NO: 202649 - protein, 204 aa, Oryza sativa
  Clone ID: PAT_MRT4530_97909C.1.pep
MAGSSAYRPPTDAKTDVQVDLEQWGLESRPLGGFVDFIKNTTNLMHHVTEGCQLQPINVENGNNGNATRTEKRLGWSTEEDLRLEANSLYASGECNVDLMDKALKMYENDFKDGRFLFIECWNELKTQPKWHAYLDQLDKSNKRKRDYADATPLDDEEIPRPMGVKAAKAKRIGKGKGKVQDCTAELEDDTHKFMEAHEAAKEQ

SEQ ID NO: 202650 - protein, 244 aa, Oryza sativa
  unsure (1)..(244): unsure at all Xaa locations
  Clone ID: PAT_MRT4530_9790C.1.pep
MTSAMTSPTAAAARRSGRLGWRTLAGERRRXDANGGHQDVEDDAANSPVTKTAAEDQRMATATRRKRRKPSGXRRRRGSGDLRRRRRGGRGRRRLGDHDDGLPERRRRLKRRRRTAGAAAATAKLGHTALELFRRREAKARVAAGRGDTGGPFKGARRRRQRPTAGGDEEGKIGRTNPRRTRIQLIPKRFSQRFQRRKGREDAGDCFPSIDSAGNGKERPDWKSGGGGAKLGVRPKEDDDPDRR

SEQ ID NO: 202651 - protein, 392 aa, Oryza sativa
  Clone ID: PAT_MRT4530_97910C.1.pep
MAGSSAYRPPTDAKTDVQIDLEQWGLESRPLGGLVDFIKNTTDPMHHVTEGCQLQPINVENGNNGNSTRTEKRLGWSTEEDLRLVSAWLNNSNDPIESNFKKNDKYWADVAAAYNSTTPSSRFRQVKQVKDRFSKIKKKVGNFCCSWKEANSLYASGECNVDLMAKAQKIYENDFKDGPFLLTQCWNELKTQPKCHAYLDQLDKLTSLAGFRSPLFLDTVRGEAPQVHYYVNGKEYNHEYYLADGIYPEWAVFQKTIPLPQTEKHKLYAEHQEGARKDVERAFGVLQARFNNVRRPAKKWKRKSVGNIMLACVILHNMIVEDEGEDAICDLDLNRIPRTSIVLPPEVTSGGNPCFRDVLSRKAAIRARSMHTQLKTNLLEHIWNRFRNTQRA

SEQ ID NO: 202652 - protein, 282 aa, Oryza sativa
  Clone ID: PAT_MRT4530_97911C.1.pep
MDEEGVAPADGGGLLLLRLIGDSSSCGCCGWAVGGWGARGGASGGWVPCRPWRFGARGKGRGFCDVDAVGGTVVAGMPAAGAYDDGGADPPSATMGEGEGKLWRSAQKFGALSDFYLDDCSFLGGILEGYQSCRYTLLRVVTALNPIPVIFHVQIHHRAMAGTTLADQQEEQTMRRRPTADGEEEDGREKGNCRHHATMMVWSGMAKLVVHAPCMTLTAKQKQRRRRWSNLHAAFPLHVVIAMMPPTATTAFLATAPTPPHRRPSHRLLAAFSSLVVFEVSR

SEQ ID NO: 202653 - protein, 77 aa, Oryza sativa
  Clone ID: PAT_MRT4530_97912C.1.pep
MPRHLRQKGGPDIASTDGGGYDREYVQEKTARKQAISYPVKCERETEAEGPDQRVYNYYSVRISGSLCKVRCERGGG

SEQ ID NO: 202654 - protein, 407 aa, Oryza sativa
  Clone ID: PAT_MRT4530_97913C.1.pep
MGRCCWCWRLAPAPPLTRVARLEHCSSSSCTKGGKRDADAAPRRVAAYARRVCPDARIASGWRGGEGDKWRGGEDGCVERGQRLARWGVASPRLGGKGGVGGWRWRCGPGFGGGKTVGGVDVGQAGRRLVRRPPGQDGRGGGQLRDGSRSLEARWQPGEEEEAPLSPSRAKATVPSLEYEMSSVTWGVIQGRKEQLVSRVLALDFLQSVGVSDPAGELEAVELPSSLEVLQERLDFDIRLGLSIDNLSSYPLLPACSLRKNAIPVLSYLEAGDAEHRRAAMAACPLLLPLSHSVAHVVIDEEVGEGAIAHVLVDEEAVGALVAAAEQAHQVAVALPHDGAHLSLELPLAVLHQLLQPLHGNRPLAAVPQCPLEHRAKRGAEAVRRVIQLIIAVQAERRLVVQGLNVG

SEQ ID NO: 202655 - protein, 125 aa, Oryza sativa
  Clone ID: PAT_MRT4530_97914C.1.pep
MATMDTIIVHIMDEQEDIKIKSSKCWNPIRPPATLLTSNGRQISIRAPFSSREYLMESSQSPLSNGSSLIVIFHLSEPQLKKQGAALSVMGLWACNFVWDPGPSGAQGGLCPKQREDALLTSSIP

SEQ ID NO: 202656 - protein, 54 aa, Oryza sativa
  Clone ID: PAT_MRT4530_97915C.1.pep
MKKMHTGASGVFGLLDVSPVAVKGRSLQMQAPCRVALRVRAGVVAVAVEAVEAD

SEQ ID NO: 202657 - protein, 60 aa, Oryza sativa
  unsure (1)..(60): unsure at all Xaa locations
  Clone ID: PAT_MRT4530_97916C.1.pep
AAHDPTSTINSEEFLPAPVSLNKIELRNIDGCFTYFDKDGSGFXTVDKLKRLMERNMEDI

SEQ ID NO: 202658 - protein, 32 aa, Oryza sativa
  Clone ID: PAT_MRT4530_97917C.1.pep
RRACSGGRTFVTFYVRCECNIANWLYHEHVTV

SEQ ID NO: 202659 - protein, 141 aa, Oryza sativa
  unsure (1)..(141): unsure at all Xaa locations
  Clone ID: PAT_MRT4530_97918C.1.pep
GREAATLRWWSWSVVTTSDAASATPAAVFLAMPGWTQHPSIHDGVDSLPNRSEVPLLRHARRIVEEDYLDLPWEXATAEHVCDVVLLRRHTAVCNRSTLTVHPICVPHLTDGVYLPPHGGRPAWSALPNPRIGTWLRLIHR

SEQ ID NO: 202660 - protein, 158 aa, Oryza sativa
  unsure (1)..(158): unsure at all Xaa locations
  Clone ID: PAT_MRT4530_97919C.1.pep
TSPHPLSLSPSRSPSPANSRSPPRRAPTPSPPVRARAXPRTPTPSPPRRSPTAWRVRLRCRRREDSSAAAGGATGRAGPRPARAGSRTRPGPTLLPLISAAARVGSRRPATSPGSRSRSHPAPLPAPVRRSPGSTAATATARTWRRCSPVHLLSHLIP

SEQ ID NO: 202661 - protein, 311 aa, Oryza sativa
  unsure (1)..(311): unsure at all Xaa locations
  Clone ID: PAT_MRT4530_9791C.1.pep
LRPPSLAPALFKLAPRLPRPFPPLAAPSLRRNRARAVALSLLRRRRPPAGLLRSPGPSPAPASPPPASPHRHRPRPPPRRVRRPPERRRPRRPEPRRRLPPLWLPFSSLPSTXGEPWTAASFPPSLPLSRPPLRRAYGRRRRPXGAGAASRRPRRXGRRRARRVAAAWGPAVSRPRPRVWLTRGAHGAGRXSPGAPGPPWTHLGHIRTGLRASVAKHYRXFHMSSGANECYTSCGPVVEMSWHRTGVLLLGAQSCLPVPGVPGVGGVGSMYTSDQSITYSNSRALGYGQAEQCTQVSRLPSLRGPSLRVSI

SEQ ID NO: 202662 - protein, 47 aa, Oryza sativa
  Clone ID: PAT_MRT4530_97920C.1.pep
GVPARVRPANKLPRLKEQAEEYAALIIEELDPEGLGYIEVSSMFLSR

SEQ ID NO: 202663 - protein, 159 aa, Oryza sativa
  Clone ID: PAT_MRT4530_97921C.1.pep
SNSPNNHRSGATTPVNANPPGSRSSDKQPICHCRAGKCKVETIKGQKYYVCCIQKGQGACPYQVPVNAFVEESPQAGNSVPLEDNRGNYSPVKVEANNDNGSINPDQPEYDEWPFDIVNNDVVCSGFLPTAEPTLRDGIVAGESPSTQHLSNATTEAKT

SEQ ID NO: 202664 - protein, 80 aa, Oryza sativa
  Clone ID: PAT_MRT4530_97922C.1.pep
PGPLSISILYSLQILISEIQVKSGPTRPQTRGPLRSVAGCQSTLDLPDSSPRSRCGQHVIFCTPPPSGLGCSLPSVCTRS

SEQ ID NO: 202665 - protein, 153 aa, Oryza sativa
  Clone ID: PAT_MRT4530_97923C.1.pep
MVKSLVGSRRMTQKNHHGNKCAEKDDQSFGMREEKAEDGRESADYKQKRVMDINRVTDKNCKSRKKDLESEYRFDCEDEEVTFNVYNIDMEILELIITHSDLVELKALPLIKVKMVLLWVDEDMALQRCFLALALGDLGGAKQTAQEQATITI

SEQ ID NO: 202666 - protein, 113 aa, Oryza sativa
  Clone ID: PAT_MRT4530_97924C.1.pep
MCLVNPHLRPAATPSSLFRWCSLTLMLESLRLHITTVIQGFNPLGSAVTIAHSDNLAPQIPSASSWLQYGRGISSRHQIVPPNRFHMFALFTYVLGSNDLFNFRLLAGDISSW

SEQ ID NO: 202667 - protein, 223 aa, Oryza sativa
  unsure (1)..(223): unsure at all Xaa locations
  Clone ID: PAT_MRT4530_97925C.1.pep
MTTSIPGRTPCLQAESEIERPLHCTRTKLIFTGGREVRLHHNDCENHPSSQSGQRPACENXKNRTKKIAGLRREPLPPPFHAVGAVAGLPLPSSGQIWEGGXEGSRRRRXPAPSPLHAVGAAAGLXLPPPVRSRRERGXGSRRRRPVRAAAARPVPLSSPPGPRRRRXAAGLPPPSSGQIWEEGGRGAAAALLRRPPRTRRLASSPLPPFAAAAGSCRRGELK

SEQ ID NO: 202668 - protein, 74 aa, Oryza sativa
  Clone ID: PAT_MRT4530_97926C.1.pep
KNTKTFIGEIHIQILPKAVKRKNKQVLGLPKYNKMKSTLSLGLYIKNIPNHFFGRGVYRTEIFYLHKRFDKKIF

SEQ ID NO: 202669 - protein, 137 aa, Oryza sativa
  Clone ID: PAT_MRT4530_97927C.1.pep
MDFRHAWPTKSGPTTSPKPPVGSYPLPLVLCEVVARNGGSSGSYGGSGGGGSSPKQQRWLLLLPVAAAPPPSSGARLLLFPTTTAVASPSDSSCLSRRQRLPLPNNKRPPFLTRPFHQSSSMCNQIIRLSPKLVFVH

SEQ ID NO: 202670 - protein, 173 aa, Oryza sativa
  Clone ID: PAT_MRT4530_97928C.1.pep
MASSSEESKEKAVAEEEEKGVISPAATETAGEKKASAAAAGEETKKKQKEKKMKKVRMPQHEVDRIMSYKHRPLTMPPGYKNFSKELLACFPVPVDQLDDYWARKNKIHDEGAKPILEEQERIRKEYNEKGYAEYWITDDEDQAATRSRAPAPGRRRGRPGVTKKHTGGTKKL

SEQ ID NO: 202671 - protein, 74 aa, Oryza sativa
  Clone ID: PAT_MRT4530_97929C.1.pep
FSSSLLQRETAGLQRMQQLGSCGEAERRAEGRVRHCEPLGINLADDEAFDRAARDREHMPSRPPEVETRPWKAA

SEQ ID NO: 202672 - protein, 1390 aa, Oryza sativa
  Clone ID: PAT_MRT4530_9792C.1.pep
MPRYKPEYLFGVEGFVQELRTMSFVIGFGTAPFYAQIPHDRHEEKCRVKVTLNSNSEEEVARIAIGELRDRYSDQLADTEYRYHPRQPQGSDRGSYLETEGIENDATTRHLVEMLWAMDESRAETVLAAQDREDRNRGKICKLEDKVDRLEKELAALKGEAPPQKARIRLTARKRALFVPRYQLAPKMVNTRSNGNGPNNPNNNNGENPTLAQVLAQQTQLMNMMMQQLQNQQNQGNNHVPPQNKLAEFLREKVSFASHQLHGPASEWWDHFRLNRTTAEPITWLEFTAAFRKTHIPSGVVSLKKKEFRSLTQGSRSVTEYLHEFNRLARYAPEDVRNDEERQEKFLEGLNDELSYPLMTGDYHDFQKLVDKAIRQEDKYNRMEQKKRRIAQFKTQQGNNQKPRLTLRPQSMPHGGSSFVVRPQRQFFNNNAGNNIRNQAPRPVAAPTQQQPAKREQGSKPVVCFNCGDPRHYADKCPKPRRVKAVPTQSNSTAPASKARVNHVAAAEAQDAPDVILGTFLVNLVPATVLFDSGATHSFLSMSFAGNHGMEVEDLRHPLMVSTPSNQALSLQRSPSVRIEIKGVPFLANLILLESKDLDVILGMDWLARHKGVIDCANRKVTLISNDGRVVTVHALSSESLRSRLNQITLEEIPIVREYPDVFPDDLPGMPPKRDIEFRIDLVPGTTPIHKRPYRMAANELAEVKRQVDDLLQKGYIRPSSSPWGAPVIFVEKKDHTQRMCVDYRALNDVTIKNKYPLPRIDDLFDQLKGATVFSKIDLRSGYHQLRIKEEDIPKTAFTTRYGLFECTVMSFGLTNAPAFFMNLMNKVFMEYLDKFVVVFIDDILIYSRTKEEHEEHLRLALEKLREHQLYAKFSKCEFWLSEVKFLGHVISAGGVAVDPSNVESVTNWKQPKTVSEIRSFLGLAGYYRRFIENFSKIAKPMTRLLQKDVKYKWSEECEQSFQELKNRLISAPILILPDPKKGFQVYCDASKLGLGCVLMQDGKVVAYASRQLRPHEKNYPTHDLELAAVVHALKIWRHYLFGTRTEDYDMGIHYHPGKANVVADALSRKGYCNATEGRQLPLELCQEFERLNLGIVSREIKKNMRRGKAIGFLEDEQGTVWLGERICVPDNKDLKDVILKEAHDTLYSIHPGSTKMYQDLKERFWWASMKREIAEYVAVCDVCQRVKAEHQKPASLLQPLKIPEWKWEEIGMDFITGLPRTSSGHDSIWVIVDRLTKVAHFIPVKTTYSGSRLAELYMARIVCLHGVPKKIVSDRGSQFTSNFWKKLQEEMGSKLNFSTAYHPQTDGQTERVNQILEDMLRACALDFGGSWDKSLPYAEFSYNNSYQASLQMAPYEALYGRKCRTPLLWDQTGERQVFGTDILREAEEK

SEQ ID NO: 202673 - protein, 156 aa, Oryza sativa
  unsure (1)..(156): unsure at all Xaa locations
  Clone ID: PAT_MRT4530_97930C.1.pep
SGQRGRQGPRHGCPILPLPSFQHRHLGLDPPPQPQPLPSPSPPPPMHISFSXTVGLEDLPPSSPSPLSLPSPPSSSPPCPRPAVVVPVVASDGSGLPAVASDGSSLPAVAGDGSAPPPPPWLMPHSPPPLPPLLQPDAATSAALAEAATEVANKKK

SEQ ID NO: 202674 - protein, 61 aa, Oryza sativa
  unsure (1)..(61): unsure at all Xaa locations
  Clone ID: PAT_MRT4530_97931C.1.pep
FNLAFFFHIVFTPSXSGLNGESWGFRVLHLLKGEPYNYTVDXSLVXLLEGPMTSRVEPYHA

SEQ ID NO: 202675 - protein, 66 aa, Oryza sativa
  Clone ID: PAT_MRT4530_97932C.1.pep
QSSNRPLQSKSVYVHLSRLPKELKMNIYVRSNIYHNIQFCPDGQNIWHYLHILDAELFIWHSISFQ

SEQ ID NO: 202676 - protein, 103 aa, Oryza sativa
  Clone ID: PAT_MRT4530_97933C.1.pep
MAPRSVAISGRGTSGARRHRIVFRGYIQGIAKPVIRRLARKGGVKRISGLIYKETRGVLEIFLKNVICDAITYTEHAHRKTVMAMDVVYALKLQGRTIYDFGG

SEQ ID NO: 202677 - protein, 133 aa, Oryza sativa
  Clone ID: PAT_MRT4530_97934C.1.pep
MVPTEVGNDDTLGAATTRRLPLAKSDRLMRSAALGGARLNRGTDGGAWPATSNNHDALAKIARNSFGGPPIGHDRGNEQAGPRRLQTLTLIGYRWPNRPPGPAWPRHIQAWAEVSRVEPCLSTGYTRGSGMAQ

SEQ ID NO: 202678 - protein, 304 aa, Oryza sativa
  Clone ID: PAT_MRT4530_97935C.1.pep
MTTPLPCRAVYWLRGLASMVYKRILMQPNPMIQAHFPQGWKKVYEGMSLEGLESTPQIKGKANGAFSCSSVRCILPPANPSDQHAPREMPMKRKAAKSNDSTKHCPKSYLHAAGAINAGAACFCPVVLTHRVGLSAGAGAGVVIGVGGGRPWDSTRIDHSTCTSSHGHDLTSSSGGAVTSPDDDHVNNRCYCRCCCTSRRRERGRLPCGGLNHTRYATHEPRATAAARAAADLFLVTSCRERRGKRRQMNERKRRVIRTASIDQQPDKRACNRKRRGEAMKADDEPPTLLTVPGPVKKEVSRDA

SEQ ID NO: 202679 - protein, 257 aa, Oryza sativa
  Clone ID: PAT_MRT4530_97936C.1.pep
MRPLLARLFAPTYIAMGFSSSASPPSRRLAHLTRHLLLSSGELSSSVGAPAAARPAYLAAPKGYAAVLVCLFEDPHGGDPRVILTKRAASLSSHSGEVSLPGGKVEEGDADATATALREAKEEIGLDPALVSIVTVLEPFLSKNGLHVTPVIGILSDKALFKPVLNESEVADIFDAPLEMFLKDDNRKTQESNWMGMNIPVQSFEYQSEDKTFVIWGLTAHILTRAAAVVLPREPSFVEFRPRYVNSPSGDTNETKR

SEQ ID NO: 202680 - protein, 92 aa, Oryza sativa
  Clone ID: PAT_MRT4530_97937C.1.pep
GAPGPKCRLKKPPPLKRGVHPQPFLVIPLLEGPHVFLMVFWGFSGFLYKRGEKKKKKGFFFLGPKSHWGCFLAPKNLPVLMTFSRARDQVLS

SEQ ID NO: 202681 - protein, 64 aa, Oryza sativa
  unsure (1)..(64): unsure at all Xaa locations
  Clone ID: PAT_MRT4530_97938C.1.pep
PTVDHSTLVHLILSANYLNIXGLLDLTCXTVADLITGKTPEEIRLTFLINNHFSPDDEEDHPPR

SEQ ID NO: 202682 - protein, 78 aa, Oryza sativa
  Clone ID: PAT_MRT4530_97939C.1.pep
MAATAVPPPLPLHVGLDGRPSISTTVDPSVVAIQQRRLSPRPLFSLQWRPVVGSNGDNSIGGFPAEKDWERPTGDNEM

SEQ ID NO: 202683 - protein, 69 aa, Oryza sativa
  unsure (1)..(69): unsure at all Xaa locations
  Clone ID: PAT_MRT4530_9793C.1.pep
GIYYIXIVAWTLISYTRXGRVLVYYXXXNXKEFYPPQLHYTFFLPPPVPIFIYXYKMXIPLRAEFPASR

SEQ ID NO: 202684 - protein, 61 aa, Oryza sativa
  Clone ID: PAT_MRT4530_97940C.1.pep
IVNYTFFSPLLLWIEKWRGNVQRSNFSSPPLKNWSGAVLVPALYSNIHVIIRILQTSSSDN

SEQ ID NO: 202685 - protein, 108 aa, Oryza sativa
  unsure (1)..(108): unsure at all Xaa locations
  Clone ID: PAT_MRT4530_97941C.1.pep
MADHHQEQVVYTRGQLCQPGIAYPTWAVATYGPMVKRQSVDPGTLEEQGXLKRGVXRQQSSTVVTPCYALNHMLVNIYRESGTCDCXHPMGEVYRGCGRGDIELTVLS

SEQ ID NO: 202686 - protein, 368 aa, Oryza sativa
  Clone ID: PAT_MRT4530_97942C.1.pep
MAAAAPELVDDMTYEILLHIPPDDPASLVRASLVCKRWRQLLTDPAFLRRYRAFHRTPPMLGFIHNVDHSSNSSYIPRFVATTSPSPFYPDFPPPSIEFPTYWWALDCRHGRLLLQLFNPIDLMVWDPTTGDHRIFPQPPYLDFYCTGAVLCATRGCRHVDCHGGPYLVVFVGTGEDDHSWACVYSSETGEWSSQASIAFDSYVEMLPGLLVQDTLYFRCERGKRILGYDIGRHELSEIDPPPLGHEVGILMESGYGGLGFATVEDCSILLWSRYVGDDGIEEWKKSWVIGLDFLNPVGNPSLSWELAGFAEGVHTIFISSEIGVFTIELKSGQVKKLCEEGYYTVVPYMSFYTSDIAIWRPEEPAED

SEQ ID NO: 202687 - protein, 115 aa, Oryza sativa
  Clone ID: PAT_MRT4530_97943C.1.pep
YLVTAKQGNNIKMLLEQLCSTRSRPQKAKSTIVTSSAQNFHRSNKKKKELTSAAEGAAAPNPTVLQSGLAGLVAGAYSKCDRRALSVHGQWRTCKQQPTPSVPKKGKSVGLRIQL

SEQ ID NO: 202688 - protein, 189 aa, Oryza sativa
  Clone ID: PAT_MRT4530_97944C.1.pep
MSLPKQEWLANVSVETIKLLFLKQSNCTRTNENIEHGGLTKAADIFPSATIRIFKNSRWSTCLAESKQHTSAKEIDKLKRGRIRFQIVVLPATILQYYLLQARIMEKSLMKAFRQSNLRMLMTDAKMPSIILTGDPRSSLPIRRLSQAIIVCTVQCRQIVPGRIDQQREVIKPSGKGYQWKGDRSPRSR

SEQ ID NO: 202689 - protein, 674 aa, Oryza sativa
  Clone ID: PAT_MRT4530_97945C.1.pep
MSSAKSTRSRPAGHSGVLPVNATAGGGDGGVPLADKMKIFKTDNFDPDAYVQSKCHAMNEKEIRHLCSYLQDLKKASSEEMRRSVYANYAAFIRTSKEISDLERELLSVRNLLSTQSALIRGLSEGVHIDSLTTGSEGSAEEGTDEDQEPSEIQNWCTDFPEMLDVLLAERRVDEALDALDEAERVVADEKQKQTLTTADILAVKRAISDNRLKLANQLAEAACQSSTRGVELRASASALKRLGDGPRAHSLLLSAHNQRLQCSMQTIHPSSTSHSGAYTASLARQVFSVIAQALSDSLELFGDEPSYLSELITWATEQAMLFALLVKRHALAACVAAGGLRAAAECIQISLGHSSLLETRGLSLSSVLMKQFKPSVEQALESSLRRIEESTAALAAADDWVLTYPPSGIRTFARSSASSLLLQPKLSNSGHRFSSMVQDFFEDVGPLHSLQLGGSAMDGLLKIFNSYVNLLISALPHSLDDEANLEGLGNKIVRVAETEEQQLALFANASLLAEELLPRAAMKLSSVNHTGVNDIRKKSVDRQNRVAEQREWKKKLQRIVDKLKDSFCRQHALDLIFTEDDDTRLSAEMYINMDNTVEEPEWVPSLIFQELYAKLNRMASIAADLFVGRERFATFLLMRLTETVILWLSEDQSFWEEIEEGPRALGPLGLQQG

SEQ ID NO: 202690 - protein, 75 aa, Oryza sativa
  Clone ID: PAT_MRT4530_97946C.1.pep
NPPKPYPWRPPSSPGPLPSPPSPSAAPARTTYCPPPSPRKPCFLLPSSSSSPPPSPRSSRGEESDGARAEEAGFG

SEQ ID NO: 202691 - protein, 159 aa, Oryza sativa
  unsure (1)..(159): unsure at all Xaa locations
  Clone ID: PAT_MRT4530_97947C.1.pep
MWILAIGRVLDVTVTPREGGKRIHVGVQELTXFTEDIAARSQAVARQFKSLKVKAVVALLSLSRNDTAEDVDSNNEKEKSYGYMMMERLTGSPDGRIDHVLQVYSCSNYWRDHDTALFILKHLYHDIPEETPTDDPERMPIRLFYATGIVEAVEDLLRC

SEQ ID NO: 202692 - protein, 85 aa, Oryza sativa
  Clone ID: PAT_MRT4530_97948C.1.pep
DSNNEKEKSYGYMLMERLTGSPDGRIDHVLQEKTFQHLYLSALGSHTNYWRDHDTALFILRHLYRDIPKEPPTDDPERCLFDCFM

SEQ ID NO: 202693 - protein, 80 aa, Oryza sativa
  unsure (1)..(80): unsure at all Xaa locations
  Clone ID: PAT_MRT4530_97949C.1.pep
SYVHISKHHLNKQHQYQSGQTEQDNEEIESGLQGIDSLKQGLXVPQAGARRLGALGWPTSSHPPRDLETWAGYPLEXVLR

SEQ ID NO: 202694 - protein, 596 aa, Oryza sativa
  Clone ID: PAT_MRT4530_9794C.1.pep
MDLLRQPRGGARGPGPRGWGPRGSPTVHGGPGAPGLTPAGAVGPTRQPHPRTRAADSRAPRGSRTVRPKAATPAQRRHGGAAAERGEGKGEKKRRSTAHPGSTATTETATGAEEGGGAARVDGVDGAPAVGERNGGVDEVVGDAVKPKVATPRREVVRGDDSGGPELGGDGGERERRRELDSDGERGRRVAETVEGGTGKVYIGLGGGGSCRTRGKRARKIRSPLMAPASLSFLHLNPNSITFLNIFSHLCEAYIGVEPFLDLFRFYYKLRWMESTRVSGCVGFRLRDGLKSRYIPFQCPSSRSKWQARWFYLQVEDSDPIFVVPEEQPDKIPSWTAKPALTPSLQFFINPIDDLRVRGLSRYEVAADFIGLNSETMERCVGQLMISGPTTVSNVPIPLCEKGKAEHEAAINALPLTDVIGPLLDHQAAASLKEGVAQEASDAAIAAAATTSGSRVPRKGRKFTSVLGSRRKASSHRSARAKAVQDGSGGNSSTSPAMASTDVVVVPRSREVTPNGPASDLVPARGLPADVLTWGELQVEMGHILEVGAHGISREIAEARTAAASSANERADKLARDLAEVREDLQKMRELVAGNE

SEQ ID NO: 202695 - protein, 131 aa, Oryza sativa
  unsure (1)..(131): unsure at all Xaa locations
  Clone ID: PAT_MRT4530_97950C.1.pep
MHIVDFFSVFYALQVTKSNVLITFFGCSEDVDSNNEKEKSYGYMMMERLTGSPDGRIDHVLQEKTFQHLYLSALGSHMFILXSNYWRDHDTALFILKHLYHDIPEETPTDDPERMPIRLFYVRDPIAERFP

SEQ ID NO: 202696 - protein, 939 aa, Oryza sativa
  Clone ID: PAT_MRT4530_97951C.1.pep
MESPAARGALGDDASGASTSQAAPGAVDGGASPDSLRNTPSNIARLEDAIEHCAARRKYLARTKSPSDGEDVRWYFCKLPLADKALSASVPRTEIVGKGDYFRFSMRDSLALEASFLEREEALLAYWWREYAECSEGPKGSLVAADASDSKSLYKVEEERVGVPVKGGLYEVDLMRRHCFPVYWNGKNRRVLRGHWFARKGGLDWIPLREDVSEQLELAYNCQVWHRRKFQPSGLFAARVDLQGSTPDLHALFTGEDDTWEAWLVFDTGPKLGGNTIKLRRGFSSSGSAKPTQDELRQQKEEEMDDYCSQVPVGHLVFMVHGIGQRLEKANLVDDVVDFRRVTANLAERYLTPYQRSTQRVLFIPCQWRKSLKLSGEQSVEKITLDGVKGLRVALGATVHDVLYYMSPIYCQHIIDSDLSLQQVSNQLNQLYTKFIKRNPGYSGKVSIYGHSLGSVLSYDILCHQESSSAPFPVDYMNMEVSSDEGHIAKSPDTVTAHESVMKEQDTSSISGHSCADNVNDVVDEGSTRTGTSCTEDTTLPTCALENSPKLTTDALPTAVDGEQIEVEKQVDNHKIACSEEGDNSSVRAKDIDSCIISRSAEGVHADVPDKDTLISSLKEEVERLKARLAQLEQHNDLVTESSAESHQGKSATHAVNLSSGKNRIGQGSTSESYTPHIRYTKLNFKVDTFYAVGSPLGVFLSLRNVRIGIGRGQDYWQNENIVEEMPCCRQMFNIFHPFDPVAYRIEPLVCEDYISKRPVIVPYHRGGKRIHVGVQEFTEDIAARSQAVARQFKSLKVKAVAALLSLSRNDTDEDVDSNNEKEKSYGYMMMERLTGSPDGRIDHVLQEKTFQHPYLSALGSHTNYWRDHDTALFILKHLYRDIPEEPPTDDPERMPIRLFYVRDPIAEETPLTFSDNSLVKEFSRKVGWNLLNFASLDE

SEQ ID NO: 202697 - protein, 44 aa, Oryza sativa
  Clone ID: PAT_MRT4530_97952C.1.pep
SITLNFLFPTTLVFWECMGYTAYVGFFEMSKPKKGEYVFVSSAC

SEQ ID NO: 202698 - protein, 93 aa, Oryza sativa
  Clone ID: PAT_MRT4530_97953C.1.pep
KANPCFSLQRGKGSWLVKGKPACRGPGQALKRRVAPPATSKPPHDKQKGSSLLPTKNTLAQPELIKTSFLGKGIFLINRLEKKGPQKTSSPGI

SEQ ID NO: 202699 - protein, 109 aa, Oryza sativa
  unsure (1)..(109): unsure at all Xaa locations
  Clone ID: PAT_MRT4530_97954C.1.pep
LVHRDASKCRSDDDQSLHEPLLRHHXRQEIGASPISTTRTGVRGVAASPAHTLPTCSACAAAWSGLRRSSILTDTAHLRSHRKSGTVGINTGATRLASNQRAIQIRLIA

SEQ ID NO: 202700 - protein, 888 aa, Oryza sativa
  Clone ID: PAT_MRT4530_97955C.1.pep
MNYRFHNLLGAPYRGGDAVFAGDSSVLLSAVGNRVASTDLSASSSLTLPFESSSNVTRLAVSPSGDFLLSVDDAGRALYANLGRRAVLHRIAFKSAPSAVRFSPDGNLIAVAVGKLVQIWRSPAFRKEFFPFHLLRTIPGFAAGVTAFDWSPDSSFLLASCKDLTARLLPVKKGLGGKPFLFVGHRAAVVGAFFATDKKTGRVTGAYTITKDGAIFTWNLVEGSDDSPPPSPGTPEQEAVQDGEAELDGDEPELDGGSRKRKSFGESEEPDTTPLHFTRWELQKKDFFMQSPAKLTACDYHRELDMVVVGFSNGVFGLYQMPDFVCLHLLSISREKITTAIFNSLGNWLVFGCAKLGQLLVWEWRSESYILKQQGHYFDVNCIAYSPDSQLLATGADDNKVKVWTVSSGFCFITFSEHTNAVTAVHFMANNHSLLSASLDGTIRAWDLFRYRNFKTFTTALPRQFVSLTADQSGEVICAGTLDSFEIFVWSMKTGRLLDILSGHQGPVHGLMFSPINAILASSSWDKTVRLWDVFESKGAVETFQHSHDVLTLAYRPDGRQIACSTLDGLIHFWDPFDGLLMYTIEGRRDIAGGRLMTDRRSAANTSIGKYFTTLCYSADGTYILAGGNSKYICMYDVGEQVLLRRFQITRNLSLDGVLDFLNSKKMTDAGALDLIDDEDSDVEEGIDQQTRGNLGLGLPGSMANRGRPIARTKCVKFAPTGRSFAAATTDGVLLYSVDDSFIFDPTDLDIDVTPEKVEEALEENQQQRALLLSLRLNEDSLIKKCIFSVDPSNVRAICSSTPLKYLQRLIEAFSDLLESCPHLEFILLWSQELCKIHGNYIQQNSRALLPALKSFQKSITRIHQDLADTCSSNEYMLKYLCSSGTRN

SEQ ID NO: 202701 - protein, 335 aa, Oryza sativa
  Clone ID: PAT_MRT4530_97956C.1.pep
MARTPSGRGEGVKERHGEERNRQRELDEAAGDLGEELQQQIGLVRGGRGDDEPGSEWRPQTSSITGSLGIGGPIDSRWPVSCAASPAQASPPLSSPAHRPRRCRGTHIHRRRVCHQPPLPHGAAGLFPPRCWGHGPPSSPSSARRPPRGRATSASPTGTRRQVGPHAEGEDDAGGDDDEEDIAKTTHATMAIVWLAVKADPATKTLFFHSLGWSAGADDLLSTFSRFGFVLFRSRRSVLRALRCSHAEKLRPPLRFGGRGSRRSDHRPPRFAPLGSSTVAAASPAACPAPPVGPSTPSLRVLRRPLRPYSGRRLPLHRALPCRGIERRGSFEDDM

SEQ ID NO: 202702 - protein, 90 aa, Oryza sativa
  Clone ID: PAT_MRT4530_97957C.1.pep
ALLVLESLQGLGEGNYRVSRVGTNPIIERATLRQTYSVARVLPEMVKQLHVPCGMTRSAATSAHALDLLSELTGTFDQNCPSRFENYHGL

SEQ ID NO: 202703 - protein, 37 aa, Oryza sativa
  Clone ID: PAT_MRT4530_97958C.1.pep
SLFTISSSEIEYDQRRGQTCGGLLNYTPETSFLVPLL

SEQ ID NO: 202704 - protein, 294 aa, Oryza sativa
  Clone ID: PAT_MRT4530_97959C.1.pep
MAAAQDASSQALGLRWRYGDVDDGNFAVRGRAVPLLVALLFVLVCFVAVSLYLRWACHCHRYGRDTTPMPATTSSGFSSSHAAATAPGSASSVTGLDDATIASMPVALYRAVASAAGDGDDGGAAQCSICLGEFEEGEKVKALPLCGHGFHPECVDAWLRSRPSCPLCRSSLLPAAATTKPDVAGSDAAAGGGEQLQGAFSRFWDTGLASIFMLLAFSSNSGDLLFFSDAGDTLDSGRGPYSDAGAVVLEEGGGLMLVAGHLVVDGLGRQSAARWGGGGRGSGIAEKCVMVAAK

SEQ ID NO: 202705 - protein, 605 aa, Oryza sativa
  Clone ID: PAT_MRT4530_9795C.1.pep
MADNEKGNKVRSQDIGTSSSRVNEAPDTSCVTLVQHLINQNRLLIEILQQHQTPILNLSQIQPQVQLEAVQALTPQVSMPPASRRTHGDVPHVDPKEASNICFMCDEQGHYARERPQQKRKTPMRTEDEVRKMIITSTEWPPPGMTRRQRRNTFRGAPQLTEHLLANGGRVSDSEDSDQVSSDDEDEMERKACSRCGEIGHVASSCATICVHCEEDHPPDRCPTSRITCFFCEGTDHVPKDCQFSFLLTKKMANQPASSNGEKPQGNTNPRQDYSLSLKPVPGQRNQNEKRKCRVREDICCFNCQGMGHFADKCPKPRNIAASTSVHATPCNRKLAPQRIDIHASRSSPIARVATAPTPASALPQGVNAQFQPQPSVDKTEASIGIVPLDVPAQQPRNQVQDEEPKPLTILCTDSLSKELSSMKEVVSLPDLLQAKQRAINLRRAIPSRRPSSASNSNQKEASPVNDSIMQSYHIITEPIKDAVTRTMPAISLQNQNEQPRLWFSVRYLSLCSRKFAAITGNLSEVDSEDMNHEKFWNGSITELPQPSLSQPKGAPWSKSGEEKIPSATGGQAKQFRVVKFCWKFVKTQRKKSDKKRRPPNLSSC

SEQ ID NO: 202706 - protein, 76 aa, Oryza sativa
  Clone ID: PAT_MRT4530_97960C.1.pep
KTPGGTGYSTTKSEQSLLDVLNHDERGAAKRTNQSSYDPQLLYQVQTQSWLTDALEKHTFSLLETRWLRTLMLRFT

SEQ ID NO: 202707 - protein, 71 aa, Oryza sativa
  Clone ID: PAT_MRT4530_97961C.1.pep
MPLAVWVNRILSSFLNVLCCCNLILVGASAICWALWLSRNGNFQGNTLAPVLCTATKFYGMAARVFLPHGN

SEQ ID NO: 202708 - protein, 36 aa, Oryza sativa
  Clone ID: PAT_MRT4530_97962C.1.pep
MSRYDHLKSWCEDRYAIAVVVPRPSEVVAREIATYY

SEQ ID NO: 202709 - protein, 98 aa, Oryza sativa
  unsure (1)..(98): unsure at all Xaa locations
  Clone ID: PAT_MRT4530_97963C.1.pep
GFXIXETRLAXXSXNVIXLXPAXVDSXNSGPXRSXXXSXGXXNLXXEKRXEGPXXXWFPXKFQXPXXKXWGXQXSXXXXIXXWSTXPMXNXKHTYTXA

SEQ ID NO: 202710 - protein, 528 aa, Oryza sativa
  Clone ID: PAT_MRT4530_97964C.1.pep
MDSARSWFTKLQTREKSIGKKKELPPNGKEGTDEAPSSATKQRVAAAKQYIEKHYKEQMKNLQDRKERRCSLEKKLADANVSEEEQHNIVKQFEKKETEYMRMQRHKMSVDDFDLLTMIGKGAFGEVRVCREKNTGNVYAMKKLRKSEMLRRGQVEHVKAERNLLAEVDHHCIVKLYCSFQDSEYLYLIMEYLPGGDMMTLLMRKDTLTEDEARFYVGETVLAIEAIHRHNYIHRDIKPDNLLLDRHGHLRLSDFGLCKPLDYSNFPDLNEKDVTSTKPQSTNGDGRQQSMPKRTQQEQLEHWQKNRRTLAYSTVGTPDYIAPEVLLKKGYGMECDWWSLGAIMYEMLVGYPPFYSDEPMTTCRKIVNWRTHLKFPEEARLMTDAKDLISKLLCNVDQRLGTKGAEEIKEHSWFSGVEWDKLYEIEAAYQPQVTDELDTQNFEKFEESSDNIQCSAKAGPWRKMLSSKDLNFVGYTYKNFELVNDPEVLGMAELKKKEKAKRPSAKSLFGIPSRALAVLCSSSIRRHN

SEQ ID NO: 202711 - protein, 419 aa, Oryza sativa
  Clone ID: PAT_MRT4530_97965C.1.pep
MPPRNGNLVLAAAAAALLVLLASPPSCSAAAPRRRDPVVVPVTRDPATSLYTIPVRYYDNLVVDLAGPLVWSTCAADHLPASLSCQDPTCVVANAYRAPTCKVTGGGGDCSKNVCTAYPYNPVTGQCAAGNLAHTRFIANTTDGKNPLIQVSVKAVAACAPKRLLARLPRGATGVAGLAASGLALPAQVASSQGVAGRFLLCLPRLGYGQGVAIFGGGPIYLGEGLPDFTTTLDYTPLVAKRDNPGYYVTANAIALDDARLPLPSGALAAGGVALRTAVPFGQLRPDVFRPFVREFEKGLNRSDAKVAAVAPFPLCYRASMLGNTRIGYFVPAVRLMLAGGKNYTMTGTNSMVDVKGGKACLAFVEMKSGDAASSPAVILGGFQMENMLLQFDSEKKRLGFARLPFYTSCSNFNFTKTQ

SEQ ID NO: 202712 - protein, 64 aa, Oryza sativa
  Clone ID: PAT_MRT4530_97966C.1.pep
VKKKKKKKKKKKKKKKKGADARDLQLVHPHVIFPFKKKKKNQKKKKKTKKKQQKKQEKPKKKPN

SEQ ID NO: 202713 - protein, 91 aa, Oryza sativa
  Clone ID: PAT_MRT4530_97967C.1.pep
MKISHLMIFNLVLLVLSSDMTMAARMTNYGRLDAPVCKKITFKVHCDDIKPCVQLCATQDPLYPIPSMVASIVCHNSSECECMYCPRAIRN

SEQ ID NO: 202714 - protein, 46 aa, Oryza sativa
  Clone ID: PAT_MRT4530_97969C.1.pep
RHSIPIIYISYWGFSARPWPGGNKRFGYPNKSPLYNHANAWADEVG

SEQ ID NO: 202715 - protein, 3041 aa, Oryza sativa
  Clone ID: PAT_MRT4530_9796C.1.pep
MVNTRSNGNGPNNPNNNNNGENPTLAQVLPQQTQLMNMMMQQFQNQQNQGNNHVPPQNKLAEFLRVRPPVFFSTTNPIEAGDWLHAIEKKLDLLQCTDPEKVSFASHQLHGSASEWWDHFRLNRTTAEPITWLEFTAAFRKTHIPSGVVSLKKKEFRSLTQGSRSVTEYLHEFNRLARYAPEDVRNDEERQEKFLGGLNDELSYPLMVGDYSDFQKLVDKAIRQEDKAQQGSNQKPRLTLGPQSMPQGGSSSVVRPPRQFFNNNAGNNIRNQTPRPVAAPTQQQPAKREQGSKPVVVPAQSNSAVPASKARVNHVAAAEAQDSPDVILGTFPVNSVPATVLFDSGATHSFLSMSFAGNHGMEVEDLRHPLMVSTPSNQALSLQRSPSVRIEIKGVPFLANLILLESKDLDVILGMDWLARHRGVIDCANRKVTLTSNDGRVVTVHALSSESLRSRLNQITLEEIPIVREYPDVFPDDLPGMPPKRDIEFRIDLVPGTTPIHKRPYRMAANELAEVKRQVDDLLQKGYIRPSSSPWGAPVIFVEKKDHTQRMCVDYRALNDVTIKNKYPLPRIDDLFDQLKGATVFSKIDLRSGYHQLRIKEEDIPKTAFTTRYGLFECTVMSFGLTNAPAFFMNLMNKVFMEYLDKFVVVFIDDILIYSRTKEEHEEHLRLALEKLREHQLYAKFSKCEFWLSEVKFLGHVISAGGVAVDPSNVEPVTNWKQPKTVSEIRSFLGLAGYYQRFIENFSKIAKPMTRLLQKDVKYKWSEECEQSFQELKNRLISAPILILPDPKKGFQVYCDASKLGLGCVLMQDGKVVAYASRQLRPHEKNYPTHDLELAAVVHALKIWRHYLFGTRTEMYTDHKSLKYIFTQPDLNMRQRRWLELIKDYDMGIHYHPGKANVVADALSRKGYCNATEGRQLPLELCKEFERLNLGIVSRGFVAALEAKPTLIDQVREAQINDPDIQEIKKNMRRGKAIGFLEDEQGTVWLGERICVPDNKDLKDAILKEAHDTLYSIHPGSTKMYQDLKERFWWASMKREIAEYVAVCDVCQRVKAEHQKPAGLLQPLKIPEWKWEEIGMDFITGLPRTSSGHYSIWVIVDRLTKVAHFIPVKTTYSGSRLAELYMARIVCLHGVPKKIVSDRGSQFTSNFWKKLQEEMGSKLNFSTAYHPQTDGQTERVNQILEDMLRACALDFGGSWDKNLPYVEFSYNNSYQASLQMAPYEALYGRKCRTPLLWEQTGERQVFETDILREAEEKVKIIQERLRVAQSRHKSYADNRRRDLSFEEGDYVYLRVTPFRGVHRFHTKGKLAPRFVGPYKIVSRRGEVAYQLELPQSLAGVHNVFHVSQLKKCLRIPSFSESPFSPEKSLKSSKASKATPGLEWYIPGLEIELCSRDGCSEWLGLYNRMPRYKLEYLFGVEGFVQELRTMSFAIGFGTAPFYAQIPHDRHEEKCRVKVTLNSNSEEIPSVMFEAGGRNYIHACQEVARIAIGELRDRYSDQLADTEYRYHPRQPQGSDRGSYLETEGIENDATTRHLVEMLWAMDEGRAETVLAAQDREDRNRGKICKLEDKVDRLEKELAALKGEAPPQKARIRLTARKRALFVPRYQLAPKMVNTRSNGNGPNNPNNNNNGENPTLAQVLAQQTQLMNMMMQQFQNQQNQGNNYAPPQNKLAEFLRVRPPIFSSTTNPVEAGDWLHAIEKKLDLLQCTDQEKVSFASHQLHGSASEWWDHFRLNRTTAEPITWLEFTAAFRKTHIPSGVVSLKKKEFRSLTQGSRSVTEYLHEFNRLARYAPEDVRNDEERQEKFLGGLNDELSYPLMEDKYNCMEQRKRRIAHFKAQQGSNQKPRLTLGPQSMPQGGSSSVVRPQRQFFNNNAGNNIRNQAPRPVAAPTQQQPAKREQGSKPVVCFNCGDPGHYADKCPKPRRVKVVPAQNNSAVPASKARVNHVAAAEAQDAPDVILGTFPVNSVPATVLFDSGATHSFLSMSFAGNNGMEVEDLRRPLMVSTPSDQALSLQRSPSVRIEIKGVPFLANLILLESKDLDVILGMDWLARHKGVIDCANRKVTLTSNDGRVVTVHALSSESLRSRLNQITLEEIPIVREYSDVFPDDLPGMPPKRDIEFRIDLVPGTTPIHKRPYRMAANELAEVKRQVDDLQQKGYIRPSSSPWGAPVIFVEKKDHTQRMCVDYRALNDVTIKNKYPLPRIDDLFDQLKGATVFSKIDLRSGYHQLRIKEEDIPKTAFTTRYGLFECTVMSFGLTNAPAFFMNLMNKVFMEYLDKFVVVFIDDILIYSRTKEEHEEHLCLALEKLREHQLYAKFSKCEFWLSEVKFLGHVISAGGVAVDPSNVESVTNWKQPKTVSEIRSFLGLAGYYRRFIENFSKIAKPMTRLLQKDVKYKWSEECEQSFQELKSRLISAPILILPDPKKGFQVYCDASKLGLGCVLMQDGKVVAYASRQLRPHEKNYPTHDIELAAVVHALKIWRHYLFGTRTEMYTDHKSLKYIFTQPDLNMRQRRWLELIKDYDMGIHYHPGKANVVADALSRKGYCNATEGRQLPLELCKEFERLNLGIVNRGFVAALEAKPTLIDQVREAQINDPDIQEIKKNMRRGKAIGFLEDEQGTVWLGERICVPDNKDLKDAILKEAHDTLYSMHPGSTKMYQDLKERFWWASMKREIAEYVPVCDVCQRVKAEHQKPAGLLQPLKIPEWKWEEIGMDFITGLPRTSSGHDSIWVIVDRLTKVAHFIPVKTTYSGSRLAELYMARIVCLHGVPKKIVSDRGSQFTSNFWKKLQEEMGSKLNFSTAYHPQTDGQTERVNQILEDMLRACALDFGGSWDKNLPYAEFSYNNSYQASLQMAPYEALYGRKCRTPLLWDQTGERQVFGTDILREAEEKVKIIQERLRVAQSRHKSYADNRRRDLSFEEGDYVYLRVTPFRGVHRFRTKGKLAPRFVGPYKIVSRRGEVAYQLELPQSLAGVHNVFHVSQLKKCLRVPTEEANLEQIGVQEDLTYVEKPIRILETSERRTRNRVIRFYKVQWSNHSEEEST

SEQ ID NO: 202716 - protein, 453 aa, Oryza sativa
  Clone ID: PAT_MRT4530_97970C.1.pep
EEEEEGDDQTESEDGRRRRPRLRFKRRCIDHAEAAKARLQKEAQLAQSVLSRYGSDVSFRFLYDGVADTFAELLKSDVEHMRAGENAKIGLAAKWCPSLRSSYDRATLLCEAIARRMFPRESSQEYLFLSDEHYAYRVRNRLRREVLVPLRKVLELPEVYMTAGKWEQMPYARVPSVAMRQYKGAFEKHDKSGVAGFLDEVRTGHARLHVGAAMPHELVAAALKGEHDEAAELQWRRMVSALAAGGRLSNCIAVCGLSSGGDVAKPPGAAAVALGLLISELSQDPWKGRVITFDATQQLHKVCGATLVEKLRSLAAPVRAAPKGSSLNLQGVFDRILTVATYGGLAKDMMVRRVFVLSDMELNASAWRVQDELKTIRSKFTAEGFTAPEVVFWNVGAPASAPVVATEANAAVVSGYSKNLVRLFLEWDGQLTPAAVMADAISGPEYDSLEVVD

SEQ ID NO: 202717 - protein, 80 aa, Oryza sativa
  Clone ID: PAT_MRT4530_97971C.1.pep
DLFVPGSICSNFLLQSVCLCSFTESCKPVFTRSTTVAPYTGSKGSCVTPRLTLLYDIVETMLHSKKKKNTRTSSLSPRAV

SEQ ID NO: 202718 - protein, 313 aa, Oryza sativa
  Clone ID: PAT_MRT4530_97972C.1.pep
MEQFHDGHHVWLRSRAQGTYLRADDDGRGVSMGQGRASVHAAWTVHTHHLNAGDVDILMLHSAANGRYLATGLGWTRRRLLSGNRASIILRDLDQEVFPPACWFAIRSGWGDDVLLRHCSWRFLRADDRKWNWNRNGTGVIADMIDGRRLARWQWVVEAIPPRNSIPRPPNPSPSFGFFARRIIFRRLTHNDLQWVWIWFTGRSALHLWNQLSRRMGFEPDPNSTMCVRAGTYGRLTPLVTDLPRNNATMVIFVLPPESLGEICTCARLAVAFLFYGYWLMFYRLHAHGIHLVLNLSCALQCSRSVVLLLHVS

SEQ ID NO: 202719 - protein, 88 aa, Oryza sativa
  unsure (1)..(88): unsure at all Xaa locations
  Clone ID: PAT_MRT4530_97973C.1.pep
LVGRAWSAAXRVASWVGXKNKCHCDSNTCDTGNVLGQYTHVVWRKSVSIGCGCVVCTANRGVFITCNXDPRGKFNGERTFLTLNAAAK

SEQ ID NO: 202720 - protein, 565 aa, Oryza sativa
  Clone ID: PAT_MRT4530_97974C.1.pep
MEQREDHTKSSVPGKEREYNAQPKDDMFPMMKQPGTNARVADPMDDVAQHLIGNLLPDDEELLAGVIEDFDHVKLRTQVEESEEYDVFRNSGGMELDIDPLESITFGTAKASLVNGTGSSTNQYSIQNGAGTVTGEHPYGEHPSRTLFVRNINSNVEDSELRSLFEPFGDIRSMYTATKHRGFVMISYYDIRHARNAKTALQSKPLRRRKLDIHYSIPKENPSDKDMNQGTLVIFNLEPAVSNEELLQIFGALRLVQIRETPHKRHHRFIEFYDVRAAESALRSLNKSDIAGKRVKLEPSRPGGARRSFIQHFNHEFEQDETKHNSFQIGSPSANSPPSLWSQLGSPTDENKLNALNETAFNGGMSPLGSNHLSGFSSGYPPMKSPVGKSSYWNNRADNIFHGSPTLHNSHSFPEHHGGIISASPLVSSAASSASTASGFTALTGTSFLWGNNNNLRDHGQPSSIQSQALSNSLFPNNQPQRQSNLYQNLRGSFGASEHFSQFNVGSAPSVFPFESNFGYFSDSPDTSYMRQGKFCGTDPTRVSGSLMTNFGAYPRIHVDSIQMR

SEQ ID NO: 202721 - protein, 181 aa, Oryza sativa
  unsure (1)..(181): unsure at all Xaa locations
  Clone ID: PAT_MRT4530_97975C.1.pep
MEVDPGDPLPDTNRDWSKLPVDALSAVFMKLGTVEILMGASFVCHSWLAASKSPELWRFVDMTRHKVIFSKGTDILCAMAKAAIDRSDGRMESFWAQKFVTCELLDYIVSRASSTLKSIRLIACTFVWGQSLATLAARCXLLEEIECSHHKMSADFFKYVGTCSPTATSTSPYAVFLIMMR

SEQ ID NO: 202722 - protein, 47 aa, Oryza sativa
  Clone ID: PAT_MRT4530_97976C.1.pep
LGLLRRLWTSKSPGHALVCELVNLDSFPEGSRVSRSLPRVSTYLRIG

SEQ ID NO: 202723 - protein, 421 aa, Oryza sativa
  unsure (1)..(421): unsure at all Xaa locations
  Clone ID: PAT_MRT4530_97977C.1.pep
SGCVWGPAVAPGMAAAANSSASAAGAGGGSAAAAGLKTYFKTPEGRYKLQYEKTHSAVVLQYKHGGKTVSQLTVAYLKEKPAGQGSTPSTPSSSSGMRSAAARLLGSGNGNRTLXHDLIIGMGSGDVYSMSLRQQLQDSGRKPVAAQHYNKGVRYDCLTLKCPIRRCTSVAWVPEREGIFVVSHSDGNLYVYDKCKDGNTECTFPAIKDPAQLMISHAKSSKSNPIARWHVCQGSINAISFSPDGAYLATVGRDGYLRVVFDFSKEQLIFGGKSYYGALLCCTWSSDGKYLLTGGEDDLVQVWSMDDRKIVAWGEGHNSWXSGVSLPSPRMRDVPKLSPLVAHRVHVDPLSGLVFTNESILTICREGLIKIWVRPDQNENNHQSNSSELVLGNPVSKDRVITTSNKATGSSFKQSSAVVFT

SEQ ID NO: 202724 - protein, 145 aa, Oryza sativa
  Clone ID: PAT_MRT4530_97978C.1.pep
MVVQAPIVHRQRPCPFQSVELEKDRAALATAEDGAPARWLTGRGVNDEWLLVRGVILTTEATRLAFMALTGARAAVHGNTTLAIKHLCGGSSWHRRGGILLPIDSMERLQFRYWFKDVRADEVEVLVMKSVTIIHQTVEKISKLK

SEQ ID NO: 202725 - protein, 285 aa, Oryza sativa
  unsure (1)..(285): unsure at all Xaa locations
  Clone ID: PAT_MRT4530_97979C.1.pep
DPAQLMISHAKSSKSNPIARWHVCQGSINAISFSPDGAYLATVGRDGYLRVFDFSKEQLIFGGKSYYGALLCCTWSSDGKYLLTGGEDDLVQVWSMDDRKIVAWXEGHNSWVSGVSFDSYWSPPNSDGTGENTVYRXGSVGQDTQLLLWEPALDEIAVPLRHPSSGSPRPGSGSPSAHWDNACLPTGVLQPSPRMRDVPKLSPLVAHRVHVDPLSGLVFTNESILTICREGLIKIWVRPDQNENNHQSNSSELVLGNPVSKDRVITTSNKATGSSFKQSSAVVFT

SEQ ID NO: 202726 - protein, 366 aa, Oryza sativa
  unsure (1)..(366): unsure at all Xaa locations
  Clone ID: PAT_MRT4530_9797C.1.pep
TTHKKKAHPHVNLKDRGRPMADKRTPAHVNDYRHRYTDTGVDNRTTGTXGDTERTRTGQRXRRDPYHHATRRGNDNDERARRRRPGTTKTNGEGTTSAAILGRRRDAAGTRLDDAEPRTKTTTATATLTKHRGRTRTARRRDERHDDRERREDDDDDDRGRRGGDEGSRQRLHGGEDGVEHAAAMPTTEAAPRDDEPARMNGEDDDGHRRCSAEGEAMPRTTSRLRCRRWWRCGRPVHGRGGTGGRTTPERPARATAFRRNSGDVVAWPGKRTALRCRERXWRRRPAHRGRGRGGRRRNSGGNATVAGGEALPEVSAENRGQAGEEEAAAMLEEATARPAGVLTRRQGRLKMAGGTGERGRRRGGG

SEQ ID NO: 202727 - protein, 105 aa, Oryza sativa
  Clone ID: PAT_MRT4530_97980C.1.pep
HWPFGKLAATHNQLSIDKAIWYCCINNQSSNKEAIWHGCIDALESLEESMNEKSIFFWSSGQTTGPDANSMLPDGGSILNRMPIICSYVKNMERTVHSKFILFLN

SEQ ID NO: 202728 - protein, 425 aa, Oryza sativa
  Clone ID: PAT_MRT4530_97981C.1.pep
MEPGAALRAYLPDDLVADILTRLPARSVCRFRAVCRSWRALATERQFVLAHAARDRAAAVPMNHHHRKVHPPFSPSPRRGGGEPTVMLAFVMICRRNEPDRSFYLESREDGACKLLGCWDGMMCIDVRRDSPACRDGIVVVNPISMAYAVVRSPMPDGGEFIAGYAHPDTFAFHLMYCCHNQGKVIFQVIKAGDSQWREIAADRLAISGIDFDKQGISSVALHGGLHWQLRTNSGQWVMLVYDMVTEKFRSIAAPQCAITWVRGLSVLSGRLCSIVIPESMTAEIWVLEDYHEHRSWHCIREIDMAASAERINLENFWDSDLRMFLKVDVEQGIEHEVQEIIIHHGNKIISQPCSVYELRRNEAVYNVRHNVWHKSTMCFNEESIMYKESIVPYQMSFGMKSQFCERKRGALQFSEGQHVYHLPL

SEQ ID NO: 202729 - protein, 41 aa, Oryza sativa
  Clone ID: PAT_MRT4530_97982C.1.pep
SVATAANVTANSGGFLIWLALYLNNFQDKLIPESKLTMTLM

SEQ ID NO: 202730 - protein, 142 aa, Oryza sativa
  Clone ID: PAT_MRT4530_97983C.1.pep
MWLHSLALPPRLASRRSSQRASGCHVMPLGPSRCLAPRPSPNRHVAGKASGEEIQAKPLSMRAAPQLPLTAFNASHSTGQAAVSPRRLCIWRSGDSIEGGYAISRSELFPPAELTERGISRSPAKEDHSSTSVVYIDMIRVS

SEQ ID NO: 202731 - protein, 195 aa, Oryza sativa
  Clone ID: PAT_MRT4530_97984C.1.pep
MADPCAKYGEKRWKGEVTGGSASPVATDGSTYLESTVIVVVPLSRCFAPPHRRRGIMLTRLCKGRRWCRSNGRHERGSVGGRSAVASLGKGKGSVGGSVQAGQWRGEATPAGARAVAGGEKARGQSMAAVFRRSDRDGEIGWVQAECGYRSRSREGGGTEGRRVIDREVRRRRSTWARGRGTEGGLRVSFGKSKT

SEQ ID NO: 202732 - protein, 118 aa, Oryza sativa
  Clone ID: PAT_MRT4530_97985C.1.pep
MVQRLTYRKRHSYATKSNQTRVVKTPGGRLVYQYTKKRASGPKCPVTGKKIQGIPHLRPAEYKRSRLSRNRRTVNRPYGGVLSGTAVRERIIRAFLVEEQKIVKKVLKIQKTKDKTAK

SEQ ID NO: 202733 - protein, 75 aa, Oryza sativa
  unsure (1)..(75): unsure at all Xaa locations
  Clone ID: PAT_MRT4530_97986C.1.pep
LINXFTYSDTHISLIGASNKFPPSPTDPTSHKKRPQFSLKLPNQTPDHNKSLFVKKLTGKTLIIKARPPPFKYIS

SEQ ID NO: 202734 - protein, 63 aa, Oryza sativa
  Clone ID: PAT_MRT4530_97987C.1.pep
IIYVNKYRHTHIYIYIYIYIHIYIYIIYIYIIYIYICMCVFRFINIYINVSNTKNSYNLKRRK

SEQ ID NO: 202735 - protein, 183 aa, Oryza sativa
  Clone ID: PAT_MRT4530_97988C.1.pep
MAPLAMGGRGGGCWNRTHNYPEVAERWADEWSEGPFTRPRVGGAHQGERLRARSHGKSPGTLELAPGPPRPLNRLWGSGGLDWAPRSPRPFGALGSGIGCSGAGVGARVVPRNAVGGSSGENLREEIERVEEDPRQSQALGKSDGAAESHRRVPSPPATTTFTAPVLVPIGKSSIHDNICGGG

SEQ ID NO: 202736 - protein, 86 aa, Oryza sativa
  unsure (1)..(86): unsure at all Xaa locations
  Clone ID: PAT_MRT4530_97989C.1.pep
IKKQKCIVKDWRRRDDYXITFTPAQFYKEHLSSIYIYLQGGXHXXXKFRGXSANYTYIYIYIYIYIXKQPRCTIQXENIFIPXTSV

SEQ ID NO: 202737 - protein, 97 aa, Oryza sativa
  unsure (1)..(97): unsure at all Xaa locations
  Clone ID: PAT_MRT4530_9798C.1.pep
RRQRGERGRAQGTAKEPLDGRVRTRRCTRAPARWPVAAHRRSLSLLHFTGGGLETVGGEQKSGRATARGHRPWRAGHDAAARGARQXDGAAMHGPST

SEQ ID NO: 202738 - protein, 189 aa, Oryza sativa
  Clone ID: PAT_MRT4530_97990C.1.pep
MPPTVALPQRLRLARIFFHPLYLFPQILPTATTDSIPWNHPCSNPSAATANATSQRPYWGRIATLHHSTPIGSGGGRASRGLPPTPCGAHLHREGPDRTPRKLTEPEEGSRLREVRSQPKGLGDLGAQSRPPEPQSRFKGLGGPGASSSVPGLLPWLRARSLGRTPGMSMGCHKSALLISHPPPMLRHD

SEQ ID NO: 202739 - protein, 145 aa, Oryza sativa
  unsure (1)..(145): unsure at all Xaa locations
  Clone ID: PAT_MRT4530_97991C.1.pep
RVAGCVACRRPPGGRARRPSTSMPPPPPDRRSPDLAAGAFSRLPATDVAASRPPAXPPTPSPPPNRRSPDXPPGSRIWPPAPSXPPGRRRRQVWPPRSRIWPPAPSLASRPPTPPRIRPPTPSPPPQPLPLKLPPPPSSPSSPSP

SEQ ID NO: 202740 - protein, 60 aa, Oryza sativa
  Clone ID: PAT_MRT4530_97992C.1.pep
GGRCFSMFTCHVYCIAIPPAVLESWGIQKLAAQPTTHSDQNHLRIHPKILHSNATSHKWA

SEQ ID NO: 202741 - protein, 71 aa, Oryza sativa
  Clone ID: PAT_MRT4530_97993C.1.pep
YSISNRMSLLIQSSYTLRTFHVPPKHLLGTAIDRVLQAAAFVDHGKIRGAARPTPPARTHPAPPRSPAQIP

SEQ ID NO: 202742 - protein, 55 aa, Oryza sativa
  unsure (1)..(55): unsure at all Xaa locations
  Clone ID: PAT_MRT4530_97994C.1.pep
NNQVMQQQCXQQLXLVAQQSHYXISSVQAIVQQLHXQVGVVYFDQTQAQAQALLP

SEQ ID NO: 202743 - protein, 62 aa, Oryza sativa
  Clone ID: PAT_MRT4530_97995C.1.pep
GIRHQIRRQQLINKLGSLEVSELDLNKNVFDFFTLFCPLVNSEKNKLYLTLAPLGSFREDLS

SEQ ID NO: 202744 - protein, 68 aa, Oryza sativa
  Clone ID: PAT_MRT4530_97996C.1.pep
NKHAFKQLRLLWVLNWTLPLPPLSLSSHVLMPVALSLDGHSFRMITRVAPLPLELIGLVIRDGGGWVI

SEQ ID NO: 202745 - protein, 315 aa, Oryza sativa
  Clone ID: PAT_MRT4530_97997C.1.pep
MASEQQRRRSPPTILAAILLLSFLATANLAGAIDPAGRRRNVVVFWGGNKNEGSLRSVCDSGLYNIVIISFYSLFGHGRYWDDLSGHDLRHIGADITHCHFKAVYVLLSIGGGDGKDYSLPSSKSAADVADNLYNSFLGGSRPGVYHPFGDDVTVVGIDFFIDRGQPDHYYEIAERINYDTRHWRDPIGFKLTATVSCAYDDSDPRMKKALETYLFRRIHVRFYDDPRCSYNHAGLAGVMAQWNRWSASYPYNGKIYLGLAAANLTGKNDMVAVGELYRKLLPAVQKTDTYGGVMLWNSYYDSITHYGRYVSAWA

SEQ ID NO: 202746 - protein, 51 aa, Oryza sativa
  Clone ID: PAT_MRT4530_97998C.1.pep
LIPWILGNLPSATGALATGRVPTSAPEPAFSHLLQVRNGALQGDAQRAEGV

SEQ ID NO: 202747 - protein, 115 aa, Oryza sativa
  unsure (1)..(115): unsure at all Xaa locations
  Clone ID: PAT_MRT4530_97999C.1.pep
KLYIYICIYIYIYMYIYICIYIYVYIYVYMYICIYVYIYXVYIYICIYMYIYVYICIHIYIHIYMSXKYIYIYIYIYIYIYIYIYIDYYIYIYIYIYIYICIYTYIYIWGKYSEL

SEQ ID NO: 202748 - protein, 882 aa, Oryza sativa
  unsure (1)..(882): unsure at all Xaa locations
  Clone ID: PAT_MRT4530_9799C.1.pep
GSDRGSYLETEGIENDATTRHLVEMLWAMDESRAETVLAAQDREDRNRGKICKLEDKVDRLEKELAALKGEAPPQKARIRLTARKRALFVPRYQLAPKFPPVSLLVPCPCQMVITRSNGNGPNNPNNNNEGNPTLAQVLAQQTQLMNMMMQQLQNQQNQGNNHAPPQNKLAEFLRVRLPIFSSTTNPVEAGDWLHAIEKKLDLLQCTDQEKVSFASHQLHGPASEWWDHFRLNRTTAEPITWLEFTAAFRNTHIPSGVVSLKKKEFRSLTQGSRSVTEYLHEFNCLARYAPEDEDKYNRMEQKKRRIAQFKTQPGNNQRPRLTLGPQSMPHGGSSSVVRPRRQFFNNNAGNNIRNLAPRPVAVSTQQQPAKREQGSKPVVCFNCGDPGHYADKCPKPRRVKVVPAQSNSTAPASKARINHVAAAEAQDAPDVILGTFLVNSVPATVLFDSGATHSFLSMSFAGNHGMEVEDLRRPLMVSTPSNQALSLQRSPSVRIEIKGVPFLANLILLEPKDLDVILGMDWLARHKGVIDCANRKVTLTSNDGRVVTVHALSSESLRSRLNQITLEEIPIVREYPDVFPDDLPGMPPKRDIEFRIDLVPGTTPIHKRPYRMAANELAEVKRQVDDLLQKGYIRPSSSPWGAPVIFVGKKDHTQRMCVDYRALNDVTIKNRYPLPRIDDLFDQLKGATVFSKIDLRSGYHQLRIKEEDIPKTAFTARYGLFECTVMSFGLTNAPAFFMNFMNKVFMEYLDKFVVVFIDDILIYSRTKEEHEEHLRLALEKLREHQLHAKFSKYEFWLSEVKFLGHVISAGGVAVDPSNVESVTNWKQPKTISEIRSFLGLAGYYRRFIENFSKIAKPMTRLLXKDVKYKWSVECEQSFQEL

SEQ ID NO: 202749 - protein, 199 aa, Oryza sativa
  Clone ID: PAT_MRT4530_979C.1.pep
MASAGAPDAHGGGGWIRRGAPAGERWAMSSRPQATVAGDGMNDDGPSAAAVEDTDLFTGWQGGSWRIRPVAGSEAPALNLADGANPRRRRRARAHPPPRPPRRRGAARRGAGEGHRPSPRAQQEYDVTSAAAAGPCDAYLVFRSSPPLNASVVSISNLLNITTTTVTESNAVDPVVPIAVDPLVFAPVVGDLIPTCRLA

SEQ ID NO: 202750 - protein, 49 aa, Oryza sativa
  Clone ID: PAT_MRT4530_97C.1.pep
HPSPQIGDAPWRRTTTSWRWPAVLEVKALLQASLPQHPLQINAEETSSH

SEQ ID NO: 202751 - protein, 44 aa, Oryza sativa
  Clone ID: PAT_MRT4530_98000C.1.pep
MKPEGYVCQGYGRKESYSDRTGSLTYRIGSDTSKFYLETSRSAI

SEQ ID NO: 202752 - protein, 99 aa, Oryza sativa
  unsure (1)..(99): unsure at all Xaa locations
  Clone ID: PAT_MRT4530_98001C.1.pep
VHLNWQSGVPHILSQXITNLPAIHLVVHFTXGNNLTQYTVPEDERLLERRYRLKNVHIFRXVARYCYXDLHTKEEDLEKMLFNCRSAILQLKSMKEGKS

SEQ ID NO: 202753 - protein, 130 aa, Oryza sativa
  Clone ID: PAT_MRT4530_98002C.1.pep
MDKMDPQARCNCPGNRFNYHNRHKDPPVSDPEKCGGLLGQPRFGQTLAASAQVGSARGRSGWLADGGCKGKMDNSHGYNHHTDPLINFPDFFWIYRGRRRRIPVVQGGGDQGRQRRPTNSVIASPSSGRH

SEQ ID NO: 202754 - protein, 1363 aa, Oryza sativa
  Clone ID: PAT_MRT4530_98003C.1.pep
MAERRPCYCRNNGFLLLLVQVLLFLFLFLDSSMVATAASAPAPLNTTQVSIMKELSGLVTASAKWNTSDSNPCRWDGVSCSSSSNSISVVTNLTLSGYGLSNSTIFATICSLDTLQILDLSKNSFTNSIEQFFTSSCSMKAGLRSLNLSSSQLSMPLSNFSGFPLLEVLDLSFNSFSGDVRTQLSSLLKLRSLSLRRNNLAGDVPTSMTPSLEELVLSINNFSANQNNFTGFIPSGITKNVKMLDLSYNELSGVIPSDILSPVGLWTVDLTHNKLEGPIPSSLSPTLYRLRLGGGNSLNGTIPATIGDASTLAYLELDSNQLTGSIPLELGRCKSLSLLNLASNKFQGPVPDAISSLDKLVVLKLQMNNLDGPIPSVFSNLTSLITLNLSGNSFTGGIPREIGKLPKLSILNLQCNKISGTIPDSLHLLTSLIELNLGNNILTGTIPTMPTKLSTVLNLSHNNLSGSIPSNIDLLSDLEILDLSYNNLYGEVPASLAKLESLTQLVLSYNHLSGSIPIFRQHVDIATNGNPDLTNGTRNYDNAPTSGKRRTHNTVIIVVAITGALVGLCLLAAIVTISYSKRIYRVEDEGPSTEDVARIINGHLITMNSIHTSAIDFVKAMEAVSNHSNIFLKTRFCTYYKAVMPNGSTYSLKQINCSDKIFQIGSQGKVAHELEVLGKLSNSNVMVPLAYVLTEDNAYIIYEHVHKGTVFDFLHAGRSDVLDWPSRYSIAFGLAQGLTFLHGCTQPVLLLDLSTRTVHLKSMNEPQIGDVELYKIVDTLKSSGSLSTIAGTVGYIPPEYAYTMRLTMAGNVYSFGVILLELLTGKPSVSDGIELAKWALSLSGSPDQREQILDTRVSRTSAAVHSQMLSVLNIALACVALSPDARPKMRTVLRMLFNANTIVQVLRHAAAAPSFLLHPRRGGGVTAPAGSSRRRRACFRVEAKIREIFMPALSSTMTEGKIVSWTASEGDRLAKGDPVVVVESDKADMDVETFHDGFLAAVLVPAGESAPVGSAIALLAESEDEIPAAQSKAASLSSSSSSSPPPPPPQESTPPPPPPPPPAPVAAAVSAPAPPSPASQGGLRVVASPYARKLAKDLNVDLNSITGSGPGGRIVAKDVEAAAAAPKKAAPVAAARPDVPLGSTVPFTTMQGAVSKNMVESLAVPTFRVGYTFTTDALDALYKKIKPKGVTMSALLAKATAMALVQHPVINSSCRDGKSFTYNSSINIAVAVAIDGGLITPVLPDADKLDIYSLSRKWKELVDKARAKQLQPHEYNSGTFTISNLGMFGVDRFDAILPPGTGAIMAVGSSQPTLVGTKDGSIGIKNQMQVNVTADHRVIYGADLAAFLQTLSKIIEDPKDLTF

SEQ ID NO: 202755 - protein, 71 aa, Oryza sativa
  unsure (1)..(71): unsure at all Xaa locations
  Clone ID: PAT_MRT4530_98004C.1.pep
MDDLRGQKRXVIRDVCGHHRLGFPSGNRLLCCGAAGLLEPLNQVKWLREPRSNDPTXEVGALPFELLKASL

SEQ ID NO: 202756 - protein, 448 aa, Oryza sativa
  Clone ID: PAT_MRT4530_98005C.1.pep
MGMVVFAAGDERPLMLVWAAVAGAVLAWCAVRAMEWAWWRPRRLERALRAQGLRGTPYRSPAGDAPLNVQLSAEARARTMPLGCHDVVPRAMPLFHQAMKEHGKVSITWFGPVPRVTITKPELVREVLSNKFGHFEKLKFGRFQRLLHNGLGSHEGEKWAKHRRIINPAFISRSSRHLPTKSNRRMKQIAAEIEGMLKRIIAKRESALKAGEASSDDDLLGLLLESNLDHSKGNGGAASSGISIDDVIGECKLFYFAGMETTSVLLTWTMVVLSMHPEWQDRAREEVLHVFGSRAPDYDGLSRLRIVTMVLYEVLRLYTPLTALQRKTYKPMELGGVRYPAGVVLTLPLLCVHHDKDVWGADADEFRPERFAEGISKASREAPAFFPFGWGPRICIGQNFALLEAKMGLSMILQRFSFDLSPSYTHAPFPVGLLQPEHGAQVRLTRLN

SEQ ID NO: 202757 - protein, 81 aa, Oryza sativa
  Clone ID: PAT_MRT4530_98006C.1.pep
RTVGRKVREPANSPAIPRAAAVFAVDVGFYVEEDIFNIVYNYITTTYFLSTFIKVINYIFSIDECYIIILHDIIITQNTVH

SEQ ID NO: 202758 - protein, 214 aa, Oryza sativa
  Clone ID: PAT_MRT4530_98007C.1.pep
SFYLLSLSRFSSPIPSSLRAKQSRGGREGAPKPYSLFHQPAGGGAAAWGEAAAGRRPAAVGRRAAERCWSPNRPGKRPIQPPASTHRTTNHRPPRRRGERKEEREMEAAAAAGVQLGTSKPQIATQAEMSEARLPLPYRDQCAHLLIPLNKCRVAEYYLPWKCEPERHAYEKCQYELVMERMIQMQKIREAQEAKSKGAATIGVPLIPSTAKLS

SEQ ID NO: 202759 - protein, 121 aa, Oryza sativa
  Clone ID: PAT_MRT4530_98008C.1.pep
IKPRKSVPPVRLWVKSVFLGFRRSKVRQNENQALLKIQGVNDSKYAPFYFGKRVAYIYKAHTLNNNTKYRAIFGKISRAHGNNGVVIARFRHNLPPRAIGSTVRVFLYPHRFQGNFRLAGQ

SEQ ID NO: 202760 - protein, 825 aa, Oryza sativa
  Clone ID: PAT_MRT4530_98009C.1.pep
MSLAPPAARVHLQEVAVNVNKSLFCFDHDSGATSSGVFAGDDPLKFYFPLFLYHVCTVFALSRAINALLRRANVPLVISQILAGTLLGPSFLGHIAPRVGELFATPEGWVLINTIGGYAFTLHIFVIGVKTDLGMIRKSGNKAIAIAVLGTASPHLAMYITGLALKARVPAAWAASFLLTNLNSWWSLSAFIVVCCTLHDLNLLSSKLGRLAMSAALIGDFANTFAIAGVTSYLLAASPSEKLQRIGIASVIAFTTFIAFMALVARPAILRLIRDVPEGALLTEARLIAVLLICLTCSFTGELLGLHATYGPFMLGLMLPGGAPLGVTMAERLDRLVAGVLMPLLFAQGGMRLNVKKITDASTCALLETFLVVGVVSKFVASIMPCLYFRMPVRDAVVVGLMMNFKGITEVVYASAFEDAQVLDEQVYAAFMINVLLIGAASASAVKYMYHPEEKYVAYRRRTVEHKKLGEELRVVACIHSQDDVGPMLALLDASSPTPMSPLSVYLLHLMPLAGLTSSVLRHFKHGKRNCVPSGTTDSERVVNAFQFFVQQRPPGAASLVPYVCIAPYATMHDDVCAVALEKRAMLIVVPFHKRLAIDGSVEPTSHNAGAIQAANTNILNYSPCSVAILVDRGSLSTVAAAAAAADGFPHRVALYFLGGPDDREALALAATMAEDATIGLTVFRFMLPADRQSRGGEGDGEEDRRDEAELQEFVRRWVDDHRVAYSENMVGGSDEMVDVIRKTSPAFNLLVVGRRSESPESPLTAGISDWSEHLELGVLGDLLTSTDFGCRVSTLVVQQQTMAAAGESCRLPELPAKHKSDEPV

SEQ ID NO: 202761 - protein, 616 aa, Oryza sativa
  Clone ID: PAT_MRT4530_9800C.1.pep
MDLARATAGGGIIPVERRCRLVEDEESLGEEELELAGDNKRTSVFVSAVMAASRPLPRYSRLCLVQARATFYLPIFSDLGQGGWLCHPLQRFASGESTRNLASVNSQAWWLEREGKEVAKGRSEFGEDSNGGKPATIEGSSIAAFHSDNSDGCDPRGVGQRQHSTAQMDNTGNKGYGNDGSDDSRTQANGNEKSINKTSPELIQIVVNQTNMLATAFQLLQNWNNPAGATNVQVPTVQQQCKLSEFLKTEPPTFAIAVDPMEASDWLRTVEKKLGLIQCTDQERVGFATHQLVGPASEWWDSYEASRPEGHTITWNEFSSVFKRSHVPAGMITLRKREFRYLKQGDLTVTEYLHEFYRLAHYAPEDVETDEDKQEKFLQGLKDELAVQLLLEDYEDFEKLVDKAMQLESEHNRMTNCKRRIVNIPVFPCGNQRQRTEPLQITGSSVAHQELLPQEDGHNVDNNISNTNADDATNNHGSCPIHDHLDQACNVNNIHQDIDDSINEGTQNDNPSNFDSEKDSNGDSKYGTTDANVSKDFQPPIPTPSQNDRSQTDNSVKKTLICYNCKEPGHFSRDCPQPKRNLRHHSGHYARRRQVTRLVVTGANAIPVRPRVNHNP

SEQ ID NO: 202762 - protein, 38 aa, Oryza sativa
  Clone ID: PAT_MRT4530_98010C.1.pep
MAHSKVEGPHRWRCFPIPGMKFGPCPALPMGKILPLLR

SEQ ID NO: 202763 - protein, 118 aa, Oryza sativa
  Clone ID: PAT_MRT4530_98011C.1.pep
MKRIAESKLNMKKVNLSCLFVGAIPSYEPSDMFADSLQRRLSQAVQSGEVLLGKFVIKDATEEVRQEEKTAQPIFLLASSNLGDEILVRGPRAPGPPWTERLTRGPHFPWTRSARVTS

SEQ ID NO: 202764 - protein, 127 aa, Oryza sativa
  Clone ID: PAT_MRT4530_98012C.1.pep
MVAKLGKLLGGRMGTMPKNGSSIMAARAVALLGDTFTGKVVIVIPPSTASTLVRGGASGGEFVGIPPPQPPASPRTAAEAPRVAAVHFPVKYSDSAGRPSAATSSSASASASASGSFREVHEARRAE

SEQ ID NO: 202765 - protein, 78 aa, Oryza sativa
  Clone ID: PAT_MRT4530_98013C.1.pep
MGRACSIGALENSDNKVRRGPWRPRPLSSALPQPEQDLASSLRALRKRRPSDPPAKIIFGGGLFFFVGAKSTRLRKHF

SEQ ID NO: 202766 - protein, 126 aa, Oryza sativa
  unsure (1)..(126): unsure at all Xaa locations
  Clone ID: PAT_MRT4530_98014C.1.pep
MKRIVGSEPNVKKVNPSCLFVRAIPSYEPSDMFEDNLQRGNFYEVDAKNMNYAKFWNXKHHLQVPQPSRSQXKGSTRDKSGEEKIPSATGDXAKQSRVEKFCXQVVXKTRRKKSDKKRRPPNLSSC

SEQ ID NO: 202767 - protein, 127 aa, Oryza sativa
  unsure (1)..(127): unsure at all Xaa locations
  Clone ID: PAT_MRT4530_98015C.1.pep
LKVIVGSKLNVTKVNPSCLFVGTIPSYEPSEMFEDSLXRSDLYEVDAKNMDYAKFWNXKHHLQVPQPSRSQXKGSTRDKSGEEKIPSATGDRAKQSRVEKFCXQVCYXKTERKESDKKRRPPNLSSC

SEQ ID NO: 202768 - protein, 126 aa, Oryza sativa
  unsure (1)..(126): unsure at all Xaa locations
  Clone ID: PAT_MRT4530_98016C.1.pep
LKIIMGSKLNVKKVNPSCLFVGAIPSYEPSDMFEDSLQSDNLCEVDAENMNREKFWNGSIIKLPQPSLRQLKGAPWFESGEKKIPPATGDRAKQSRVEKFCXQVCYXKTERKKSDKKRRPPNLSSC

SEQ ID NO: 202769 - protein, 324 aa, Oryza sativa
  Clone ID: PAT_MRT4530_98017C.1.pep
KKKSAQRRHPDRRRRRFIGRNSSEEQEEAAPAPAAKTTDMAITGKLNKEHDTIFLKVQIGGGRNVRNIYFPFDVANDTAMEVATEMVKELDIADREPTEIAAMIEQEIVRLVPGYKQHEYSYADDNDDDDVSGHPNPFYYLSSSPTSSQGSLCGVGSTSSEGFPGPHGKVDWSRDYCYYPPSSVSVSDDDDSGTSSLSAAVSASSLHQQQQHCSASSSRLGPASASASEDGGGGHAGRPRQREGEEERRRRRMSRNRSMVDMRSQLLHRTLVEELNKRLFFNTVGAVHDIGFRDPTAAASSSSSSSHHRRRSSNKIDHKHHYMF

SEQ ID NO: 202770 - protein, 106 aa, Oryza sativa
  Clone ID: PAT_MRT4530_98018C.1.pep
PYGINPAGYTIHRVIHEVRHDVTGVLHTHTAAGVAVSAQQQGVLPITQQSLFVLSSLAYHAYEGVALNHEEKARLQADLGENNFLMLHTHGLLTCGSTIADTFLMM

SEQ ID NO: 202771 - protein, 127 aa, Oryza sativa
  unsure (1)..(127): unsure at all Xaa locations
  Clone ID: PAT_MRT4530_98019C.1.pep
MKRIAESKLNIKKVNLSCLFVGAIPSYETSDMFEDSLQRGNLYEVDSKDMNYAKFWNXKPHLQVPQSSRSQXRGATREKSGEEKTPSATGDXAKQSRVEKFCXGKFVIKXRRKKSDKKRRPPNLSSC

SEQ ID NO: 202772 - protein, 492 aa, Oryza sativa
  Clone ID: PAT_MRT4530_9801C.1.pep
MGQAGYFLCSEITASKLLTVTATRELKPPPPPRPSGRVLSRRARRRRSSVLAWRHRRCFGGLILQTWKKNHTISAVQQRSHLERFAALDEAPPPAPEETVVTGGEMVDYMLGQPPPTTPGPQSQVSFDKLTFSDVLQFADFGPKLALNQPAASDNGGGGGDDGDDDDDSYFLRFQSLPSLPAVPPPRGGAAAAHQVVDEQEGSKQTVDAGGVSESTTLVQQADGGGGRAEKAGEQGKSGRRKRPRTVKTSEEVESQRMTHIAVERNRRRQMNEYLRVLRSLMPGSYVQRGDQASIIGGAIEFIRELEQLIQCLESQKRRRLYGGDAPAPPARPVADGAVLPAPMQQPPPATPPFFPPSIPFPASSGAGDGTGAGVAKVALDLDASGGGEVGGGVREEMAENKSCVADIEVRVVGVDAMIKILSRRRPGQLIKTVAALEEMHMSILHTNITTIDQTVLYSFNVKIAGDARFSAEDIAGAVHQILSFIDVNYTL

SEQ ID NO: 202773 - protein, 587 aa, Oryza sativa
  Clone ID: PAT_MRT4530_98020C.1.pep
MSGARRCGDRRSERSSVVGDNRNGYVETDPTGRYGRLSEVLGKGAMKTVYRGFDELRGVEVAWNQATISDVLRTPDALHRMYAEVSLLADLRHDAIIAFHASWVHPSRRTFNFITELFSSGTLRSYRLRYPRVSRRAVAAWARAILRGLAYLHSRGVIHRDLNVIGTPEFMAPEMYDECYGVGVDVYSFGMCMLEMLTNEYPYSECDNPAQIYKKVTAGKLPDAFYLLTDADARRFIGRCLVDAAHRPSAEELLLDPFLSPPQNHDDHNTIAHATAPPPPLPLACSNSSEEQEEEEAPAAKTTGMAITGKLNKEHDTIFLKVQIGGGGNVRNIYFPFDVANDTAMEVATEMVKELDIADREPTEIAAMIEQEIVRLVPGYKQHEYSYADDDDDDDVNGQPNPFYYLSSSPTSSQGSLCGVGPTSSEGFPGPHGKVDWSRDYCYYPPSSVSVSDDDDSSTSSLSAAVSAISLQQQHCSASSSRLGPASASASEDGGGHAGRPRQREGEEERRRRRMSRNRSMVDMRSQLLHRTLVEELNKRLFFNTVGAVHDIGFRDPTTYGSSSSSSSSQHRRRSSSKVDHKHHYMF

SEQ ID NO: 202774 - protein, 127 aa, Oryza sativa
  unsure (1)..(127): unsure at all Xaa locations
  Clone ID: PAT_MRT4530_98021C.1.pep
MKRIVESKLNIKKVNRSCLFMRAIPSYEPSDMFEDSLXSGNLYEVDSKDMSYKKFWNXKPHLPMPQPSRSQXRGATREKSGEETIPSITGDRAKQSRVEKFCXQVRYXKTRRKKSDKKRRPPNLSSC

SEQ ID NO: 202775 - protein, 162 aa, Oryza sativa
  unsure (1)..(162): unsure at all Xaa locations
  Clone ID: PAT_MRT4530_98022C.1.pep
VWARAILRGLAYLHSRGVIHRDLKCDNIFVNGHLGQVKIGDLGLAAVLRGCTSARSVIGTPEFMAPEMYDECYGVGVDVYSFGMCMLEMLTNEYPYSECDNPAQIYKKVTAGKLPDALYLLTDADAQRFIGRCLVDAVHRPCXEELLLDPLLCPARTTTITI

SEQ ID NO: 202776 - protein, 91 aa, Oryza sativa
  unsure (1)..(91): unsure at all Xaa locations
  Clone ID: PAT_MRT4530_98023C.1.pep
HEVGNFNEVDSKDMNYEKFWNXKPHLQVPQPSRSQXKGSTRDKSGEEKIPPATGDRAKQSRVEKFCXQVCYXKTERKKSDKKRRPPNLSSC

SEQ ID NO: 202777 - protein, 162 aa, Oryza sativa
  Clone ID: PAT_MRT4530_98024C.1.pep
HTHQSYILGTIHTHDYCYYPPSSVSVSDDDDSSTSSLSAAVSAISLQQQHCSASSSRLGPASASASEDGGGHAGRPRQREGEEERRRRRMSRNRSMVDMRSQLLHRTLVEELNKRLFFNTVGAVHDIGFRDPTTYGSSSSSSSSQHRRRSSSKVDHKHHYMF

SEQ ID NO: 202778 - protein, 201 aa, Oryza sativa
  unsure (1)..(201): unsure at all Xaa locations
  Clone ID: PAT_MRT4530_98025C.1.pep
SSVSDNPGLCGAKLNSSCPGVLPKPIVLNPDSSSDPLSQPEPTPNGLRHKKTILSISALVAIGAAVLITVGVVTITVLNLRVRTPGSHSAAELELSDGYLSQSPTTDVNSGKLVMFGGGNPEFRGSTHALLLKDCELGRGGFGTVYKTTLRDGQPVAIKKLXTVSTLVKSXDEFEREVKMLGKLRHRNLVALKGYYWTPSL

SEQ ID NO: 202779 - protein, 91 aa, Oryza sativa
  unsure (1)..(91): unsure at all Xaa locations
  Clone ID: PAT_MRT4530_98026C.1.pep
REMGNFYEVDAKNINYAKFWNXKHHLQVPQPSRSQXKGSTRDKSGEEKIPSATGDRAKQSRVEKFCXQVCYXKTERKKSDKKRRPPNLSSC

SEQ ID NO: 202780 - protein, 127 aa, Oryza sativa
  unsure (1)..(127): unsure at all Xaa locations
  Clone ID: PAT_MRT4530_98027C.1.pep
MKRIVGSKPNEKKVNPSCLFVGAIPSYEPSDMFEDSLXRSDLYEGDSKDMNYAKFWNXKHHLQVPQPRRSQXKGSTREKSGEEEIPSATGDRDKQTRVEKFCXQVRYXKTRRKKSDKKRRPPNLSSC

SEQ ID NO: 202781 - protein, 128 aa, Oryza sativa
  Clone ID: PAT_MRT4530_98028C.1.pep
MQLPERSSERGRATSGSRHPSHHDTSSAAATASGDTSSVATKPRDERGGKLGGRRGRRARRQWDASSAAAAEEARRTTTTGSGAAWHAGERGGMAAAGERGDGLSGGHGGGLAAGLPVREKARGDRGR

SEQ ID NO: 202782 - protein, 90 aa, Oryza sativa
  unsure (1)..(90): unsure at all Xaa locations
  Clone ID: PAT_MRT4530_98029C.1.pep
APSSRAPTLCPGEGRADRVHGKWGPRVSLSVHGGPGARGWRRSAPWVPRVSRTCGRGRLTAGPTCKPXXRARRRTLRHCRTRRRRYLPSL

SEQ ID NO: 202783 - protein, 290 aa, Oryza sativa
  unsure (1)..(290): unsure at all Xaa locations
  Clone ID: PAT_MRT4530_9802C.1.pep
MTSAVTSPTAAAARRSGRLGRRTLAGERRHXDANGGHQHVEDDAANTPVTKTAADEQRTTTATRRKRRKPSGCRRRRCSGDLRRRRRGERGRRRDGDHDDVLPERRRRLERRRRTAGAAATTAKLGHTALELFRRREAKAKVATGRGDSGGPFKGARRRRRRPTATGDGEGNLGLGEKETDPNRTRFHELPKRFSRXFQRRKGRGDPGDCFPSFDSAGEGKERPDLEGKRRRREXRVFGGGGRRRTKNLTGGTHLSATDARARLRTGPAGPRREKRDFGPTFGPKPKEDF

SEQ ID NO: 202784 - protein, 64 aa, Oryza sativa
  Clone ID: PAT_MRT4530_98030C.1.pep
MEGVIRHLPVPITTATVGPSTSLPSIPPQIQNPNPTGSNVDRRCHRHIIDLHDHQFLSNSSPDP

SEQ ID NO: 202785 - protein, 76 aa, Oryza sativa
  Clone ID: PAT_MRT4530_98031C.1.pep
PRAFGRCSRHRFVVHGQHNMLRCAQLVARLSICVNMCVWMAMPSCQHCVHIMHMIHRKSCYAISTRGLCLSLLIAQ

SEQ ID NO: 202786 - protein, 67 aa, Oryza sativa
  Clone ID: PAT_MRT4530_98032C.1.pep
VSQTAFLNACSTTGKAGELTSMNRSLFLRASPKFSCRSILKANPSLVISAIRTLSSFIISKSHELTI

SEQ ID NO: 202787 - protein, 505 aa, Oryza sativa
  Clone ID: PAT_MRT4530_98033C.1.pep
MDFDLNSIPELVSGENEPPVHHLLVDDEDRTWMIPAINLDYTFDFETMYTSGDVGSLQAHNVANDEMQVFEANDEMQVFATNDEMQVFEANDEMQVFEEMSDHADTMHTSVATGATTATANTISSQDSGTDDSEVPYLILTFNSEEEARAHYNRYAKRVGFSIKINTARKSAKDGERDKVMFVCNKCGPEEKTGEAFPTKKRKISRTRQAACKARMTVKRKGARWEVIQFVEEHTHPLVRKFSLKKFLRSHRAIPKEEKDFITMLHGMNLSAGRIMKLMSELYGGARNVPYTRKDISNFKSKLGSEYRCRDIPEPIAHFEEIKKDDPNFFYKIQLDKEDRVQNIFWVDGAARNAYKDFKDCVSFDCTYMTNMYNMPCAPFIGINRHGQSLQLGCGFLRNEKTETFVWLFQAFLETIEDQNEFEAEETIPSMWAYYPMKTKALEVYTRPIFNRFQKELIASTSYKLTRTSENMYLVEPNGGPVRNYGSKAFIVSANVLDRIYNCEC

SEQ ID NO: 202788 - protein, 61 aa, Oryza sativa
  unsure (1)..(61): unsure at all Xaa locations
  Clone ID: PAT_MRT4530_98034C.1.pep
RGXQGLDPRTGKQQLHYFPSAAXQLXPTQLTLGTXFLFFFTIFLLXLSPRSPVXLVPVDLR

SEQ ID NO: 202789 - protein, 65 aa, Oryza sativa
  unsure (1)..(65): unsure at all Xaa locations
  Clone ID: PAT_MRT4530_98035C.1.pep
IIHSATIPSFRLQYVSSQPGPCNNNXGFVQSSGEYMRNIKSMDQSSGGIEHVGHLASGFPFLSQR

SEQ ID NO: 202790 - protein, 697 aa, Oryza sativa
  Clone ID: PAT_MRT4530_98036C.1.pep
MDFDLNSIPELVSGENEPPVHHLLVDDEDRTWMIPAINLDYTFDFETMYTSGDVGSLQAHNVANDEMQVFEANDEMQVFATNDEMQVFEANDEMQVFEEMSDHADTMHTSVATGATTATANTISSQDSGTDDSEVPYLILTFNSEEEARAHYNRYAKRVGFSIKINTARKSAKDGERDKVMFVCNKCGPEEKTGEAFPTKKRKISRTRQAACKARMTVKRKGARWEVIQFVEEHTHPLVRKFSLKKFLRSHRAIPKEEKDFITMLHGMNLSAGRIMKLMSELYGGARNVPYTRKDISNFKSKLGSEYRCRDIPEPIAHFEEIKKDDPNFFYKIQLDKEDRVQNIFWVDGAARNAYKDFKDCVSFDCTYMTNMYNMPCAPFIGINRHGQSLQLGCGFLRNEKTETFVWLFQAFLETIEVQEDSRKITVATDQNEFEAEETIPSMWAYYPMKTKALEVYTRPIFNRFQKELIASTSYKLTRTSENMYLVEPNGGPVRNYGSRAFIVAANVLDRIYNCECCKFERDGILCCHVLKVMTFDFVGQVSDIPEHYILPRWTMVKEPELPPVTSIGEQMQLPPKSLKLIRYTNLCTKFTQIAKDASSNEKAYRMALQCMSSMTDDLAAMKQSRKKQKKAQPAPSDPARGISDIPSASTNPTLQINDPPPIIQKQGRPVSTRRKPGVHAKASKTSVRKGLASTEK

SEQ ID NO: 202791 - protein, 841 aa, Oryza sativa
  unsure (1)..(841): unsure at all Xaa locations
  Clone ID: PAT_MRT4530_98037C.1.pep
MDFDLNSIPELVSGENEPPVHHLLVDDKDKSETYFPINPTDTSMEIPAINLDDTFDFETMYTAGDAGSLQAHNVANDEMQVFEANDEMQIFEGDYEMQVFEEMSDRGDTMHTSVATGATTATANTISSEDSRTDDSEAQSAPSQDIPCSTQVPYLTLTFNSEEEARAHYNRYAKRVGFSIKINTSRKSAKDGERDKVMFVCNKCGPEEKTGEVCPPKKRKRSRTRQAAWKARMTVKRKGARKFSLKKFLRSHRAIPKEEKDFITMLHGVNLSAGRIMQLMSELYGGARNVPYTRKDISNFKSKLGSEYRSXRCRDIPETIAHFEEIKKDDPNFFYKIQLDREDRVQNIFWVDGAARNAYNDFKDCISFDCTYMTNMYNMPCAPFIGINRHGQSIQLGCGFLRNEKTETFVWLFQAFLEAMEGVEPTNIITDQDLAMKAAIALVFPHAKHRNCHWHIMQNAQKKIGHILDHDKALCDAFNDCLDNSWTEQEFDAKWDAMLTTYHLQDNEHFRHLWEMRQCWVPVYFMHCFFPFLQTTARSEGFNAVLKRYVNPQNSIYNFFLQYKKIQEKITVATDQNEFEAEETIPSMWGNYPMETKALEVYTRPIFNRFQKELIASTSYKLTRTSENMYLVEPNGGPVRNYGSRAFIVAANVLDRTYNCECCKFERDGILCCHVLKVMTSDFVGQVSDIPEHYILPRWTMVKEPELPPVTSIGEQMQLPPESLKLIRYTNLCTKFTQIAKDASSNEKAYRMALQRMSSMTDDLAAMKQSRKKQKKAQPAPADPARGISDIPSASTNPTLQINDPPIIQKQGRPVSTRRKPGVHAKASKTSVRKGLASTEK

SEQ ID NO: 202792 - protein, 66 aa, Oryza sativa
  Clone ID: PAT_MRT4530_98038C.1.pep
FITLMFTWRNTRVFANFQNLLWPVSKEQNHFSRSGLMLLWLGLSSVSLNHLFNLPKFCLRVSTPLE

SEQ ID NO: 202793 - protein, 126 aa, Oryza sativa
  Clone ID: PAT_MRT4530_98039C.1.pep
TRFQWHQWRDAHAANKHCHARVDDPPYWRIFFQGGHEHRRCAPTTACTASSAKRTSEMATKISGIAVCSLLTYQKTKEPSTTWHGSLGKAVCTSIGSCCMEGGCPAFTSARDRIFYLDYHEDPSYC

SEQ ID NO: 202794 - protein, 294 aa, Oryza sativa
  Clone ID: PAT_MRT4530_9803C.1.pep
MDRESTWQKMTLECLGYHADGTFGTPTSLPDHALATTAMRAEVVQASKILFLLDFISSCKEDAISNRHKIERSSPPWSPLKPTDHFPRRHRQPDFAGLRARRGQRGCGDGDDRRRGGGGGRSCEQAAEEGRRGRSSVRAPPLAATHKAHEAAAGGGATGRRQRAAGGPGGGGRSDGRCTRRTVLPEDRATTWGAAGRQSRREAGKHVAEEEDGADGERDGECEDAAAVVVHGRRSRASALNGVAGGSVTATGDAVGRRAGRPVRVAEGGVVTELDRPSPFSRQGTRKRGGRRCR

SEQ ID NO: 202795 - protein, 152 aa, Oryza sativa
  Clone ID: PAT_MRT4530_98040C.1.pep
HPGIPGRGRPNTEFQLQSDPNRDGIEWNEVGRVGRSPSRPGRAPSLHRAHGPARPRAAPRARAGESPTLPPALHRLERREEERLRGGDWKRAERSRVPGSSRRPAGGVKGGQARADGERRPGEEKLRGERRRRRAFFFFPSPPRRDEPTCFV

SEQ ID NO: 202796 - protein, 421 aa, Oryza sativa
  Clone ID: PAT_MRT4530_98041C.1.pep
MTTAAPTAALHKGRLLPSATTALQQGAALLGTVLGASLGTVGCGDAGDDGGGDAEDGSRGAAGNGAGGAAGDSGRGDAGDDSGGGAEDGRGGAEEGCQGDTGDDDRADDGDGGRGDAGDGGRADDADGGRGDAGDGGRADDGEGGGPPVGSRLAGAARGRWGQPADGASRWALMRHGGGRRKAAASLGRWRRSRMVDWGGLALPNQQTVDYPSFKLVIVGDGGTGKTTFVKRHLTGEFEKKYEPTIGVEVHPLDFFTNCGKIRFYCWDTAGQEKFGGLRDGYYIHGQCAIIMFDVTSRLTYKNVPTWHRDLCRVCENIPIVLCGNKVDVKNRQVKAKQVTFHRKKNLQYYEVSAKSNYNFEKPFLYLARKLAGDGNLHFVETPALAPPDVTIDLAAQQQHEAELAAAAAQPLPDDDDDLIE

SEQ ID NO: 202797 - protein, 67 aa, Oryza sativa
  Clone ID: PAT_MRT4530_98042C.1.pep
MRQAVAVVVDLGNESGGMALGGQRDGLEVAQPWSFRLASLSRLEAATSVVEVLVIADLDLEELMASH

SEQ ID NO: 202798 - protein, 224 aa, Oryza sativa
  Clone ID: PAT_MRT4530_98043C.1.pep
MAEQEVIRRDDVVAATAAEDERFACSPGSPVSSGSGKRGSGSGSGDEVDDAGCDVGGGGARKKLRLSKDQAAVLEECFKTHHTLTPKQKVALAKSLNLRPRQVEVWFQNRRARTKLKQTEVDCEHLKRWCDQLADDNRRLHKELAELRALKATPTPPAAAPPLTTLTMCLSCKRVANAGVPSPAAAIFPGHPQFLCGFRDHAGAASSSYGGASSGLAKAVRAAR

SEQ ID NO: 202799 - protein, 335 aa, Oryza sativa
  Clone ID: PAT_MRT4530_98044C.1.pep
MEYATRGDRTASCLSFLCNIVVLLGLAAAAASGQLTDDYYDYCCPQVYRIVRSRVAAAMKAEMRMGASLLRLHFHDCFVNGCDASILLDGTNSEKFAAPNNNSVRGYEVIDAIKADLESACPGVVSCADIVALAAKYGVLLSGGPDYDVLLGRRDGLVANQTGANSNLPSPFDSISVITARFKDVGLNATDVVVLSGAHTIGRSRCLLFSNRLANFSATNSVDPTLDSSLASSLQQVCRGGADQLAALDVNSADAFDNHYYQNLLANKGLLASDQGLVSSSGDPAVAATKALVQAYSANGQRFSCDFGNSMVKMGNISPLTGSAGQIRKNCRAVN

SEQ ID NO: 202800 - protein, 391 aa, Oryza sativa
  Clone ID: PAT_MRT4530_98045C.1.pep
MAAAAREAAESPNPRSAPRRAAAAAAKDASSFLSPRFRSAAAQAGWDEESLLHAALVVEDTPVRESRRRRRASTTSSSAGGGGSAGSNTRKRRSWRQPPGSIPPVVFLLDDDEKKPDTTADGKKEVKEEEKKTVVVGEKEACSEKAAATSELPCMDRLREELSCAICLEICFEPSTTPCGHSFCMKCLKHAAAKCGKRCPKCRQLISNSRSCTVNTVLWNTIQLLFPSETEARRTSIASSSETNDDLAQQISQRSNSMAQGGIRSSSSNGIGYITQRSTRSSATNNRSFTTTGSRRSTFVAQEGSSTATGRGFVRASQLVPSARVVSVRSHQSDDAALAYRLQQEEFMTAFESEGERQPPRSSSSTVSAARANLRAMASRAIRLRARGWPV

SEQ ID NO: 202801 - protein, 109 aa, Oryza sativa
  unsure (1)..(109): unsure at all Xaa locations
  Clone ID: PAT_MRT4530_98046C.1.pep
RPPXXGIARXRAHARPPRRPATRRSASAYRRGQEGTTXRHQSDAAPXXTSTVMRRASWRRPNVKXVQRSSPSRTLISQGEASVRRAWSHNWALVSDELTTRRSCMDRQP

SEQ ID NO: 202802 - protein, 47 aa, Oryza sativa
  Clone ID: PAT_MRT4530_98047C.1.pep
MTRVETGALDSWQIFLPKCFIRVQTQGVDNDSVFTTEAFRPERSVLN

SEQ ID NO: 202803 - protein, 561 aa, Oryza sativa
  Clone ID: PAT_MRT4530_98048C.1.pep
MELAMDFALRLRDAANHHLSRYEPLVLLAAPLLALLAARTLHAAAAAVADRGLRTVLLALAMTAIKLLPGVSAYINAEKRKVVDQLQSGGTSTKSTLRTELPTVGLSNQVINDLETLKARDVNWQGKCSGTVYIAGSESEGHFALINKAYSMFSHTNPLHQDVFKSVAQLEAEVVAMTAALLGIKEKSSGGQICGNMTSGGTESILLAVKTSRDYMRTKKGITKPEMIIAESAHSAYDKAAQYFNIKVRRVPVNKEFLADVKGFKRCINGNTIMMVGSAPGFPHGLIDPIEELGELASRYDICLHVDLCLGGFVLPFARKLGYPIPPFDFCVKGVTSISTDVHKYGLAPKGTSIVLYKNHEIRKISWLSLHNYYSLTDMIMLQNCTKMFKQVTEWTGGLYVSPTIAGSRPGGLIAGAWAAMTSLGLNGYMENTGHIMEVSKKIQRGIEDIPGLFVIGKPDMTVVAFGSDSVDIFEVNDIMSSKGWHLNALQRPNSLHICVTLQHTVIYEEFLKDLKDSVDTVKANPGPISGGRAPIYGAAGKMPDRGMVRELLVEFMDASC

SEQ ID NO: 202804 - protein, 106 aa, Oryza sativa
  Clone ID: PAT_MRT4530_98049C.1.pep
MCGRTLGLIEAGGDRHSRSVESNTLVGWPGTFDELRSTGRRLDVALGSFGGYEGSMVICRLRLAARLMGGQSEVGAGCGLEVEQQRWRYPWVNFYFWFEGVDKVLQ

SEQ ID NO: 202805 - protein, 54 aa, Oryza sativa
  unsure (1)..(54): unsure at all Xaa locations
  Clone ID: PAT_MRT4530_9804C.1.pep
NSMXKYCGLFCKSIAGVSVHVIHKKTWPVNXPXLTFLAPTRXWXYFTIQIEGSH

SEQ ID NO: 202806 - protein, 155 aa, Oryza sativa
  unsure (1)..(155): unsure at all Xaa locations
  Clone ID: PAT_MRT4530_98050C.1.pep
MELAMDFALRLRDAANHHLSRYEPLVLLAAPLLALLAARTLHAAAAAVADRGLRTVLLALAMTAIKXALIDFNLLLFSYLLLLLLLLSVHTYTRRLLPGVSAYINAEKRKVVDQLQSGGTSTKXTLRTELPTVGLSNQVINDLETLKARDVNLQG

SEQ ID NO: 202807 - protein, 227 aa, Oryza sativa
  Clone ID: PAT_MRT4530_98051C.1.pep
MSTAALVARLARDVSAARDAARLAAAAASRAARSSAVASSSPCARSAAVVAARRAARSAAAAASRAARAVSRIPSYNLDDYSDYEPTPAPPSPLPSYGPEPADDETDKDFETDLVDSVTDKDFESDEAIWAFYERWCKAYDKERDHAEMAHRFKIFKETAELVHRSNKDAPEEEKLCFGPYCDGFDEQQRAEFLLKFGHFHGIHEFVEQWKIDFPKPRKIDSPNQSP

SEQ ID NO: 202808 - protein, 539 aa, Oryza sativa
  Clone ID: PAT_MRT4530_98052C.1.pep
MDEERTAAWWGRRAWELLSAVRARAPLVHCVTNLVSMDIAANALLAAGASPAMVHSLREVPEFTPRCDAVCVNVGTLSEGWLPSMRAAASAGRPWVLDPVAAAASEFRMEACLSLLALRPAVVRGNASEILALASRSLAASSSSSTTTFKGADSTHDSGDALQDAKALARSTGAVIAVSGAVDYVTDGERVVGVSNGVAMMQKITATGCAATALIAAFLAVVEEPSDAMAAAACALAVFGLAGEIGMESGAKGPASLRMHLIDALYCLDVQTGDQEGGPLAGGGHYLHGSTCSGQTDLLIVDKQRKETCNPASTTTLGLSIPGHKGPNQMLSDEGSVSRHHRLIRGAARHGTDSQLRRRGCGRARWRWRSKRASTGAVSTGGGGTEAADGRGCVLDTPSRHGPPLRAGLVGNGSPRTTPPLHQERRGGRGGEERKRETQRLGRGRGGKGVGNGGGRTTATTAEVPNPAADVAASPDPEGRAADATALTPPSGPTAAASTLRAASAFYLRLHRIWEEGGKPAAGSTLRAATALSHLCHRR

SEQ ID NO: 202809 - protein, 108 aa, Oryza sativa
  Clone ID: PAT_MRT4530_98053C.1.pep
MKLIKLLIGCFVPRGGETEAQMMMRELDEELNELFRDVLPPPRSPWKRAKEAIRRRRNGAKVAPATVDAAVIVLGPAVTRMLVDQGATHLLDELELLNQAIREHYASS

SEQ ID NO: 202810 - protein, 116 aa, Oryza sativa
  unsure (1)..(116): unsure at all Xaa locations
  Clone ID: PAT_MRT4530_98054C.1.pep
MMTSATDRLRAYLLRHQALGCRCVALSGRSVAACXSTERRPPHCGLTAAGFHVAASTWSYTCITPSGHSVARLVVFIVVRASTTSSSALVIVSHSSLLCLLRASPPCLQAATVAVL

SEQ ID NO: 202811 - protein, 171 aa, Oryza sativa
  Clone ID: PAT_MRT4530_98055C.1.pep
MGDDGGGDGGASSAGFSYFAVFHNYPLVAALLGFAVAQSIKFFVTRYKENRWDPKQLIGSGGMPSSHSATVTALAVAIGFQDGFGCALFATAAIFASVVMYDASGIRLHAGKQAEVLNQIVCELPSEHPLSETRPLRELLGHTPTQVVAGALLGSMLATAGQMFLVVSGSV

SEQ ID NO: 202812 - protein, 30 aa, Oryza sativa
  Clone ID: PAT_MRT4530_98056C.1.pep
RNSARGPFLCIEIWVMTLLMYGNNSSCYFR

SEQ ID NO: 202813 - protein, 135 aa, Oryza sativa
  Clone ID: PAT_MRT4530_98057C.1.pep
MRTTTPAPSPPREPRRCRPPSPSHPRRRWSSTAVAAVRPPPPPRPPLRRPPPRLWPPQRLLSHDRDSRRWHRCPPSWGSPSRCTPSRHRRSSDSPPRSPAPPPTCPSAPRSGRPALPPARTARRAAPSSRESAEP

SEQ ID NO: 202814 - protein, 67 aa, Oryza sativa
  Clone ID: PAT_MRT4530_98058C.1.pep
MEMKSFAFLGAPYWAVVDAPAMMVEADRDGGVTPHSPSTMLGTGVAVDMPSAGLSLASERNTQGSSG

SEQ ID NO: 202815 - protein, 104 aa, Oryza sativa
  unsure (1)..(104): unsure at all Xaa locations
  Clone ID: PAT_MRT4530_98059C.1.pep
NVSPGVELSMSLLTLKRHSKWYMVQVLPEVWVYMVFYGTYRISKNAHANHLSHAAXLTSVLWPVAEHVGFFLVGKTAMGVHEDSCSSRPYANRRRVSLISWIYM

SEQ ID NO: 202816 - protein, 88 aa, Oryza sativa
  unsure (1)..(88): unsure at all Xaa locations
  Clone ID: PAT_MRT4530_9805C.1.pep
GFRSDPSRPTKQQPQQQPWPTRDSSPTTAPSWSGSSRCRRRRRRRPPPPRRPPPPRPMPPTPSRLSSPXXPRWRACGRWRSRGARWCP

SEQ ID NO: 202817 - protein, 154 aa, Oryza sativa
  unsure (1)..(154): unsure at all Xaa locations
  Clone ID: PAT_MRT4530_98060C.1.pep
MEFNGGGGSTEGEDAVGAGPHSGADHHATGLLQQDARACRHTDHPRHPGPRCGAHHPGSGHRSASSPTIETLVAGTVVHHLGDPRHGARRAAXRRSSDSPPRSPAPPPTXPVRSALPEKREREREEENSEDEEEEREGRGMKKGVRMTCVPHHF

SEQ ID NO: 202818 - protein, 42 aa, Oryza sativa
  Clone ID: PAT_MRT4530_98061C.1.pep
TLASSPAVECSLSSSAHITHSAIYYGPQLKPDLVASGGRHHT

SEQ ID NO: 202819 - protein, 264 aa, Oryza sativa
  Clone ID: PAT_MRT4530_98062C.1.pep
MACSPHAAVHVAMTLDASYLRGTIAAVLSVLRHASCPGSVHFHFLAVSSEAAVRELRDTVRASFPSLVFRVYPFDESCVAGLIFTSIRGTLDRPLNYDRSYLASTLPSCVCRVVYLDSDVVLTDDIAALTVTPLPGETAVAAPKYCGANFTAYFTPGFWASLALFEAFAGVMIEEWIELQKRVRIYELGSLPPFLLVFAGRIAAVDHRWNQHDLGGDNYCGLHAVAVSLLHWSSKGKPWDRLDAGRPCPLDAIWAKYDRELVID

SEQ ID NO: 202820 - protein, 105 aa, Oryza sativa
  unsure (1)..(105): unsure at all Xaa locations
  Clone ID: PAT_MRT4530_98063C.1.pep
GICCKGKKXGKXXXXPXAXEGXXXXRXQWRXSFXXXXSXXPXGXMKQNILPVXIAKXNGIXFKEXIITVGXQMIXPGGSXQXNTXHRXXKXXXXXXRTRAESCSP

SEQ ID NO: 202821 - protein, 298 aa, Oryza sativa
  unsure (1)..(298): unsure at all Xaa locations
  Clone ID: PAT_MRT4530_98064C.1.pep
MDDMAKLAQMPRAPLLVLLLMLGVGAAVAVPEYREAPHFTNSAAARCPPPLPATDADAACSPHAAVHVAMTLDAPYLRGTMAAVLSVLRHASCPESVHFHFLASSSSSPEAAAAVGAGAEGSTVXGVVPVAGVPAGEAAVAAPEYCGANFTAYFTPGFWASRALSEAAFAGRRACYFNTGVMVLDLPRWRRAGYTAQIEEWMELQRRVRIYELGSLPPFLLVFAGRIAAVDHRWNQHGLGGDNYRGLCRGLHAGAVSLLHWSGKGKPWDRLDAGKPCPLDAVWAKYDLLRPAAAIETS

SEQ ID NO: 202822 - protein, 1156 aa, Oryza sativa
  Clone ID: PAT_MRT4530_98065C.1.pep
MRRAHEQPHGSRWTARARAGVQGSVGPGSALNRSQPRWRRRGAFVAATRASGRRKKGKAEMDGGRRPSSPELDKTTMVKGEHTGLASGTREDEPMARIAPGEVKGGGLRRRRLAACKRGKTGGAARVRFKASGASPLFGELILGVGWDGGASREADERRLPGTGGNGGEAMPGGGGASSTRVQEGYRATTRAKRGRGQARRENGGRHYRAETGAAWGVELRGEGTEHGQSRGARLGQGGGDSGGDNGAGQGKRRKGERKGALPMPFWEKGGGRERELWLRVLEACGMGASGLGDDSGDDCKKASGVRRLHGVGVAGLTRRRLGGSAGTGGDRATTYVIVFDGLPASPSGLLATVVTSFQLLYVLSPIQVIVVQIDESFVGVIKQLPGVLAVIPDVLHKVHTTRSWDFLELERNGAATGAWKDAAKYGVDAIIGNVDTGVWPESASFKDDGYSVPSRWRGKCITGNDTTFKCNNKLIGAGFFNLGFLASGLLQGKPPSQAAELYTPRDYIGHGTHTLSTAGGGFVPDASVFGHGKGTAKGGSPLARVAAYKACYAEGCSSSDILAAMVTAVEDGVNVLSLSVGGPADDYLSDPIAIGAFYAVQKGVIVVCSASNSGPQPGSVTNVAPWILTVGASTMDRDFPAYVTFGGVTSSMTIKGQSLSNSTLPQGQRYAMINAKNANAANVPSENSTLCFPGSLDSDKVRGKIVVCTRGVNARVEKGLVVKQAGGVGMVLCNYAGNGEDVIADPHLIAAAHVSYSQCINLFNYLGSTDNPVGYITASDARLGVKPAPVMAAFSSRGPNPITPQILKPDITAPGVSVIAAYSEAVSPTELSFDDRRVPYNIMSGTSMSCPHVSGIVGLIKTKYPDWTPAMIKSAIMTTAITGDNDSGKIRDETGAAATPFAYGSGHVRSVQALDPGLVYDTTSADYADFLCALRPTQNPLPLPVFGDDGKPRACSQGAQYGRPEDLNYPSIAVPCLSGSATVRRRVKNVGAAPCRYAVSVTEALAGVKVTVYPPELSFESYGEEREFTVRLEVQDAAAAANYVFGSIEWSEESESDPDRKHRVRSPIVAKTTCGAEEDSTRSARPPPHAPRTPRPFARLPVAAAPLRSSAPLRVAAPGWEPARRVRPASGKRCRALPDSGDCNGCSTAALQVDS

SEQ ID NO: 202823 - protein, 114 aa, Oryza sativa
  Clone ID: PAT_MRT4530_98066C.1.pep
ALKKLWICEVQNLKSLDNFACVVELSVDDNPDLQRISNFPKLRKLDIMFCPKMEQVSMRNLFVDCSFELLSSIAMGDTGPEWNKISHIQQVKANSDDGYDETMWYVSYTRPGIL

SEQ ID NO: 202824 - protein, 153 aa, Oryza sativa
  unsure (1)..(153): unsure at all Xaa locations
  Clone ID: PAT_MRT4530_98067C.1.pep
RKQFAGLSLHIVILGVRILETEESIISSQAASLPAGGHATPPPAHLSTLLPNRRRLLPPSPLPAAFPTEQRRRRRXSGGDGGGGHRTTXRQIRRWRRSRAGGGSLLPSRLPPAPDPAAMAVSAGGSVADDEVARSSAPPPPPAGPAEGQGPAR

SEQ ID NO: 202825 - protein, 93 aa, Oryza sativa
  Clone ID: PAT_MRT4530_98068C.1.pep
KTKSHILNLCYSARHNSNDITDPMDSIYLEHNCVFQEKTFMYHFTWSTFPTNTHEAFPHTYCRKHKPFFHVSTCSTYVGMSTLNFHFICPYND

SEQ ID NO: 202826 - protein, 72 aa, Oryza sativa
  Clone ID: PAT_MRT4530_98069C.1.pep
MRAIYMAQNSPMSRVRKGTSPTLTPLKSDLNLIRDPQPHNRYDPPNYSNQCNLNSLAVLDDGFADMALTWRC

SEQ ID NO: 202827 - protein, 195 aa, Oryza sativa
  Clone ID: PAT_MRT4530_9806C.1.pep
RNKETDLDLVRHGLGVGCGKGRGGGPPRLRGRGRGGRGRGVSYLLPPSQGRAEDGEEVLFGAFPWREGRDSRRNRQKSSTQHSPKDPTGSSGEILQDEHRIEEKAEMASSGEKLQKHRPEEIALRTGSSGQTTQKLREKAATENHRPKEIGPSGEKPPHKLLRAKGKAGTSSIGVTLQKHRAEKADSSRGIPHKL

SEQ ID NO: 202828 - protein, 92 aa, Oryza sativa
  unsure (1)..(92): unsure at all Xaa locations
  Clone ID: PAT_MRT4530_98070C.1.pep
GAECAVCLAVLEDSEEARYLPRRGHRLPRREXQTCRLGYHCTCPLXRLTVDAPTAAVTAVPAEPATIYTVXSLPQSVLLSLYKHGARAVTMT

SEQ ID NO: 202829 - protein, 329 aa, Oryza sativa
  Clone ID: PAT_MRT4530_98071C.1.pep
MKQHFDEDLISNRLRVIACYSWRLPPPRRLVEELPGDLSEKIVEEVRCRFADVPDELRENIRQALQVESTVFETKYLGLPTLEGRMKAGKFKTLKQRFAKRLTDWSEKYMSSGAKEILIKSVAQAIPTYVMGVFKLPATIKLPQVRTEDLLAWHYEKTGFFSVHSAYRLALTNHMNISELGSSSSETSGERKIWASIWTTLVPQKIKIFARRLAREGLTTMVNRKKRKLEVNATCRICGYEDEDCFHAAISCTRAVALRSLLREVWEMPKESCLIRSGPDWLLIILDSINPEGRAKFLLLLWRSWFLRNDCVHGYGKASVQGSSIFLQS

SEQ ID NO: 202830 - protein, 50 aa, Oryza sativa
  unsure (1)..(50): unsure at all Xaa locations
  Clone ID: PAT_MRT4530_98072C.1.pep
SSXHXXKVKSFXKDDVSRPCHXTXFXGYKXGXTHIVREVEKXXSKXHKKE

SEQ ID NO: 202831 - protein, 577 aa, Oryza sativa
  Clone ID: PAT_MRT4530_98073C.1.pep
MRRCVILPEHVVENIPHHVRIYHFHAKNMELKWDTHSPSEMRACAVRREVCGDIVEDVSSLCLSQVGYWDEQRLVLDAITYFVPLWTLLSTASTIWRGARGEQVAAGWPAWLSAVVGEAIDGWTPRRADSFEKIDKIGQGTYSNVYKARDTATGKIVALKKVRFDNLEPESVRFMAREILILRRLHHPNVVKLEGLVTSRMSCSLYLVFEYMEHDLAGLAASPDISFTEPQVKCYMHQLLSGLEHCHNNGVLHRDIKGSNLLLDNNGMLKIADFGLASLFDPNKNQPMTSRVVTLWYRPPELLLGSTDYGVGVDLWSAGCILAELLAGRPIMPGRTEVEQLHKIFKLCGSPTEEYWKKSKLPHATIFKPQQPYKRRISETYKDFPQSALRLIETLLAIDPADRLTATSALRSDFFTTEPYACEPSSLPAYPPSKEMDAKRRDEEARRLRAAGGRTNDGAKKTKTRDRPRAVPAPEANAELQINIDKRRLVTHANAKSKSEKFPPPHQDGAVSLVSTNHMDPLYEPQDPSSFSTVFTQEKSSVPTWSGPLADLSAVGKQKWKHKFGRSSKQPSTARAR

SEQ ID NO: 202832 - protein, 76 aa, Oryza sativa
  Clone ID: PAT_MRT4530_98074C.1.pep
HEGLSLVGYIVYMAKLNLLLTSDFITIKKLSLASSCRLLASQSLLVFNEGYDKQNNTTNLNSCLFALSFGGPNLIF

SEQ ID NO: 202833 - protein, 142 aa, Oryza sativa
  unsure (1)..(142): unsure at all Xaa locations
  Clone ID: PAT_MRT4530_98075C.1.pep
WRREEATSSETMATTTMQTRDDDDANPMTMTVRAAITASVGGGGXGRRRPLAGGGASSETPAGDDDGADGESHVGGGRLGGRRRRYERGPHLQIQPTPSNQTENWITKSTFISTTKQKMDRHIQQNMDRHIPSNLGREPNTP

SEQ ID NO: 202834 - protein, 63 aa, Oryza sativa
  Clone ID: PAT_MRT4530_98076C.1.pep
MAEQGSNGAGCLVEVNRKTGPPPQVANGRSISKAEKALPCGLDSSFGNHFYWPPSSYWALLLV

SEQ ID NO: 202835 - protein, 277 aa, Oryza sativa
  Clone ID: PAT_MRT4530_98077C.1.pep
MAEEKGKGKEEGEGSAMASKAAGILVVPGAVGVGNALLEAFAKVAVEKKDEVATVSELVRKLVSEGVAEEVAVTEALEHPVFDSPEKVVPEVAEEEESGGRMITLKSLDGKTVKVKEASARLSETIGNLIDDGRRRGDETIPRLFVSYKALMKVIEYCDEHANNKADTDERKEELKNWDKAFIDKLDEDNILFVEVLAASNYLKITGLSKLTDQRFVDPFNTSNKTPDAEETRVNLIPANTSATASTSRPSTSTSSPSTSTSASHSATRRGRGRRRH

SEQ ID NO: 202836 - protein, 70 aa, Oryza sativa
  Clone ID: PAT_MRT4530_98078C.1.pep
GKKPLILLSFQLVQTNTTPYSFLDQKRRIKNSFFLSLPLIAMLRAKTYCLLYHGTKGVFASRCSRLSYGQ

SEQ ID NO: 202837 - protein, 443 aa, Oryza sativa
  unsure (1)..(443): unsure at all Xaa locations
  Clone ID: PAT_MRT4530_98079C.1.pep
MNGAGGNHQQQQQQQQRLRQQQQQQALLMQQALQQQQQYQSGVLAAAAAAAMTQMEPISNGNLPPGFDPSTCRSVYVGNVHPNVTESLLIEVFQSSGLVERCKLIRKEKSSFGFVDYYDRRSAALAIMTLHGRHICGQAIKVNWAYASTQREDTSGHFIFLXAEVNDATLYACFSAYPSCSDARVMWDNKTGRSRGYGFVSFRNQQEAETAITEMTGKWLGSRQIRCNWATKNNAEEKQETDNHNAVVLTNGSSSNPGMEASQDTGSKENPENNPDCTTVYVGNLGHEVNRDELHRHFYNLGVGAIEEVRVQQDKGFGFVRYSNHGEAALAIQMANGLVVRGKPIKCSWGNKPTPPGTSSKPLPPPLPSYQPVPMAGVPQGFSAADIVAYQRQLTLSQVAAGQIAGQHGLAGQVSAGLLAAGSQALYDGYPNQSSAQQLMYYN

SEQ ID NO: 202838 - protein, 60 aa, Oryza sativa
  Clone ID: PAT_MRT4530_9807C.1.pep
THTKQDLHETNPVYIMLEATWFSSRYPRHGIQTWLTQRHSHSGGLSHTYSGMGHNTGRTF

SEQ ID NO: 202839 - protein, 48 aa, Oryza sativa
  Clone ID: PAT_MRT4530_98080C.1.pep
MERGDEKATATSGLCGVSGGGGVNSNCYRHGPYRHRELNGKRGIVTVG

SEQ ID NO: 202840 - protein, 488 aa, Oryza sativa
  Clone ID: PAT_MRT4530_98081C.1.pep
MVSDASKKKAAQKKAAAAAKRGDKAKAAITLSERTCTAVLTSHPLSRDIHIESLSLTFHGHDLLLDTDLELNYGRRYGLLGLNGCGKSCLLKAIGCRELPIPPHMDIYHLTHEIEASDMSALQAVISCDEQRLQLEKEAEILAAQDDGGGEALDRVYERLEAIDASTAEKRAAEILFGLGFNKHMQAKKTCDFSGGWRMRIALARALFMNPTILLLDEPTNHLDLEACVWLEETLKKFDRILVVISHSQDFLNGVCTNIIHMQNRKLKLYTGNYDQYVQTRAELEENQMKQYRWEQDQIASMKEYIARFGHGSAKLARQAQSKEKTLAKMERGGLTEKVVRDKVLTFRFTDVGTLPPPVLQFVEVTFGYTPDNLIYKNLDFGVDLDSRVALVGPNGAGKSTLLKLMTGDLIPLDGMVRRHNHLRIAQFHQHLAEKLDLDMSALQYMMKEYPGNEEERMRAAIGKFGLSGKAQVMPMRNLSDGQRSRVI

SEQ ID NO: 202841 - protein, 178 aa, Oryza sativa
  Clone ID: PAT_MRT4530_98082C.1.pep
MAASSSFVLAAAALLLQAVTAAAEAAGQQKEMRMRVYWHDVVTGPNSTVAKVAEAPTSRASATVFGTVYVIDDPLTDGPSLTAPSRLVGHAQGMYVSAGKETMSLLMAMSFVFAADEPYNGSSVAIFGPNPARPVSEIPVVGGTGAFRFARGYCRATTYWYNAAGDATVPYDIHIRHD

SEQ ID NO: 202842 - protein, 128 aa, Oryza sativa
  unsure (1)..(128): unsure at all Xaa locations
  Clone ID: PAT_MRT4530_98083C.1.pep
FFFFFFQFKHYIDCIMFKWHLIPGLMSIAKKSANAGGQVNLINQNKEQPYQLSTXGDGDLXPIIHIFTNEKKNHGTSSICNIPPKCTISAFLGACSTDXRSQNNKQGCQGNPGVKXQMSLMIQFQAST

SEQ ID NO: 202843 - protein, 141 aa, Oryza sativa
  Clone ID: PAT_MRT4530_98084C.1.pep
TRKRPKELGIRKLDVVTDNEANYNVMIGKRDLSKSSSPETSMAFIQAAKEYDICKCRREPREMISHVNDLAKEAHTKSTDMLDLREIIERKSPQFWGMPFVRIKQDDSSIKAKLGDSKVSDTPFEATNYYMEVWSKAQKND

SEQ ID NO: 202844 - protein, 548 aa, Oryza sativa
  Clone ID: PAT_MRT4530_98085C.1.pep
MAASRARQLHALYLTRGCRDPDMWANLAKVYASNSFLREAAIIYSKLLPHRTHHLPLVIVLLKATASRADPVLGRALHAEAVKSANAHDRLVGTTLVSVYCKCGLLADARRVFDGMLDRNAVTCNAMLAGYAAAGDMVSAEALFAGMGSRTPVTWATLIRGFAGKGDMAETRRWFEAMPLGMQNVVTWTVAVQAYVAAGDMETARELFNKMPARNAFVWSSMVTGNFKAGNADEAQAVFDKIPVRNLVNWNALIAGYAKMGCCEKALEAFHSMLKDKIKPDEFTMAGVLSACAQLGSLEQARKVHNFIIQHRIRKNQFVMNGLVDMFAKCGDLAFARNIFDNMQWRNTECWNSMISALSSHGQSIEAIRLFSKMECSDQKPNAITLLAVLGACTHGGFVDEGLRIFSKFDVYGVAAAVEHSGCLVDLLARAGRLREAYEIVKNMLVQPNEVIWGSLLGACRVHGDAEMSELVSSEIHQLHSRRVSTNDAEYILLSNIMASSERWEQAERMRRKMALHGVGKTPGCSSVELEVPEHQVRAGSGTLSQPP

SEQ ID NO: 202845 - protein, 401 aa, Oryza sativa
  unsure (1)..(401): unsure at all Xaa locations
  Clone ID: PAT_MRT4530_98086C.1.pep
MLPSYLRSPYLMGVTTRLPAPPGGGLQRRAPRGILPASLPVERPARRRLAPGVRAASGIPGPGGSPVPRRTTPAPADAAAAAPPSAAASSASSAIDFLTLCHRLKTTKRKGWINHSIKGPESIADHMYRMALMALIAGDLPAVDRERCIKIAIVHDIAEAIVGDITPSDGIPKAEKSRREQKALNEMCEVLGGGPIADEIKELWEEYENNSSIEANLVKDFDKRGVMQTRVQSIGKGKIFGGGQDRRMKRKDSVEPLLATPAKHKDARSTACVAVEPEPRSRCWHSSTRMRGPRRLAACVIVVTPESRGTTAGHSSHPSASSSSNRCRCCSLVLGGWEEMLGEDGGRXVEMILQALEYEKEHGKVLDEFFLSTAGKFQTEIGKSWAAEVNARREQRCGKQK

SEQ ID NO: 202846 - protein, 217 aa, Oryza sativa
  Clone ID: PAT_MRT4530_98087C.1.pep
CAVGGGSGDDASRGRARGGRNEAVEAVHPSFVELREPDVVDGERDPLGAGEVEVEGEAPGSRGVGAVASSEQGNPGSSPGRCAPVGRQPPRPASSSSCSWPQQVHRVAEPYSRICEGAVESRTPDLAAWRSRSASGLPPPPPLPPQRWRAATVAAEQWCRGGEAGGGGRQLLIPPASADGGTWELGVDARWPGYEREGRERERQKESPGRRADSCSP

SEQ ID NO: 202847 - protein, 81 aa, Oryza sativa
  unsure (1)..(81): unsure at all Xaa locations
  Clone ID: PAT_MRT4530_98088C.1.pep
IKKNQIWQKLALGGQKFPNQDINIFXAKGQKLKIQQFGDFNFXRKLGQGQTLLGFNGPSKYGISPREYGGPRTNTPPGGVL

SEQ ID NO: 202848 - protein, 321 aa, Oryza sativa
  Clone ID: PAT_MRT4530_98089C.1.pep
MAAAAARQTVCVTGAGGFMASSHVELLLSRGNYAVRGTVRDPGDAKNDHLRALQGAEERLQLLKADLLDYDSVASAVAGCEGVFHVASPVPSGRSTNPEVEVIAPAVTGTLNVLKACHEAKVKRVVMVSSIAAVFSNPNWPKDKAFTEDSWSDEELCRKNQDWYYLSKTVAEREAFAYAAKTGLDIVTICPSLVIGPLMQSTVNASSKVLINYFKGDRDTVENRLRNVVDVRDVANALLLAYENPASGRYICSSAPIRVSDMINILKTLYPTYTYPKNFVDVEENTIYSFEKLQKLGWSFRPIEETLRDSVESYKAFGILD

SEQ ID NO: 202849 - protein, 63 aa, Oryza sativa
  Clone ID: PAT_MRT4530_9808C.1.pep
FFFFCLEILFLYNTVVVSLFCFFLYCIYIYREGCPLSTACVSSYLQPEPIFTSPLLHQQILQG

SEQ ID NO: 202850 - protein, 455 aa, Oryza sativa
  Clone ID: PAT_MRT4530_98090C.1.pep
MGAYHYQPVVYHHPHNQKPSGKNPGYFVSKHACAWLGCGFLSLALLHLLCCAPAATRQAAFSPLRQYINNTYSFVSTVPGGGKSCNYSEGSWVWAPGHGRRYNATGCNVKESHDCIRNGRPDTGYLDWRWQPAAAGCTLPAFDAGSFLAAVRGKHVAFIGDSMARNQAQSLICLLTAAAADLPHRLVYRGTGAYPDKYNYWRYAFPSHGVTVSFYWTPFLVRAEGKSVDDGLRHNYVHIDEPHGRWAADAGTIDVAVLAAGHWFLNGAVYYNGSGEVVGVHNAPPEFANHTLVGYAWPLRAAFRSAIERLLTSGRPRPRTLVLATFSPSHFEGKPAENPTSWVCTKTEPYREGEKEMAWVVKDTRGIVYDVVDAARARYGDVGSGGGAVRIEVLDVTKLASMRPDGHPGVYMNRDPFANGGVDEQKLVSDCLHFCLPGPVDTFNEILVQLLKRGR

SEQ ID NO: 202851 - protein, 118 aa, Oryza sativa
  unsure (1)..(118): unsure at all Xaa locations
  Clone ID: PAT_MRT4530_98091C.1.pep
LARSPPXXQPSPSPAMAXPPPPPPPPPSSSAVSPPPPPXRLRPRAAAPTPPPAXSPRFPPTPXASPSSSPRQALFRPRRGQPRGGGGGGGVGGGDRSEGGGGGVCERGNRGVPLPASG

SEQ ID NO: 202852 - protein, 782 aa, Oryza sativa
  Clone ID: PAT_MRT4530_98092C.1.pep
MFSPPLSLSLFVLLSLTTPPHDRTSKRRVRRRRRRRFLPPTQVVMIKTSEAERRFPACLGNRKMDAVDKLVVRFHFNGEFLFDGKNTCYVNGREALSYVDRKKVSLNEIRDQAKEHCEVAEKALFHWCFPGKSIDDGLRVLHDDKTCLLMAKYTTQGVVADVYVELVDIEEIDTEANKDEVGSDFEDEMKEISDNDDLDDNTVELIGGNEVIMINSSPTHVNKNDMCGGKRKVFKTSSVGTKSNGDSSSDSEYLPGDSSSSGDDEEADEIEKTFKEFKRKFKAGHVSELDEITWAGGAEPSRGIVPYVLEEGHETPYYDSSDDEASFDEQGSSGELEENKLVTSRRIAEKYENLIKANPQWSLNHIQTTISEEMFANVSISKIKRAKALVMKKMFDDKKGEYSLVFNYQEELLRSNPGSTVMVKLDLDEVEPVFQRFYVCFDACKRGFLAGCRKVVGLDGCFFKGATNGELLCAIGRDANNQMYPIAWAVVEKENNDSWDWFCSLLFRDLKVGSGEGWVFISDQQKGILNAVHHWAPLVEHRNCARHIYANWKKKFRNKEWQKKFGVDNNMCESFNKWIVQARYLPIISMLEAIRCKVMVRIQENRDKAAKWNTLICPNIYKRLKSYITESAFCHPIYNGDDSFELAVPGSQQSSTSCHKRKANASARAISTEKAKRTCTGLGLQSRKSSQDTVNLDIGKRRVIRTSATARVATILGGTATMNLHAHGRSAHASSNVTITVTSGTASAHVQTHEPAPRSNSPQRKRRLPQLLLSPPRSDGNE

SEQ ID NO: 202853 - protein, 257 aa, Oryza sativa
  Clone ID: PAT_MRT4530_98093C.1.pep
AEWRSGGDAGVRHDTAKPSVAVARSGGGGSNGGDRLEGVDGRRSSGARCGSVSEAETGKGVGARVWHGTAMQMVVAAWRDGVWSGSGVRLEARRRAAELGLARGEREKARWAQESWGNERGECGEEFYGRGRATVGWGDADSGRQPPAVWGGDVGAWRGKPVPFSWWKIGEMVEEVVGVQFHHLGVSGRGGVVLPLDNNGVDSDSDSGLAPELVSIVGDTVVASTALDSAVAASIYDTLLVILTVTDKIRKRTDIPM

SEQ ID NO: 202854 - protein, 80 aa, Oryza sativa
  Clone ID: PAT_MRT4530_98094C.1.pep
PRALDQTILASKTLFGLCFFWKLNLFKKLVFVPCAPPKSIKLLKGAKGSQSFGSQKKKRGKTQKKFKKNQKKKKKKKKNY

SEQ ID NO: 202855 - protein, 225 aa, Oryza sativa
  Clone ID: PAT_MRT4530_98095C.1.pep
MGNAAPRVRRRDEPAAKSWSKGAEAAGELLPVAKAAGGEEKAAAERAVVTVKVVMTRKEAERLAARLREQRARGRNARMAELKNALRAGDGALCGAAAARPGPRGRAQSLAPIQESCRGFGVLGSLEWHPFWRGKRRTAGDNESDGDECTWCFAHLKTAVKTLASGVLISLPLKPPLSRASQLPTCSKFIGKNIIKMHLTVDDVFLRVSVTELAGWKCAREATTF

SEQ ID NO: 202856 - protein, 78 aa, Oryza sativa
  Clone ID: PAT_MRT4530_98096C.1.pep
TGQRNNQLPIQINRAEEQSNCLTDEAVRHHLHESSNQILLDHMLSTTPLLIIYIYYCSNKKKNSSKENEIFSFFFFGM

SEQ ID NO: 202857 - protein, 195 aa, Oryza sativa
  Clone ID: PAT_MRT4530_98097C.1.pep
MGGGGRRPTSGLIPPRGGGEPRGAWGGLLPLVSAREWPPPYLGPDPPRGSTTWHWRAASSIQSLGRSGRRPTSGLTPLGGGPRGIGGQPPPTSLWGRSGRHPTSGLTPLGGGLRGIGGQPPPSKPDTPGPYHRHEAERRNQPTGPKPAATEELAQGAPCVDAERRNQLTGPKPAATEELAQGAPGIDGTQSSTQG

SEQ ID NO: 202858 - protein, 194 aa, Oryza sativa
  Clone ID: PAT_MRT4530_98098C.1.pep
MLEERKLFVAGLPQQTREGDLRGHFARYGEVVHTRVVLDMASGNSRGFGFVEFADEAATLRALADDEMPNHVFRGRKGGGYSFPETGWRRLSPDATWPSPEGESQARGRVAATPSQRLYGGGCPPMPRGPPPRGVRPEVGWRPLLPQRLVGGGCPPMPRGPPPKGVRPEVGPRPLLPRDWMEKTTLQCHVSGPR

SEQ ID NO: 202859 - protein, 91 aa, Oryza sativa
  unsure (1)..(91): unsure at all Xaa locations
  Clone ID: PAT_MRT4530_98099C.1.pep
SRPRSGRRPTXGPDPSGEGHVILESSLLHPVSGKEWSPPYLEPDSPRGRATWHRGQPPPTSLWGRRWPPPYLGADSPRGRATWHRGAASSL

SEQ ID NO: 202860 - protein, 703 aa, Oryza sativa
  unsure (1)..(703): unsure at all Xaa locations
  Clone ID: PAT_MRT4530_9809C.1.pep
MAKDEPLMSAASYFWSNAMNGFLFKQGPMTPTLLDITMITGLDITSSVNPVGLNTKNKFDFKTRSIGGWSGFVSSNMGNGAVTPREHTAFLLMWLEKYLFCGPSCGPTVNWQHIAESLVEKKGFPLGKYLLGYLYQTLNSTSARIASGSAIDIGGPWWLLQIWLNLHTMKVVDRPALTEADFPRFEPITDEDREEITTCRCMSFGEAASTNAGSKLSADPFRDWFASFYNGFPRDSIVWFAYADSDSFELPSDFRFDDINSEKFDKSREVFTTAISPCILSVGIHQGRNIQVSYEFYHPMSAARQLGLGQLPIGLYFADKIQHRGEITLALMMDRLLSIQGPPLGSIDNIELALLRSTTFDRWWVEWKKHLFHQSVSMYLTNIFPDVIPQXLLPNGGGLAPPVIGFHAXPKTTSLLQGQMREPIPMDTGKKKRTKPSVVDPSATKKKKTNKQKTLATDDLPTVDPDVDKFLDDEAMEEDIDAAAAEVSDTREQTPPADTPAPQRIPPAPPQLARHPRPPHSPTPVQPESSEHTPSAVGSHHVEDAAAPTPAVPVLADMFSFDIRQFWDEEEEDTSSKALAPLADDVKRTLMEISNRLENSLDVLVVDCGSIRAWFHEIQNMIPEDLATTLTPAFYLEQHQFKLEKARQRIANRRERKDIEATIQVNRQSVNEEKANLDQLSFGPCRDPNYDPSVCNVLVPDQR

SEQ ID NO: 202861 - protein, 87 aa, Oryza sativa
  Clone ID: PAT_MRT4530_980C.1.pep
AWNKKGRRTISAIQKKKEASSLSLFGVQTGSSGVMQASEVGGTIVEDRVEAGVGDVMQGCGELGGRTVVNVESGLTGVRQEVEGSGI

SEQ ID NO: 202862 - protein, 79 aa, Oryza sativa
  Clone ID: PAT_MRT4530_98100C.1.pep
MPCFESCCYCYTSLLLLIVQPECSEDSKIKRRETDVLMHNYHVKSFIGYYKKKKKKKKKKKKKKKKKKKKKKKPKKKKK

SEQ ID NO: 202863 - protein, 103 aa, Oryza sativa
  Clone ID: PAT_MRT4530_98101C.1.pep
MRVYGAMESAAARTTTTSASVFVFLCLLFAVAALQCAATVDAARQLRPAADDGGRRAAPALVQSQDAAAYATLRERSPARSTTTVMAWTAQLPAGPSQKGPGH

SEQ ID NO: 202864 - protein, 147 aa, Oryza sativa
  Clone ID: PAT_MRT4530_98102C.1.pep
TQKFSSMFLLITTSNYIQHHMLLFLQLGEVDLSINLAGLLLLAHLTKTYSAHSFLCFLLASGQLCEYQNIHQSRAVSTDLNRETAAWILTCTGSEKPLRRRTPATGVFPCCRPWPRRRRCCRCNPEATWTRTAEGSCCRIQEESCRS

SEQ ID NO: 202865 - protein, 50 aa, Oryza sativa
  Clone ID: PAT_MRT4530_98103C.1.pep
MEAAGGKENPAAPPHLAAGFGRAVACRGPIIRHPVARSHPIARSHPVARR

SEQ ID NO: 202866 - protein, 102 aa, Oryza sativa
  Clone ID: PAT_MRT4530_98104C.1.pep
MASARELLAATISIVMSLTGPIEEVKKQMLVLTKVKLIEGGRRSGDGQAAGPCSSGVAMGGGRQSGAGLWAERRRAKLILGQLAGSWGGAHPKRTFRSLFVE

SEQ ID NO: 202867 - protein, 116 aa, Oryza sativa
  Clone ID: PAT_MRT4530_98105C.1.pep
MADYFPAPGRNHLFVPGPTNIPDKVIQAMTRNNEDHRSPAFPALSKTCLEDVKQLFGTKKGHAFIFPSTGTGGWESALTNTLSPGDKIISFRVGQFSLLWIDQMPRLNFDVDVGDT

SEQ ID NO: 202868 - protein, 56 aa, Oryza sativa
  Clone ID: PAT_MRT4530_98106C.1.pep
DRGIEAHIGGWRPTIHASSTRYLLFFLPSFTDGRTPCCSLLLSIRFLDLMHIFISP

SEQ ID NO: 202869 - protein, 83 aa, Oryza sativa
  Clone ID: PAT_MRT4530_98107C.1.pep
IKQTKKIEKTLNQTLARHRSAASTPHAVAGGGSIAPATPRRRRRRIRQRRHRIRHPHRSASSSAADPSPPSPSVVAGGGSIGP

SEQ ID NO: 202870 - protein, 64 aa, Oryza sativa
  Clone ID: PAT_MRT4530_98108C.1.pep
CLHSAPSEPSIPSTDGSDQTNLDQPKIRTSQKLIFLRLHRMSLGYDALLGSSTLIHTSNCFSLR

SEQ ID NO: 202871 - protein, 235 aa, Oryza sativa
  Clone ID: PAT_MRT4530_98109C.1.pep
MRRSGGGLGFGLGFFRFYFFLFAQFIFACGRYKQPHAKIGFSHAVAPAACKKGDFYRRFRPCGWHNRMERWFSAVWKNHICSSVACLALVLLLPPPAQAATVVTHLPGFDGPLPFYLETGYVGVEEETGTELFYYFVESERSPHSDVVLLWLSGGPRCSVFSGFVYEIGPVMFVAERYSGGTVPRLEYNPYSWTKLASILFVDSPVGSGFSYAHDPKGYDVGDISSSMQIMKCLR

SEQ ID NO: 202872 - protein, 1715 aa, Oryza sativa
  Clone ID: PAT_MRT4530_9810C.1.pep
MGVEWSVVDAAIGWLVQSVLGTLLAGKLEAWTREVGLAGDVRRLEVGMRSVEMVLAAAAARGRELVGNEPLSRSLDDLRQLLFDAEDVVDELDYYRLQLEIEQREDAAAAVDSCVEGGNASSFSSTSSSTCRLVWNAATKLTSWASMAVDFVMAHAGSKRKRGQYELAQDDATVVVVPFENKDDISRRINEIATSLCTISDSVHKAIHLEASYCIAVPKEGVVSNRRLTTSVPVEQKVYGRDSDRDMIVELLVNGKSRDLNVLPIVGNGGVGKTTLAKFVYRDRRIKDHFDLQMWVCVSSIFDEVRLTREMLEHACRDRQDCEKISSFNVLQEMLMGSVRNRRFLLILDDVWEDKDKNGWNRLLGPLRQNQTVGCMILATTRSPSVAKKIRTLTSVELKGLDDDNFWLFFKQCAFGDENHGDHPSLQVIGQQIVKTLKGYPLAAQSVGALLGQNLNYEHWWKIRDQWASLQKGDDDILPILKLSYDYLPSCLQRCFSYCSLFPQEHKFDGEKLIFAWISQSFVSCKDTKNRVEQTGREYLDKLVDLGFFQKDGPHYVMHGLMHELAQAVSSNDCATIDGLKSNSIPSTIRHLSIITSAYDEVEHDSFPTDKFERQLEKITCLKKLRTLMFFGHGPYGSRNLLKCLLTLCKHAKGLRYLRVHFAFMLIDALWNSIKPFHLRYIEFFNGSITFEKSCWWETEDGPRIYNVDPQGSSSNLVPRRINNLVNLRHLIADKERHSEIANVGRLTSLQELRKFRVENVDGFEIGQLQQMNELVSLGIFQLGNVKTKEEARRARLIDKDYLENLCLVWDDSTTNLKPAMATAEEVLEGLHPNRNVKRIKIRGYNGAICPMWLGSNVSVPLLRSLHLKNCSEWRAIQLEEISSLGKLNLIRMWSLVDVSIPSLDELVLIDLPNLEKCIGTYNRELTSNMRILRMERCDKLKDFTLFLNYDHFRVERKTWQWTILPFEEMHSLKDLKLIAMPGVREVSVPYLKKLVIRNMPNLECCTCANLDLLSSCLEVLKITKCRKLTSFQVLQVLPPHCEEKTWLPNMNKLKVHSCPHFIVSCPFPPSAELSKVSVSIRGVLAPPAIEMRKHWPLFTIKSYEWSVLNDDTVAFNNLTSILNFRIINCPNLVSVSFEALSQLMSLQSLEIVDCPRLLWPQMMLEEACEGKTKFPSITHLSIVSSSMLGDPLLLPCTQSEQLTVNDKPSTFSCPVEEQSNHLSLLYISSTTTTATTESIRNGPILFHMPHLLYTYVKKLHISDCPNLVFCSRKVGFAGFTSLEELTVTRCPKLLMPMVHEGVSDDHIGGRFLLPPLLNQFETDHLSEKLQLYFPENHTSLRRLSVWDSPSLICLQLHSCTKLEELEIFNCKNLCTLGGLTFLSSLKIMKLARNPKLSTSWEFDSQDQQCTGDQAGDLSILSGLEWLETDDFSVLTMSFFKHLNSLQHLTLSSSRSYWRVVRLSEGQGRVLQQLTHLQELRFLCCDDLLVLPEQLHCLSSLKKLEIGYCPGILRLPEEGLPLLSLEELETRGCTEELNRQCRLAATEKLKVLIDGKPRLSVIACAIALNRCWTADRLSIRGLLHPSMCVLCDQHEESIDHILVACPESRQLWWLLLSAISRPECLPVNEISFHSWLCDKRETFPSSQRRGFDTIATLAAWTIWKEWNNRVFNQKQRSWTEVARAMAEEAALWRLTNTAMPAMPLGRLGRNIVSRE

SEQ ID NO: 202873 - protein, 1474 aa, Oryza sativa
  Clone ID: PAT_MRT4530_98110C.1.pep
MSECATTARMKRKEYMQLKRGMKRARTDGNEEKGRADPTYISNMELKNTLSWNMTWPKCMCRLCQGPNGIYKNIKNVVEPKYCNIQLMQLKEPSVINSAIIYSQLKKARRAKELAKIARMKRKEQNTLKRSRKGTRTNKNVITKEIISSDSKIWNFGGPTCMCQHCHALMWHAERSLHSTVKQPSFGLCCKQGKVALPPLKEQPPYLTSLLTRDGGRSTNYQQNIRSYNSMFAFTSMGGTVDRKINNGHGPYIFRLNGQNHHHIGTLLPEGSNKPRFQQLYVYDTENEIENRIEASKSGASNAPLDQKTIASLLKMLDENNTLAQTFRMARDRFKEDDYHNYTLRLLDNRDQDGRQDNMPSASEVALLIVKDPTKKSYGRDIVLEYKDMRPKRISETHPKLMAMQYPLLFPYGEDGYRPGIKYSGKEGVRNDKKCVTMLEYYAYRLQQRQDQSMLPLMCGNLSMQYMVDAHACIEQIRLNWIRQNQGVLRTELYGGLQDALRRGDTRTEQVGRRIVLPASFTGGPRNKEQNYQDAMAICRWAGHPDLFVTFTCNPKWPEIQCMLDKVGYQKPSERPDILVRVFMIKLKELMSDIKRNQHFGKTKAIVFTIEFQKRGLPHAHILIFLDKRGKSLEPSQIDELICAEIPDRDKDPETFEAVKNFMMHGPCGEANPKSPCMVDHKCNRFFPRGFSDETIIDEVNFPIYRRRDDGRQIKKGRVNLNNGFVVPYNKDLLAKFQVHMNVEWFNRSRSIKYLFKSICNEDDQATAVVEETDEKNNDEIKRYLGCKYTTATEACWRIFKFPLHYQEPPVERLSFHEENEQHVIFPDSTDLQEIVRRPRSGVTMFTEWMETNKRHEDARELTYSEFPTKWTWDKNVKKWVRRKGGMKIGRIYNAHPASGERYYLRVILNTAKGCTTFEDIRTVNGTVHSSYKSACHALGFLNDDSEWIECIKEASCWASGMKLRQLFATVLCHCEMNYDKEKLKHEHLQILNTLNIEQKKAFDAIIESAHQSLGKLIFVDGYGGTGKTYLWKAITTRLRSEGKIVLAVASSGVAALLLQGGRTAHSAFNIPINLTDEYTCFIKQGSHIADLLMKTSLILWDEAPMANRNCFEALDKSLRDVQRCRNENSCQKPFGGMTVVLGGDFRQILPIVPKGRREHTVNATIKCSYLWQHFEVFNLTKNMRLNYVSKDQTEHQKSAEFAEWILQIGNGDTISLDEKGWVRMPSDLLLQKGDDPKAQIIESTYPDLQDNCCKQNYLEERAILCPVNENVNELNEYIMDQIQGDKVTYLSRDSVSKSVSYSHEMEMLYPTEFLNSLNHSGIPNHQLKLKVGLPVMLLRNINQSAGLCNGTRMTITRLGNKVIEAQIITGTHSGDMVCIPQIIMSPTEPKWPFMLNRKQFPLSVCFAMTINKSQGQTLNKVGLYLPRQVFTHGQLYVAVSRVTSRDGLKILIADEECPGEGMVKNIVYKEILQ

SEQ ID NO: 202874 - protein, 164 aa, Oryza sativa
  Clone ID: PAT_MRT4530_98111C.1.pep
MGRRAGSYPYYVEAAPPVDVNKNTEWFMYPGVWTTYILLLFFAWLLVLSVSACSPGIAWTVVNLAHFAITYHFFHWKKGTPFAADDQGIYNRLTWWEQIDNGQQLTRNRKFLTVVPVVLYLIASHLTDYKQPMLFLNTIAVLVLVVAKLPNMHKVRIFGINADI

SEQ ID NO: 202875 - protein, 180 aa, Oryza sativa
  unsure (1)..(180): unsure at all Xaa locations
  Clone ID: PAT_MRT4530_98112C.1.pep
MGRRAGSYPYYVEAAPPVDVNKNTEWFMYPGVWTTYILLLFFAWLLVLSVSACSPGIAWTVVNLAHFAVELKSNYAFSLKQLAITYHFFHWKKGTPFAADDQGIYNRLTWWEQIDNGQQLTRNRKFLTVVPVVLYLXIASHLTDYKQPMLFLNTIAVLVLVVAKLPNMHKVRIFGINADI

SEQ ID NO: 202876 - protein, 49 aa, Oryza sativa
  Clone ID: PAT_MRT4530_98113C.1.pep
RWVDIGQKFGRSTLGMITDHFSRSFRSSKFNYSSMTRSLSGPLQIQVQK

SEQ ID NO: 202877 - protein, 321 aa, Oryza sativa
  Clone ID: PAT_MRT4530_98114C.1.pep
MDTTTRAKIPSLHHQTEINWDNLDKTKLYVVGAGMFSGVTVALYPVSVIKTRMQVATGEAVRRNAAATFRNILKVDGVPGLYRGFGTVITGAIPARIIFLTALETTKAASLKLVEPFKLSEPVQAAFANGLGGLSASLCSQAVFVPIDVVSQKLMVQGYSGHVRYKGGLDVAQQIIKADGIRGLYRGFGLSVMTYSPSSAVWWASYGSSQRIIWSAFDRWNDKESSPSQLTIVGVQATGGIIAGAVTSCVTTPIDTIKTRLQVNQNKPKAMEVVRRLIAEDGWKGFYRGLGPRFFSSSAWGTSMIVCYEYLKRLCAKVEEV

SEQ ID NO: 202878 - protein, 324 aa, Oryza sativa
  Clone ID: PAT_MRT4530_98115C.1.pep
IELRSLLDARTCFLQNLQNDFSKLLDEKKYCETQVLILNEKLEMAQALAEESEAIATEAKQMAEERMTPAEEKDEEVKLLERSIEELETTVCALENKVDIIKEEAERQRMHREEIELELQKVRQQMLAVPSSGQATSSLEGGMGDFTDSSRHSREIKNELLAAQENIRILQKDVAEKETEIAQCKAHISELNIHAEAAAREYKQKFMELEAMAQQVKSDNTSANACSTRPEKISLKPRGSGSPFKCIGLGFVQQMNSEKDEELSAAKQRIMELEGIAASRQREIFMLNARLATTESMTHDVIRDMLGGKMNMATLAALVDNQHQ

SEQ ID NO: 202879 - protein, 81 aa, Oryza sativa
  Clone ID: PAT_MRT4530_98116C.1.pep
GHEAPSVVFFFLEVFGNQPNFALLWQLGFRSIVFLFFSLKGVMNGGGGSFSMPPWFSPSDRGAGSLAKISPLFLKRAPPSF

SEQ ID NO: 202880 - protein, 69 aa, Oryza sativa
  Clone ID: PAT_MRT4530_98117C.1.pep
SYVIFVGPWCFTYHEAKPYFIPFSEGLLLFNHSGHMYPISKPKPYVVFTMILAIYLLFSPETVWRKTMT

SEQ ID NO: 202881 - protein, 117 aa, Oryza sativa
  Clone ID: PAT_MRT4530_98118C.1.pep
KLVVSRAESSASHKSLTNSRRLGSYNGSIIRLSLRAEETNSLRKKRVAVLLHPCRSPTASARDPPVSRPPRTPSGRRTVGSSRIGGTSRRRVAVSSGGHRHPRARCCCYGQSCKPWW

SEQ ID NO: 202882 - protein, 68 aa, Oryza sativa
  unsure (1)..(68): unsure at all Xaa locations
  Clone ID: PAT_MRT4530_98119C.1.pep
IIISTFFQRAARALHSTYNKXTHTKLPHDTLIRYTKRFHLSLNEAIINIRQIMQKAYSSVKLISSQIS

SEQ ID NO: 202883 - protein, 879 aa, Oryza sativa
  unsure (1)..(879): unsure at all Xaa locations
  Clone ID: PAT_MRT4530_9811C.1.pep
MSTSAGPFAAPSAEFPENLSHQIAIPSLVHPNQYFLGPIDNLDPTEFINAETNRIPFRLANPNLSLXKNTFKSWXQLRRVXPAWYKRVSASKGSHWEEIGIAQALALTAANMAKDEPLMSAASYFWSNAMNGFLFKQGPMTPTLLDITMITGLDITSSVNPVGLNTKNKFDFKTRSIGGWSGFVSSNMGNGAVTPREHTAFLLMWLEKYLFCGPSCGPTVNWQHIAESLVEKKGFPLGKYLLGYLYQTLNSTSARIASGSAIDIGGPWWLLQIWLNLHTMKVVDRPALTEADFPRFEPITDEDREEITTCRCMSFGEAASTNAGSKLSADPFRDWFASFYNGFPRDSIVWFAYADSDSFELPSDFRFDDINSEKFDKSREVFTTAISPCILSVGIHQGRNIQVSYEFYHPMSAARQLGLGQLPIGLYFADKIQHRGEITLALMMDRLLSIQGPPLGSIDNIELALLRSTTFDRWWVEWKKHLFHQSVSMYLTNIFPDVIPQTTESSPPHHSESGLEINYAAGLLPNGGGLAPPVIGFHAPXTTSLLQGQMREPIPMDTGKKKRTKPSVVDPSATKKKKTNKQKTLATDDLPTVDPDVDKFLDDEAMEEDIDAAAAEVSDTREQTPPADTPAPQRIPPPPHSPTPVQPESSEHTPSAVGSHHVEDAAAPTPAVPVLADMFSFDIRQFWDEEEEDTSSKALAPLADDVKRTLMEISNRLENSLDVLVVDCGSIRAWFHEIQNMIPEDLATTLTPAFYLEQHQFKLEKARQRIANRRERKDIEATIQVNRQSVNEEKANLDQLSFGPLKSLTDQGDLLKLRTSSTQQKWSTQLWSTPLNRPHRSMISTHTDGLPPRFTQIHHRPGLKHFPPVHYYTRCNTCH

SEQ ID NO: 202884 - protein, 146 aa, Oryza sativa
  Clone ID: PAT_MRT4530_98120C.1.pep
MNPPPVSPKPAPAALASVAQGVEDDEEKAEVDDGGGGGGYARTPDLGCPYYYAPPKKVTTTMPPPPPAASAVGGWDFFNLFYVVQEVAAVAISNEDMRTMREREGIPELEEAETRGQRRRRTPRPPKQQKLRSEWPIKKRPKTCAG

SEQ ID NO: 202885 - protein, 73 aa, Oryza sativa
  Clone ID: PAT_MRT4530_98121C.1.pep
MEAEEEEAAVEEMAGGRGPDSGVYASGCGGGWPWQVVRASPAHRDRRSIALMPAAVRPSSPSSRYPRRCQMKG

SEQ ID NO: 202886 - protein, 431 aa, Oryza sativa
  Clone ID: PAT_MRT4530_98122C.1.pep
EPLSVRNVERRTSRRANDLQYQIGLRYTGGARMALALSLKFSAVPVVVPVWVRDFDIDGELWVKLRLIPTEPWVGAVSWAFVSLPKIKFELSLFRLFNLMAIPVLSMFLTKLLTEDLPRLFVRPKKIVLDFHHASAMGPVAGDVASDVIQNVASGILQDVASDVIQDGNKDFVGELSVTLVDARKLSFVLFGKTDPYVVMILGDQEIKSKKNSQTTVIGQPGEPIWNQDFHMLVANPRKQKLCIQVKDSVGLTDVTIGTGEVELGSLKDTVPTDKIVTLYGGWGLLGKRSKGEVLLRLTYKAYVEDEEDEGVKNEFAAGYVSDEDVLDYVQDSTSKQSDMDGKERETFMDLLAALLVSEEFQGIVSSSEPGSLRDSEQAAKSRDGENAAAAADTGTVSNSSTDTALVWLAAITSVMVLVSSNLGGSGYFNP

SEQ ID NO: 202887 - protein, 322 aa, Oryza sativa
  Clone ID: PAT_MRT4530_98123C.1.pep
MGFYSSYHHPSTWPSTSPSPLAAPPGAASSPLDPTAAFLSSPHHRMLSAASGRLNGMLSVSDTLRSYGVPGAAAPGVIGGAHHHHHHLHGGQPFVGALASRFMPKLPAKRSMRAPRMRWTSTLHARFVHAVELLGGHERATPKSVLELMDVKDLTLAHVKSHLQMYRTVKSTDKPAASSGPADGGSGDEEFAGGGQAASGGGDSMCLRGGGGGGVAAAAFAEHGRSASEGAASSVGGGGGGDMDQSSAGNTSTTRWSNSSRDPWLSSNSCNMDAHRSVGLSSPIENLEPCRSSSSQVSNHELSSPSLEFTLGRPDWHGADHD

SEQ ID NO: 202888 - protein, 379 aa, Oryza sativa
  Clone ID: PAT_MRT4530_98124C.1.pep
MELGQPGCPVVQLPDSPQRTGRLPTACLGVGVKPHHGVDEDNDGSFHSAAANESDESGPVQGKGARSRVPIGPNHQAKLPDCTFGKKDGNVAEDSADSLSCLYLGSDRTENISNNQAPVRSSVLHPTDSMPTDAMPLLLTPTLGPPIDAPQPETTAVVHESAGEASTTSFDWSKLTEMGYRAVEVIQTWSSEVKLLKTIFVEEKDRNEHLKTMLGEEKDKNEHYKTMLAKEKDKAEHHKNMLEEEKDNNKRLKTMLVEEKDKNKHHKIILEEEKDKNERLKTMLSEEKVKNEHLKSMLAEEKDKNERLQLRLHGEEKDKNELLKTMLAEKKDKNDRLQLSFPKNEHLPLGLQRVHTRLDECIALIDRITQKDTVFLEML

SEQ ID NO: 202889 - protein, 63 aa, Oryza sativa
  Clone ID: PAT_MRT4530_98125C.1.pep
ETNNQNSRNLKQTLIIQNKNINIHFAFYILMNIAVTMLCLISFLDSKTRCHAHYYNKSLSSGH

SEQ ID NO: 202890 - protein, 64 aa, Oryza sativa
  Clone ID: PAT_MRT4530_98126C.1.pep
LGPHPSPGYPRQKVTNAVPWLRLRRHQNTTLGDGIVRQLSRLDSLLHASHRCQHHGRLCLTHRH

SEQ ID NO: 202891 - protein, 130 aa, Oryza sativa
  Clone ID: PAT_MRT4530_98127C.1.pep
QSVKTRDRACPIHHSERAKGGKANGAGLLAKTPKGERGKSRQNEGSWESARDLPRLESCKKSGPDHPHPRRQQEKRLARTQSRQYVKPWNTFKTLRPFFFFFFFFFFFFFFFFFFFIQKNMKSQHAGRTR

SEQ ID NO: 202892 - protein, 151 aa, Oryza sativa
  Clone ID: PAT_MRT4530_98128C.1.pep
KLWGQKIYPPFRVSKGRMVSGAPPPPRGAPPNRLCWPPKVLFGRPPKGWYFPRGGLKMLWASLRNKRFCPLLLSGVPSFFWGFFFFPAHKGGGPPLKLGRPPPCPGSGPQIFFPPPGFVSTVGGSPPDFFLHRGRRPWFFFHPIFARRTPL

SEQ ID NO: 202893 - protein, 362 aa, Oryza sativa
  unsure (1)..(362): unsure at all Xaa locations
  Clone ID: PAT_MRT4530_98129C.1.pep
MAGQRVVAAVAVALGVCLLQLPAASRGQLQVGFYNTSCPNAETLVRQAVTNAFANDSGIAAGLIRLHFHDCFVRMGIDGCDASVLLTSPNNTAERDAAPNNPSLRGFQVIDAAKAAVEQSCARTVSCADIVAFAARDSVNLTGGVSYQVPSGRRDGNVSVAQDAIDNLXPQPTFTAAQLVASFANKSLTAEEMVVLSGAHTVGRSFCSSFLARIWNNTTPIVDTGLSPGYAALLRALCPSNASATATTAIDVSTPATLDNNYYKLLPLNLGLFFSDNQLRVNATLGXASVSSFAANETLWKEKFVAAMVKMGSIEVLTGSQGEVRLNCSVVNNRSSSSAAGMETSYHYYSGSTMSVDEVASS

SEQ ID NO: 202894 - protein, 462 aa, Oryza sativa
  unsure (1)..(462): unsure at all Xaa locations
  Clone ID: PAT_MRT4530_9812C.1.pep
DTIEYSSLHACRSTLEDPHGFLFKQGPMTPTLLDITMITGLDITSSVNPVGLNTKNKFDFKTRSIGGWSGFVSSNMGNGAVTPREHTAFLLMWLEKYLFCGPSCGPTVNWQHIAESLVEKKGFPLGKYLLGYLYQTLNSTSARIASGSAIDIGGPWWLLQIWLNLHTMKVVDRPALTEADFPRFEPITDEDREEITTCRCMSFGEAASTNAGSKLSADPFRDWFASFYNGFPRDSIVWFAYADSDSFELXLDFRFDDINSEKFDKSREVSLXAISPCILSVGIHQGRNIQVSYEFYHPMSAARQLGLGQLPIGLYFADKIQHRGEITLALMMDRLLSIQGPPLGSIDNIELALLRSTTFDRWWVEWKKHLFHQSVSMYLTNIFPDVIPQTTESSPPHHSESGLEINYAAGLLPNGGGLAPPVIGFHAXPKTTSLLQGQMREPIPMDTGKKKRTKPSVVDPSA

SEQ ID NO: 202895 - protein, 122 aa, Oryza sativa
  Clone ID: PAT_MRT4530_98130C.1.pep
MWTQGFLHASANSGSIQDGHYANTCPTNPANFDKVMKATNRGKGKRGRPRGSSRGRGRGTNVGCKVSTAVPRPTRRSTREGPSLRRCLDDEWAAYAADYAAYTDDDLTNADDDIGCYESDST

SEQ ID NO: 202896 - protein, 504 aa, Oryza sativa
  Clone ID: PAT_MRT4530_98131C.1.pep
MEPKSSSCGGAGIRLRLLVVLHLLLLVPSSAMAFNYADALAKSIIFFEGQRSGKLPPGNRMPWRADSGLTDGAQYNVDLVGGYYDAGDNVKFGLPMAFSTTMLAWSVLDFGKFMGAELPNARAAVRWGADYLLKAATATPGALYVQVADPNQDHRCWERPEDMDTPRSVYRVTADKPGSDVAGETAAALAASSMVFRRADPAYSARLLHAATQVFDFADRHRGSYSDSLASSVCPFYCSYSGYHDELLWGASWLHRASRNASFMSYVEANGMQLGAGDDDYSFSWDDKRVGTKVLLAKGFLRNRLHGLELYKAHSDSYICSLVPGTASFQSRYTPGGLLYREGSSNMQYVTTATFLMLAYAKYLRSSGATASCGDGGGGARGEVSAAELVAVAKRQVDYILGKNPAGMSYMVGFGCRYPRRAHHRGASMPSVRAHPGRISCDAGFGYLHSGEPNPNVLVGAVVGGPDSRDAFADDRGNFAQSEPATYINAPLVGALAYFAGTTK

SEQ ID NO: 202897 - protein, 917 aa, Oryza sativa
  Clone ID: PAT_MRT4530_98132C.1.pep
MSPASIAALRHLAAVLSILAHCLLLSSADVDFIYNGFRNAANLSLDGSATVLRGGALQLTNDSNNIMGHAFFDSPVQMVSDAAVVSFSTAFVFDIVTNGSVGGHGLAFVVAASKVLPGATAEQYLGLLGKSNMGDPSNHVFAVEFDTVQANGLLNETNGNHVGVDLNSLVSNVSEPAAYFTDGGGGKRNLTLESAQPIQAWVDYDGSAKILNVTIAPVASTVPTRPRRPLISHAVDLLPIFKQEMYVGFSSSTGKLASSHYVLAWSFRTGGGAARPIDLSRLPSVPKKPAPPPSASVVVKIVALTCAATVTVIVAAIGVALWLRRRAALADTLEEWELDHPHRLPYRELYMATKGFKNSELLGAGGFGEVYRGVLRRSGDVVAVKRISSNGRQGMREFVAEVASLGRMRHRNLVELRGWCKRGHDLLLVYEFMPNGSLDALLFGGAPATATATALTWEQRVRILRGVASGLVYLHEEWEQVVVHRDVKASNVLLGADASAARLGDFGLARLYEHGGDPATTRVVGTLGYMAPELTVTGKATTATDVFAYGALLLEAACGRRPIDPATGVNLLRWVREHGARGELVHAVDERLDGRYDKEEARLVLWLGLACSQARPEARPSMRQVCQYLDGEEDVPEEAVLVFSDVDSIDFGSLTSLTWSSCATMSVGSLNGGRGEGARCAVDEMKEVVLHVYDVTNSDSEKTNNTILQINRIFKDRIGLGGIFHSAVQVRLRAASQIPPSEGRICFCFAFAFLPPPDLADFGWFSLALFCSDPGGAQVYGEEEWSFGFCENGSGVFSCPIGKNPMYTYRECIVLGETECSIATVNRILRELSREWPGHSYDLLSRNCNHFCDVLCERLAVPKLPGWVNRFANAGDTAVVVAENTAVKDNPPSQHQNKLSKSQLVQFRCEDQCVEYP

SEQ ID NO: 202898 - protein, 206 aa, Oryza sativa
  Clone ID: PAT_MRT4530_98133C.1.pep
MANVVPINDRNSRINNYGITEEDNLTHLDLGFKFYDLTDNVHRVLGQTHRFDYVNKLSVSANMPVMGGTPWYAVSDIFSTNHALRYPSPPSPSPLVAGRALAPCRLAPPSPPQVQPCAAVASVVVTARGGRRRGRQAVADLVRPSIFAEDRRNIAVIVNPKVAAVSSSSPSPSVDLPPSLWSPVSSPHRPHRLGVFCSRRRAVVRR

SEQ ID NO: 202899 - protein, 1064 aa, Oryza sativa
  Clone ID: PAT_MRT4530_98134C.1.pep
MASTSSGSTPSSAASTGDSTGSIFVNPYATVNVKTHIPITLELKHPNFNKWKTFFTSMCCMFGLLPHIDGTAPPRPDDSTCAQADCCVRGWLFGSVSDAILDVVMEPDQTARDLWLAIDDLFQANKEPRAIYLSHEFHSMTQGDMPIAIYCQKVKTAADALRDVGHPVTESQLVLNLLSGLNSRFSSTADNITSAPVLPSFTSARNTLLLKELRVANAHKSRGGGSNNGGRRNQRRYNGGQNNSSGGGNGGRQNNSNGGGYGNFGNNFQQQQHQAGPRPTGPWVCFNPWAVQQQQSPWRPSNSAGLLGPYPQAHTTFAGPYVSPPMPGLPPIQQSQPNWDQAGLIAALNQLSVQSPSPWVLDTEATSHMSSTDGILVTRLPNSHTFITVGNAHTIPVICRGTSFLPIGTTKFDLKNILVAPSLGVSKAVAPSSLDVEHPLSLPVAPSPEVEPPDDLAGPDMYRLLLHNRRLQSSQALEPAILAPSSASSGADASTTGGSMSSSSPVQTISNSSIAQPPALHSVPSARPLISPYRHTYVRRIQPVAVHGPIRTTRAFRAAQHTQDQQRHAMVTRSQTGNLRPVHRFNYTAMQTSVSPVPSNYRSALADPNWRAAMADEYKALVDNNTWRLVPRPPGANVVSGKWIFRHKFHSDGTLARHKARWVVRDYSQQHGIDYDETFSPVVKPATIRVVLSIAASRSWPIHQLDVKNAFLHGNLEETVYCQQPSGFVDPSAPTAVCLLQKSLYGLKQAPRAWYQRFATYICQLGFTSSASDTSLFIYKDGDNIAYLLLYVDDILLTASSTSLLQHITARLHSEFAMTDLGDLHFFLGISVTRSADGLFLSQRQYAVDLLRRAGMSECHPTATPVDARCKLSAIDGAPVSDPTEYRSLAGALQYLTLTRPEIAYAVQQAGCPDSRRSTSGYCVFLGENLVSWSSKRQTTVSRSSAEAEYRAVAHAVAECCWLRQLLLELHIPLASATTVYCDNVSAVYMTANPVHHRQTKHIEIDIHFVREKVALGQVHVLHVPSSHQFADIMTKGLPVQLFTEFRSSLCVRDVPPTLTAGGY

SEQ ID NO: 202900 - protein, 1306 aa, Oryza sativa
  Clone ID: PAT_MRT4530_98135C.1.pep
MASTSSGSTPSSAASTRDSTGSIFVNPYATVNVKTHIPITLELKHPNFNKWKTFFTSMRGKFGLLPHIDGTAPPRPEDSTWAQADCCVRGWLFSSVSDAILDVVMEPDQTARDLWLAIDDLFQANKEPRAIYLSHEFHSMTQGDMPIADYCQKVKTAADALRDVGHPVTESQLVLNLLSGLNSRFSSTTDNIASAPVLPSFALARNTLLLKELRIANAHKVQAETAMVVAASSANDCTSGTCASSSSSQSRGGGSNNGGRRNQRPTAVVAAMADDRTTAMAAAMATSGTISSSSSTRLGHDLPAHGSVSIHGLCSSSSLSGVPATVPACLAHILKHTRHLQAHMSLHQCRACHQCSNLSPIGIRQDLRTRRVILRCNSRGDLYTLPTAAPAIAAHSFLAQSSTLWHRRLGHPSSAAIQTLHKLAILPYTKIDHSLCHACQLGKHTRLPFSRSQSSTSSPFELVHCDVWTSPVLSTSGFKYYLVVLDDFSHFCWTFPLRHKSDVHQHIVEFVAYVTTQFGSSIKCFQADNGTEFVNQATTSFLASRGTLLRLSCPYTSPQNSKAERMLRTINNSIRTLLIQASMPPYWAEALATATYLLNRRPSTSVHDSIPFQILHHKVPDYSNLRVFGCLCYPNLSATTPHKLSPRSAACVFLGYPASHKGYRCLDISTRHVFISRHVVFDEQTFPFAAIPQTASSFDFLLQGVSKAVAPSSLDVERPRSLLVAPSPEVEPLDDLAGPDMYRLLLHNRRLQSSQAPEPAILAPSSASSGADASTTGGSMSSSSPVQTISNSSIAQPPALHGVASARPLISPYRHTYVRRTQPVAVHGPIRTTRAFRAAQHTQDQQRHAMVTRSQTGNLRPVQRFNYTAMQTSVSPVPSNYRSALADPNCRAAMADEYKALVDNNTWRLVPRPPGANVVTGKWIFRHKFHSDGTLARHKARWVVRGYSQQHGIDYDETFSPVVKPATIRVVLSIAASRSWPIHQLDVKNAFLHGNLEETHITARLHSEFAMTDLGDLHFFLGISVTRSADGLFLSQRQYAVDLLRRAGMSECHPTATPVDARCKLSATDGAPVSDPTEYRSLAGALQYLTLTRPEIAYAVQQVCLFMHDPREPHLALVKRILRYIKGTLHIGLHIGTAPVDSLTAYSDADWAGCPDSRRSTSGYCVFLGENLVSWSSKRQTTVSRSSAEAEYRAVAHAVAECCWLRQLLLELHIPLASATIVYCDNVSTVYMTANPVHHRRTKHIEIDIHFVREKVALGQVRVLHVLSSHQFADIMTKGLPVQLFTEFRSSLCVRDVPPALTAGGY

SEQ ID NO: 202901 - protein, 1146 aa, Oryza sativa
  Clone ID: PAT_MRT4530_98136C.1.pep
MASTSSGSTPSSAASTGDSTGSIFVNPYATVNVKTHIPITLELKHPNFNKWKTFFTSMCGKFGLLPHIDGTAPPRPDDSTWAQADCCVQGWLFGSVSDAILDVVMETDQTARDLWLAIDDLFQANKEPRTIYLSHEFHSMTQGDMPIADYCQKVKTAADALRDVGHPVTESQLVLNLLSGLNSRFSSTADNIASAPVLPSFASAHNTLLLKELRIANAHKVQAETTMVVAASSANACTSGTCASSSSSQSHGDVSNNSGRRNHSGGGNGGRQNNSNGGGYGNFGNNFQQQQHQAGPRTTGPWVCFNPWAVQQQQSPWRPSNSAGLLGPYPQAHTTFAGPYVSPPMPGLPPMQQSQPNWDQAGLIAALNQLSVQSPSPWVLDTGATSHMSSTDGILDTRLPNSYTFITVGNGHTIPVICHGTSFLPIGTTKFDLKNILVAPSLVRNLLSIRQFTRDNNCSIEFDEFGFSVKGLRTRRVILRCNSRGDLYTLPIAAPAIAAHSFLAQSSTLWHRRLGHPSSAAIQTLHKLAILPCTKIDHSLCHASIPQTASSFDFLLQGVSKAVAPSSLDVERPRSLPVAPSPEVEPPDDLAGPDMSQLLLHNRRLQSSQAPEPAILAPSSASSSADASTTGGSMSSSSPVQTISSSSIAQPPALHGVASARPLISPYHHTYVRRTQPVAVHGPIRTTRAFRAAQHSQDQQRHAMVTRSQTGNLHPAQRFNYTAMQTSVSPVPSNYRSALADPNWHAAMADEYKALVDNNTWHLVPQPPGANVVTGKWIFRHKFHSDGTLARHKARCVVRGYSQQHGIDYNETFSPVVKPATIHVVLSIAASRSWPIHQLDVKNAFLHGNLEETVYCQQPFGFVDPSEPTAVCLLQKSLYGLKQAPRAWYQRFATYIRQLGFTSSASDTSLFIYKDGDNVAYLLLYVDDILLTASSTSLLQHITARLHSEFAMTDLGDLHFFLGISVTRSADGLFLSQWQYAVDLLRRAGMSECHPTATPVDARCKLSATDGAPVSDPMEYRSLAGALQYLTLTRPEIAYAIQQVCLFMHDPREPHLALVKRILRYIKGTLHICLHIGTAPVDSLTAYSDADWVGCPDSRHSTSGYCVFLGENLVSWSSKRQTTVSRSSAEAEYRAVAHAVAECCWL

SEQ ID NO: 202902 - protein, 1159 aa, Oryza sativa
  Clone ID: PAT_MRT4530_98137C.1.pep
MPGLPPMQQSQPNWDQAGLIAALNQLSVQSPSPWVLDTGATSHMSSTDGILVTRLPNSYTFITVGNGHTIPVICRGTSFLPIGTTKFDLKNILVAPSLVRNLLSVRQFTRDNNCSIEFDEFGFSVKDLRTRRVILRCNSRGDLYTLPTAAPAIAAHSFLAQSSTLWRRRLGHPSSAAIQTLHKLAILPCTKIDHSLCHACQLGKHTRLPFSRSQSSTSSPFELVHYDVWTSPVLSTSGFKYYLVVLDDFSHFCWTFPLRHKSDVHQHIVEFVAYVTTQFGSSIKCFQADNGTEFVNQATTSFLASRGTLLRLSCPYTSPQNGKAERMFRTINNSIRTLLIQASVPPSYWAEALATATYLLNRRPSTSVHNFIPFQILHHKVPDYSNLRVFGCLCYPNLSATTPHKLSPRSAACVFLGYPASHKGYRCLDISTRRVFISRHVVFDEQTFPFAAIPQTASSFDFLLQGVSKAVAPSSLDVERPRSLPVARSPEVEPPDDLAGPDMYRLLLHNRRLQSSQAPEPAILAPSSASCGADASTTGGSMSSSSPVQTILSSSIAQPPALHGVASARPLISPYRHTYVRRTQPVAVHGPIRTTRSFRAAQHTQDQQRHAMVTRSQTGNLRPVQCFNYTAMQTSVSPVPSNYRSALADPNWRAAMADEYKALVDNNTWRLVPRPPGANVVTGKWIFRHKFHSDGTLARHKARWVVHGYSQQHGIDYDETFSPVVKPATIRVVLSIAASRSWPIHQLDVKNSFLHGNLEETVYCQQPSGFVDPSAPTAVCLLQKSLYGLKQAPRAWYQWFATYIRQLGFTSSASDTSLFIYKDGDNVAYLLLYVDDILLTASSTSLLQHITARLHSEFAMTDLGDLHFFLGISVTRSADGLFLSQRQYAVDLLRRAGMSECHPTATPVDARCKLSATDGAPVSDPTEYRSLAGALQYLTLTRPEIAYAVQQVCLFMHDPREPHLALVKRILRYIKGTLHIGLHIGTAPVDSLIAYSDADWAGCPDSRRSTSGYCVFLDENLVSWSSKRQTTVSRSSAEAEYRAVAHAVAECCWIRQLLLELHIPLASATVVYCDNVSAVYMTASAVHHRRTKHIEIDIHFVREKVALGQVRVLHVASSHQFADIMTKGLPVQLFTEFRSSLCVRDTYSRFECGRVLELD

SEQ ID NO: 202903 - protein, 72 aa, Oryza sativa
  unsure (1)..(72): unsure at all Xaa locations
  Clone ID: PAT_MRT4530_98138C.1.pep
FLLAGLVAAHGXXDTMIRLPSDGAEAPPRPPKPWDFXDXIEMFPXEIFPAVYXXNDXVKXFFGGFKEFVEAA

SEQ ID NO: 202904 - protein, 79 aa, Oryza sativa
  unsure (1)..(79): unsure at all Xaa locations
  Clone ID: PAT_MRT4530_98139C.1.pep
ATNFMAGLASXKNQNPQPKSPSNQXSRNGPTFQGTWFKNIISNGAKPSSSESTSSHDTGTGGDESSLQNQKPSEQSTRL

SEQ ID NO: 202905 - protein, 82 aa, Oryza sativa
  Clone ID: PAT_MRT4530_9813C.1.pep
WWRGRRARRRGRRRDRSNRAAAEKRRRRRGARRRRRRRRRRRCRRCCRRGRRWRCSGTARGWAAARSPSATTAPTRSASPAA

SEQ ID NO: 202906 - protein, 40 aa, Oryza sativa
  Clone ID: PAT_MRT4530_98140C.1.pep
ARSYQYMDSVLILSCSCSMVYHHQQQLSGLISLIRYHHLH

SEQ ID NO: 202907 - protein, 167 aa, Oryza sativa
  Clone ID: PAT_MRT4530_98141C.1.pep
FFFFGSILPGSAPQSDLGGSSNSFIVLTTTHSGLHVPFLAVGSALSRRSSPSTPAKRAHRGQWCFPPSPLSSSSLAIQRFLLVTQHCTFTHSSITHTQPDQGHTHSTCLHRTVSTPQLHVPLIQWVAHQSQPLGAHSVRHMHQAQQPAHPHRHPHNSHTSLHATLWR

SEQ ID NO: 202908 - protein, 145 aa, Oryza sativa
  unsure (1)..(145): unsure at all Xaa locations
  Clone ID: PAT_MRT4530_98142C.1.pep
MRCHSSRCSRKPIQRRTLEPCNFSPSLLYFSHXRGGGGEWSVVLVVGVVAIQPRPPANAEQARATGDGGGRWARARGCGRAVGGVAWGRAVDGGGGGTAREDTAVAGFTISSSVSTTPRPPSTTAASSAPRRTRQRVLGRKLHRL

SEQ ID NO: 202909 - protein, 99 aa, Oryza sativa
  Clone ID: PAT_MRT4530_98143C.1.pep
LGYKLVPITPTSMTGPRLGINPKEPLDYRDITILWKGHLGPFFFHLQKANTPMGSRKTRAIGFKQGGPPQQFPGTPPGKKPPVRQTKWEGAHPPLLGLW

SEQ ID NO: 202910 - protein, 85 aa, Oryza sativa
  Clone ID: PAT_MRT4530_98144C.1.pep
IRHEGMAVRPLMEGITQLPHIKILCLNLLTRGHAYGASVLHILTMCTGIAVLGLRIEEDFQVIMFPMNSEQLRFLILISIPAVNS

SEQ ID NO: 202911 - protein, 77 aa, Oryza sativa
  unsure (1)..(77): unsure at all Xaa locations
  Clone ID: PAT_MRT4530_98145C.1.pep
PTTTTFLPSSLFLSLRSELSDPEGGRKGGHXHRLXXPDRLARRXSLRRRXXXPLXRRRAXSRAXXAFPPSPEXYEFR

SEQ ID NO: 202912 - protein, 116 aa, Oryza sativa
  unsure (1)..(116): unsure at all Xaa locations
  Clone ID: PAT_MRT4530_98146C.1.pep
QKTRGLGDLLNSSAGPKLAFGCASVPVDLILXSIRNRSKETSVKSINDSRSARTLSMCGNHLEAPQXQPDISFIKLHCRNRLHRLTXSDSDPANPXIVADLVSSRFLLCFRTRSPP

SEQ ID NO: 202913 - protein, 138 aa, Oryza sativa
  Clone ID: PAT_MRT4530_98147C.1.pep
HRIGADQDAHGNNVQAYASANTSRQRPPPSSNQLQHTMSERKRREKLNGSFVALQSRPYVLPPGSKLDKTSSILIGAREYVKFLESKLSELEEKNRELEARLVSSPAVVAKNDAEEAAAPPEAGGESRFKYPVLKIDF

SEQ ID NO: 202914 - protein, 431 aa, Oryza sativa
  Clone ID: PAT_MRT4530_98148C.1.pep
MAAAEAVPTGSGDVRGGAGEARSCRSGFSNRRIPLYGSTPTTHSPRGCVLLRFRPAAAAAVSIPSVESTCCIFVSDFVSVCFFSRMPDWCSGSNFKHRWGGVRFKRTMLQLEPDQKQFIIDNDFESFLSLSNFKVHSRLAEWIMQKMNPEICEFRFRGKVIMFDKLLVQKITGLNDGDLPVKLSGANSEVVKEIRTLYHPYFVSNRLGTGMCEKLLLSLHDEEKFLRTFILYLLATILCPATGNYVNLDYVHSLVDVQMWSQYDWCTYVASCLMREIKKYHGFSTKQRDSIFQIGECLPLLVIAYMDHLQMPTTGLHLRIIDYSTPRFCHVTDEDFEYIVVVDRCRMNLGYVTYGSRPFRPQNEIPYLAQVHVVAGGSEAENARVARAEDVPIGAGQDGVGIGAGVVVDRKHEAWEICLTPVQVQSSPSNV

SEQ ID NO: 202915 - protein, 214 aa, Oryza sativa
  Clone ID: PAT_MRT4530_98149C.1.pep
MADDVVASPEESLTALLLEPAASPRDDPSVEVRLYRRGAGPVAVFRSALVGPRRDRLQVRAIQAEHGLRALFAFKPESSLRGIRIRPGPAAAAGCSAVPFRDGAVIALDGEPKGSWTKPAAVIVAGVLVPAVMVAVAVKGCRSRCGRRGWSTPSSRRGSSPAPSSSTLASGRAQGRLLHDPSPIACSSSSPSTTSPSLFFPLSRNLYEKKRTTM

SEQ ID NO: 202916 - protein, 94 aa, Oryza sativa
  Clone ID: PAT_MRT4530_9814C.1.pep
HTSARTPPSPPACKRAEDVVEKAIAIATETGFTIRPFTKIAAATDTPTKSGYLMGSSNISCDNVSASGSGNKVTVDYKVKLMGKVIVPHCFEHH

SEQ ID NO: 202917 - protein, 211 aa, Oryza sativa
  Clone ID: PAT_MRT4530_98150C.1.pep
MAPPRPASPQSLPPVAATRSRGRPYEGWTLKELIGEVRRLRRAASSAPPRPAGVLDLDQGDARASDTVAPSPPSPCESQEQPHHLGKVRKIVNVAHDIVVNFCNAIRAPEAFKLVAAAENVKPHLLKIDHDDNLLFLQFKAALEREQQVHNVNHEIAISLDKYTNCPLSGTEIAELTQPLRREYYSEMVNRNLACKNFSIHLLALSISLHY

SEQ ID NO: 202918 - protein, 63 aa, Oryza sativa
  unsure (1)..(63): unsure at all Xaa locations
  Clone ID: PAT_MRT4530_98151C.1.pep
VRLLKGRICNEIKTTLFSIKEEAQRIQRLQDKXWSSLKASSQYYTSLILKNTLQKRGKMGEER

SEQ ID NO: 202919 - protein, 138 aa, Oryza sativa
  Clone ID: PAT_MRT4530_98152C.1.pep
YFALPGRPRRYHPSPNSRLLPRRAAMAPPRPASPQSLPPVAATRSRGRPYEGWTLKELIGEVRRLRRAASSAPPRPAGVLDLDQGDARASDTVAPSPPSPCESQEQPHHLGTRLEDVLIFLRDVAFQVIKNGRQDEVR

SEQ ID NO: 202920 - protein, 132 aa, Oryza sativa
  Clone ID: PAT_MRT4530_98153C.1.pep
LTDQSLPRRSFLRGHFLSTLKTKQATLQGHNAVRPPWVNLANFLTKCTACDNCITICETQIIVRGAGGYPEVDFSKGECTFCEKCVQSCQAGVFLATSEVAWQHKVAVQECCLLQHRIACRSCGDSCESRAI

SEQ ID NO: 202921 - protein, 83 aa, Oryza sativa
  Clone ID: PAT_MRT4530_98154C.1.pep
FHLTDDDVDDLNPAEISSEMHTGRQDLEQGARNYGAEGGERPWRRTTARACDEGAAPCGGRHARGSDKLTTTRAARPGGNRDR

SEQ ID NO: 202922 - protein, 150 aa, Oryza sativa
  unsure (1)..(150): unsure at all Xaa locations
  Clone ID: PAT_MRT4530_98155C.1.pep
QNPFPFGNXEKKFGPPPVILKSPFGNPWRTXTQSXPGXXITXXXGALDXEXFXXGXAXTDRPVEFXXXKXAGXXXGXXKXYPRXTGXXXXTXPGGXFXIXEXGRXFXFXFXWDPXXKXXRXXEGXKPNRXAPPXIRAEFGTSSXRILHXG

SEQ ID NO: 202923 - protein, 94 aa, Oryza sativa
  Clone ID: PAT_MRT4530_98156C.1.pep
KLPTWLLIYVLATTSISNQSYAPPRCKAEAAIGPRIRVRNGQSVSMKISDMAPYLHYCNHSNLDFWKQSHNMGTSCSKPALAMNFVREQSVCCY

SEQ ID NO: 202924 - protein, 386 aa, Oryza sativa
  Clone ID: PAT_MRT4530_98157C.1.pep
MPMEIVTRRDKEGLRCNGADGEKLPQLLDSPLPTPRRSCASADAASVRCRREASPLRTQVPFSWESSPGVPKRSSACMHMAQEIMPPPKPPPGRWKQCPGSNWCGYGNSTAASSDDDDASFSDALDRVSTPDQRVGSFDRITSKRFEDIFLGRATSFVNDRSSRRAPAEASLATPSSSSGRGPKHWRRRTTRRDHDGQQPTARQSNDHPVQVQLLPRININGRDEQMSPRACGLMVFFPWSAKPAVCGFRSPPAQYAPSPLAGASNPSSSQSRRFVTLRDAMQEENKTGSGGRDLPRPRGEKRSREEWQAASRGWGVSSLLDASKKYCTDARKALSKLSIGLGTDSGSGSGSPRVGSRERKCGKQDPSSTMPAMATKLTQLRTSRN

SEQ ID NO: 202925 - protein, 255 aa, Oryza sativa
  Clone ID: PAT_MRT4530_98158C.1.pep
MTMTMTSGGRRLAIERRAGGAGRGGTRHGARVQGSRPAARRDLGEVSISMILKFEIIFRLHNKIAFILEFGVNVTIGMRASGLQDPVALVSIGGWSPNQGTPQLAIILNPSLRRRCGLCPGWPYWAAAMGLSDLTLSTELEPMGLSSTEQGKLGTLTGSRQVEPRGKSMGTAIDGEPTAIDLFNELHCSKTKGFSEPVKKAIVGAFGGRSFFCVGCWKTGFFGTSCWQLAGCRPEVRWLLGGIFFLAAGKMNAET

SEQ ID NO: 202926 - protein, 106 aa, Oryza sativa
  Clone ID: PAT_MRT4530_98159C.1.pep
MARTAARYGWRQQMAVIAQVHGGRGVPVVGAAERPELGATVGRQGAAWRGWGRLEVGDGPDRWGPPVGGSRRGGRRGEASWAGGLRKERGGGGRARKGKGRLGPSP

SEQ ID NO: 202927 - protein, 200 aa, Oryza sativa
  Clone ID: PAT_MRT4530_9815C.1.pep
MAATPADVDREATNPSAIRGRRRRRRRRRRGDREMESAMFGLETPLMTALQHLLDIPDGEGGAAGKQGATGGPTRAYVRDARAMAATPADVKDLPGAYAFVVDMPGLKSSDIKVQVEEERLLVISGERRRGGGEEEKEESCKYLRMERRMGKFMRKFVLPDNADVDKISAVCQDGVLTVTVEKLPPPEPKKPKTIEVKVA

SEQ ID NO: 202928 - protein, 320 aa, Oryza sativa
  Clone ID: PAT_MRT4530_98160C.1.pep
MTTMMMTSGGRRLAIARRAGGVGPRGRAGAGQGCMATGQRHVGASAQELYAVAAASESATSTGPAMVAPECQPKNVTTGMRASGLQDQVALVSIGGWSPNQGVPQPAIILNPSFSRHRRGLCPGRPYWAAAMGLSNRTLSTLTGSRQVEPRGKTMGTAIDSEPTAIDLFKELHCSKTKCFSEPVKKAILAAKTTNVMKEIQVELDAKKLESAVLQEELERLKAQENYRHCINDDVLWWSQKLKPKIPVVAVARIIARVEVEEEAPGVTCGLELGRLDVVFAAVVRFLDRVAYFDLEKVATGGGRRRSGGRRRGDDVLRRR

SEQ ID NO: 202929 - protein, 294 aa, Oryza sativa
  Clone ID: PAT_MRT4530_98161C.1.pep
MAMVAATMTTTATAATVAATTTSVGASAQELYAVTAASESATRSTGPAMVAPECQPKNVTTGMRASGLQDQVALVSIGGWTPNQGVLQPAIIVNPSFSRHRRGLCPGRPYWAASMQLSNRTLSTELKPMELSTTEQGNRQVQLRGKSMGTAIDSEPTAIDLFKELHCSKTKGFSEPVKKAIEDMHAQEILTSPSVEDGQQAKTSIEDVSKLAAKTTNVMKEIQVELDAKKLESAVLQEELERLKAQALENYRHCINDDVLWWSQKLVSDSPSVMTTILSLRVVSDRKQAVIFIM

SEQ ID NO: 202930 - protein, 75 aa, Oryza sativa
  Clone ID: PAT_MRT4530_98162C.1.pep
MSSSPTKDVVTASTATTTSAAATGCNLLKIKVRNAIKKSHHGSKYDIESSKFQAAGHTWSFSGCGTPWLGLHPPM

SEQ ID NO: 202931 - protein, 186 aa, Oryza sativa
  unsure (1)..(186): unsure at all Xaa locations
  Clone ID: PAT_MRT4530_98163C.1.pep
RLTSGGRRLXAIERRAGGAGRGGTRHGARVQGQQASGAVGIWNVPTGMRASGLQDPVALVSIGGWSPNQGVPQPAIILNPSFSRHRRGLCPGRPYWAAAMGLSNHTLSTELKPMELSTTEQGKLGTLTGSRQVEPRGKSMGISIDSEPTAIDLFKELHCSKTKGFSEPVKKAIVSTELLHLLSFFY

SEQ ID NO: 202932 - protein, 241 aa, Oryza sativa
  unsure (1)..(241): unsure at all Xaa locations
  Clone ID: PAT_MRT4530_98164C.1.pep
MVAATTTTTATAATVAAMTTMMMTSGGRRLAIARRAGGVGXRGARRRGAGVQGSRPAARRDLXNVTTGMRASGLQDPVALVSIGGWSPNQGAPQLAIILNPSFLRRRWGLCPGWPYWVAAMGLSDLTLSTELEPMGLSSTEQGXGTLTGSRQVEPRGKSMGTAIDGEPTAIDLFNELHCSKTKGFSEPVGAFGGRSFFCVGCWKTGFFGTSCWQLAGCRPEVRWLLGGIFFLAAGKMNAET

SEQ ID NO: 202933 - protein, 459 aa, Oryza sativa
  Clone ID: PAT_MRT4530_98165C.1.pep
MGLEMEGMAAAIGVSVPVLRFLLCFAATIPTGLMWRAVPGAAGRHLYAGLTGAALSYLSFGATSNLLFVVPMAFGYLAMLLCRRLAGLVTFLGAFGFLIACHMYYMSGDAWKEGGIDATGALMVLTLKIISCAINYSDGMLKEEGLRDAQKKYRLAKLPSLIEYFGYCLCCGSHFAGPVYEMKDYLEYTERKGLWASPTPSPLLPTLRALVQAGACMGLYLYLSPQFPLSRFSEPLYYEWGFWHRLFYQYMSGFTARWKYYFIWSLSEAAIIISGLGFSGWSDSSPPKAKWDRAKNVDVLGVELATSAVQLPLMWNIQVSTWLRYYVYERLVQKGKKPGFLQLLGTQTVSAVWHGLYPGYIIFFVQSALMINGSKVIYRWQQAVSNPVFHAILVFVNFSYTLMVLNYSCIGFQVLSFKETLASYQSVYYIGTIVPIVVVLLGYVIKPARPVKPKARKAE

SEQ ID NO: 202934 - protein, 99 aa, Oryza sativa
  unsure (1)..(99): unsure at all Xaa locations
  Clone ID: PAT_MRT4530_98166C.1.pep
AEGAEVAAALSEEGEQSEPVLHRINRSSAPSGHRLVVLCQPSGRDISVRYXLGGELGRREFWVTYLCTERETGDVYAXCLCFLNKKLRTVVDIDDVRGE

SEQ ID NO: 202935 - protein, 398 aa, Oryza sativa
  Clone ID: PAT_MRT4530_98167C.1.pep
MGNAFRCMSRKEHRGGGGAAVSRSKRMGSARSGRGGGGGKLTPAEEELLHRQALAMAIHQHLDAGGSMSRRIDAGGSMSRRIGPGSTSSRRRGDLPDSVTGAKPVQIVLENLETKKIVLVHGEGFGAWCWYKTISLLEEAGLDPIALDLTGSGIDNADTNSIATLADYSKPLIDYLNKLPENEKVILVGHSCGGASVSYALEQCPKKISKAIFLTATMVKDGQRPFDVFSEELASADVFLQESQLLIYGNGKDKPPTGLMFDKQQIKGLYFNTSPSKDTVLAAVSMRPIPLAPIMEKLSLTPENYGTVPRYFIQTLDDRMLSPDVQEKLVRENPPDGIFKIKGGDHCPFFSKPQSLNKILLEIAQIQAPTALLPGKAKTEAIEATEAKTEEEKTEKLS

SEQ ID NO: 202936 - protein, 78 aa, Oryza sativa
  Clone ID: PAT_MRT4530_98168C.1.pep
MASSDWEMNPHVLHPHMDMPFVMDNGISFEEGGTTVGVIFASNSVQAAAPTLRTLPPASGPRLHSPAQARSGELCVPH

SEQ ID NO: 202937 - protein, 415 aa, Oryza sativa
  Clone ID: PAT_MRT4530_98169C.1.pep
MQKPGIPGCGVLMLCLAWKLLKNLSVYQCFRHLNKVLTPTFSGPDLQVPNISVMDFPPGKLLLVNILAFLFIERLLLQDKKLSTSFYIQLNMWTPKRNKLKICGWIMDMSKNLEETLLVNERNMDKNSLKGAIDHEACSSVVGRTAQTMHNCKSSMDLVLVPCGLAIMVGYHLMLLHRILRHPHTTVIGYENHNKLAWVERMLQAAAPEESALALGVISDNISAATTLASLCIALGSLIGAWVSSSPAPGAAGVVVLGYGDGSHATATVKCVALLACFLASFTCFIQSARYFVHASFLMSALAGDAAPPVGDAQRAVVRGGNFWAAGLRALYLATALLMWVFGPVPMLACSVLTVAALHRLDANSMPLHHHRFTARSTDASPATAPVAAARSAVARGGRAGNGNTVAFSTATFLC

SEQ ID NO: 202938 - protein, 81 aa, Oryza sativa
  Clone ID: PAT_MRT4530_9816C.1.pep
MALPLLLHHRSPLSHQRDAWRGRERENLSPAANDSDGGHINLFSARGGSGGVADFAALASADGGRGTAREWEPPANPKLIL

SEQ ID NO: 202939 - protein, 1902 aa, Oryza sativa
  unsure (1)..(1902): unsure at all Xaa locations
  Clone ID: PAT_MRT4530_98170C.1.pep
MDESRKRAASTANANSSSLGVDFGSHFLSSWKLPKSGNDTIDFGVESLPKYSKNFSFDNLNDFGPEGAFDKLSSFKMGMSDLDFSGPFKKKVKPNDSNGNDLTEGLKGTEKDNLSFSFDFNELGKFNLDANLGMAKNGICKFVEKVYPVSSECDKDPRKGLSVKGSDVLGGNISKEQKQTHDACTLRPTHLGSFSPARMDQNKVDLLSTDTHEEKSNETHPSRAAVNKPSQNLPCSSTPGEDPTHVTTTAVAENCREAPLVELSKVHISRGNNDSGQSVSSQFMNTSTTCPSISRKLTAQSDSQNDQNEIVGESACLNAQSPDNQRFRGTSMKLLKKTSCETKKAEKGTSGPKSLSSSMQRDMRNVKPASLNEAGSLSLPPQSSIVKASRPPQLTSETTLNQLSSANNMVKKMNTHSTELKRESTQANARSERPKIASSKTFCKPALHELLTTSMNAKDHKNSKLSTAECSIFTVFYPLDPSTALMVNKLPFPRLESPSTGNVSTLNAPSSPAHSNGHKTVASRSLLGSTNVFDAGKGTPKADNRPLSQLKAAKITKAGTISSKSDLLLEKDMMETSGRKGSPVTTSNNPKSYGEGKYVLPSPSMMQKTPKESASDPKAPAMLKHIMKSPAIPGSGTPKARMDNAIASAISCEMGEISELELPALLENDVNVQKAEACRKELEDKFASNLRSKKVLFEDISAIDAVLDLYSVINYHKDYGTISCSISPLAIPMSPIHHLDVPCMHPLSLYQTTLFSCLRWKSINVRLKWSDCASPRKNTGTVNAICYTPVILGSMRNLYLGIGDDSTGPRAEKKKHGSRGACAHTLVRNCVDIARSVVNCVLVDRTTRVPLVVDPWCSIVCPGQNAIEEVLLHTVLCHGQKLLSNVVGDVPVDSKASVLTLSIYRMDLPAQSSKILIGVEFACVHRGECACVWKILGRAEEADRMMDLEEKMKIVAANTGIDLVSLLRRRQRRCRFTGDGAATANEIGLSRVWILGVMAPSECPPGSHVDWSLIIKVTSWPQDITDNTSVQMTIFMFDRHTAFSINVRIPPYDAKMDDGSELPMEGQEHSWWVNGVVSMDRMVEDLKSQVIWGSRQKPIFYGTDHRTCETIEISSNLVLISQFIDRFDTKVMNLLVNIMDKSDTLDGSNTAIAAIDSGSVVNDDPPAPATHAAGPYNVVAPGAVGAYNVDAPSVVAHGGIDWDELNIQPLTVEGGSCHVTFDEDEMFDMLGLGGSDIGADEATTSQFPPVDLEQGMTEAAIPVNDDVGVEPNRDWDRDDPIMNVDTIYPXMAVRQYAINEEFELGTEKSDPTRFRGFCTAXVQINAGKHDCSSTSRVLGRMASQAWVADRAAAIMRKKPNCGAKELKTILEERYKAEIELRCPGSRVEIGTKEVNGQVHFERFFCCFEPCITGFLLGCRKYLSIDSTALNGKWNGHLAASNALDGHNWMYPMAFGFFDAETTDNWTWFMEQLAVCIGHVEDLAICTDACKGLENVVERVFPNCEERECFRHLMENLTKRKTGTVYGNLWPAARAFRSEIYDYHMDKVLSADPDVGDWLYKHHKILWARSKFSPKIKCDFITNNVAESWNAWIKEFKELQVDALADAIREKTAALWAKRRKIGEKLEGRNILPAIVTQLKAATRGLANMRVMKGADDTAEVTELHNSVEVYRHVVYLDQQKCTCREWQLTGKPFSHALAAISKQRNPIMDDFVDPVFSVSCFRAAYEGVIPCITDKSQWPTANKDFKLQPPVPKPRTVPRQRKNMIPSCLEKGKGKIRRQVNCPRCGGLGHRQSSQKCPLNGTKKRKRKAKNIATKARKKKTAKEIVETPTRSKVARVQLVDSPARVTRSQTRTTGTPTIAREGCSQDSPGPVTRRRLAMTEATPSQPLPPTKKKLTPKKKQN

SEQ ID NO: 202940 - protein, 157 aa, Oryza sativa
  unsure (1)..(157): unsure at all Xaa locations
  Clone ID: PAT_MRT4530_98171C.1.pep
MMLVDKSSMDLVLVPCGLAIMVGYHLMLLHRILRHPHTTVIGYENHNKLAWVERMLQAAAPEESALALGVISDNISAATTLASLCIALGSLIGAWVSSSPAPGAAGVVVLGYGDGSHATATVKCVALLACFLXXFTCFIQSXRYFVHASFLMSALAG

SEQ ID NO: 202941 - protein, 478 aa, Oryza sativa
  Clone ID: PAT_MRT4530_98172C.1.pep
MPGGPSRAADADDDDDDELSRLLSLAEADLEAGRLRAAHKHARRAARLDPDSTRASLLLTAVSVLAADDSSHRATLLLPDSPHSQASPLSPSALRRHYKSLSESLRSAPPSSSPAVSSAVKEALRRAADAYAALANQAAAPVPPTFWTACAGCRLLHEFDRKYVGFRLMCPSCRRTFLASEVPPPPEAEAEAEPDPLPPAKKKPKTQKREMTLAEMQLQLSKKRATNNSSRLDEDDDDDNDDDDDDDEGEEQQQNNDSEMMDVEDSDFYNFDADRCEKCFKRGQVWALYGDDDGMPRHYALVEMITPGGRFRAQIRWLDLQPDGGEGTPCGEFKVGRTVTVHSVNIFSHQVAYERVAREVYRIYPKKGSVWALHGGKDADSGRPKYEFVVFLSGYSDLYGASFGYLEKVEGFRSIFTRQDVGRDAVQTLHKGDMGKLSHQIPARRAPKGEGSTLPPTDCWELDPASLPSELLHDNQQK

SEQ ID NO: 202942 - protein, 92 aa, Oryza sativa
  Clone ID: PAT_MRT4530_98173C.1.pep
NGKDSMIHTQLTVPHNGNNFHILAKEPPGAKIDPNFHMPHTKNGLFLDLFAFLPQIKTRNEPILHQTCGGPPIGEFIKTNQIACAVGPNPTL

SEQ ID NO: 202943 - protein, 216 aa, Oryza sativa
  Clone ID: PAT_MRT4530_98174C.1.pep
FHFWSGLMKVKETFLNMGSWILNNGEQIRFWEDKWLVNLPFKDKYPSLYTIVRRKCSSIASVMNSVPLNVYFRRALVGQNLVSWHDLCASIVHIQLNHSSGCFKWNFNQNGMFTVRSMYLALINNGYIEKNKIIWKLKMLLKIEIFMWYLLKGVVLTKDNLARRNWNGCLRCCFCMKIKSIQHLFIDCHYAKFLWRAVQFSFGYLPSSITHIFDGW

SEQ ID NO: 202944 - protein, 148 aa, Oryza sativa
  Clone ID: PAT_MRT4530_98175C.1.pep
LPHHPPPPQTYTFRRGRAEDVDDNTGALARDPHDQGSKTTREDGRRRGDLGGRRDIRDDRRDDARHDLDGRHGDRDDRRDDARRRDRKGKYNNDHPDADRGRGWRRDEHDDEDRDNAGRDIARGRPRQWSTSPVFQSCRLPDSDGPWD

SEQ ID NO: 202945 - protein, 469 aa, Oryza sativa
  Clone ID: PAT_MRT4530_98176C.1.pep
MGVVGALLGPEAEALVRLRAAAWRLRREVAAATDDDEHWAFAYSMLHRVSRSFAIVIQQLGPDLRNAVCVFYLVLRALDTVEDDTSIPTEIKVPILQEFHRHIYNRDWHFSCGTKDCKILMDKFHYVLTAFLELGSGYQEAIEEITRRMGAGMAKFICKELLSVILACAPGHLHMNTSLLAKAWLQPNHLVCSIPKPTAMQIAFVSYCIYVGLCVVETVDDYDEYCHYVAGLVGIGLSRLFHAAGLEDLAPESLSNSMGLFLQKVNITRDYLEDINEIPKSRMFWPREIWSKYVDKLEDLKYENNSVKAVKCLNEMVTNGLIHTEDCLRYMSALKDITILRFCAIPQSSLLSSTETATYFICKQREFIFQHSCTLIGLTARIINETNSMADVYTAFYEFSSLLAEKIDDNDPNASLTRKRVNAIKETCKSSGLLKIRGYDLDRPKRNPAMIMMLLLLLVAIFLGALYRR

SEQ ID NO: 202946 - protein, 110 aa, Oryza sativa
  Clone ID: PAT_MRT4530_98177C.1.pep
MALPTLCKMFVGGIGPYTGDEDLRRHFQLFGYVASVHMPIDRHTGRHHGFAFIQFTCLEHLINALAYRHTIHGHTLGTRLIEPRLSRGVTRYTTVFGNHIYRIGHNCTFC

SEQ ID NO: 202947 - protein, 510 aa, Oryza sativa
  Clone ID: PAT_MRT4530_98178C.1.pep
MAAAGAMPGGLLLTFLLLAVVASGAYNGAGEPPVSRRSFPKGFIFGTASSSYQYEGGAAEGGRGPSIWDTFTHQHPEKIADRSNGDVASDSYHLYKEDVRLMKDMGMDAYRFSISWTRILPNGSLRGGVNKEGIKYYNNLINELLSKGVQPFITLFHWDSPQALEDKYNGFLSPNIINDFKDYAEICFKEFGDRVKNWITFNEPWTFCSNGYATGLFAPGRCSPWEKGNCSVGDSGREPYTACHHQLLAHAETVRLYKAKYQALQKGKIGITLVSHWFVPFSRSKSNDDAAKRAIDFMFGWFMDPLIRGDYPLSMRGLVGNRLPQFTKEQSKLVKGAFDFIGLNYYTANYADNLPPSNGLNNSYTTDSRANLTGVRNGIPIGPQAASPWLYVYPQGFRDLLLYVKENYGNPTVYITENGVDEFNNKTLPLQEALKDDARIEYYHKHLLSLLSAIRDGANVKGYFAWSLLDNFEWSNGYTVRFGINFVDYNDGRKRYPKNSAHWFKKFLLK

SEQ ID NO: 202948 - protein, 431 aa, Oryza sativa
  Clone ID: PAT_MRT4530_98179C.1.pep
MQYLNCLQRSTPCFLGSPKTASFAVNCGGPLTSGSDNLRYQSDEVNLGDASYYITGEPTWGVSTVGRFMDASNGGYTIRSSRQFQNTLDSEMFQNTRTSASSLRYYGIGLENGNYTVTLQFAEFGFEDTQSWKSLGKRVFDIYLQGERKEQNFDIRKAAGDKSYTVVKRSYKVPVTKNFVEIHLFWAGKGTCCIPTQDNYGPSISALSLIPADFTPTVSTSISPEGNNNTSKAGVSTSKAGVIVGVVVGVTILGLIALAAILIWRQNRRKRKLSLEQQELYSIVGRPNVISYGELRSATENFSSSNLLGEGGYGAVYKGKLTDGRVVAVKQLSQTSHQGKVQFAAEIQTISRVQHRNLVKLYGCCLESNNPLLVYEYMDNGSLDKALFGTGKLNIDWPARFGICLGIARGLAYLHEESSIRVVHRDIKASN

SEQ ID NO: 202949 - protein, 86 aa, Oryza sativa
  Clone ID: PAT_MRT4530_9817C.1.pep
MALPCRNARPCPSLHRRCRWRAARAPPQTPCPPPCRPRAVPAALGRAQPCPGCCLPFGWSFQEVKVDQDYIKNKNYPEQASHHPIP

SEQ ID NO: 202950 - protein, 318 aa, Oryza sativa
  Clone ID: PAT_MRT4530_98180C.1.pep
MTFQLYPLLSATENFSSSNRLGEGGYGTVYKGKLTDGRVVAVKQLSQTSHQGKKQFATEIETISRVQHRNLVKLYGCCLEGNNPLLVYEYMENGSLDKALFGTSNFSLIDWPARFGICLGIARGLAYLHEESSIRVVHRDIKASNVLLDAYLNPKISDFGLAKLYDDKKTHVSTKVAVLSSGYLAPEYAMRGRLTEKVDVFAFGVVLLETLAGRPNYDDALEEDKIYIFEWAWELYENNYPLGVVDPRLTEYDGEEALRAIRVALLCTQGSPHQRPSMSRVVTMLAGDVEVPEVVTKPSYINLRMETIQSLFNLLSLG

SEQ ID NO: 202951 - protein, 235 aa, Oryza sativa
  Clone ID: PAT_MRT4530_98181C.1.pep
MAAARRAAGLLPLLLSSPSRARLPHRQALALTPPLLRPHRLYSHSPKPSSSAAFSAFASASNGAPAGRARELHLYNTKSRRKELFQPRVPGGEVGMYVCGVTPYDDSHIGHARAYVAFDVLYRYLRYLDHKVRYVRNFTDIDDKIIARANQLGEDPFSLSKRYSDDFLSDMANLHCLPPSVEPRVSDHIDQIINMIKQAVKVPYFDYYYLERDDSSHTIKSIPDNGLVSFIGNAY

SEQ ID NO: 202952 - protein, 565 aa, Oryza sativa
  Clone ID: PAT_MRT4530_98182C.1.pep
MASPAVASPSRTPSRGPPAAAADTTAPSPASPPRRLASAPPAVDASSPESARSGELAATPDPSSPLLASRSEEYRLLFRLPPDEVLVQDFNCALQENILLQGHMYLFLHHICFYSNIFGYETKKTIPLQEVTDVRKAKTAAIFHNAIEIIAGTKRHFFGSFLSRDEAFRIIVEGWEQHVSDARLLLERQDAKSGNSSDENGYVLLEGAKETKQDDDSSPLDRSVNGTAVTSGSNDSGDSDVNISKRSSEVLENESEDKCTAATALNPFILGPFDDEAPNVPEPFALITESKFQVPVEVLFNMLLSDSSFGFLDDFHKKCGDKDEQGGLIRDVSFLHPIKIYLGAKFGSCQEVQKLRVYKNRHLMIQTSQQIGDAPYGDHFTVEGIWDVEQDSLDESSCYLRVYINVAFSKKTIFRGKIDQSTKDECRDVFGLWVKLGHDLLKQDSSCHSRGPSSSTNVDDPSGTTLSSENPLENTDPGSSSAPDEPVVTIIVLLLRSPKVYMVNQETSPSGFSYSKESIEWVQKRLNLLGEEMRMAESHLEMMQHEFAWLKSHLERLQRLRSSSS

SEQ ID NO: 202953 - protein, 92 aa, Oryza sativa
  Clone ID: PAT_MRT4530_98183C.1.pep
RVLPETVAKYMPLMPAKKQIDLASVLISPMPGIVKSVSVKVGQRVAEGQEVCVVEAMKMQNKLTAGRMGVIKYVGIKEGETVEDGKILIELE

SEQ ID NO: 202954 - protein, 102 aa, Oryza sativa
  unsure (1)..(102): unsure at all Xaa locations
  Clone ID: PAT_MRT4530_98184C.1.pep
MDPRRRRPDPIAVRRGSHRPPAGDERRRLETHVLAASRTFPGLLCRRLAHHRRRRGXAQIHDGREGERRAAVDASNGRGGPPRRPRRRSPGLTRLPRPRTVP

SEQ ID NO: 202955 - protein, 161 aa, Oryza sativa
  Clone ID: PAT_MRT4530_98185C.1.pep
QSRRIRRSPRRRRRTWRRRRRSWSGTPGTARAHPAASRRPPPSPTDAPARRRRRPPPPSPACTGTPTARRRRSGRRCSAMESRRRRTSACPETRRCTSIAAACTGSHNQAAIFLSWIPLLGRRRRRRRRAPWRRTSGTGRRTRRRLGDTWCSSRTPRRSNS

SEQ ID NO: 202956 - protein, 73 aa, Oryza sativa
  Clone ID: PAT_MRT4530_98186C.1.pep
LALQQIPLHYYYSLMTPQNTSLVVLIILQRGRFAVIVDESKLVPRLGCTGATPVEVDPFGCDHTLGLVPQGVD

SEQ ID NO: 202957 - protein, 386 aa, Oryza sativa
  Clone ID: PAT_MRT4530_98187C.1.pep
MGEVSLFITLLCTLMSAHYIAGSQVNYLKDNGLPLLHVDPSSAAIVNKSTKTQQPDEGAYYVFNAGYEMNSQYYYGIEVTTDVYGLSLDGEQNSGILVSIANKGDDQSSTNALVIGWHVYPRLNGDAHAHFFVRWTIDGYRKTGCYNLDCPGYVPEAGISIVPGVAIDTVSEPGGIKHIIIFKIFKDGAGDWLLHCGWDSEPYLIGRFPASLFTTLRNKANYMKVAGYAVARTTHLAPMGSGYLPNNPKAASFSNVQLIDQDGQTSKIPQDLPATQTFPSIYSVSPINFEVQSAICSLARLVANQASPRYGLAIQVVDGMVFNPSLNTNILATMSLFPNTVYGDIDSHYNQFAKMSYRPVLQNLYVLTCKLSELRKDAIPFNLYSN

SEQ ID NO: 202958 - protein, 47 aa, Oryza sativa
  Clone ID: PAT_MRT4530_98188C.1.pep
FFFFFSTQTVSIESKLTAQITWAKYRGTSCCSTSIAPNTNQTMFKIL

SEQ ID NO: 202959 - protein, 62 aa, Oryza sativa
  unsure (1)..(62): unsure at all Xaa locations
  Clone ID: PAT_MRT4530_98189C.1.pep
FFFFFFLGKKLPCVYVHQCSRMXLQHFYTSNKKSVVELIYVVVSKLQTSSVENIIHSLAAGG

SEQ ID NO: 202960 - protein, 1273 aa, Oryza sativa
  Clone ID: PAT_MRT4530_9818C.1.pep
MVVGPLLSMVKDKASSYLLEQYKVMEGMEEQHEILKRKLPAILDVIADAEEQAAKHREGVKAWLEALRKVAYQANDVFDEFKYEALRRKAKAKGHYKKLGSIVVIKLIPTHNRILFRYRMGNKLRMILNAIEVLIAEMNAFRFKFRPEPPMSSIKWRKTDSKISNLSMDIANKSRKKDKEEIVNRLLAQASNGDLTVIPIVGMGGMGKTTLAQLVYNDPEIQKHFQLLLWLCVSDNFDVDSLAKRIVEAAPKEMNKKNDNGGAKKLPQDELKEVVSGQRYLLILDDVWNRDASKWEALKYNLKHGGSGSSVLTTTRDQAVAQLMAPAQEVYDLKNLNESFIEEIIKRSAFNSEQERPPPELLEMVGDIAKKCSGSPLAATALGSTLRTKTTKKEWDAILSRSTICDEENGILPILKLSYNCLPSYMRQCFSFCAIFPKDHEIDVEMLIQLWMANGFIPEKQGECPEIIGKRIFSELVSRSFFQDVKGIPFEFHDIKCSKITCKIHDLMHDVAQSSMGKECATIATELSKSDDFPYSARHLFFSGVIFLKKVYPGIQTLICSSQEELIRSSREISKYSSLRALKMGGDSFLKPKYLHHLRYLDLSYSKIEALPEDISILYHLQTLNLSICDCLCQLPNGMKYMTALRHLYTHGCWRLKSMPPDLGHLTCLQTLTCFVAGSCSGCSDLGELRQLDLGGRLELRKLENVTKADAKAANLGKKEKLTELSLRWTGQKYKEAQSNNHKEVLEGLTPHEGLKVLSILHCGSSTCPTWMNKLRDMVKLVLDGCKNLEKLPPLWQLPALEVLCLEGLDGLNCLFNCDIYTSFTFCRLKELTLASMRNFETWWDTNEVKGEELIFPEVEKLIIKSCPRLTALPKASNVISELSGGVSTVCHSAFPALKEMELYGLDIFQKWEAVDGTPREEVTFPQLYKLDIRRCPELTTLPEAPKLRDLNIYEVNQQISLQAASRYITSLSSLHLHLSTDDTETAPVAKQQDSSELVIEDEKWNHKSPLELMDLTGCNLLFSYPSALALWTCFVQLLDLNIWEVDALVDWPEEVFQGLVSLRKLHILQCKNLTGLTQARGQSTLAPSELLPRLESLQIRRCYSFVEVPNLPTSLKLLQITDCHDLRSIIFNQQQDTTMLVLHLPPSIKKLDIVRCEKLQSLSGKLDAVRALNISYCGSLKSLESCLGELPSLQHLRLVNCPGLVSLPKGPQAYSSLTSLEIRYCSGINLLPPSLQQRLDDIENKELDACYEGNLQFLNRVRFSGKSFERGV

SEQ ID NO: 202961 - protein, 222 aa, Oryza sativa
  Clone ID: PAT_MRT4530_98190C.1.pep
MEDWVVLSDSDGDSVELHDGSDVGGSDSESGFAAFSGKLPSSSQLLLTLRCSTQPKRTRRTLPEVSPAIAGGEHENAEISDVAERNNDHVDSNIAAAEDTTFSGEEDLDDETNDDIECFDEEDGICENPDDEIFDDEEELDDDDESLDDDDIECYDVEDKICEENPDDEIFDDEEEIDCEEDLDDDDDDCESLDDDNIECFDAEDIICLETRTMKSSTNIAM

SEQ ID NO: 202962 - protein, 206 aa, Oryza sativa
  Clone ID: PAT_MRT4530_98191C.1.pep
MVSLSTWFRYAAHKFEYSISLSWKKYNVGQINSTQLTDAVWKNFFQGKLTYMHWNKGGEAMAPIESTTGGTLLVRKLVNLSPTQVFVGDVVLLKDPEKSDDLIVRRLAALEGYEMVSNDEKDEPFVLDKDQCWVLADNQSLKPKEARDSRLFGPVPMTDILGRVIYSLRTAVDHGPVENSRMAMNQDSPVLAVELDVEEMAKNNKV

SEQ ID NO: 202963 - protein, 673 aa, Oryza sativa
  Clone ID: PAT_MRT4530_98192C.1.pep
MEDWVVLSGSDGGDSVELHDGSDVGGSDTESSFAVVQVRGRAADTPAIAVEAVPSQPSPSPPGFFKTVSYGQAFSGIASEHVAASSHAPVLDAAEEDIAEVSPVIVGGEHENAEISDVVESNNDHVDSNIDAATEVTTFSGEEDLDDETDGDIECFDEEDGICEENPDDEIFDDEEEESDPEEEDIGSSDLETDSDEYIESTDEESDYEEEDTTDLESDSDEDTESTESSHDEDDLDDDDESLDDDGSECFDEEDKIGTENPDDESVDTGSSDEEESDDEEDSYSDEEIDDEEESDCDEEIDEEEEEEHGGNKYDAIDNESFGEEESCMEQSDAEEEWPEFTGVPVSYNDIDTDSDMEIDGGKYDDIDSESLYEEESVSDEQSDDEEEPEEFAGGGYDGIDYESLNGDDFEEYLQVLADGGIDNESFGEEESVLDDEVLDFFHGLNDEFLDFFYGDTLYDYETESSCDEECEHVCVCGRCMELIDGEEFYQLITGDEFDGTQLGEEIGGDASGADEEEPSDAGESDHDTAPDAGDGEAHGDSADMAGGNSAAAAAEPASTSSQFQQAMQQAAARNQAAAAMVRAADAIDSYMQAAAGGLAAQDVEALSQGATGLRAMAAAPSFAVGVDVSASNTAAAAFLPDTLALQDGVVSLAVFYLLFGVVYLLLRICALN

SEQ ID NO: 202964 - protein, 723 aa, Oryza sativa
  Clone ID: PAT_MRT4530_98193C.1.pep
MEDWVVLSDSDGDSVELHDGSDVRGRAAAVVGADTPAALPHTTIAVEAVPLQPSPSPPGFFKTVSYRQAFSGIASELVAASSHAPVLDAAEEDEEDITEVSPAIAGGEHENAEISDVAESNNDHVDSNIAAAEDTTFSGEEDLDDETDGDIECFDEDDGICEENPDDEIFDDDEEESDPEEDDTGSSDLETDSDEYTESTDEESDYEEEDTTDLESDSDEDTESTDEESDYEEEIDDEEIDDESVEEDINLDDELMGFASGLFGDDDTESSHDEEDLDDDDDESLDDDGSECFDEEDIICAENLDDEIFDDEYVDTGSSDEEESDDEEDSYSDEEIDDEEESDCDEEIDEEEEEEHGGNKYDAIDNESFGEEESVCMEQSYAEEEWPEFTGVPVSYDDIDTDSDMEIDGGKYDDIDSESLYEEESVSDEQSDDEEEPEEFAGGGYDDIDYESLNGDDFEEYLQVLADGGIDNENFGEEESVLDDEVMDFFHGLSDEFLDFFYGDTLYDDETESSSDEECEHVCVCGRCMELIDGEEFYQLTGDEFDATQLGEEIGGDASGVDGEEPSDAGESDHDTAPDAGDGEAHGNSADMAGENSAAATAEPASTPSQFRQAMQQAAARDQAAEAMVRAADVIDSYMRAAAGGLAAHDVEALSQGATSLRAMAAAPSFAVGVDVSASNAAAATAAAFLPDTLARQDGVVSLAVFYLLFGVVYLLLRICALN

SEQ ID NO: 202965 - protein, 244 aa, Oryza sativa
  Clone ID: PAT_MRT4530_98194C.1.pep
MPIARGRPPVFKAPSANEAERERVDVVSIMGTAPLSLAGGPWSTAIGPARGAPGETAHSRGRLFLCDSPICEGGPSTGAAQQVARGVKMAQRAEPTQGERTAHQMEMAEKSQRLSRWRRPKERWRLREWGSCFSKPGLDSHGIRCGTRHNGRCHMSARHCLLMGKTLVKRRKWKNLPFLAPGKPPARANLEHREAECTLNLHKALRGCSCWAFGQFGLHVSNLAFMSCLQPAGCWVAEVGYKTF

SEQ ID NO: 202966 - protein, 61 aa, Oryza sativa
  Clone ID: PAT_MRT4530_98195C.1.pep
MDGLELGGRRRRRRLKLLVVDGGRFGGLRSSVAVDFTMPLSLISARVREEAPAPAAAARAA

SEQ ID NO: 202967 - protein, 89 aa, Oryza sativa
  Clone ID: PAT_MRT4530_98196C.1.pep
MYKFHEWFMEMSAKGKEMFRARIRNPDFLQGEEVLCIHFKNGLYDTGFIDPQKINTEMIDKYEKDIEDNLVHLLTQQHFKTFILLSNNT

SEQ ID NO: 202968 - protein, 94 aa, Oryza sativa
  Clone ID: PAT_MRT4530_98197C.1.pep
KCTGYYSEEQDDHAMAESSRNEWNDDYQSVNGESTNGATRQPDFPKLRSIVLTDVKKLRSICTPRDFPCLETLRVEDCPNLRRIPCAALTTVVN

SEQ ID NO: 202969 - protein, 143 aa, Oryza sativa
  Clone ID: PAT_MRT4530_98198C.1.pep
MAAARSRAPWLDLAVVRAGWAWGGTEVDAARGGAVGEGRRLSRCVDASSSFLGALSSRPLPLVGLPGENPVLVFPKTSTDGGSSVIVALLPGDVVKEVPSPNLLSNSWCRLTLDSSSCDSALAFVLSVCCGGGGIFSFLATTF

SEQ ID NO: 202970 - protein, 110 aa, Oryza sativa
  Clone ID: PAT_MRT4530_98199C.1.pep
MAPAPSAALGSTHLRIPYLPGGIGRARNLAIDPEDGNEDRQGEWPVAVDGGGGGVGILASDYSRWAATGRGRGVGVWAIGLSRQTLAVTPPGWRVASGWRPPHGGVQRGG

SEQ ID NO: 202971 - protein, 74 aa, Oryza sativa
  Clone ID: PAT_MRT4530_9819C.1.pep
ANSLITLEPSELHVNTTLQPGVQVTHQDVFIHISHQDFGVWSGAARQQMGWISSYVVWSAVVSRIRRVCSGWLL

SEQ ID NO: 202972 - protein, 231 aa, Oryza sativa
  Clone ID: PAT_MRT4530_981C.1.pep
MGRRRRQRAASDQRRECAPEAPQPAVTSPSTEVATVAPPTDSGWITTAVERMMSFFGGGHARRSSEVAPTPAHGKGTTTGRTGLAHGKAGGKGATTNRTGNQAWIHLPQKKHTPPAPPQAPPQPQAQRQHRVVNGEEVPFEVEDQYIHYCRESRTIVHKTICHICFFQEQNFTGSNRVSGSQMLLHCHMKHSKFPLVPCEAEDCRIYVTTARDLQLHNYFCHTLPAGWWEE

SEQ ID NO: 202973 - protein, 188 aa, Oryza sativa
  unsure (1)..(188): unsure at all Xaa locations
  Clone ID: PAT_MRT4530_98200C.1.pep
MGIDLVAGGRNKKTKRTAPRSEDVYLKLIVKLYRFLVRRTKSHFNAVILKRLFMSKTNRPPLSMRRLVRFMEGKGDQIAVIVGTVTDDKRIYEVPAMKVAALRFTETARARIINAGGECLTFDQLALRAPLGQNTVXLLRGPKNAREAVKHFGPAPGVPHSNTKPYVRSKGRKFEKARGRRNSKGFKV

SEQ ID NO: 202974 - protein, 86 aa, Oryza sativa
  Clone ID: PAT_MRT4530_98201C.1.pep
GHCGHCEPCDVHCVQGLAWFSMFMLYDPYLSSLARLSGSYVRFVRPVLLAAHSSLFILLVYLVFCLLLILMYVCLVWLAFPLLFML

SEQ ID NO: 202975 - protein, 195 aa, Oryza sativa
  Clone ID: PAT_MRT4530_98202C.1.pep
MGIDLVAGGRNKKTKRTAPRSEDVYLKLIVKLYRFLVRRTKSHFNAVILKRLFMSKTNRPPLSMRRLVRFMEGKVPDRHAISGDQIAVIVGTVTDDKRIYEVPAMKVAALRFTETARARIINAGGECLTFDQLALRAPLGQNTVLLRGPKNAREAVKHFGPAPGVPHSNTKPYVRSKGRKFEKARGRRNSKGFKV

SEQ ID NO: 202976 - protein, 121 aa, Oryza sativa
  Clone ID: PAT_MRT4530_98203C.1.pep
PPNPNFTFGGKNLKDFAPAHIPAKKCPSPNGKFCMVIKIAPFSKLVQILCGMFPHIPLPTKCADGKPPVPIFRVSKEKIKSLGLEMTPPPPSIKGALESFKKKRFVSFFSTNLLNNKAPSP

SEQ ID NO: 202977 - protein, 69 aa, Oryza sativa
  Clone ID: PAT_MRT4530_98204C.1.pep
FLLLKCPFVALCVDWLYLFFGYLDLSLPLLPPFFCPKMFLPPSGSGPRGFWASLTEYQKPLSIILPLLV

SEQ ID NO: 202978 - protein, 446 aa, Oryza sativa
  Clone ID: PAT_MRT4530_98205C.1.pep
MGKTATEGDKEAGRGGGGGGGARRPVVLVTGCSEGGIGHAMARAFAAAGCAVVATARSRASMRGLEGDPRYLLLELDVRSDESARAAVADAVRELGRVDVLVNNAGVHLVAPLAEVPMEEFQQVFDTNVYGAMRLIHAVIPQMIEREQGTIVNVGSITALAPGPWAGVYSAPKAALPAPPSATGRESPPTTTTTMALASTSATASAAVLKTPFLGAKRALANAVGVAGAKPAPRRALVVSAKKSWIPAFKSDAEFINPPWLDGSLPGDFGFDPLGLGKDPAFLKWYREAELIHGRWAMAAVLGIFVGQAWSGVPWFEAGAQPEAIAPFSFGSLLGTQLLLMGWVESKRWVDFFNPDSQAVEWATPWSRTAENFSNATGEQGYPGGKFFDPLGLGGETRDGVYIPDTDKLDRLKLAEIKHARLAMLAMLIFYFEAGQGKTPLGALGL

SEQ ID NO: 202979 - protein, 73 aa, Oryza sativa
  unsure (1)..(73): unsure at all Xaa locations
  Clone ID: PAT_MRT4530_98206C.1.pep
GWIPWDGXYALSTFYNAEYNSSGAGADTTRRVTWPGYPVLNSTADAGNFTVGNMVLGDLWLPQTGVPFTSGLN

SEQ ID NO: 202980 - protein, 311 aa, Oryza sativa
  Clone ID: PAT_MRT4530_98207C.1.pep
MAAVLGIFVGMSACAGLVCWCAVLCCPAAPWLLGDWACSEWLWIWARDWLLCAVLLAGLWLLPVVCHCVRVCCCLHARCLLWGPCGTCCWSSTCCSDESARAAVADAVRELGRVDVLVNNAGVHLVAPLAEVPMEEFQQVFDTNVYGAMRLIHAVIPQMIEREQGTIVNVGSITALAPGPWAGVYSASKAALHALSDTLRLELKSFGINVMIVAPGGTKSNLGSNSTSKYVQIRDWKYYKKFEESLRARTDASQGPGSTPAEDLAKRVVALVLKKNPPAWFAYGQFSAILSLLYYAPLWFRDYFYKIVMKC

SEQ ID NO: 202981 - protein, 48 aa, Oryza sativa
  Clone ID: PAT_MRT4530_98208C.1.pep
KLASQRTKLSPGGSSKTKAPGKAWYKTMIFASGHPKFENFSKGLGVPQ

SEQ ID NO: 202982 - protein, 100 aa, Oryza sativa
  Clone ID: PAT_MRT4530_98209C.1.pep
SSHYGSIIFSAPCKIYPKTYNRGTMFKSRSFSQYCQQRYGQVDNSFRSWIRNDAHKIYPLILRAENLFNSVLGSNNRSWCLLHRKFSISIGLPASRNIDI

SEQ ID NO: 202983 - protein, 549 aa, Oryza sativa
  unsure (1)..(549): unsure at all Xaa locations
  Clone ID: PAT_MRT4530_9820C.1.pep
RGGEDEDEDGAAAARLTNADDGRERLDGGTNATTTGNDERTTTTTTTGTGEEATRTAGSGCTGTRTAWNTPQRXMXRRRRRETMSRATDGTSTTRTIGDDDDGPRRGLDGGETMPRTTLPVTVPREGTAAPADARAWRKGQPEEMPPRRKEKPARAPVFRRSSGEEDVMPGMRAASWSRGRWWRRXPALRQGVRGGWRRXGAEEKEGRRRERASGGLRGKRRAGRGGGGGGDAGGGDGATGRRSGEEGEAAACLRRRRLVFPPARLAFMPPLLGVYVFTDRLPRPPPTGVSACSLVYYAAVVGRRPACLRRRRLVFPPARLAFMPPLLGVYVFTGRLAFAAADWCFRLHGWPIMPPLLGVYVFTDRPPHPPPTGISAYTAGLLCCRCWASTTSLSACLHRRRLVTSPIRLPPSLPAGIELAPSLSLSAVAAELRSAAVVAPDHLPPRRRLLRLRRILADLVHLSVSVADRRSTVDPNHPSRAAAFLRSGRRFRRRRRPGVSRGPPLRFPLSLPSLGRRSAVPMAAAGDHRGAGVPPPAGRTGVAASGHA

SEQ ID NO: 202984 - protein, 134 aa, Oryza sativa
  Clone ID: PAT_MRT4530_98210C.1.pep
MYLCLSELRVVVASTPDAAREVLKTHDAAMSTAVSANFGDGADDRPGAARHHGGALHAVRTAATSAVRDVKLLSAKLYDMVGRAIEQHQEHADDGGTHGNRECLLSTLLRIPKEGDNNDDGGDLTMANVKAVIL

SEQ ID NO: 202985 - protein, 64 aa, Oryza sativa
  Clone ID: PAT_MRT4530_98211C.1.pep
KATKFIWGGGNKKKVMAPPTWISTINLSPPQYSKNRGTFHQVIPLKMHYPPKKKRVTPHKKNLA

SEQ ID NO: 202986 - protein, 82 aa, Oryza sativa
  Clone ID: PAT_MRT4530_98212C.1.pep
TRVEGHPQRPGRKNRGDPRRRRRCFWPQKRRALPGGTLSPRKRLETTTPSSETRPLISTTTSTPPDGTVTLQAWREWHPEGA

SEQ ID NO: 202987 - protein, 184 aa, Oryza sativa
  Clone ID: PAT_MRT4530_98213C.1.pep
MPLKNSGHFLNQRSHKPSLLPTPEEEAALAASATGGPSFVLHTSIAPNNPSSQITYGLTIHHAVTESEKTVASSAAIEPKKMSHAPIVDAHIEDTQIRDVVPVRPYATISTPPLPPMPRPRFCMEEDRLPLLSSAPAPSPTTSILATPRKCNNQPCVTALEGDWEEMSKRSNGKTSPSEFPSVR

SEQ ID NO: 202988 - protein, 76 aa, Oryza sativa
  Clone ID: PAT_MRT4530_98214C.1.pep
PGGGTVSQGRGQAEGHLQPKKLPAGYDGSPSDQELREVVNSLKLALFRAWQVIGMLLWADATMEINNADVIMLMEI

SEQ ID NO: 202989 - protein, 1037 aa, Oryza sativa
  unsure (1)..(1037): unsure at all Xaa locations
  Clone ID: PAT_MRT4530_98215C.1.pep
MATITIVRITIGEEKKICRFLKVKAAHVKAKGRNDCGSWRKSGSRVDPPMVLPQQNAGLMEADGSASFIRKLQLSVSDGLPHAAPVPELSTQEHELVKSVFQVLQGFDTVLLYWDKTAPGYCEKAGVYVSHLSQTSLRAVLKPFLFAATWLKQVELFVGRRLRKAALKEEEQLFLSVDRTITLLGLTDSMSSLCSGAEHLYQVVQGAVPDAFWNSGAQIASSEVAVHAVNHLFKKLNEVCLVEDGEGEPYHMLLVIFAETLLPYLQCLDSWLYDGILDDPYEEMFFYANKAVTIDQPAFWEMSYMLRVRGPRTDSSSTLADNESIRKKELINQEATAAAALLKSSNQGCADILCPVFLKDIARAILSAGKSFQLVQHVQETHRIQTREVVHEFNVDQHGNYISQQKFRPDTSSIRIQDKREDIIEESAGQFGNNACKMGFLTLSESFLICLSGLLENGDHVDDYLRKLCADHAPVNKSIVHSKSNVQETEEVCGENSSEKTWLKLLRDATSGRDYDGMEKTLAKNAVMRDPTFVPGDHQDVSSTAVESHFNLSCYENPGITACQEILERNKNSWSDLNISKSFHLPPLNDENIRKSIFGDRDSSGTSPGDTLSTTYFPRLDGTDYKFGFQFDDSEYIRQEDDRRTLESLYTFPTLLPCVNENVPLSEILPLQKDSTLASRALKFIQSMSLRDPLQPVGIIQECLSKCIKRQVDHIGKQILSKLMGDWRLMDELFVLRAIYLLGSGDMLQQFLVTIFDKLDKGNPWDDDFELNTLLQESIRNSADKMLLTAPDSLVVSLAKHDTRNDEETTSISRKGRAQGFGIEALDVLNFTYKVSWPLDLIVNTEALKKYNQVMAFLLKVKRAKFILDKTRKWMWKGGGSTTHNFKQHLIVEQKLLHFVDAFHQYVMDRVYHSAWTELCDGMASATTLDEVMEVHEAYLSSIQRQCFVASDKLWALIASRVKTILGLALDFHNIEQTLGTGWNCSSRQXQDILSFKLNVGHFPHLADLVTRINYNHYYMSDSGSFSAIPGSRPRYR

SEQ ID NO: 202990 - protein, 59 aa, Oryza sativa
  Clone ID: PAT_MRT4530_98216C.1.pep
RHVTAAEHLRRAPRHWPSPGGADRGPGRRGDHVTAEAESGYVAGKGAPRGWALTSFPTP

SEQ ID NO: 202991 - protein, 1140 aa, Oryza sativa
  unsure (1)..(1140): unsure at all Xaa locations
  Clone ID: PAT_MRT4530_98217C.1.pep
MATITIVRITIGEEKKICRFLKVKAAHVKAKGRNDCGSWRKSGSRVDPPMVLPQQNAGLMEADGSASFIRKLQLSVSDGLPHAAPVPELSTQEHELVKSVFQVLQGFDTVLLYWDKTAPGYWEKARVYVSHLSQTSLRAVLKPFLFAATCLKQVELFVGRRLRKAALKEEEQLFLSVDRTITLLGLTDSMSRXVLEISAPLCQVVQGAVPDAFWNSGAQIASSEVAVHAVNHLFKKLNEVCLVEDGEGEPYHMLLVIFAETLLPYLQCLDSWLYDGILDDPYEEMFFYANKAVTIDQPAFWEMSYMLRVRGPRTDSSSTLADNESIRKKELINQEATAAAALLKSSNQGCADILCPVFLKDIARAILSAGKSFQLVQHVQETHRIQTREVIHEFNIDQHGNYISQQKFRPDTSSIRIQDKREDIIEESAGQFGNNACKMDFLTLSESFLICLSGLLENGDHVDDYLRKLCADHAPVNKSIVHSKSNVQETEEVCGENSSEKTWLKLLRDATSGRDYDGMEKTLAKNAVMRDPTFVPGDHQDVSSTEVESYFNLSCYENPGITACQEMLERNKNSWSDLNISKSFHLPPLNDENIRKSIFGDRDSSGTIPGDTLSTTYFPRLDGTDYKFGFQFDDSEYIRQEDDRRTLEALYTFPTLLPCVNENVPLSEILPLQKDSTLASRALKFIQSMSLRDPLQPVGIIQECLSKCIKRQVDHIGKQILSKLMGDWRLMDELFVLRAIYLLGSGDMLQQFLVTIFDKLDKGNPWDDDFELNTLLQESIRNSADKMLLTAPDSLVVSLAKHDTRNDEETTSISRKGRAQGFGIEALDVLNFTYKVSWPLDLIVNTEALKKYNQVMAFLLKVKRAKFILDETRKWMWKGGGSTMHNFKQHLIVEQKLLHFVDAFHQYVMDRVYHSAWTELCDGMASATTLDEVMEVHEAYLSSIQRQCFVASDKLWALIASRVKTILGLALDFHNIEQTLGTGGTAPAVKARCEMEVDRIEKQFDECVVFLLRILSFKLNVGHFPHLADLVTRINYNHYYMSDSGSFSAIPGSRPRSRYFLMERSKSSFFLFVGPVARGHPECMVTGRASVESDVYSFGVALLELACGRCLVMTRPDGSAVHLAQRVRELHNTLSFIRVL

SEQ ID NO: 202992 - protein, 288 aa, Oryza sativa
  Clone ID: PAT_MRT4530_98218C.1.pep
MQINIVRTPRSSPIAPCAPIDPESSFPIVESNLQSSGAELYVVDEDNSVSSFVDRRTPESIREIDLLPDDAVADLRTIASRMAASRLSAPPSVGSTSSGSASATNSASSERPSRPRYAAGSAQPMHSQWHGSAVTSQGRRCEKKEEVGKRDEMDEKHNDSDMVRSWRPRAALSATSWLSHSSCTFSLRRAPHASIALTRTWSRRQLWISALVSVSDDDDDAAAGPRREEEGLTAPPPKPPSPSTTSSSVLFLPLLVIVSASSIPADSNRGVQQDDDSSSRAGSSASLR

SEQ ID NO: 202993 - protein, 112 aa, Oryza sativa
  Clone ID: PAT_MRT4530_98219C.1.pep
PGFPMVGPGWVFYVREGSSLFCIPYPKGWVFVPGEFLPEFCCSLNRRGIYLCRGRGLLEKPVLLFFKPRVRDSPRGNFNRAAFFFPFFFVQGLKGTCGSSPHIEKNPTCLEC

SEQ ID NO: 202994 - protein, 689 aa, Oryza sativa
  Clone ID: PAT_MRT4530_9821C.1.pep
MVVGPLLSMVKDKASSYLLEQYKVMEGMEEQHEILKRKLPAILDVIADAEEQAAKHREGVKAWLEALRKVAYQANDVFDEFKYEALRRKAKGHYKKLGSMDVIKLIPTHNRFAFRRRMGDKLIKIVNEMEVLIAEMNAFRSRSEDKQKIINTLLAQVSNRDLTVLPIVGMGGMGKTTLVQLIYNDPEIQKHFQLLLWVCVSDKFDVDLLAKGIVEAARKEKNENVMAKNSPQDALKEVLSGQRYLLVLDDVWNREASKWELLKSYLQHGGSGSSVLTTTRDQAVAQVMAPAQKAYDLKRLNESFIEEIIKTSAFSSEQERPPELLKMVGDIAKRCSGSPLAATALGSTLRTKTTEKEWESVLSRSMICDEENGILPILKLSYNCLPSYMRQCFAFCAIFPKDYEIDVEMLIQLWMANGFIPEQQGECPEIIGKRIFSELVSRSFFEDVKGIPFEFHHIKDSKITCKIHDLMHDVAQSSMGKECAAIATKLSKSEDFPSSARHLFLSGYRAEAILNTSLEKGHPGIQTLICSSQKEETFICDRSVNEDLQNLSKYRSVRALKIWGRSFLKPKYLHHLRYLDLSESKIKALPEDISILYHLQTLNLCRCYCLRGLPKGMSDLGELRQLDLGGQLELSQLENVTKADAKAANLRKKKKLTKLSLDWSPNHSKEAQNNHKEVLEGLTPNEGLK

SEQ ID NO: 202995 - protein, 249 aa, Oryza sativa
  Clone ID: PAT_MRT4530_98220C.1.pep
SCYWSVRRGDDELDQTYHLLYRPRAIWGRRPRPNGGRRRPRPIQGLFRVSHPAVNPTAEPIGRQFLEQLDYPLPTITGSALLDETNLILHDFYKNISDIRSQIYNQQALWEEAEELVCISKKIFDSTNLDKKLLYPFPSWFNSRETRKKNYLDLTSWVSLLETYANERSASPEADGEAYDVGLLDDKTGDASADLDYEKSACSGETSDAAFDEESASPGDATKEADIDEPIAILGTPMVARSVEWRPMA

SEQ ID NO: 202996 - protein, 583 aa, Oryza sativa
  Clone ID: PAT_MRT4530_98221C.1.pep
MAAPAPTASPPPPPAMSGLLSFASSRPYPPLPAPRPAAAAPRPRLRIAGSAAAAPNAVSHRASSSFSSGDRLRSLVRRGELDEALRLVGSARRPDAGTCAALIKKLSASGRTAEARRVLAACGPDVMAYNAMVAGYCGAGQLDAARRLVAEMPVEPDAYTYNTLIRGLCGRGRTANALAVLDEMLRRRCVPDVVTYTILLEATCKRSGYKQAMKLLDEMRDKGCTPDIVTYNVVVNGICQEGRVDDAIEFLKNLPSYGCEPNTVSYNIVLKGLCTAERWEDAEELMGEMGQKGCPPNVVTFNMLISFLCRKGLVEPALEVLEQIPKYGCTPNSLSYNPLLHAFCKQKKMDKAMAFLDLMVSRGCYPDIVSYNTLLTALCRSGEVDVAVELLHQLKDKGCAPVLISYNTVIDGLTKAGKTKEALELLNEMVSKGLQPDIITYSTIAAGLCREDRIEDAIRAFGKVQDMGIRPNTVLYNAIILGLCKRRETHSAIDLFAYMIGNGCMPNESTYTILIEGLAYEGLIKEARDLLDELCSRAGEEILLDVHLIDVAFLTTFLPCSNANGGPFLRLPPEGSPVYDALL

SEQ ID NO: 202997 - protein, 57 aa, Oryza sativa
  unsure (1)..(57): unsure at all Xaa locations
  Clone ID: PAT_MRT4530_98222C.1.pep
VVRLYFTRVKLGSPPKEYFVQIETGXSEILXGVPCTPWHPGGPSSIGLNINWEFLHP

SEQ ID NO: 202998 - protein, 543 aa, Oryza sativa
  Clone ID: PAT_MRT4530_98223C.1.pep
MAWRESLEVTNETHRHSIEWNTNSTALDNKASLLQEVKCASCCSYRDETERLIEIMRSRTPDHFNEYQRVPRSSTKGFEAIPFSDRWSTPAKEIDVRSPCGTEVFVPSNVLDVASSPIELAKAYMEAQTSASVQESQKRKFRALSHGVEVENSSSKVFPKIATDSPVCWPGSVVRNYPNYLTPQSNKGRTLPPTSSRTTYIGSVFPRSNKYTGSRDAYNNSSGKPQFSSPFPVGSKAIFEDKTAPLGAVLGAQPSTTYSKEAYGDTVGATTPLFAKKCSASKKNDGSALQGHHGEGTTESGSSLGFVSMVDNMPHSKSAALSVHPKSSKTAHKILQHLERTIPSPTAKPLELRWTSAKRTTSSVVTNIQHNGPATDSHRHSSINDSGSAQQEISDANKVLAPPSSSNAVESSPKIENSGTKSMPSSQHTSESDSATTSAAQVLDKSTGNGLAFTFPVPKTSMSLPEPPPTPTLSQPPSIPSADGADIPKFTFGSSSTTGKLVFSFDLPSSSHSAEEAAPTFKFGSDTKRELSFDVAGKDAVCF

SEQ ID NO: 202999 - protein, 991 aa, Oryza sativa
  Clone ID: PAT_MRT4530_98224C.1.pep
MRRLPPLAPSATSSAAAAPSTSTPDVVAELGRILSTRRWNKGRAYKRLAPSVTAAHVADLFRADSTAPEPATALAFFEWLARRDGFRHTADSHAALLHLLSRRRAPAQYERLVVSMLNCSDTAEDMRVSADAIQAIRRTGSARLALSPKCYNFALRSLARFDMTEYMGRVYSQLVQDGLLPDTVTYNTMIKSYCKEGDLTTAHRYFRLLLEGGLEPETFTCNALVLGYCRTGELRKACWLFLMMPLMGCQRNEYSYTILIQGLCDAKCVRKALVLFLMMKRDGCSPNVRAFTFLISGLCKSGRVGDARLLFDAMPQNGVVPSVMTYNAMIVGYSKLGRMNDALKIKELMEKNGCHPDDWTYNTLIYGLCDQKTEEAEELLNNAVKEGFTPTVVTFTNLINGYCMAEKFDDALRMKNKMMSSKCKLDLQVFGKLINSLIKKDRLKEAKELLNEISANGLVPNVITYTSIIDGYCKSGKVDIALEVLKMMERDGCQPNAWTYNSLMYGLVKDKKLHKAMALLTKMQKDGIIPNVITYTTLLQGQCDEHDFDNAFRLFEMMEQNGLKPDEHAYAVLTDALCKAGRAEEAYSFIVRKGVALTKVYYTTLIDGFSKAGNTDFAATLIERMIDEGCTPDSYTYSVLLHALCKQKRLNEALPILDQMSLRGIKCTIFAYTILIDEMLREGKHDHAKRMYNEMTSSGHKPSATTYTVFINSYCKEGRLEDAEDLILKMEREGVAPDVVTYNILIDGCGHMGYIDRAFSTLKRMVGASCEPNYWTYCLLLKHLLKGNLAYVRSVDTSGMWNLIELDITWQLLERMVKHGLNPTVTTYSSLIAGFCKAGRLEEACLLLDHMCGKGLSPNEDIYTLLIKCCCDTKFFEKALSFVSIMSECGFQPQLESYRLLVVGLCNEGDFEKVKSLFCDLLELGYNHDEVAWKILNDGLLKAGYVDICFQMLSIMEKRYCCISSQTYALVTNKMHEVSSSLVSEVREEAR

SEQ ID NO: 203000 - protein, 62 aa, Oryza sativa
  Clone ID: PAT_MRT4530_98225C.1.pep
AGQFKANQSFNPSSPRAAPQSGKPNQDPNQDAPNRRLGLLSRGLGWLEKSKGKSSSTETPEG

SEQ ID NO: 203001 - protein, 47 aa, Oryza sativa
  Clone ID: PAT_MRT4530_98226C.1.pep
ELWVKSKETRARTAPINATVWRVSVSGYYPGNSMLRVIAGSSPCLAN

SEQ ID NO: 203002 - protein, 136 aa, Oryza sativa
  unsure (1)..(136): unsure at all Xaa locations
  Clone ID: PAT_MRT4530_98227C.1.pep
GGLDLLSRLRRREGAHVGAPREGAAAAEEEGAPASRALGRWWRGGVFAVESHQQPRASYAWKELXSLGGRMLFVTRGCSRSYEANKYPGCRRRSRGAAMPXWPCRDSGKWLAAAGDLDKFLPEQGPVKYSPPAWFL

SEQ ID NO: 203003 - protein, 1821 aa, Oryza sativa
  Clone ID: PAT_MRT4530_98228C.1.pep
MEEVEVGLLEGGIGWLVQTILENLDTDKLGEWIRQVGLTDDTEKLRSEIERVEVVTAAVKGRAIGNRSLARSLSRLRELLYDADDAIDELDYYRLQQQVQGDAWQGGTGSLDEPEAEQAERPSINAAIAISSGSKKRSKAWGHFDITEEENGKPVKARCIHCHTVVKCGSEKGTSVLHNHLKSGSCNKKREATDQQPNPSSSTADTAANSTLVELGGSGSDIRKKMRINGESTHNDAPYAHPWKKAECSTRIQQITRELQDARGAVSEILKLHGPCSVGNSNHRTSTTTTLCRRTSSLNPHKIYGRDAEKNTIMKIITDDSYDGVTVVPIVGIGGVGKTALAQLVYNEPTVKRDFERIWVWVSDNYDELRITMEILDFVSQERHEESPCRKEIRKGVSSFAKLQEILNGYMDIQSKKFLLVLDDVWDSMDDYRWNILLDPLKSNHPKGNMILVTTRLLSLAQRIGTVKPIELGALSKEDFWLYFKTCTFGDENYKAHPSLNIIGQKIADKLKGNPLAAKATALLLREKLTVDHWSNILMNEDWKSLHFSRGIMPALKLSYDQLPYHLQQCLLYCSIFPSSYRFVSKELICIWISQGFVHCNSSSKRLEEIGWDYLTDLVNSGFFQKVDHTHYIMCGLMHDFARMVSRTEYATIDNLQSNKILPTIRHLSILNNSAHYEDPSNDKVEGRIRNAVKAMKHLRTLVLIGKHSSLFFQSFKDVVQKGHHLRLLQISETCTYVDPLLCNLVNPAHIRYMKLHKRALPQSFSKFYHLQVLDVGSKSDLIIPNGVDDLVSLQHLVAAEKACSSITSISKMTSLQELHNFGVQNSSGWEIAQLQSMNQLVQLGVSQLENVTTRAEACGAKLRDKQNLEKLRLSWTNLHKLGHLGTNVPWDERENARAVLEGLEPHTNLKHLEIYSYNGATPPTWLATSLTSLQTLRLECCGQWKMIPSLERLPFLKKMKLESMQKIIEMTVPSLEELMLIDMPNLERCSCTSMRDLNCSLRVLKVKKCPVLKVFPLFEDCQKFEIERKSWLSHLSKLTIHDCPHLHVHNPLPPSTIVLELSIAKVSTLPTLKGSSNGTLTIWLPNDDDVPDKLITLDDNIMSFHNLSFLTGLEIYGFQNPTSISFHGLRQLRCLKTLKIYDCPKLLPSNVPSELTGEYMSGENHSALPSLVRLHIEKCGIMRKWLSLLLQHVQALQELSLDNCKQITGLSLGQEENNQPNLMSAMEDPSLGYPGEDKLMRLPLNLLSSLKKVSITLCNDITFYGSKEDFAGFTSLEELVISRCLKLVSFLAHNDGNDEQSNGRWLLPLSLGKLEIKHVDSLKTLQLCFPGNLTRLKTLVVLGNQSLTSLQLHSCTALQELIIQRCESLNSLEGLQLLGNLRGLLAHRCLSGHGEDGRCILPQSLEKLYIWEYSQERLQLCFPGNLTRQKILGVLGSQSLTSLQLHSCTALQELMIRSCESLNSLEGLQWLGNLRVLRAHRCLSGYGEYGRCTLPQSLEELYIHEYSQETLQPCFSGNLTLLRKLQVKGNSNLVSLQLHSCTSLQELIIESCKSINSLEGLQSLGNLRLLRAFRCLSGYGEYGRCILPQSLEELFISEYSLETLQPCFLTNLTCLKQLEVSGTTSLKSLELQSCTALEHLKIQGCASLATLEGLQFLHALRHMEVFRCPGLPPYLGSSSEQGYELCPRLERLDIDDPSILTTSFCKHLTSLQRLELNYRGSEVARLTDEQERALQLLLSLQELRFKSCYDLVDLPAGLHSLPSLKRLEIWWCRSIARLPEMGLPPSLEELVIVDCSDELAHQCRTLASKLNVKINGEYVN

SEQ ID NO: 203004 - protein, 251 aa, Oryza sativa
  Clone ID: PAT_MRT4530_98229C.1.pep
MAAAELSIKLVIDTKAHKVCFAEAGSDFVEFLSSLLCLPVSNIINLLTKEHMVGSIANVFDSVEKLDADHVISNESKEPYLKPMVAPGALCPLQQLIDAQLDTDTSFFTCEGKLNHYHGIRVACGYFTVMKGSICPKCGYAMEKAMAHVKATGFVVGTARYTVKDDLSIVPASSVSTISLLAQCGVKDLSTLQERTVKIGKEEALEILLASLRTKTVLTDVFLLKKKFYQASHLRNWKVPYKLQTFIVSME

SEQ ID NO: 203005 - protein, 77 aa, Oryza sativa
  unsure (1)..(77): unsure at all Xaa locations
  Clone ID: PAT_MRT4530_9822C.1.pep
VSMRRLGDTIINRRYLHXKWVLLLVAFWVGWCISDRAMSTPYHLISYQNVCKENVCECGVPKCHASKNEKRKIIWGQ

SEQ ID NO: 203006 - protein, 40 aa, Oryza sativa
  unsure (1)..(40): unsure at all Xaa locations
  Clone ID: PAT_MRT4530_98230C.1.pep
REVGKEEALEXLLASLRTKTVLTDVFLLKKKVSCKREAAT

SEQ ID NO: 203007 - protein, 49 aa, Oryza sativa
  Clone ID: PAT_MRT4530_98231C.1.pep
SLSTCGLGSAIAEIKTRRVSTSCSGIRGTLTLHPPVRERVGGRVGDRVG

SEQ ID NO: 203008 - protein, 116 aa, Oryza sativa
  unsure (1)..(116): unsure at all Xaa locations
  Clone ID: PAT_MRT4530_98232C.1.pep
PDNPKLKLTSLRDKGGFHRXGGXFRNXGSPGCRXXAXGNLGRGNALRXDFALGKSXIIFCCFQKHLYHVGKXVLSLSFXLDLLXXPXLTEXXPLIAIGLTDXXXMGXYGFGSNLXL

SEQ ID NO: 203009 - protein, 131 aa, Oryza sativa
  Clone ID: PAT_MRT4530_98233C.1.pep
MDRVLLSSQLSSQTVVNTRVQQGSGGINSIGFAVIRKGSLKLRCYAIGGLGGGENLNDPLKESNNGPVLQGFNGSSASFRTVGAKITQETGDFFVSDAEGDPDKPTDGFSSIDEAIGALHEGKVCNIYSRL

SEQ ID NO: 203010 - protein, 121 aa, Oryza sativa
  Clone ID: PAT_MRT4530_98234C.1.pep
LRRAHPLWLAPNSTRAEPPPNNRIPFRRCHAWDCPRRLWTHAPIAPPQIAPELHAKPAPAPQKSLLRESLPTESLSSSLFLRERRRSVGRCSPSRGRIPSHHRLPPGVYRRRCWMQVVVRR

SEQ ID NO: 203011 - protein, 144 aa, Oryza sativa
  Clone ID: PAT_MRT4530_98235C.1.pep
LLSVSTPPLTYNLFSCIIDTSSPVGAHLIPLLDIVKLSSVSNGNMESLSPCTAYLSICKEGRFLGSSTVFFRSSTSSLCRHCWSLIQGKKATTGLHPARRPDCTVFLFIGIRFMNKCLQFPCPACLRTVARYDFVWCGGSSFVQ

SEQ ID NO: 203012 - protein, 261 aa, Oryza sativa
  Clone ID: PAT_MRT4530_98236C.1.pep
MAGSSAATSCARFLALLATCLLWNEAASFTASGWNKAFATFYGGSDASGTMGGACGYGDLYSTGYGTNTAALSTVLFNDGASCGQCYRIMCDYQADRRFCISGTSVTITATNLCPPNYALPNDAGGWCNPPRQHFDMAEPAWLKIGVYVGGIVPVMYQRVPCAKQGGVRFTINGRDYFELVLVSNVGGVGSIQSVSIKGSRTGWMAMSRNWGVNWQSNAYLDGQSLSFKVTSSDGQTLTFLDVAPAGWTFGQTFSTSQQFS

SEQ ID NO: 203013 - protein, 629 aa, Oryza sativa
  Clone ID: PAT_MRT4530_98237C.1.pep
MDRSWMYTTGLRCQYKEYRDGVLSFMKAAVEDRIRRNDKYMCCPCNDCRNEIWLDDEKEHDMFVPSPLGASRYKRKKSAGEGKKSKRGGLAKVVWYLPIIDRFKRIFANPNEEKLKEGVETWDAYGQENFTLRVLLFCTINDYPALGNLSGQTVKGKKACSDCMEHTRSRWLKKSRKMVYMGHRRWLPLRHAFRRTKKIFNGKKELGSAPADLSGDQEVLKVRHCIDLIHVEKNVCDSLLGLLLNMPGKTKDGLNARLDLQEMNIRSELQPVTDEKTGRVYLPPASHTLSKDEKIAMLSCLVDIKVPSGYCARISKYVKLEDLKLVGMKSHDCHVLITQILPVAIRGILPPQVHHMIQRLCAFFNTIVKQTKICGPAFMREMWPFERYIGILKSYVRNRAKPEGSIIEGYMTEEAIEFCIDYMAETDPIGVPSSRHKGRLAGVGTTGRKRIVLDQASYAQAHFAVLQHMAEVTPYFEEHLAKVRQDNIGRSDIWINREHGARFNEWFKDRVVRSTDGPSEILQRLARGPSWDVDTWHGWVNIRTGVKVDKEGFTLVDLAKVGYADEPFVLTKQVEQIFYIKDPANKKMHIVRDGKRRIVGVDNIVDEEEYNKNLHWLTFVQTIRKAYHC

SEQ ID NO: 203014 - protein, 140 aa, Oryza sativa
  Clone ID: PAT_MRT4530_98238C.1.pep
REKDAQAVKLRNELKELHVSMSQLQASCDELDTKRSLLNDEKNSVQEALDAEKAEACKLKSKIEAIENCNVEKDGEIGKLKVALMEKREKIDVLIKDIEQLNLEVAEAHRKRKGGIWAWLYAATTTMVAAISFIYATKSR

SEQ ID NO: 203015 - protein, 1000 aa, Oryza sativa
  unsure (1)..(1000): unsure at all Xaa locations
  Clone ID: PAT_MRT4530_98239C.1.pep
CPCSDCRNEILWEDEKEVHAHLIRRGFMERYTCWVMHGEQDLGTNGAAADRSGADNHEEVDEXEHDMFVPSPLGGELVDVDPDMRQDMLRDVDDLAMNERDSMKFSRLVSDSETPLYAGCKPKHTKLSATLDLMKLKASSGWSDKSFTKLLGILKDMLPQGNTLPETTYEAKQVLCPLGLEVWRIHAYPNDCILYHKQYADLDACPVCKASRYKRKKSAGEGKKSKRGGPAKVVWYLPIIDRFKRIFANPTEAKLVHWHATERRNDGLLRHPTDWIQCWNIDRKHKEFAADPRNVRICLCTDGMNPFGDMSSSHSTWPVLIANFNLPPWLCFKRKYIMLCLLIQGPRQLGNDIDVFLEPVIDDLEILWKEGVETWDAYGQENFTLQVLLFCTINDYPALGNLSGQTVKGKKACSDCMEHTHSRWLKKSRKMVXMGHRRWLPLRHAFRRKKKIFNGKKELGSAPADLSGDQVHNMVKDITNEFGKKRKRSKEDKKEKNVCDSLLGLLLNMPSKTKDGLNARLDLXDMNIRSELQPVTDEKTGRVYLPPACHTLSKDEKIAMLSCLADIKVPSGYCARISKHVKLEDPKLVGMKSHDCHVLITQILPVAIRGILPPQVHHTIQRLCAFFNAIGQKIIDPKDLDGLQADIVSTLSHLEMYFTLAFFDIMVHLTVHLLKQTKICGPAFMREMTPFERYMGILKSYVRNRAKPEGSIIEGYTTEEAIEFCIDYMAETDPIGVPMSRHEGRLAGVGTTGRKRIVPDQASYAQVHFAVLQHMAEVTPYFEKHLAKVRQDNIGRSDIWINREHGARFNEWFKDRVAQSTDGPSEILVDTWQGYDINGYTFYTVTQDEKSTVQNSGVRIDAYQDQAGSSTYFGRIEQIWELNYLNFKVPLFRCSWVNIRTGVKVDKEGFTLVDLAKVGYANEPFVLAKQVEQIFHIKDPANKKIHVIRDGKQRIVGVNNVVDEEEYNKNLHVRPQIDLDDDPEDEVAYVRSDHSEGISL

SEQ ID NO: 203016 - protein, 870 aa, Oryza sativa
  unsure (1)..(870): unsure at all Xaa locations
  Clone ID: PAT_MRT4530_9823C.1.pep
WRWRGATVFSKIDXGYHQLRIKEEDIPKTAFTTRYGLFECTVMSFGLTNAPAFFMNLMNKVFMEYLDKFVVVFIDDILIYSRTKEEHEEHLRLALEKLLEHQLYAKFSKCEFWLSEVKFLGHVISAGGVAVDPSNVESVTNWKQPKTVSEIRSFLGLAGYYRRFIENFSKIAKPMTRLLQKDVKYKWSEECEQSFQGLKNRLISALILILPDPKKGFQVYCDASKLGLGCVLMQDGKVVAYASRQLRLHEKNYPTHDLELAAVVHALKIWRHYLFGTRTEVYIDHKSLKYIFTQPDLNMRQRRWLELIKDYDMGIHYHPGKANVVADALSRKGYCNATEGRQLPLELCKEFERLNLGIVSRGFVAALEAKSTLIDQVREAQINDPDIQEIKKNMRRGKAIGFLEDEQGTVWLGERICVPDNKDLKDAILKEAHDTLYSIHPGSTKMYQDLKERFWWASMKREIAEYVAVCDVCQRVKAEHQKPAGLLQPLKIPEWKWEEIGMDFITGLPRTSSGHDSIWVIVDRLTKVAHFIPVKTTYSGSRLAELYMARIVCLHGVPKKIVSDRGSQFTSNFWKKLQEEMGSKLNFSTAYHPQTDGQTERVNQVLEDMLRACTLDFGGSWDKNLPYVEFSYNNSYQASLHMAPYEALYGRKCRTPLLWDQTGERQVFGTDILREAEEKVKIIQERLRVAQSRHKSYADNRYRDLSFEEGDYVYLRVTPFRGVHRFHTKGKLAPRFVGPYKIVSRRVEVAYQLELPQSLAGVHNVFHVSQLKKCLRVPTEEANLEQIEVQEDLTYVEKPIRILEIDERRTRNRVIRFCKVQWSNHSEEESTWEREDELKSGFGSVSLSPSPRFPSRRRSPWAFAAAFQPL

SEQ ID NO: 203017 - protein, 730 aa, Oryza sativa
  unsure (1)..(730): unsure at all Xaa locations
  Clone ID: PAT_MRT4530_98240C.1.pep
MERYTRWVMHGEQDLGTDGAATDGSGVDNHEEGDEEEHDMFVPSPLGSEMVDVYPDMLQDMLCDINDLAMNERDSMKFNRLDMLPQENTLPETTYEAKQVLCPLGLEVRRIHACPNDCILYHKQYVDLDACPVCKASRYKRKKSAGKRKKSKRGGPAKVVWYLPIIDRFKRIFANPNEAKLVRWHATEKRNDDLLRHPADSIQWRNIDRKHKDFAADPRNMRICLCTDGMNPFGDMSSSHSTWPVLIANFNLPPWLCFKRKYIMLCLLIQGPRQPGNDIDVFLKPVIDDLEILWKEGVETWDAYGQENFTLRVLLFCTINDYPALGNLSGQTVKGKKACSDCMEHTRSRWLKKSRKMVYMGHRRWLPLRHTFRRKKKIFNGKKELGSAPADLSGDQEMNIRNELHPVTDENTGRVYLPPACHILLKDEKIAMLSCLADIKVPSGYCARINXYFPLAFFDIMVHLTVHLVKQTKICGPAFMREMWPXERYMGILKSYVRNRAKPEGSIIEGYTTEEAIEFCIDYMAETDPIGVPTSRHEERLAGVGTTGRKRIVPDQASYAQAHFAVLQHMVEVTPYFEEHLAKVRQDNIDRSDIWINREHGARFNEWFKDRVARSIDGPSEILQRLARGPSWDVDTWQGWVNIRTGVKVDKEGFTLVDLAKVGYADEPFILAKQDEQIFYIKDLANKKMHVVRDGKRGIVGVDNVVDEEEYNKNLHWLTFVQTIWKAYHC

SEQ ID NO: 203018 - protein, 400 aa, Oryza sativa
  Clone ID: PAT_MRT4530_98241C.1.pep
MENGSGADNHEEGDEEEHDMFVPSPLGGEMVDVDPDLLQDMLRDVDDPAMNERDSMKFSRLQCADLDTCHVCKASRYKRKKSAGEGKKSKRGGPAKVVWYLAIIDRFKRIFANPNEAKSKTTRNDIDVFLEPVIDDREILWKEGVETWDAYGRENFTLRVPLFCTINDYPALGNLSGQTVKGRRHALTEMSIRSELQPVTDEKTGRVYLPPACHTLSNDEKIAMLSCLADIKVPSGYCARITFMREMWLFKRYMGILKSYVRNRAKPEGSIVEGYTTEEAIEFCIDYMADTNPIGVPTSRHEGRLAGVNTTGRKRIIPYQASYAQAHFAVLQHMAEVTPYFEEHLAKVRRDNIGRSDIWINREHGARFNEWLKDRVARSTDGPSEILQRLARGPSWDVDT

SEQ ID NO: 203019 - protein, 70 aa, Oryza sativa
  Clone ID: PAT_MRT4530_98242C.1.pep
LVLDRHAAALLEYYRIHLNLWMLLMNLRIVRCVLSILMRLLPWQAAILDYGYQTDGPGIDYVGFAIYTQY

SEQ ID NO: 203020 - protein, 884 aa, Oryza sativa
  Clone ID: PAT_MRT4530_98243C.1.pep
MAPLPAAAAAPAFLFLSPPGKLPGGKPRLKPSCAASTSSSSSSSPSLAEQLEPLSRRLLHGKPTPTQHAPEPTWVNPSKPKPTVLSLRRHRRRSPSSHPSSAPLQPLLRAIRALPDAADLAPTLHDFFPPASPPSTSDALLLLNYLHPSWRKSLSLLCWLRALPDGAFPLDTIVFNVALKSLRAARQWPQAERLALDMLASGVPLDNITYSTLITAARRCRQFDKAVEWFERMYASDGVLPDEVTYSAILDVYAQLGMKEEVLALFDRARGSGWKPDHVAFAVLAKMFGEAGDYDGIQFVFKEMREVGIKPNIFVYNALLEALGKTGKPGLARNLFEEMTAEGVEPNARTLTALAKIYGRARWGRDALQLWEQMREKKLPADNILCNTLLSMCADVGLVGEAEQLFSEMKDPDLGDVPKPDKWSYTAMINIYGSSGDADRALQLFAEMVESGIEPNIMSYTIVIQCLGKAGRIQEAVDVLEAGMAKGLKPDDRLCGCLLSVVALSSGDETEVILACLEKVRSNLVKLIRMLGDARVGVEDLRVELKGILNSAAPEVRRPYCNCLIDICRNHGYPSERAVELFRLARHYGLYSKIHTRKEEEWSLDLRSLSVGAAKTAFDDWMKTIREHEEEEALPQTFSVYTGSSTHKFAQGLATAVASHLEQVGAPFRASDSQLGSFISSRDDLLSCRNHSSSSSEGFFFRNPNRSIEQGTGQGRIVAGEEEREREREQRGRRRDKMILAVLFSNSDGNILIERFHGVPAEERLHWRSFLVKLGADNLKGAKNEELLVASHKSVSIVYTMIGDVCLYIVGKDEYDELALAEVIFAITSAVKDVCGKPPTERLFLDKYGRICLCLDEIVWKGLLENTEKDRVRRLIRLKPPVEP

SEQ ID NO: 203021 - protein, 141 aa, Oryza sativa
  Clone ID: PAT_MRT4530_98244C.1.pep
MAPGKLPVNHSRPLLLSPSREALPRPVLARRPAAVAMAPGKLAVFALLASLLLLNTIKAADYPPAPPLGPPPHKIVDPGKDCVGACDARCSEHSHKKRCSRSCLTCCSACRCVPAGTAGNRETCGRCYTDWVSHNNMTKCP

SEQ ID NO: 203022 - protein, 990 aa, Oryza sativa
  Clone ID: PAT_MRT4530_98245C.1.pep
MEESLMGWWQANATVFEGVGKSAVGLQRQKQIESSCNKEAMDRSWMYTTGLRRQYKEYRDGVLSFMKAAVEERIRRNDKYMCCPCSDCRNEIWLDDEKEVHAHLIRRGFMKRYTCWVKHGEQDLGTDGAAADGSGADNHEEGDEEEHDMFVPSPLGGEMVDVDPDMLQDMLRDVDDLAMNERDSMKFSRLVSDSETPLYAGCKPKHTKLSAALDLMKLKASSGWPDKSFTELLGILKDMLPQENTLPKMTYEAKQRKKSAGDGKKSKRGGPAKVVWYLPIIDRFKRIFANPNEAKLVRWHVTERRNDGPRQPRNDIDMFLEGVETWDAYGQENFTLRVQLFCTINDYPALGNLSEQTMKGKKACSDCMEHTRSRWLKKSRKMVYMGHRRWLPLRHAFRRKKKIFNGKKELGSSPADLSGDQVHNMVKDITNEFGKKRKRSKEDKKRMWKKKSIFWRLPFWEDLEVRHCIDLMHVEKNVCDSLLGLLLNMPSKTKDGLNACLDLQEMNIRSELQPVTDEKTGRVYLPPACHTLSKDEKIAMLSCLADIKVPSGYCARISKYAKLEDLKLVGMKSHDCHVLITQILPVAIRGILPPQVRHTIQRLCAFFNAIGQKIIDPEDLDGLQADIVSTLCHMDMYFPLAFFDIMVHLTVHLVKQTKICGPAFMREMWPFERYMGILKSYVRNRAKPEGSIIEGYTTEEAIEFCIDYMAETDPMGVPTSRHKGRLAGVGTTGRKTIVPDQASYAQAHFAVLQHMAEVTPYFEEHLSKVRQDNIGRSYIWINREHGACFNEWFKDRVARSTDGPSEILQRLARGPSWDVDTWQGYDINGYTFYTVTQDEKSTVQNSGVCIDAYQDQAGSSTYYGRIEQIWELNYLKFKVALFRCSWVNIRTGVKVDKEGFTLVDLAKVGYADEPFVLAKQVEQIFYIKDPANKKMHVVRDGKRRIVGVDNVVDEEEYNKNLHVRPQIDLDDDPEDNVAYVRSDHSEGISL

SEQ ID NO: 203023 - protein, 301 aa, Oryza sativa
  Clone ID: PAT_MRT4530_98246C.1.pep
MAAAAAAALITAASTPFPLVSFRSRRDGHLSLSPPRRPGAGRCRASAPTFQGGPAASYAREMERLSAKESLLLAFRDAGGFESLVSGKTTGMQKIDVNERIVGLERLNPTPRPTTSPFLEGRWHFEWFGDSSPGALAARLLFERSPTTVAHFTGLDVLIKDGYSKISSNVKFLNTVQSKFLLTTQLSVEGPIRMKEEYVEGLIEIPRIREETLPDQLKGFFGQTAGALQQLPAPIRDAVSEGIKLPLNGMFQRLFMISYLDEEILIIRDASGAPDVLTRLEGPQPNSIDGTSDAVLSEYES

SEQ ID NO: 203024 - protein, 741 aa, Oryza sativa
  Clone ID: PAT_MRT4530_98247C.1.pep
MESYTCWVKYGEQDSDTDGATVDGNGADNHEEGDEEEHDMFVPSLLGGEMVDVDPDLLQDMLRDADDPAMNERDSMKFSRLVSDLETPLYAGCKPKHTKLSATLDLMKLKASSGWTDKSFIELLGILKDMLSQENTLPETTYEAKQVMRPLGLELQRIHACPNDYILYHKQYVDLDACPVYKASRYKRKKSAGKGKNSKRGGPTKVVWYLPIIDRFKRIFANPNEAKLVRWHATERRNDGLLRHPADSIQWRNIDRKHKDFATDPRNMRICLCTDGMNPFGDMSSSHNTWPVLIANYNLPLWLCFKRKYIMLYLLIHGPRQPGNDIDDLEILWKEGVETWDAYEKNVCDSLLGLLLNMPGKTKDGLNARLDLQEMNIRSELQPVTDEKTGRVYLPPACHTLSNDEKIAMLSCLAYIKVPSGYCVRISTYVKLEDLKLVGMKSHDYHMLITKILPVAIRGILPPQVRHTIQRLCAFFNVIGQKIIDPEDLDGLQADIVSTLCHLEMYFPLALFNIMVHLTVHPVKQTKIYGPAFMRKMWPFERYMGILKSYVRNRAKPEGSIIEGYTTEEAIEFCIDYMAEIDPIGVPASRHEGRLQARFAVLQHMVEVTPYFDEHLAKVRRDNIGRSDIWINREHGSCFNEWFKDRVAWSTDGASEILQRLARGPSWDVDTWQGYDINGYTFYTVTQDEKSTVQNSGVRIDAYQDQARSSTYYGRIEQIWELNYLNFKVPLFHCSWVKDSP

SEQ ID NO: 203025 - protein, 459 aa, Oryza sativa
  unsure (1)..(459): unsure at all Xaa locations
  Clone ID: PAT_MRT4530_98248C.1.pep
MVYMGHRRWLPLRHAFRRKKKIFNGKKELGSAPVDLSGDQVHNMVKDITNEFDKKRKHSKEDKKRMWKKKSIFWRLPYWEDLETGRVYLPPACHTLSKDEKIAMLSCLADIKVPSGYCAKINLANCYKRHSTTTSPSHDPTGLCLLQCNRSEDYRSRRPRWVAGRYCQYPVSVGXMYFPLAFFDTMVHLTIHLVKQXKICGPAFMREMWPFERYMGILKSYVRNRAKPGGSIIEGYMTEEAIEFCIDYMAETYXIGSPTSRHEGRLASVGTTGRKRIVPDQASYAQAHFAVLQHMAEVTPYFEEHLAKDHVARSTDGPSEILQRLARGPSWDVNTWQGYNINGYTFYTVTQDEKSTVQNSGLRIDAYQDQAGSSTYYGRIEQIWELNYLNFKVPLFCCSWVNIRRGVKVDKEGFTLVDLAKVGYADEPFVLAKQVEQIFYIKDPANKKMHVVRVLVVCV

SEQ ID NO: 203026 - protein, 344 aa, Oryza sativa
  Clone ID: PAT_MRT4530_98249C.1.pep
MSSPPSDPSSGGGDGGSAVPGTASSNFTLLYIIIAVLVGVILYMAIRYGRSVMSEWRQLQAGGGGGEPRAALLGLSSDDIDALPTFTYRARGAAASPLVGGGGRRGGGSGKGKGATTVVVECVALLPRRLHRPLAARPLHVPGVPRAPGARRRAAQRRRGRVAAAAAAAPVRPVAGAAHGGVARPGGHPGTFSIEGQHHLDDDDHHHRRTDHVDVVEVAVVTGSSGDHQLRAGLTFAVSDGVPQPERAVAELADAGCGCAVEVAVAVVATDRWSESADDDGGGGERRRRGGRGGCRCNHVGVGVGANAGGGAVKGRWWFAVQVAVAGATLITRLQKRRQDKAIA

SEQ ID NO: 203027 - protein, 995 aa, Oryza sativa
  Clone ID: PAT_MRT4530_9824C.1.pep
MVVGPLLSMVKDKASSYLLEQYKVMEGMEEQHEILKRKLPAILDVIADAEEQAAKHREGAKAWLEELRKVAYQANDVFDESKMNAFIFKFRPEPPMSSIKWRKTDSKISNLSMDIANKSRKKDKEEIVNRLLAQASNGDLTVIPIVGMGGMGKTTLAQLVYNDPEIQKHFQLLLWLCVSDNFDVDSLAKRIVEAAPKEMNKKNDNGGAKKLPQDELKEVVSGQRYLLILDDVWNRDASKWEALKYNLKHGGSGSSVLTTTRDQAVAQLMAPAQEVYDLKNLNESFIEEIIKRSAFNSEQERPPPGYSKWLVILPRNVLDHEIDVEMLIQLWMANGFIPEKQGECPEIIGKRIFSELVSRSFFQDVKGIPFEFHDIKCSKITCKIHDLMHDVAQSSMGKECATIATELSKSDDFPYSARHLFFSGVIFLKKVYPGAQGSEYTSLWEQYMSTWMNKLRDMVKLVLDGCKNLEKLPPLWQLPALEVLCLEGLDGLNCLFNCDIYTSFTFCRLKELTLASMRNFETWWDTNEVKGEELIFPEVEKLIIKSCPRLTALPKASNVISELSGGVSTVCHSAFPALKEMELYGLDIFQKWEAVDGTPREEVTFPQLYKLDIRRCPELTTLPEAPKLRDLNIYEVNQQISLQAASRYITSLSSLHLHLSTDDTETAPVAKQQDSSELVIEDEKWNHKSPLELMDLTGCNLLFSYPSALALWTCFVQLLDLNIWEVDALVDWPEEVFQGLVSLRKLHILQCKNLTGLTQARGQSTLAPSELLPRLESLQIRRCYSFVEVPNLPTSLKLLQITDCHDLRSIIFNQQQDTTMLVSAESFAQPDKSSLISGSTSETNDRVLPRLESLVIEYCNRLKVLHLPPSIKKLDIVRCEKLQSLSGKLDAVRALNISYCGSLKSLESCLGELPSLQHLRLVNCPGLVSLPKGPQAYSSLTSLEIRYCSGINLLPPSLQQRLDDIENKELDACYEGNLQFLNRVRFSGKSFERGV

SEQ ID NO: 203028 - protein, 65 aa, Oryza sativa
  Clone ID: PAT_MRT4530_98250C.1.pep
MNERDSMKFSRLVSDSETPADLDACPVCKASRYKRKKSAGEGKKSKRGGPAKVVWYLIGKILRSV

SEQ ID NO: 203029 - protein, 348 aa, Oryza sativa
  Clone ID: PAT_MRT4530_98251C.1.pep
MSSPPSDPSSGGGDGGSAVPGTASSNFTLLYIIIAVLVGVILYMAIRYGRSVMSEWRQLQAGGGGGEPRAALLGLSSDDIDALPTFTYRARGAAASPLVGGGGRRGGGSGKGKGATTVVVECVVCLQELADGDVVRVLPACRHFFHGGCIDLWLRAHSTCPVCRAHPEPDGVRLSDVVAVSPPLPQLLRCGLFSYWPTAASRALADILARSPLRGNTTSTTTTTTTGGPITSTSSKSPSSPVQAAIINYVQASRSPSPTAYHSLNERWPSSPTPVVVVRSKSPSPSSPPIGGLSLQTTTAAAARGVGVVEGVDAGATTSASASAPTQVVALSREGGGSRSKSPSPVPH

SEQ ID NO: 203030 - protein, 660 aa, Oryza sativa
  Clone ID: PAT_MRT4530_98252C.1.pep
MAGGDLPRRTRAKRGALLLSKMFRHRRPTRYRRHSAVLEQQCPHVIAAGAATSAPLGESPYALEEQVHVEEMNIRSELQPVTDEKMGRVYLPPACHTLSKDEKIAMLSCLADIKVPSGYCSRISKYVKLEDLKLVGMKSHDCHVLITQILPVAIRGILLPQVRHTIQRLCAFFNAIGQKIIDPEDLDGLQTDIVSTLCHLEMYFPLAFFDIMVHLTVHLVKQTKICGPAFMREMWPFERYMGILKSYVRNRAKPEGSIIEGDTTEEAIEFCIDYVAETDPIGVPTSRHEGRLAGVSTTGRKRIVPDQASYAQAHFAVLQHMAEVTPYFEEHLAKVRQDNIGRSDIWINREHGARFNEWFKDRVARSTDGPSEILQRLARGPSWDVDTWQGWVNICTGVKVDKEGFTLVDLAKVGYADEPFVLAKQVEQIFYIKDPVNKKISTAVVASSSSATADAASSSSKPSPPDRRRLLLDAATASRFNIHRCLLHSRGSGLTDRRRRLQVQDPPSPTASASSTPKTAAASLLSKFAAAGFLSAKSSRPTPRPLQRSTSSPPPRPTSSPTPSPPPSLASSPPLLLLLVTEIMAFRRIRSVLVAKSGLVGDIDSKFEWYTDVEVEFPAAPALLSMDAMVSSTRRIDIGHVAARRTDVNDHFWDYIVPES

SEQ ID NO: 203031 - protein, 39 aa, Oryza sativa
  Clone ID: PAT_MRT4530_98253C.1.pep
PTLLFIYRCYARLHPRAVNCRKKKCGHSNQLRPKKKIKN

SEQ ID NO: 203032 - protein, 832 aa, Oryza sativa
  Clone ID: PAT_MRT4530_98254C.1.pep
MRPWRPPPTAVASLAHQCSLLLRRLAERHSPAPTCPSSSFLRALRCLHARLLTADLLHAPSHPHLTLRLIHLYTLSPDLATPAALFRSDPDPGPVAATSLVAAHAAAGRLRDAAAFFDAVPPARRDTVLHNAMMSAFARASLAAPAVSVFHALLGSGSLRPDDYSFTALISAVGQMHNLAAPHCTQLHCSVLKSGAAAVLSVSNALIALYMKCDTPEASWDARKVLDEMPDKDDLTWTTMVVGYVRRGDVNAARSVFEEVDGKFDVVWNAMISGYVQSGMCADAFELFRRMVSEKVPLDEFTFTSVLSACANAGFFVHGKSVHGQIIRLQPNFVPEAALPVNNALVTLYSKGGKIVIAKRIFDTMNLKDVVSWNTILSGYIDSGCLDKAVEVFKVMPYKNDLSWMVMVSGYVHGGLSEDALKLFNQMRAEDVKPCDYTYAGAIAACGELGALKHGRQLHAHLVQCGFEASNSAGNALLTMYAKCGAVNDARLVFLVMPNLDSVSWNAMISALGQHGHGREALELFDQMVAEGIDPDRISFLTILTACNHAGLVDEGFHYFESMKRDFGISPGEDHYARLIDLLGRSGRIGEARDLIKTMPFEPTPSIWEAILSGCRTNGDMEFGAYAADQLFRMIPQHDGTYILLSNTYSAAGRWVDAARVRKLMRDRGVKKEPGCSWIEVGSKIHVFLVGDTKHPEAQEVYQFLEVIGARMRKLGYVPDTKFVLHDMEPHEKEYILFAHSEKLAVGFGLLKLPPGATVTVLKNLRICGDCHTAMMFMSKAVGREIVVRDVRRFHHFKDGECSCGGLWWNPGESENGLIQIAGKVVEKLGIS

SEQ ID NO: 203033 - protein, 58 aa, Oryza sativa
  unsure (1)..(58): unsure at all Xaa locations
  Clone ID: PAT_MRT4530_98255C.1.pep
PSMVSHHLPGKSSIFRALPNXMFLANAYRISRARGLQRLKHNRGDDFXVAFTPIQYKS

SEQ ID NO: 203034 - protein, 116 aa, Oryza sativa
  Clone ID: PAT_MRT4530_98256C.1.pep
MKAAGNNLSSWAPALLIRPPPSNKDVGELCTCITAEKVRQVGEAMISDDKNVLGDCWGHRSQNREIGDGLEWVADVETLDPDKEMLMVVAGTTQSMHVNMSYGNPIHFDPGPGTAL

SEQ ID NO: 203035 - protein, 108 aa, Oryza sativa
  unsure (1)..(108): unsure at all Xaa locations
  Clone ID: PAT_MRT4530_98257C.1.pep
FFFFLQTAKQHKNAKFSIEDCHPIFTISVSGNIFLGSPACSFVARSITHPKHHFPSHFFQLTGFNHPVHXHHHHHHHHHHHHHHHHHHHHHHYHHIIYIYILIYIIIN

SEQ ID NO: 203036 - protein, 99 aa, Oryza sativa
  Clone ID: PAT_MRT4530_98258C.1.pep
WRTSSWWWRRRSGGAGGGGVATADGLLAERRSGGAGIATRTGSSWRWRRQSNGRGRGGCVAAADGLLAVVEEAKRRRCRRRARSSPDQRERRRIEKRLT

SEQ ID NO: 203037 - protein, 115 aa, Oryza sativa
  Clone ID: PAT_MRT4530_98259C.1.pep
PPNCSPPPAGELSGGKIGFFTPTRGRRFLQRLSGPSQGTVLPRGACNNLFFYVFGEPCSFRGLTDWGGGALPGGARNSVCVACFPEKPFFCAPLFFWKRINQFQETKSILGTLNK

SEQ ID NO: 203038 - protein, 170 aa, Oryza sativa
  unsure (1)..(170): unsure at all Xaa locations
  Clone ID: PAT_MRT4530_9825C.1.pep
AAKISPLAGWPPTKSSPVPPAPPXTSPSPSSPPPAPPRSXSPSPSLPPGPFPPSPSPPRAKSSPPPRAPPRSRPPRRRRRAKSSPPPLAPPXKSSPSPSPSPPPGPLPLAASPPPSPPXPPPAPPXSPPGPSPPRPXGSSPKSYPSLPPPSPPAIPPRHRRAGSSGPKSP

SEQ ID NO: 203039 - protein, 297 aa, Oryza sativa
  Clone ID: PAT_MRT4530_98260C.1.pep
VDEIWDTHNLHTIIQDRGIGGSLIRLIFHDCFVRGCDGSVLLNASDENPRPETAAPVSIGLEGFDILEEIKADLERRCPGVVSCADILIFAARDASSILSNGRVRFDVPAGRLDGVVSSAYEAQAELPDPTFTIRQLIDNFARKNFTVEELVVLSGAHSVGDGHCSSFTARLAAPPDQITPSYRNLLNYRCSRGGGADPAVVNNARDEDLATVARFMPAFVGKLRPVSALDNTYYRNNLDKVVNFNSDWQLLTQDEARGHVREYADNAALWDHDFAASLLKLSKLPMPVGSKGEIMN

SEQ ID NO: 203040 - protein, 435 aa, Oryza sativa
  Clone ID: PAT_MRT4530_98261C.1.pep
MAAAKHFTYVILGGGVAAGYAAREFAKQGVKPGELAIISKESVAPYERPALSKGYLFPQNAARLPGFHTCVGSGGERLLPEWYSEKGIELILSTEIVKADLASKTLTSSADATFTYDTLLIATGSSVIKLTDFGVQGAEANDILYLRDIEDADKLVAAMQAKKDGKAVIVGGGYIGLELSAALKTNNFDVTMVYPEPWCMPRLFTSGLAAFYEGYYANKGIHIIKGTVAVGFDADANGDVTAVKLKNGNVLEADIVIVGVGGRPLTHLFKGQVAEEKGGIKTDAFFETSVPGVYAIADVAAFPMKLYNEIRRVEHVDHARKSAEQAVKAIKAKEAGESVPEYDYLPYFYSRSFDLSWQFYGDNVGEDVLFGDNDPTAAKPKFGSYWIKDGKVVGVFLEGGSAEENQVIAKVARAQPPVADVEALKKEGLDFAAKV

SEQ ID NO: 203041 - protein, 41 aa, Oryza sativa
  Clone ID: PAT_MRT4530_98262C.1.pep
FFFFWYWITNHLHSKGPEIFFLLILKVARGSLEAQCVWLSS

SEQ ID NO: 203042 - protein, 104 aa, Oryza sativa
  Clone ID: PAT_MRT4530_98263C.1.pep
ASKLMETLSSEKEKNEIMQKQLEALSFLDKRKATKPKLVANQVPSVSDVTQGSDQVIVPAQQQTPVVSPIKVPPAKATKRIASVSRRARVRGALLQDTEEDVEE

SEQ ID NO: 203043 - protein, 106 aa, Oryza sativa
  unsure (1)..(106): unsure at all Xaa locations
  Clone ID: PAT_MRT4530_98264C.1.pep
QTFMMMQPDDVRRGLVGEVVGRCEKKGXYLRAVKLIHVRKSLPESRYDXLSCKPFLXAFVEYIVSGPVVAXMVWEGKQVRSSGRELDGGTNPLCAEPGTSRGDFAG

SEQ ID NO: 203044 - protein, 130 aa, Oryza sativa
  Clone ID: PAT_MRT4530_98265C.1.pep
MVSSLRLAEISRKWSGSGSSKVTSPTAAAAACPRGHFAAYTRDGSRFFVPIACLASDTFRELLSTAEEEFGSPGGRPIVLPCSADRLHQILAAFRSASGKNKCSPPSGSGGRAGGRTKIWYWNMKGDTLS

SEQ ID NO: 203045 - protein, 64 aa, Oryza sativa
  Clone ID: PAT_MRT4530_98266C.1.pep
ILSWYSNWFDCFALYLDFTKPMYSKIKIYGWHTKKKKKGRPPMKSLPSDGVQHTSYTTSIEMRR

SEQ ID NO: 203046 - protein, 121 aa, Oryza sativa
  Clone ID: PAT_MRT4530_98267C.1.pep
MDGASEKPPHKDYYKVLEVDYDASDDTIKLSYRRLALMWHPDKHKGDNDVTAKFQEINEAYTVLSDPAKRLEYDLSGCYELNRYTLREYLTRFKGMILTCNGLGIDHSSKWARHLRELEPH

SEQ ID NO: 203047 - protein, 111 aa, Oryza sativa
  unsure (1)..(111): unsure at all Xaa locations
  Clone ID: PAT_MRT4530_98268C.1.pep
MQTAVSSVVGXLSAELPADVNALSLPILAALRGALRDLAAADGVAFDAAEXTYSSNISVFTMEACYLIGGEACNVQMYSEAKLSSSGACAVSRAAAEEVDRDYLSYDEPTH

SEQ ID NO: 203048 - protein, 170 aa, Oryza sativa
  unsure (1)..(170): unsure at all Xaa locations
  Clone ID: PAT_MRT4530_98269C.1.pep
SNTNQIACNQTDVSNSSPPSAHFFGFSPHHTLAQHFNILHGRCNTCISRLWHMHTSWLQAITITVFLSFALHHQPECTSTVPPSPRASTNHHTAPTSINPLTPMVFHLPFTAIMHGPAQACPKPGCHVSNQNSGPHSXLILPGHAVSHGTPSRPNVIPDISVMTLSAHQS

SEQ ID NO: 203049 - protein, 1760 aa, Oryza sativa
  unsure (1)..(1760): unsure at all Xaa locations
  Clone ID: PAT_MRT4530_9826C.1.pep
GSSSTSTPRDVFAIGGTSTSARADAEVENQVVTPAQHIGAINAILRETPYDPILNDDLTRWTEXLRESVANLSNAFEEATAGANQNNXPASGANGEPPEQRTSPRQDTPPPRGTGDLCDHLNGRREVRHARDNENHSXHRVSSRRRENEERGGHPSENRDHDDREQRMPGDTGRGRRHNDDDDGDRRRDINGRRRQDSREPGRHPRNRTPEPSDSSSSSSSSSSSLSDRNPRRTYDHRQPTTPSGRCKAFNRALRDVRWPERFRPGAIEKYDWSTDLEEFLQVYSRVLYTAGADDNALANYLPVALKGSARSWLVHLRPYSISSWADLWQQFVANFQGTYKRHAIEDDLHALTQNPGKSLRDYVRRFNECRNTIPEITNASVIYAFKTGVRDRYTTQELATRRIRTARKLFEIVDXCAHADDALRRKNNKPKTGGEKKPAKDAPESSKKKSHKSGKTKAQTEVLAAEYVDPPKHPDPQGNDTKKIWCPIHKSDRHSLEDCFVFKKSLAKQLALEKGKRVRVVEKAAEAATQDLDSAXPDSDLHVSQIFXVPWRRYPIVVEPTIXNTKVARVLIDGGSSINLLFACTLDTMGIPRSELTPINQPFHAITPQSSSKPLGKIMLPVTFGQANNFRTEQITFDVAEFDTAYNAIIGRTALAKFMAASHYTYQVLLMPGPKGTITVQGNAKLAVQCDKQSLDMVEHTPSPPATAEPPRKVSKTNKTPKPDGAIKIVPLSSANPDKAELALITFLRDSAYVFTWQPSDMPGVPREVIEHKLMVRPDAKPVKQKLQRFAPDRKQAIREELDKLLKAXLHPEWLANLVMVQKANRKWRMCVDFTDFNKACPKDHFPLPRIDQLVDSTAGCELLSFLDAYSGYHQISMAKEDEEKTAFITPFGVFCYVKMPFGLITAGNTFQRTVQGALNDQLGNNVEAYVDDIVVKTKTSDSLIDDLRETFDNRRXYRLVLNPEKCTFGVPSGKLLRFLVFGRGTEENPEKIKAIKNVKSPTRLKEVQKLTGCMAALSWFVARMGERGQPFFALLKKQDKFVWTQEAEEAFIALKRYLSNPPVLVTPHPNEELFLYIAATPYSMSTVIVVEREKVQRPVYYVSEALHDAKTRYPQIQKLLYAVIMTSRKLRHYFQAHRVTVVSSFPLGEVVRNKDVVGLIAKWVVELSXFDVHFVPRTAIKSQVLADFVADWTMLENRSDSQTDNETWTMAFDGALNSQGAGAGFILTSPSGDQFKHAIHLNFRATNNTTEYXGLLTGIRAAAALGVKRLIVKGDSELVANQVHKDYKWSSPEVELSKYLAEVLRKLEKRFDGIEVRHVYRKDNIEPDDLARRASRREPLKPGTSLDVLTKPSVKEANDEDSTVAPDISSGATEAECAIADIETTDGXRIPLIKFISSDKLPEDDAEAEKITRQAKIYCMIGNDLYKKAPNGVLLKCVSFDDGKHLLLDIHEGICGSHAADRTLVGKAFRQGFFWPTALKDICDMXTHKVTSASVPNYPSHLADLMLGARHTRTIPTRTREATSTGEIKADSAIKFIKEIFYRYGLPHRIITDNGSQFISANFQDYCIRLGVKICFASVSHPQSNGQVKRANGIVLQGIKTLLWAVRTTPTTSNKETPFFLMYGSEAMLPTELQHQSTXVHKYSDEDQEEQRTDDVNLLEEHRERVAVRAASYQQALRRYHEKRIRARTLSISDYVLXRVQSQAGRNKLSPKWEGPYTITQVLRPGAFKIADGDGRKDYNQSVPSRRSLTTITPSIET

SEQ ID NO: 203050 - protein, 497 aa, Oryza sativa
  Clone ID: PAT_MRT4530_98270C.1.pep
GTRGSFRMEVLLSAVLGDLVSRSISFLVDKYYQQKMGMGVDLQCLRHLLLRIEATVLEVEGRHITNRAMLQQLQMLREGMYKGYYLVDTIKNGVLQHEMVNDEVGDHSFSFPKLRPTKRLCFSTRTFTMAFQGEDRKEVGEMLCSLLSITDDMKEFLVFLKGYPHIHRQPYSQHLILEKCMFGRQAEIERITNFLLRESLGAESLGVLPIIGPARVGKSTLVEHICYDERVRSFFSSIVFCSGSDIGSKSFADLRDSGIVKHQSCVAHERSLIIIEFIDDGDVDEENWRRLYSSRSCIPHGSKIIITSRSERFRNVGTTQPLELSLLPQEAHWYFFKVLAFGSTNPVEHPFLESAAMEMAAEYRCFVAANFVASLFRANFCTQFWHLFLRCHRNIVEKHVILFGEHPYTLVQKNHGIYLVENFRDPKFILVNGYKTCLRDDDPKVMLHEVHTGTSKAHGKFEVLVWRSRIPPYHEFVMSCEAQAQQHIIFKRKRFLA

SEQ ID NO: 203051 - protein, 303 aa, Oryza sativa
  Clone ID: PAT_MRT4530_98271C.1.pep
MATAGDEQQQQAAAAQTAEVTEAAAKEVVSVEMPAPEGWTKKFTPQRGGRFEIVFVSPTGEEIKNKRQLSQYLKAHPGGPASSEFDWGTGDTPRRSARISEKVKAFDSPEGEKIPKRSRNSSGRKGKQEKKEATENEEAKDAEADKEAPSEDAPKETDVETKPAEEAKEAPSEDAPKDTDVEMKTAEDASKTADADTPAPAPAGTEKEDAKPAESEAAPPAPSEGGEKKEDAKPAEPEAAAAPPSNPTEPSAPKAAAAAPVENSADKGPHQDSQPPSAAAPAKESSPVNNGQLPAGASAVKCT

SEQ ID NO: 203052 - protein, 71 aa, Oryza sativa
  unsure (1)..(71): unsure at all Xaa locations
  Clone ID: PAT_MRT4530_98272C.1.pep
GAWRPDRHHTTRRQAKNEHMLWYQKESRSVNQVKTSRCYLAWMDLEXSDLFERHMQSGHGKVYIRFHXALF

SEQ ID NO: 203053 - protein, 109 aa, Oryza sativa
  unsure (1)..(109): unsure at all Xaa locations
  Clone ID: PAT_MRT4530_98273C.1.pep
GAGLGSPAHRAAEELSLRMQESVDVRFISLVHKATMKKMFSSCVLGRXINFAWXDDCGDMRDGGALLQVESRERNYRDSXSLVYGEPGGGLSGQFSVSGEKGSTQVRVH

SEQ ID NO: 203054 - protein, 216 aa, Oryza sativa
  Clone ID: PAT_MRT4530_98274C.1.pep
MGSSGAPELTHEMSSNPCAGGRATILGIGTAVPVHVYEQKSFPDYYFEITDSNHLVDLKAKFANICEKTSTEKRHMYISDEWLRANPSVTAYMSTSLNVRQQVAEEGIPRLGAEAARKAIDDWGKPASSITHIVFATTSTGCLPSADVVLIKLLGLPLSTKRVMLYQAGCFGGTTALRVAKDIAKSNPGARVLVVTSEVMSLVIGGPSESHIGGIL

SEQ ID NO: 203055 - protein, 130 aa, Oryza sativa
  Clone ID: PAT_MRT4530_98275C.1.pep
MGGGRCDVCPQGEEGLLAAAGRGGRQCAVAGRSSRRRGAATLADLYTIDTKGEDEEDADGPVYNLHPEEEAGLPNRHSHLSLASRATSPIRRRPAAVCRIAAAVRRSLPVPRCRRVAARNVSWGCVLWVQ

SEQ ID NO: 203056 - protein, 137 aa, Oryza sativa
  unsure (1)..(137): unsure at all Xaa locations
  Clone ID: PAT_MRT4530_98276C.1.pep
MRRRRAPQRTKKAAAQPRRRSRRRRGRGCAALLPPPPQPGPSPAGRRAQFTLRRAWREERXIGRXGGRRRGMRMTCGLHVGPTIFNXFVCETDMWVPXILSPCQCHVRXRPSQISHVGATSTKTTLKTAEGSNLHRF

SEQ ID NO: 203057 - protein, 43 aa, Oryza sativa
  Clone ID: PAT_MRT4530_98277C.1.pep
MTLTQATSGVRARRLQPYSGHPQSKQTWRAAKFRLCPRALLFR

SEQ ID NO: 203058 - protein, 431 aa, Oryza sativa
  Clone ID: PAT_MRT4530_98278C.1.pep
MAAGWARPAGFALLVVVVLAAAASADRPARGGLSVTAGAEESSAVFPLYGDVYPHGLYYVAMSIGNPPRPYFLDVDTGSDLTWLQCDAPCVSCSKVPHPLYRPTKNKLVPCVDQMCAALHGGLTGRHKCDSPKQQCDYEIKYADQGSSLGVLVTDSFALRLANSSIVRPGLAFGCGYDQQVGSSTEVSATDGVLGLGSGSVSLLSQLKQHGITKNVVGHCLSTRGGGFLFFGDDIVPYSRATWAPMARSTSRNYYSPGSANLYFGGRPLGVRPMEVVFDSGSSFTYFSAQPYQALVDAIKGDLSKNLKEVPDHSLPLCWKGKKPFKSVLDVKKEFRTVVLSFSNGKKALMEIPPENYLIVTVNILELRILLKYGNACLGILNGSEVGLKDLNIVGDITMQDQMVIYDNERGQIGWIRAPCDRIPKFGSSLL

SEQ ID NO: 203059 - protein, 101 aa, Oryza sativa
  unsure (1)..(101): unsure at all Xaa locations
  Clone ID: PAT_MRT4530_98279C.1.pep
QHSEIRRGDRAQTLYDRGYAQIADRMQARADPGEKAVADVTRHYDKVEQDVHRIDCTGGHPXSNYNRSNASCSSSCSSWKSRGSAXEDQRRRFHNLQRMLH

SEQ ID NO: 203060 - protein, 617 aa, Oryza sativa
  Clone ID: PAT_MRT4530_9827C.1.pep
DLGELRQLDLGGQLELSQLENVTKADAKAANLRKKKKLTKLSLDWSPNHSKEAQNNHKEVLEGLTPNEGLKVLRIHCCGSSTCPTWMNKLWYMVELQLIGCKNLEMLPPLWQLPALEVLFLEGLDGLNCLFNSDEHTPFTFCKLKELTLSDMRNFMTWWDINEVQGEELVFPEVEKLFIEYCHRLTALPKASNAISKSSGRVSTVCRSAFPALKEMKLCDLSVFQRWEAVNETPREEVTFPQLDKLTIRCCPELTTLPEAPKLSDLNIYKGSQQLSLVAASRYITSMSSLNLDLSIDDTETALVAKQNSSELVYEKEKWNDNSPLELMDLDGCNLLFSHPSALALWACFVQLLDLTIWCVDVLDYWPEKVFQGLVSLRKLQIRECRNLTGHTQAYEQSTPVRSELLPCLESLEISYCISFVEMPNLSASLKLLEIMNCFGLKSIIFSQQHDRRLVSAESVTRPDRSSLIAGSSSGTNDHILPCLESLAIKRCDRLEVLHLPPSIKKLEILKCENLQSLSGKLDAVRALIIRSCESLKSLESCLGELPSLEQLDLFDCKSLVSLPEGPQAYSSLRFLTIDSCSGIELLPLSLQQRLDYLEEKKLDARYEGNLQFLRFF

SEQ ID NO: 203061 - protein, 217 aa, Oryza sativa
  Clone ID: PAT_MRT4530_98280C.1.pep
MAQACTFCGKPKEDASAYLQQFLESCSTYTVKGIRLQLLPLSLLERAEQWFYINRVTVNTRNKRSTAFLSKIFPMGKTNTPRGRISSFQQMRDETILEAGEMLQERSVMPTNLIEKMVSNIGWSKERLQTRQRGMYTVEGMEMLAAQLDLLMKRLDNNEKDAKQSAVKALGSHITCEVYGKTGHSGTDRPETRKNVMLMNNNNGYRPQGDQGWSIAP

SEQ ID NO: 203062 - protein, 36 aa, Oryza sativa
  Clone ID: PAT_MRT4530_98281C.1.pep
GTCISHVEHTARSQQTASAARNSPNVTAGLMCHLVP

SEQ ID NO: 203063 - protein, 1065 aa, Oryza sativa
  Clone ID: PAT_MRT4530_98282C.1.pep
MHTSVFIWICSIHKFKLGDEMGDNFVSIEDQEHYAMMKGMRFKSEEDGFIFYNRISYAQKANLMELKGVGLRQHQVMDVMERHRGGFETTGFVSKDMYNFFVRQKKKQIVGGDVDRVIKYMQARQKDDMEFFYEYETDEAGRLKRLFWADPQSRLITMLLKHPKGLITDSDNSMRRAIATVMPNSEHRLCTWHIEQNMARHLRPKMISDFRVLVHATYSAEEFEEKWVEFKLKRKVAEDNQWLGRMYNLRRNGRLHILKHYEHCLSRMRHREAELDSKASQSVPFTANDASLIEKDAARIFTPSVFKKLKMDIIKSKDCEVIDCIDEENIIKYIICMKGKIDKITILTCSYVESSLKNMSCTCKKMECESLPCQHMFTIMDYLNLQAIPDVCVVPRWTVKAKIAFPSDRYGEVYTWSDQMERYRRMRAIGSEVLLKCSMSEEYTLKVMEMFEKLDLETNAIEGDEFDVTLCGHVVAQSLRSDIASVQKVHDPMEVVPKGAPTKRLRGFLEKGNRRCGYCRVRGHTVRSCAIYLSISVAPTMADQDGNARDEGPPQVPQQAHVSFALKMSSMTIACSIPKFVSLVQNFDSCQKEAIERIGFGGLLQMPDITLQRITCGHIADQFDVTTECVEIEGIQIPITTFDVQCIMGLPAGELLITPRPVSDDEDYKYYSVYKDPKKKNISLAILREELLKAKVADEHFLRRFVLFEIGYILCPTTKPFVSSNYLALVKDINQIKHINWAALTRDFLIRSLKELKGGRTNLEGNLPLLQVQDSKYKMTYGDRTPPLMSYWNEMKVNSWLKYDSKHGISGLNSANMDIVLGQLLQLQQSIQFLDNKMTNKLISIEGICNQNRKDIQEIKKRLRSAFHVTSAKHPKVEIIHEQFNITNQEEFLRALVVPQEAPPTSKWLNGSIIDAYIELIKDEQADTPRGNGMALLESEAHCQQWKSDGAKKGTFSKTYRQRRATVASKYLNHDMIFLPLNRNKDHWYVVVLNAGKQKIQILDSIRMDRNTYEANKDLNDTDTCTTFRAKLASTLINSSMNEVINIQEDIRRIQTEQMQQKKDE

SEQ ID NO: 203064 - protein, 847 aa, Oryza sativa
  Clone ID: PAT_MRT4530_98283C.1.pep
MAREDVQLKKKWAAAYTKEEYTLKVMEMFEKLDLETNAIEGDEFDKVHDPMEVVPKGAPTKRLRGFLEKGNRRCGYCRVRGHTSARVLRHLYITLVHMGGPTMIPGISVAPTMADQDGNARDEGPPQVPQQAHVSFALKFDVTTECVEIEGIQIPITTFDVQCIMGLPAGELLITPRPVSDDEDYNSNYLALVKDINQIKHINWAALTRDFLIRSLKELKGGRTNLEGNLPLLQVQDSKYKMTYGDRTPPLMSYWNEMKVVQEITLPLQKCDPIVQHDNEEHAEQAADNKDNNIPEIKKRLRSAFHVTSAKHPKVEIIHEQFNITNQEEVRTAQADDTKNTQTESVKTTRSDKVKHTQSDSMMESKVKTEDIKETSQTPLVILSDDDNSNGNTEFLRALVVPQEAPPTSKWLNGSIIDAYIELIKDEQADTPRGNGMALLESEAHCQQWKSDGAKKGTFSKTYRQRRATVASKYLNHDMILDSIRMDRNTYEANKDLNDTDTCTTFRAKLASTLINSFMNEVINIQEDIRRIQTEQMQQKKDDDELTAAAPLQSVPTTISPLDHDGKPLSWLATTSGPGLKNSAGAPPFTPLAFALESAEAPPFTPLASALESVEAPPWSPRKRHPGVRGDRMGNQIRKRRWHHSLLATDGESYREVPLGNQIEKEFASLGNSNTAFRRAAEIAMAPPASRPPTPTPTPTANAAASSSRIESPSLRAALAMALIHYNRLPSRAAAAAAPSPQALLNWKRKAKDRKREILRLREELKLLQDGARGEEMEPPVASCRCHFFDGCGDLPPPTDGDAGEHWVDDVLRRRFVRLEYNTEDEREAGSSFTTFSHQAVDFILGK

SEQ ID NO: 203065 - protein, 80 aa, Oryza sativa
  Clone ID: PAT_MRT4530_98284C.1.pep
QAYRVRIRPPRPLPHRRPLPPPRPDRQPLPPPPPNDRRPRPPPVADPVPLPRPPVASSSATPPPPARSSGSLLHRTANRL

SEQ ID NO: 203066 - protein, 166 aa, Oryza sativa
  Clone ID: PAT_MRT4530_98285C.1.pep
LEIAVSYFALYRIQPIWILYWASYCNFNKASSSAAAPLQSVPTTISPLDHDGKPLSWLATTSGPGLYRREANRRQSALDFTVRTPRERRPSLLLPLPWSPRKRRPSLLLPPPWSPWKHRPGVRGSATLESAEIGWGIRSGSAAGTFTSGDGWGIISGSAAGESDRE

SEQ ID NO: 203067 - protein, 147 aa, Oryza sativa
  unsure (1)..(147): unsure at all Xaa locations
  Clone ID: PAT_MRT4530_98286C.1.pep
MRLEKVCTDDNGADLLTKVMTMENLKVCCQLIGMTTGRQPGKENGLYDIIDDVIAGKALNRKATGGVDRLHVDEGLPAGYGEKEPVAGLLLLLANPTTATATEXPGGGDGDQRRRLLGGAARMERRPTLGERRQLRGETARARELEL

SEQ ID NO: 203068 - protein, 557 aa, Oryza sativa
  Clone ID: PAT_MRT4530_98287C.1.pep
MDFYPTPKMGNSPSHVYWRYTVSRDDNGSGTGRAKPCPTRCPTLPTQTLPIRVSGQNFVPVPMPGGRGYVRRAYIGVEPFLGLFRFYYELRWMEPKKIENSDPVFVVPEEQPDKIPEWTAKPALTPSLQSFIDIIDDLRVRGLLGYEVAADFIGLNSEIVERRASQVMISGPTTASNIPVPICKKGKANCMAAINALPLTDVIGPLADHQAAASLKQGVAKEASDIAAAAATTMSGSNRRQRLVTLGEKAARAKATQDGSGATSSASPVATSTDVVVTTRDREATPSGPAGGLVPARGPPIDALTWGELQAEMERILQAGARGVGREIEEARTCEDLLKMRELVAGNERQRQGLGQMSELENNLSEIRGSLRVSYTGLHQLAGDFDLESALADQDRRIQYWKTKFEVAELERTMVEVKKDQAVEALRGREVWFNSYLRSCCTAMVGVCRELRVPRWNPEESAAGYISWLNGACAQLEGIGKRIDEALKQECRRSSRYAGGHVLACIRDHCPQLHLEFLHEGFSRSRRTPAEIDNLAKSMAPLKEKVFQSMDWRWPSW

SEQ ID NO: 203069 - protein, 171 aa, Oryza sativa
  Clone ID: PAT_MRT4530_98288C.1.pep
SRSLPHRTASAPLPSATPSLPHRIRASLSLPCLPPRSAASSPASHRRYRLPSPPQSALPPPPLSRRSNPPPSPGSDPPSLSLSQTLAPRDPRPPRSRRSPSRLQELPPVFRCRSPSTTTTTTTTTTPPADPPSPPSPSHRPSSTTTSPLIPQPHTALDHHRPGNSPSELLA

SEQ ID NO: 203070 - protein, 63 aa, Oryza sativa
  unsure (1)..(63): unsure at all Xaa locations
  Clone ID: PAT_MRT4530_98289C.1.pep
YRPQILQKLHQPCXQLITXSRXTTIPMPDHAYFPVLQNRFSKNWILRNERPSYTNFKXXEANV

SEQ ID NO: 203071 - protein, 88 aa, Oryza sativa
  Clone ID: PAT_MRT4530_9828C.1.pep
LFHQNKMATNTMDVANSISSNAMSKDKHSANNVEMLNKRCTCAQFYLDQCNKHSNSFGFRKGTSKANIGHFKCALREHTWQEVQLQHK

SEQ ID NO: 203072 - protein, 89 aa, Oryza sativa
  Clone ID: PAT_MRT4530_98290C.1.pep
LLRRQLKNLPKIILKSQASKFEIALDITTKNSQHNSIHKYWPLLTTLLVHDTEDMSFFSKAQLHILLLFNISHPHPICGEKWTRDYLLG

SEQ ID NO: 203073 - protein, 78 aa, Oryza sativa
  unsure (1)..(78): unsure at all Xaa locations
  Clone ID: PAT_MRT4530_98291C.1.pep
LNSRLRQELQINSCSNANKSKIGNLIIRSSKHHKLTRGRTRGLSGFSFSSSFSFSPSSSRSFLLLFLAGNRKXGGRWG

SEQ ID NO: 203074 - protein, 71 aa, Oryza sativa
  Clone ID: PAT_MRT4530_98292C.1.pep
ARLRTNYRCIMPRALGSSSAKQRIVHLEHDSPLLNRSEHENIDQSFGTNTEDGKLCMVHELATQGSSAALY

SEQ ID NO: 203075 - protein, 156 aa, Oryza sativa
  Clone ID: PAT_MRT4530_98293C.1.pep
MPLHRVFHPSTLTPSLCVASSLDFCDDECFPDDVDCGASDRVYTVDAIHGRPLAVSEGSCTPAGSSWCSGGAPWAEDEEHDLTSPQAAGHGGGRRPTCERARLSPDCPTPSWCGSRKCRTSPAPTRSIDLFQHCSNELTAATIRLILPQRCLLSPS

SEQ ID NO: 203076 - protein, 105 aa, Oryza sativa
  Clone ID: PAT_MRT4530_98294C.1.pep
KKKRKRVFSLPPTKKEVRPGPAPAKVTGANKILRGGFINGPPLKAGKVFFSQPVYFFYQAPRVFPEEEKNGAGSRKIPKSEPGGFFFNPGRVGHKKKQKGGGPQG

SEQ ID NO: 203077 - protein, 114 aa, Oryza sativa
  Clone ID: PAT_MRT4530_98295C.1.pep
MLWRALWWWRRWVPRPRPRARRLAAAVRPAGAAWCIARSGAAERTVQAALDYACGPAGGADCAPIQASGLCYLPNTLAAHASYAFNSVFQRARAAPGACDFAGTATITLTDPSQ

SEQ ID NO: 203078 - protein, 86 aa, Oryza sativa
  Clone ID: PAT_MRT4530_98296C.1.pep
MVWWCTLKLDPGRIPHSLQCYRDFPRSRHGNTRRKILLPFGIGGGVALSVASFGSRGIPVLVGSSRPEWLLFAPAGCDCRLHLLKP

SEQ ID NO: 203079 - protein, 274 aa, Oryza sativa
  Clone ID: PAT_MRT4530_98297C.1.pep
MMESKAAMMVTILLCCSSISPAFAQKHKGPPAAAAVSLPPSPAPSPAAPRHVDLADLLSVAGPFHTFLDLLEKTDVLRTFQSQANGSKDGITVFVPKDAAFASLARSATANLTSDQLKSLALYHALPRYYSLAEFNRLGGAASPVPTLAGGEYTVNVTDDMGTVHVGSMWSNPKISSSVYSTRPVAVYEVDRVLLPMQIFRTDPPMAPSPAPAPDAKPASDAASPLPGKSSSAKAKADEKKSSSSPPSSRRGAGIAGYFLALAASASAGLLLLC

SEQ ID NO: 203080 - protein, 72 aa, Oryza sativa
  Clone ID: PAT_MRT4530_98298C.1.pep
PCSSSSRPTKSETVLDPYGRPLKGRRIHLIFRLIPMSLNEQLGRIHSNLDISEFICVCLILLAGAGVTFIHH

SEQ ID NO: 203081 - protein, 154 aa, Oryza sativa
  Clone ID: PAT_MRT4530_98299C.1.pep
MEEFVPLPSMKQPVYGGTIEGGGVPGSSNIESLLSMGIDALEVACEGIMVLRTTGVAASTRSRQRVRIKQVRQPERIDVAEMTGTVTSRLSEAACIMVLRMTGVAASTRSRQRVRVRFASPSPAARGPPVLYAFLIAIDRSSKCGNQSGLMWPR

SEQ ID NO: 203082 - protein, 112 aa, Oryza sativa
  unsure (1)..(112): unsure at all Xaa locations
  Clone ID: PAT_MRT4530_9829C.1.pep
TEPQTKPYPLDMWKYGSALQQRPEDRSLYGRGATIKTMHPEPSLKPFLGILNRGGDDVSCLARFPKCRLQLPRRADPPKLQRLHDQRKRKGFYSNKLHIXALTKHKNGFLTS

SEQ ID NO: 203083 - protein, 45 aa, Oryza sativa
  Clone ID: PAT_MRT4530_982C.1.pep
CYSTLCKFTAYSGKLDLYKEFFGTGMRNNNTTSITHKKLQLTILD

SEQ ID NO: 203084 - protein, 80 aa, Oryza sativa
  unsure (1)..(80): unsure at all Xaa locations
  Clone ID: PAT_MRT4530_98300C.1.pep
MCKADLLQRKQVHESQTCYVEHVIFANRWVTSAILQFTIFFFRILSKLCQLLNLTMLQLKKKKKKKKKKKKKXKKKXKKK

SEQ ID NO: 203085 - protein, 93 aa, Oryza sativa
  unsure (1)..(93): unsure at all Xaa locations
  Clone ID: PAT_MRT4530_98301C.1.pep
GVCSNTTNFDIRTVLIEDYFDGTLHTLNFITALDKSLHRAHDSKLILHLVLQRRYHHHAEASELYASMLGELHXFKVAGEPFTNEFFVAFQTV

SEQ ID NO: 203086 - protein, 77 aa, Oryza sativa
  Clone ID: PAT_MRT4530_98302C.1.pep
TSSAPFLPPFSMDTHIITMHFFFTPCVTENNYHFPFCLNCFKTHPLLLKLPHSVIPPTNLALKSFLKTFPEGLLEIE

SEQ ID NO: 203087 - protein, 195 aa, Oryza sativa
  unsure (1)..(195): unsure at all Xaa locations
  Clone ID: PAT_MRT4530_98303C.1.pep
QPTAPTSTPLPATSAMAPGQPLNPRLLMREHPQPTXQQQPIQQAPPIQPVVQPIQQQVVQPAQQTPPRQRLQPIQQTLVRXQIVQPIQHPGSANASAGFAAPGGQPAQQFVNQVVPEHLVHHAQPDGTVVPQMVPEHLVRNIQPNLQNYQGGNLSYQFQPPSPQTQYQPGGLAQPQFAPQFGQFEPMQQQPQGAA

SEQ ID NO: 203088 - protein, 139 aa, Oryza sativa
  Clone ID: PAT_MRT4530_98304C.1.pep
IQPIQQTLPRQRLQPIQQTQVRQQIVQLIQHPGSANASAGFAAPGGQPAQQFVNQVVSEHLVHHAQPDGTVVPQMVPEHLVRNIQPNLHNYQGGNLSYQYQPPSPQAQYQPGGLAQPQFAPQFGQFEPMQQQPQGAAQQ

SEQ ID NO: 203089 - protein, 73 aa, Oryza sativa
  unsure (1)..(73): unsure at all Xaa locations
  Clone ID: PAT_MRT4530_98305C.1.pep
TSHLVAADCCGSTVDPLKEPSLVTVNTVLSILSGDYPAEKVYCYAXEDGAAMLTFEALAETCEFAQKWVPFCK

SEQ ID NO: 203090 - protein, 66 aa, Oryza sativa
  Clone ID: PAT_MRT4530_98307C.1.pep
PRSPLLSPTPYVYDGFGFLDQRFFFKKGGPPPSGVGFPVLPPPVRAFFIWAPWGVLSLKFLGVWAP

SEQ ID NO: 203091 - protein, 213 aa, Oryza sativa
  Clone ID: PAT_MRT4530_98308C.1.pep
MGVEVCVKAAVGHPDTLGDCPFSQRVLLTLEEKKVPYEMKLIDVQNKPDWFLKISPEGKVPVFNGGDGKWIPDSDVITQVIEEKYPTPSLVTPPEYASVGSKIFSCFTTFLKSKDPNDGSEKALLTELQALEEHLKAHGPFINGQNISAADLSLAPKLYHLQVALEHFKGWKIPEDLTNVHAYTEALFSRESFIKTKAAKEHLIAGWAPKVNA

SEQ ID NO: 203092 - protein, 87 aa, Oryza sativa
  Clone ID: PAT_MRT4530_98309C.1.pep
KTWNKTSIQLHTPEAIGKATKEGAESGPHVAVGHQILKKAGLIRSVKEGILGNLGGAPRHSLGQKGRASWLFGSLGMGYTQEGEVMV

SEQ ID NO: 203093 - protein, 171 aa, Oryza sativa
  Clone ID: PAT_MRT4530_9830C.1.pep
LKELTLASMRNFETWWDTNEVKGEELIFPEVEKLIIKSCPRLTALPKASNVISELSGGVSTVCHSAFPALKEMELYGLDIFQKWEAVDGTPREEVTFPQLYKLDIRRCPELTTLPEAPKLRDLNIYEVNQQISLQAASRYITSLSSLHLHLSTDDTETAPVAKQHDRVNGD

SEQ ID NO: 203094 - protein, 59 aa, Oryza sativa
  Clone ID: PAT_MRT4530_98310C.1.pep
LAYFGTIALVTIPALYSKNQEQVDRYAGMVHRNISRHYKIVDENVMSRLPRSFIRDKED

SEQ ID NO: 203095 - protein, 872 aa, Oryza sativa
  Clone ID: PAT_MRT4530_98311C.1.pep
MSSKFMITYKRKRVTSHVYTADGTNLKSSGASSSVPVSSLSPKYGVGADNNMLEEDNFSTSTKQQDVFDSREQVIKEESPKQSANAPGKERAELKSRESLSQKEQPEICSTHTAIGDACENKLECIDGTHNQSLVSSCVHADRTTNQAEDSSASVSVGVNSHQQPNNSTRPSQSKSRFSPMLTFHRRVKNKIGLEEPAAGSCSRDNDKHCSKLSCNPPSSPLDAIPLCRQTAGSSLDVEDKVTIAGTSTGQSVIVDHLLEQKSSHIPKSSVHHMVPSQPAKDANQSSIPEEGTPVSEFTRVLETSESDARVEDSNRTPVDAIEVPKVIEVKRDEHGNGQTNCLQSPRKNINVNLLKPTNRSEAADLLESQDSTKNIPIIVLDDDSDERGKEQEKSEVLDQLIQEKNKGRFSLGQINLNLNCAELPQERLLSLDETSVYKLKDQDQCVHERKQMSHPVERLFFTKEKDAMHGKKHHEETSTMHSSYSNLFDPAPSSSWITGNFKEPSVMPSELKFRILDKAPEFNLDLKLDSFPDSSVLALRHDKLFRGGTSSGSHFLTERLGTYSYKRHSSPWSEEELDFLWIGVRRYGTNNWNAMLRDRRLRFSNSRNAEDLAKQWDKEQRNLLGVDFLQSLRSSARGPPPPSHIPEDYVGSSSWTGCSKSPFLSAPTDLSLGDMYLRSARTSERGQHHLSNLGMLNLHATDNVPRNLSLGGFPVASSPYGRSSSKRRRASKLPKSYYDNKAVWCQDPSERVAQFLPINQEPINNLPEWLTKDAEMAGVRRLDADLWPSMQAPGHSAADRLNEMKPHVLPDGSLKRAPKRKAEWRAFSKKLFKSGDGALDLNQRAAAIAGPLGAIGTSDTGASSEETVSDS

SEQ ID NO: 203096 - protein, 58 aa, Oryza sativa
  Clone ID: PAT_MRT4530_98312C.1.pep
CREIVWGLSQALTRLSGWLLTFHSTILVFYPTVATGAPYVPLYHTLGGVLVTELLTTY

SEQ ID NO: 203097 - protein, 41 aa, Oryza sativa
  Clone ID: PAT_MRT4530_98313C.1.pep
AKLLRTLKHVGFYLYILCVFDTPYRLHSLLLSIRCFSAIDE

SEQ ID NO: 203098 - protein, 56 aa, Oryza sativa
  Clone ID: PAT_MRT4530_98314C.1.pep
MEFIAEAGRAALGAFNDSASLPAYMLISGALLRRSEEEDDDDEDELTKKKIRRESC

SEQ ID NO: 203099 - protein, 118 aa, Oryza sativa
  Clone ID: PAT_MRT4530_98315C.1.pep
MASCWEQLQGLCAAGHLRRRCRGRSLVLLQQLQLLGVLVVVVAGVAPGISEAQVRSRFKAIFMFGDSIVDPGNNNGQLTEARADFPPYGQDFPGGVATGRFSNGKVPGDLIAISSVPK

SEQ ID NO: 203100 - protein, 639 aa, Oryza sativa
  Clone ID: PAT_MRT4530_98316C.1.pep
MGNSLACFCCGGGAGGRGGRHVAPAALPSDPAYDEGLGHSFCYVRPDKFVVPFSADDLVADAKAAAAAEGEATTFRAISGAALSANVSTPLSTSVLLLMPEESSASATASSGFESSESFAAVPLQPVPRFSSGPISAPFSGGFMSGPLERGFQSGPLDAALLSGPLPGTATSGRMGGAVPALRRSLSHGGRRLRNFTRALLARTEKFQDSADLGSPDAAAAAVAACGGDPCGLQWAQGKAGEDRVHVVVSEERGWVFVGIYDGFNGPDATDFLVSNLYAAVHRELRGLLWDQREQNVQHDQRPDQPGSAPSTTASDNQDQWGRRRRTRRSRPPRGADDDQRRWKCEWEQERDCSNLKPPTQQRLRCNSENDHVAVLKALTRALHRTEEAYLDIADKMVGEFPELALMGSCVLAMLMKGEDMYIMNVGDSRAVLATMDSVDLEQISQGSFDGSVGDCPPCLSAVQLTSDHSTSVEEEVIRIRNEHPDDPSAISKDRVKGSLKVTRAFGAGFLKQPKWNDALLEMFRIDYVGSSPYISCNPSLFHHKLSTRDRFLILSSDGLYQYFTNEEAVAQVEMFIATTPEGDPAQHLVEEVLFRAANKAGMDFHELIEIPHGDRRRYHDDVSVIVISLEGRIWRSCV

SEQ ID NO: 203101 - protein, 107 aa, Oryza sativa
  Clone ID: PAT_MRT4530_98317C.1.pep
MAYVERGVVKDKRTIWRLSIISDFFRAIVNFIRMFFLTMFSIEKTDSYRKGYGSGKKWDGGPGGGGPGGGPYGGGRGGGGGLRGPRTLSDIRSNDQNSLPACGSCCG

SEQ ID NO: 203102 - protein, 308 aa, Oryza sativa
  unsure (1)..(308): unsure at all Xaa locations
  Clone ID: PAT_MRT4530_98318C.1.pep
TRCFSWEEFSSMGKQNYELPKKQKGARCTIMYTSGTTGDPKGVIIXSRALIAGVMTTEHLLKVTDKVVAEDDSYFSYLPLAHIFDQVIGNYCISKGASIGFWQADIRYLMEDVQMMKPTVFCGVPRVYDRIYTGINQKIQSGGMIAKSLFQYAYNYKLGNLRKGLKQDEASPFFDKIVFSKIKEGLGGRIRLLLSGAAPLPRHVEEFMRVTSCSVLVQGYGLTESCSGCFTSIANVFSMIGSVGPPVTTIEARLESIPEMGYDALSNVPRGEICLRGHTLFSGYYKRPDLTEEVFSDGWFHTGDIGEW

SEQ ID NO: 203103 - protein, 177 aa, Oryza sativa
  unsure (1)..(177): unsure at all Xaa locations
  Clone ID: PAT_MRT4530_98319C.1.pep
PPKPRPAGGAPGREGGGGRTGTVGRPDPHPSPSPSPPRPPSTDRGPPRPSCXPDPPPVALQRPDPPLAPXAPRSPPWSPPLPSPVRRSRARIPRPDPPPATLQQPDPPLPRPSWAGIRGTSPSQAVVVATVGPPWLPPSPSPVCRGRADQRREEEEEEEKLPMGGGEVGGGMGDRLV

SEQ ID NO: 203104 - protein, 298 aa, Oryza sativa
  unsure (1)..(298): unsure at all Xaa locations
  Clone ID: PAT_MRT4530_9831C.1.pep
RRDERHDDRERREDDDDDDRGQRGDDEGSRRQLHGDGDDVERAAANPTTEAAPRDDEPARMNGRPKGRRRRXGWRGQXGDGVPAKQRSSWRRGQRGDVDRRTGDVQEPAGGGEVLDADEEATPASFGRGGGDAGDEGGVAEPREVVATSAGARETRQWRPEVEQWRQRHCFAGEDASPVLSPRNRGLTEGEEVAARPREKTARPDGAPVRRERRLEAAGAEEREGRRRERASGGHRAKRRAGRGGGGGGDAGGGDGAAGRRTVEAAQAAGGGRRRGRERRAAGRGLGTTGRLGMGLKR

SEQ ID NO: 203105 - protein, 103 aa, Oryza sativa
  Clone ID: PAT_MRT4530_98320C.1.pep
MGHSNVWNSHPKNYGPGSRVCRVCGNPHGLIRKYGLMCCRQCFRSNAKDIGFIKVIHAAQAMISAYDKQGFKNRRGPGYRHPAAELTALRVAYKSAFFSARRM

SEQ ID NO: 203106 - protein, 135 aa, Oryza sativa
  Clone ID: PAT_MRT4530_98321C.1.pep
MRQSSRLSIIAVVISVTLVAITNNADVALASSLPPAPPAAAAGWTAVANVNDKSIQQAGQFALWIYRQITRLYFLRYVNVVSGQTQPYNGGYNYRLVVTVYGGPNWKTTLYDADVWGIPGTTTHWWFRSFTPKRS

SEQ ID NO: 203107 - protein, 558 aa, Oryza sativa
  unsure (1)..(558): unsure at all Xaa locations
  Clone ID: PAT_MRT4530_98322C.1.pep
PAGKKKKTAFSFTAEGEGEGGGGHGEGAGAAVDGDREPRRGAVGAGXGSPTFSVRVRRRLPDFLQSVNLKYVRLGYHYLISHGVYLATIPVIVLVCGAEVGSLSRDELWRKVWGEATYDLATVLAFLAVLAFTISVYIMSRPRPVYLIDFACYKPPDKLKVRFDEFLHHSKLCGFSDDCLEFQRKILERSGLSEETYVPEAMHLIPPEPTMANARAEAESVMFGALDKLFKFTGVKPKDVGVLVVNCSLFNPTPSLSAMIVNKYKLRGNIKSFNLGGMGCSAGVIAVDLARDMLQVHRNTYAVVVSTENITQNWYFGNRKSMLIPNCLFRVGGAAVLLSNRGADRRRAKYALKHVVRTHKGADNKAFNCVYQEQDDEGKTGVSLSKDLMAIAGGALKTNITTLGPLVLPFSEQLLFFATLVAKKLFNAKIKPYIPDFKLAFEHFCIHAGGRAVIDELEKNLQLQPVHVEASRMTLHRFGNTSSSSIWYELAYMEAKGRVRRGHRIWQIAFGSGFKCNSAVWHALRNVNPSPESPWEDCIDRYPVELVDGFATHNNTQQ

SEQ ID NO: 203108 - protein, 595 aa, Oryza sativa
  Clone ID: PAT_MRT4530_98323C.1.pep
MADRVFNQSSATIGAAGGYWSSYYCYKVSDQLSQSCGHEFAMLAKVKVKEEAAMAREQALLLTEIVNRGVEPSGPDAGSPTFSVRVRRRLPDFLQSVNLKYVRLGYHYLISHGVYLATIPVIVLVCGAEVGSLSRDELWRKVWGEATYDLATVLAFLAVLAFTISVYIMSRPRPVYLIDFACYKPADELKVSKAEFIDLARKSGKFDEDSLAFQSRLLAKSGIGDESYMPRCVFEPGTNCATMKEGRAEASAAMFAALDELFDKCRVRPKDVGVLVVNCSLFNPTPSLSAMIVNHYKMRGNILSYNLGGMGCSAGVIAVDLARDMLQASGAGLAVVVSTEAVSFTWYAGKRRSMLIPNAFFRAGCAAVLLSNRRRDFHRAKYQLEHIVRTHKGADDRSFRSVYQEEDEQRIKGLSISRDLVEVGGHALKTNITTLGPLVLPFSEQILFFAGVLFRHLFPSKTSAPPPPSADGDASAAAPYIPDFKRAFEHFCMHAASRDVLEHLQGNLGLRDGDLEASRAALHRFGNTSSSSIWYELAYLEAKGRVRRGDRVWQLAFGSGFKCNSAVWRAVRRVRRPARSPWLDCVEQYPARMNA

SEQ ID NO: 203109 - protein, 98 aa, Oryza sativa
  unsure (1)..(98): unsure at all Xaa locations
  Clone ID: PAT_MRT4530_98324C.1.pep
PXXSXGRRRPPXQQRATAAGGGCXRGVGSTQAATXXTTMLPAGLGXLNHAQFFWRRPAATTCGSLRHPCPXIPFFPLSQIYXRGGGRRRATKGDSVRA

SEQ ID NO: 203110 - protein, 169 aa, Oryza sativa
  Clone ID: PAT_MRT4530_98325C.1.pep
MEGGVFIGKRGRRRGEGRRGSGRRAGLGAWSWDGDGDSGGSRREAGRDGDGDSTAAAARGARRRDGRQRRRDSGRRGAGRNDATTTATATRQRRRWRAAVRGARRDGDGRAARGAAGDSGTAAGGDGDGSGREVRMAGKGKGLGNLVEHLECNEQCLFPIYPDFSLFPI

SEQ ID NO: 203111 - protein, 132 aa, Oryza sativa
  unsure (1)..(132): unsure at all Xaa locations
  Clone ID: PAT_MRT4530_98326C.1.pep
MTADRCIYDIGSKINDLSSASSRSAIFYGFNRGKFWTCTGVKQISQASCFYINKHXKHINTPXIYTHISNIIYKVHVCRRRRGSGQPDPQAWRGRGGRRPTTGPTLLGGVPRWYRQPPPSGLDTPRHISPTM

SEQ ID NO: 203112 - protein, 252 aa, Oryza sativa
  Clone ID: PAT_MRT4530_98327C.1.pep
MAAFVTFTDAVSLLRPQFEAAVAAMWPLASFIVADAFLYWVNESAAVLGVPKMSFFGISAFAQVMRELRNRHGLCAVMEPGDVDDDGYPATLAVPEFPHIRVTLEDLMATFGEPSAVRMMMELDGKLGKAIEESHGLIINTFHGLEAPYIKFWNEHVGPRAWPIGPLCLAQSASATADARPSWMEWLDEKAAAGRPVLYIALGTLAAIPEVQLKEVADGLERADVNFIWACRAKNIDLGLGFEERIKDRGLV

SEQ ID NO: 203113 - protein, 183 aa, Oryza sativa
  Clone ID: PAT_MRT4530_98328C.1.pep
MADSTRVLAVILVVDVVAFGLAIAAEQSRPSARVETDARQEWTYCVYRPDAATGLGAAALALLLIGQAVAAVSSRCFCCGAALRPGGARACALILFLSSWLTFLIAESCLLAGLVQSAYHTRYRKVFFENPPDCETVRRGTFGAGAAFSLITCVLTGAYYFYFSKSRVSYARREATIGMSPYS

SEQ ID NO: 203114 - protein, 144 aa, Oryza sativa
  Clone ID: PAT_MRT4530_98329C.1.pep
PLPRRFGKPLDLGTLPTPPCRLPSPPDPGGGQPPPPDLGVRRAAPAPAAAPLPGRRLAVRGWPPRAQPAGSTPPPTNPTTDPTPPSSRATDPPPLSPPTMDLSPRGRHLGAAAAPPLAAPPPVSSPSRRRGAPPPAATASPPAP

SEQ ID NO: 203115 - protein, 148 aa, Oryza sativa
  unsure (1)..(148): unsure at all Xaa locations
  Clone ID: PAT_MRT4530_9832C.1.pep
SDESFFLVLQGLVCPHGYXNMYIRDHCKLSLXSILLSAHRHPLFXGFYLSTSGIRHLTRGCIGSNRSPAKGXVLRSAGPGNCLVYVGVVQCCISAFNLLDAPVWMIYLSAYLSYVFVNLVLVSQFSFIGCLSLXGFCWYRLNCFTILD

SEQ ID NO: 203116 - protein, 415 aa, Oryza sativa
  Clone ID: PAT_MRT4530_98330C.1.pep
MKVTVMTADEQILTVDVDPDESVENLKALLEVETSVPLRQQQLHFNGREIQNTDKLSTVGVQDGDLVMMVKVTSNERPSQDIIRLNPDGSAVDPQAFRQHIRGDSQLMGQLLQNDPALAQAILGDDINELQNTLRSRHQQRLELKRKQEEELALMYADPFDVEAQKKIEAAIRQKGIDENWEAALEHNPEAFARVVMLYVDMEVNGVPLKAFVDSGAQSTIISKSCAERCGLLRLLDQRYRGVAIGVGQSEILGRIHVAPIKIGHVFYPCSFTVLDAPNMEFLFGLDMLRKHQCIIDLKDNVLRVGGGEVSVPFLQEKDIPSHIRDEEKLSKLASLSQGAAGESSTAREKTPDAPPRAPTTGAPAVNPPQPQGGGDFEAKVTKLVELGFDRASVIQALKLFNGNEEQAAAFLFGG

SEQ ID NO: 203117 - protein, 80 aa, Oryza sativa
  Clone ID: PAT_MRT4530_98331C.1.pep
MGKKAMITYAFTVQKVAMEATTCLVTPASQMLLLQPWFDGLMASTAVDRLSCVVLSASSWSGTLSYVRVTETLSHPHSIT

SEQ ID NO: 203118 - protein, 160 aa, Oryza sativa
  Clone ID: PAT_MRT4530_98332C.1.pep
IWQLDNRTPRPTQLHHAHPRHRCLGKGRAILQVKQLPTLACGKHGKADVSKGGGSANRRAPHVSGTRRPVHRGPGPRGWSTDGPDRPTANDGGERRTVRWMGGRGDPRPCKADSGDGAARRRLQQRLAVAGGGSRRRRAGRAVRRRRAASERWPRRLLWQ

SEQ ID NO: 203119 - protein, 134 aa, Oryza sativa
  Clone ID: PAT_MRT4530_98333C.1.pep
MASYKILVVFALLALSASAATAITTTIPYFPSTLAMGTMNPCKLYMMQTLGMGSYATMFMSQPIALLQQQCCMQLQGMIPQCHCGASCQMMQNMQNAICGGLGQQQMMMKMVMQLPYVCNMAPANFQLFPYGCC

SEQ ID NO: 203120 - protein, 247 aa, Oryza sativa
  Clone ID: PAT_MRT4530_98334C.1.pep
MARSVAVVVLLAMAAVAAAQAPGPAATPAAGATGPPNVTAVLEKGGQYTTFIRLMKETQQDTQLNSQLNNSFNGNGYTVFAPTDNAFNNLKPGTLNSLTQQQQVALVQGHVLPQFYSMDSFQTASNPVRTQASGTDGPYTLNITSTTNNNVNVSTGVVEVTVTNALSAVKPLAVYSVDKVLLPFELFGVKAPAAAPTASTAKPKKGGSTEAASGPAGAEDAEPTGAASARAVGWGVAGLAAVVGCLL

SEQ ID NO: 203121 - protein, 180 aa, Oryza sativa
  unsure (1)..(180): unsure at all Xaa locations
  Clone ID: PAT_MRT4530_98335C.1.pep
MAAGWPDPLFLSSHEAVAAAWEQGMGRQIHPSSVEAALLLSPRRLPPSPAAASPSPCLSLPSLVAVDRATTRKSSGSHHRCQVERSGGQRTATARSRPWSPFARATGSRRRRQADSSYGCGRRAPPFSPPAAXFRSPIPLRTASMLWSPPFLPPHAPLRRSSALPRPAALCSKGLFHSSS

SEQ ID NO: 203122 - protein, 121 aa, Oryza sativa
  unsure (1)..(121): unsure at all Xaa locations
  Clone ID: PAT_MRT4530_98336C.1.pep
QXXAPQXXPPPVCQGESGDTXXGRFPWXARXXPSKPFVLEKXGPRGPXXRGXXXASPGGKIPHTRFPLEPXGGFLSQFVGEFVWGVIRVGTTSVSSASESLGIKFQNFQGGFLMLGSSPPL

SEQ ID NO: 203123 - protein, 223 aa, Oryza sativa
  Clone ID: PAT_MRT4530_98337C.1.pep
WIPRTNSYHPAIHLPNQIKACRFDFGFITRNLHVALSHLAAEREIGDELGVREARRRGVPCRRGGEQLVPAAGAWGGGAAGESEGVGLGLDRGAGEAGGDDVRGAGGGGDRGRRGDQGGVQARGAAVAPGRVPGGSRALHAGARGVRGALRPGAEARLRHPAPLLRRRRRGPGGAAGRVRRLGGAARRAPVAGRVAGDVGEQDAPPSAVSVLSRESQNSQWLF

SEQ ID NO: 203124 - protein, 104 aa, Oryza sativa
  unsure (1)..(104): unsure at all Xaa locations
  Clone ID: PAT_MRT4530_98338C.1.pep
MSKLAVKSGCSELVAIAADRAPIVXLPAGHDHTRHIPTRAGTPSLYLARSPAIEADGERGRGRMVVAVVVVAVVPLPSRHCVEHSLTRAMPAKLEGEREKERPR

SEQ ID NO: 203125 - protein, 68 aa, Oryza sativa
  Clone ID: PAT_MRT4530_98339C.1.pep
YSRVEAADAKLSGKVSNFGSPTTPPVLCTKQVEVFANSPAYTENWEEKTKIRRRVKVAKRSSRKDLLT

SEQ ID NO: 203126 - protein, 427 aa, Oryza sativa
  unsure (1)..(427): unsure at all Xaa locations
  Clone ID: PAT_MRT4530_9833C.1.pep
MAPPIVGNGRAFPGHQPWPPAAIPVAVPPSPVLGSLPSAIKWDPLTPFYRFNPIPSLPVVPSPLPAALLSLPRRRPPPAACAASTVRRPAAPLPPPASPPPPPPRPALRFARXPPEARSRRRPSLSSTPAASSRLSLLAGASSGRAVAASSVAAASPPPASPPFHAETTGDAFPPAXQWHWCHCTPSSRLLSLVGASADVAISFVDAVATSPSPATPRFRRNTAVSPPTPPPASPESXRPPVPPRLFTSQPRHHHLRHRSGKVALGLASPSTEPLRGPSSLSPFVLVXRRPVGRPARRLAAPPPSSSSQRRVPRRPRLRAATAGCPRRFLAGPGRRRRRPLVVPGRRGVRPSVEPFSSVVRVRQASRCSPVVVFVLGSASSSLVPATSRLRPRIAAEAVPSPFVSVVPVCLRRARSSLSFPRLVAWW

SEQ ID NO: 203127 - protein, 813 aa, Oryza sativa
  Clone ID: PAT_MRT4530_98340C.1.pep
MGTAFATVFVLVFLISLCKSDDQLTPAKPLHPGDMLISDGGVFALGFFSPTKSNATLYVGIWYHKIPNRTVVWVANRDNPITAPSSAMLFISNSSDLVLSESGGHTLWEARNNITTGGSGATVVLLNSGNLVLRSPNHTILWQSFDHLTDTILPGMKLLLKYNGQVAQRIVSWKGPDDPSTGNFSLSGDPNSDFQVLVWNGTSPYWRSGAWNGALVSATFQSNTSSVTYQTIINKGNEIYMMYSVSDDSPSMRLMLDYTGTIKMLIWNSNLFAWSVLFSNPSYTCERYASCGPFGYCDAAEAFPTCKCLDGFKPDGLNISRGCVRKEQMKCSYGDSFLTLPGMKTPDKFLYIRNRSLDECMEECRHNCSCTAYAYANLSTASMMGDTSRCLVWMGELLDLAKVTGGGENLYLRLPSPTAVKKETDVVKIVLPVVASLLILTCICLVWICKSRGKQRSKEIQNKIMVQYLSASNELGAEDVDFPFIGFEEVVIATNNFSSYNMLGKGGFGKVYKGILEGGKEVAVKRLSKGSGQGIEEFRNEVVLIARLQHRNLVKLVGCCIHEDEKLLIYEYLPNKSLDAFLFDATRKTVLDWPNRFKIIKGVARGLLYLHQDSRLTIIHRDLKAGNILLDAEMSPKISDFGMARIFGGNQQQANTTRVVGTYGYMSPEYAMEGIFSVKSDIYSFGILLLEIISGFRISSPHLIMGFPNLIAYSWSLWKDGNARDLVDSSVVESCPLHEVLRCIHIALLCIQDHPDDRPLMSSVVFMLENNTAPLPQPKQPIFFVHKKRATEYARENMENSVNGVSITALEGR

SEQ ID NO: 203128 - protein, 85 aa, Oryza sativa
  unsure (1)..(85): unsure at all Xaa locations
  Clone ID: PAT_MRT4530_98341C.1.pep
XPTNRGSXAGYYNVPGRXGSXPVARMLAPHXRPCXTSPAPXCGTXSXAGSDXLSGTXGXACAEPGVXGGRPXRXXXPSDLAPXAX

SEQ ID NO: 203129 - protein, 211 aa, Oryza sativa
  unsure (1)..(211): unsure at all Xaa locations
  Clone ID: PAT_MRT4530_98342C.1.pep
MVSVGTRIRSETIQPFFXDIRIKINSKIQIKTLKKSRRRPPHAVASRRRVPAIAVARRTPDPLVAVRRTPSPRAAELPPSSSPHDVGSRGSRATDPRSSRPEAGVAVRRTRTPSPRAAEFXRRHDPAAPRSAWSVTLVAARHKSSPRAAEAPPSPSALRGRAPDVAVAVCRTRPSPHRRRRRPPHAGPTPMVASRGRGLVXSREPGRKDGG

SEQ ID NO: 203130 - protein, 234 aa, Oryza sativa
  Clone ID: PAT_MRT4530_98343C.1.pep
MSMHHLGFDRAAFNFKFLPFKVPYPVPFKLLGDEAKGWLDTTYLSQTGNIRISRGNKGTTFVLQKSADQRQLLLSAISAGTGVKEAIDDLTSSRQGIEADLNTLAGEWQLLWSSKTEDESWSFVASAGLKGVQIIKEDGQLKNLVRPFPGVSLNASGNICKNEDGNNFNLSINKGAIQAGGLQFPLDARGEFAMEILYIDNKIRISNINQHKLVHGSMKKSLDFITENLWRLHH

SEQ ID NO: 203131 - protein, 130 aa, Oryza sativa
  unsure (1)..(130): unsure at all Xaa locations
  Clone ID: PAT_MRT4530_98344C.1.pep
IAKPAPPCPKPAISNASVVGFRLFDVGSRGSRATDPRSSRPEAGVAVRRTRTPSPRAAEFXRRHDPAAPRSAWSVTLVAARHKSSPRAAEAPPSPSALRGRAPDVAVAVCRTRPSPHRRRRRPPHAGPTP

SEQ ID NO: 203132 - protein, 197 aa, Oryza sativa
  Clone ID: PAT_MRT4530_98345C.1.pep
PGSSNFQQHGVVTDPEAIDTLVRYSMACPALPTCGLAVTESERIMPSVNARLRDLLNSLDLPNESIVTRMTGCPNGCARPYMAEIGFVGSAPNSYQVWLGGSPNQERLAAAYTEKMPLEQLESLFEPLFVYFKQSRKGKESFGDFCHRVGFTALREFSHGYTAPAKGGKNRKNQRRVSLSDEMYAQLKGPSERDYSP

SEQ ID NO: 203133 - protein, 77 aa, Oryza sativa
  Clone ID: PAT_MRT4530_98346C.1.pep
MKATAKLMIVRSKRQTHGHAPTRRQLAIHDRDELTMPLHLHTTFGLQGNLKMNTDAKDNKKELMLRRLLEHKNPFIH

SEQ ID NO: 203134 - protein, 48 aa, Oryza sativa
  Clone ID: PAT_MRT4530_98347C.1.pep
VKIASSVNPMLIHTLVYTLKSVRDHVICDYCNLVKKPVRLVCINTYFS

SEQ ID NO: 203135 - protein, 151 aa, Oryza sativa
  Clone ID: PAT_MRT4530_98348C.1.pep
SRQRHRRHRIHRGKPLTPPPLPLVVGEGAAAGAAAHGGGRRRCPPPFGQIWEGGREGSAASATIAPSSSWIWELGREERHLRRLRWPPPPSLPLQPDPGAGRRERKGRGAPSPRRCPPLIQSDQGGREWMAPAVAGRGRSAPLGSGEGETG

SEQ ID NO: 203136 - protein, 997 aa, Oryza sativa
  Clone ID: PAT_MRT4530_98349C.1.pep
MGFDDDDEDLVVYGTPIEREEDTSARKRRAVAEAGQLRALPAWKQEVRDEEGRRRFHGAFTGGFSAGYYNTVGTKEGWTPQTFTSSRKNRAEMKKQSIYSFLDEEDIKDMGGNALETSQQYDTFGFTATEHARKQASKEQKERPSAIPGPIPDELVVPATTSIESRREARKAFLALSGTKTGGQKIQVDSHKSDKDDGATESFEELHASGNTPVYVLHPKQDLHGLGFDPFKHAPEFKDRKRLQKSARDRNRSDVSMRGSLLISNCTTQQFSSAPSYSVSVDIKGTDPSSVSGKRSYLLFGSSAGQYAPGFGIGALEELGVEDEDIYASGFAYEQMEVDIEPSKTASDSNYKLEDRKRGVFLAFKIASSSEYKLERFDPPEIPSDFDGRHKFLTPRQDVNNLSDLAPPEVPAPEDTSLRLLIEGCAAMVARCGKHIEDFYKEKSKTNTQFNFLNEGDGCSYYARKLWEYQQKYIDQQKPDTVQSKSSDKLTAENRGKILGERPLDRSTKSSSSSFPAKEAIQLQSNLADNFVKPISLDGLPEYEKPFRNDPAKQARFEQFLKDKYQGGLRPANLIPTSTMSDVDRARERLDFEAAAETIEKGKEKKAMDPLSLLGLSGINEQRFVSSTESERSIPARDEKSIYPRREEFEWRPSPILCKRFDIVDPFMGKPFHVQRPRSKMDSLIFMSESTTRTNEVESSSIAPQHTSVAGATETEAKGAATDPEIESSSVQRPVDLYKAIFSDDSDDDMAEPLANQPVDPVKTSEDANMVLNRLVAEDFLESLGKELGLDVPPEKPTPPNVLFRSETPSTANAIGISRNRKAITCQEIKENESALDKEEIANASADVPSDNVEELGLKYEKQEHRAEKSRSRSSHRQTQSGSLDSDSTSDQHRSRERRSRHKIRSGTPGSDSSIEHHRSKKRKSHSKHRTRRSRSPYADSSDSQYTKRKHREKRHHRTRNPDTDSSDHEYEERHKSSSRRSSDKDRSRRRSRHHKR

SEQ ID NO: 203137 - protein, 1248 aa, Oryza sativa
  unsure (1)..(1248): unsure at all Xaa locations
  Clone ID: PAT_MRT4530_9834C.1.pep
RAGPPASLADGWGPPVIPFLPPLPPPRRRYPIVVEPTIRNIKVAQVLIDGGSSINLLFASTLDAMGIPQSELTPTDQPFHGITPQSSSRPLGKITLPVTFGQANNFRTEQITFDVAEFDTAYNAIIGRTALAKFMAASHYAYQVLKMPGPKGTITIQGNAKLAVQCDKRSLDMVEQTPSPPATTEPPKKVSKTNKTPKPDGAIKIVQLSSANPDKTELALITFLRDNADVFAXQPSDMPGVPREVIEHKLMVRPDAKPVKQRLRRFAPDRKQAIREELDKLLKAGFIREVLHPEWLANPVMVRKANGKWRMCVDFTDLNKACPKDHFPLPRIDQLVDSTAGCELLCFLDAYSGYHQISMAKEDEEKTAFITPFGVFCYIKMPFGLITAGNTFQRTVQGALSNQLGNNVEAYVDDIVVKTKAGDSLIDDLWETFDNLXXYRLMLNPEKCTFGVPSGKLPGFLVSGREIEANPEKIKAIENMKSPIRLKEVQRLTGCMAALSRFVARMGERGQPFFALLKKQDKFVWTQEAKEAFIALKRYLSNPPVLVAPQPNEELFLYIAATPYSVSAVIVVEREKVQRPVYYVSEALHDAKTRYPQIQKLLYAVIITSRKIRHYFQAHRVTVVSSFPLGEVVRNKDVVGRIAKWVVELSQFDVHFVPRTAIKSQVLTDFVADWTMPDNKSDNQVDNKTWIMAFDGALNSQGVGAGFILTSPSGDQFKHAIHLNFRATNNIAEYEGLLAGIRAAAALGVKRLIVKGDLELVANQVHKDYKCSNPELSKYLAEVRKLEKRFDGIEVRHVYRKDNIEPDDLARRASRQEPLEPGTFLDILTKPSVKEVSGEVSSNAPDISSKATKAERTVANIETTDDWRIPLIKFITSEELPEDDTEAEKITRKAKIYCMVGNDLYKKAPNGVLLKCVSSDDGRHLLLDIHEGICGSHAAGRTLVGKAFRQGFFWPTVLKDACDMXTHKATRASASDYPSYLAFLVLGARHTRAFPTRTGRLQVPIXVAIDKFTKWIEAVPTGEIKADNAIKFIKGIFCRYGLPHRIITDNGSQFISADFQDYCIGLGVKICFASVSHPQSNGQVERANGIVRQGIKTLLWAVRTTPTTSNKETPFFLVYGSEAMLPNELRHQSTRVQKHSDEDQVEQRDIDVNLLEEHRERVAVRATSYQQALRRYHEKRIRARILSIGDYVLRRVQSXAGRNKLSPKWEGPYTITQVLRPGAFKIADGEGRELANSWNIDQLRTFYV

SEQ ID NO: 203138 - protein, 89 aa, Oryza sativa
  unsure (1)..(89): unsure at all Xaa locations
  Clone ID: PAT_MRT4530_98350C.1.pep
MGLPPAPWAVAAAAAAGYRQVLPAGHRRVGAARRGGGRRRSRRGTSPPXDSWSRSICGGGSHALLPQRPFEANFQAEFLQDSTRDEFHS

SEQ ID NO: 203139 - protein, 60 aa, Oryza sativa
  Clone ID: PAT_MRT4530_98351C.1.pep
LPPNCSEWHNLMCDTAQCCPPPRSGIQTCDCSISGSDWSKRKKKGRHGFNSKLKTLTVVK

SEQ ID NO: 203140 - protein, 63 aa, Oryza sativa
  Clone ID: PAT_MRT4530_98352C.1.pep
CYLNSLLISPGCEHLRFFKQVFQASTGPNRWLSRGGPCCQRSQQGTGVALAINYICSITYYKQ

SEQ ID NO: 203141 - protein, 39 aa, Oryza sativa
  Clone ID: PAT_MRT4530_98353C.1.pep
ENNSMKRITQSMRNLTRRYPTFSQCTCQNIVCVSLHKGK

SEQ ID NO: 203142 - protein, 170 aa, Oryza sativa
  Clone ID: PAT_MRT4530_98354C.1.pep
SWLTSRDTIPLAEWICSELHFCESESITPEMSTWGFFSLSTRCFDFLLDILTVPAPFSCSLLLLRANPSLSLPSNSPTLQSGITTNSIRDRNCTNSPDLISYSTQDPQFLINPRAPKAGAASALLCSAPRGLLFARSLEASRDFSCEFPFFFLFSLLLAIKFPDFFLKRE

SEQ ID NO: 203143 - protein, 67 aa, Oryza sativa
  unsure (1)..(67): unsure at all Xaa locations
  Clone ID: PAT_MRT4530_98355C.1.pep
MGVFTMAVSSPALACKAAAKVYCVGRITMRKXVVNPKPAEYVSPRDGAYRVLYLMPVSCEPGYYLTR

SEQ ID NO: 203144 - protein, 336 aa, Oryza sativa
  Clone ID: PAT_MRT4530_98356C.1.pep
MTLICSMSKKLTMVMANRLTKGMRWNCCPATRYDTGQENLDMIGNRYSSENAMEQPEDQKFSIASGSQLSSSQNLLNQKNHLDSTSPSNITSESYPERNCQIIPSGASFAERNLKVQKKVASSASGQLISDNVTGHPGHQTLTRRASYPCENHEIGKRSLGKRGLGHSDVAMGTSMVVDGSFVSSISSDNSVEENSFRQLQDAVSQLDVKTKMCIRDGLYRLARSAQNRQVFPNTMNNNGDSHNVKDMQNAETSGKFVDPGSIETQTNPIDRSIALLLFHQPSEHVTGAVDEAASLKSHNDNHQAAAKNQRVMHASSVHSPRGQGDPMDAKSCRNN

SEQ ID NO: 203145 - protein, 152 aa, Oryza sativa
  unsure (1)..(152): unsure at all Xaa locations
  Clone ID: PAT_MRT4530_98357C.1.pep
MERNCENIPNPRCGDAGATRNRRSKARDQWSYRSRRLDVRDRRGPAYCACGIGALPLGSSAAPRWFAGPSDTGSVPTSRSRASVLRDRXSAWLPIARNHLGAADWGCGPAPPTCITKSLSRFQRAEKNATSNFASLLYYPCILKLCTSWNLV

SEQ ID NO: 203146 - protein, 142 aa, Oryza sativa
  Clone ID: PAT_MRT4530_98358C.1.pep
MCSAARGVRRHGSPVIIAWAILFFSIASLSLSEAQLQVGYYNYTCPRAEDLVRNVVRAAILRDPGNGPGLVRLFFHDCFVRKKNIVKLQQIIPLLPPCPSPGSSCGEIAGLGECGGSPWWGGGGGGPGSLDRERERLGEGGG

SEQ ID NO: 203147 - protein, 77 aa, Oryza sativa
  unsure (1)..(77): unsure at all Xaa locations
  Clone ID: PAT_MRT4530_98359C.1.pep
TRPVAHVHHAMDAEGIIIRNCKXVSENGEMILIXLRAQTDPLTVCRQVVLCMFDVXRSASIGIESVVATEYLGSDAM

SEQ ID NO: 203148 - protein, 140 aa, Oryza sativa
  Clone ID: PAT_MRT4530_9835C.1.pep
MGGTAGCGGGGDMGSGASRRSGWASRGGCGTPRRALQKAGYADESAALSSSESTATSPRLKWAAGVVKVVGEGALHQESGPQGRAAGMVGDVEGVRRSSRRSSQEGIDEADAVSSSLCDPPSFSFFSAAGSGGPPVTLPH

SEQ ID NO: 203149 - protein, 84 aa, Oryza sativa
  Clone ID: PAT_MRT4530_98360C.1.pep
VFFYHKWIQSRVQTVTSYMRISQKNKKSVYKGFPETNYLSQITCFCTSYDVRKIGPISGKKKVMSSKACLDRGGLGLSPLDKQR

SEQ ID NO: 203150 - protein, 42 aa, Oryza sativa
  Clone ID: PAT_MRT4530_98361C.1.pep
MSGATLTIILGFALNVPAFHVGENLVPAALPLLNSSTPLRRE

SEQ ID NO: 203151 - protein, 53 aa, Oryza sativa
  Clone ID: PAT_MRT4530_98362C.1.pep
VELGQRLTQPGQSPSGNEITPASGKTLISNTPIADDLRIIPFQNMHDSARIRI

SEQ ID NO: 203152 - protein, 209 aa, Oryza sativa
  unsure (1)..(209): unsure at all Xaa locations
  Clone ID: PAT_MRT4530_98363C.1.pep
MAHGRAAAVRRPKSSSASSAGAAAERKRKRAAAAKTVSLKNQIRSTERLLRKRRKIERMIRRLEKQQRSNADDASNKLSKLKEDLEYVRFFPKNEKYVSLFSGGNTPDMLEKRNKWRKQIKENLMAAAENGKDLEETASDDDTVDVSDDDFFMSGSSSDEEADDEWTDKSAKXPASSASGKAASGMSSDEKNQRQRDARVLMPPPRSLA

SEQ ID NO: 203153 - protein, 167 aa, Oryza sativa
  Clone ID: PAT_MRT4530_98364C.1.pep
MAHGRAAFVRRPKSSSASSAGAAAERKRKRAAAAKTVSLKNQIRSTERLLRKDLPNDIRVAQEKKLEELKRQQELQNQLAIQRTVQLRDRKIKFFERRKIERMIRRLEKQQRSNADDASNKLSKLKEDLEYVRFFPKNEKYVSLFSGGNTPDMLEKRNKWRKQIKEI

SEQ ID NO: 203154 - protein, 44 aa, Oryza sativa
  Clone ID: PAT_MRT4530_98365C.1.pep
SLSTSFYTRRHLALSGALDSYRCMIGARETQQPMVFRIDSMDRA

SEQ ID NO: 203155 - protein, 928 aa, Oryza sativa
  unsure (1)..(928): unsure at all Xaa locations
  Clone ID: PAT_MRT4530_98366C.1.pep
MALYRRLLHLRRLQPPAEHASSVASATPRSSRCSRRRAPSPPSPQSPASSRRSSSSPPDDSAGLGATRNEQTEENATGLQRIEDGSVVSNEHTVKWRIFTDNARDFLLKAKLGSALPSLTGNLCVYYWMGRTRITCIHVPDLHSAFLLGGEPYQAYNMDLLSAERKKNFTFFLSGWEDSGSLIGISLCPVAWLSSHMIASRVLSLKEVYLQTMALARNLDEAEKFFQAALHEAKEGFGLRDPHVASALNNLAEFYRLKKEYEKAELLYLEAIEILEESFGSDDIRCFCGTWTQELAATLVGTALHSLGICYHLQRKFALAQTCYERALKVLLNMYLPEFHIEGRVMGIGHPEYASTMYLLGKVLSQQGKDAEALIEESIRILEESGLGESPICIQRMRYLSTGISPKLLGASGVAGDRSMRRLRVFRSMPWVTNKSGISRLSWLKKFAIGLHFFMLLRWNLSGTTQHEKVQVLQTWRQTGSVVEYKNQFDSLVYQVRVFDPSVGGMMLVSHFILGLEDEIRAADEIRAAVVVQLPDTIQQAAAVALMQESVLLELGTYKVKKLSYKPSGVKGETSHSSDETLAIKPERAELWKAKQLRDYRWASGLCFKCGDKYSPDHQCAVTGQIKAMQITEXPTCLPPDRTYDHAIALLPDAAPVNSKPYRYXPLQKDEREHQVKEMIDSGLITPSMSPFASPVLLVKKKDGTWRFCVDYRKLNLITVKIDKWRCYLQRCPFTIRIDHKSSCHLNDQVLGTELQQKAMTKLMGLQYNFQYKKGVENIVADALSRMHVHSSISALTVVQPIWLQEAVNSYAVDSQAQHLLMELAIKSHNAQVPLPIPKEAWVDISKDFIEGLLKSDGYTVILVVVDRFTKFAHLIPLRHPFTASQVASAVDKAVFKTHGIPHSIVSIMIRSLPAGFGVICSKCGTLN

SEQ ID NO: 203156 - protein, 81 aa, Oryza sativa
  Clone ID: PAT_MRT4530_98367C.1.pep
IKNPEGIDARWTTVGDPLLLPQLQPPTPFLSFSFSVEAWGYTVDDDRSSRAVAEAVHRRQDFAEPHLLLDICSRVSRRPTL

SEQ ID NO: 203157 - protein, 71 aa, Oryza sativa
  Clone ID: PAT_MRT4530_98368C.1.pep
MPAKKGCKKLTISSKNGLRGPPAPVGVLETRELGPDVFPLGQKNPGPLGPEGEVLEKNPLGRDPPLGKPPP

SEQ ID NO: 203158 - protein, 637 aa, Oryza sativa
  Clone ID: PAT_MRT4530_98369C.1.pep
MAASSSAAASTSCAVAAEANGSTSTIVATTKPTGHHILKIDGYSRTKAMVAAGDSIDSSRFHAGDHAWRIRYYPNGTDRSNQNPDAISVMLELQDAAAGRNNGAAAAAAVKAKFVFRLLNKDGEPVPSRTYRSSVHSFPSSDGFKNWGFLRFITHGDLEKSGHLADDGFAVRCDVTVMGGIELRVEPASSLAVPEPDMHRHLGRLLSAGDGADVTFRVAGGEAFTAHRCVLAARSPVFKAELYSRGGFLRPAAAGRPGTRVIDVDDMDAGAFGALLHFVYTDTLPEMASADVPAMARQLIAAADKYKVERLKLVCEDKLSRRVVADDTSMTPTPMSTPTTMTDSTTTACRWGAKFQTLRQRPCQRECQDQLLDLAGERVARYSQSGDKCSISKKTDRWVCNSFIKRDELEKSGHVVGNRFAIRCDLTFNVQDLRVRGLVAVQLPPPVLGCHLAERLLFDDETADVRFRVRGETFPAHRAELLGSSMKEHAARTIRVDDMKVPVFAALLYFVYTDELPEMEDDERTVIMAPHLLVPADRYDMDRLAEEGVRGQDGEAPRRRHGGDVAGVGRAPWLPAAQGGHLEVPRRVAAGEVEDGHGERGVPTCDHGFPLHSHGDCSCHARRKFGLASELTVEMRR

SEQ ID NO: 203159 - protein, 114 aa, Oryza sativa
  Clone ID: PAT_MRT4530_9836C.1.pep
AGSSSTGGQERSNRGSGDPRPGHRKASRLVSDDTDELNIFYTSISLAPPASHDRWARGPTRHRRSGWVGQQDSVREPLLGRVLAGRKFDRRRRDRGRVALRAAESSAGDRAVRI

SEQ ID NO: 203160 - protein, 61 aa, Oryza sativa
  Clone ID: PAT_MRT4530_98370C.1.pep
ASASLKIPSQVGDIQLSAPELHDQLVPRVHVPLRRLAQQHQHCGWSRRRIGCTQWRTCWAS

SEQ ID NO: 203161 - protein, 94 aa, Oryza sativa
  Clone ID: PAT_MRT4530_98371C.1.pep
MPTQALANPLTEHATGKAYITQTPNRCKCGEHPAVITSRQKRSGKKQNCQRGDLRSALVNGEDRDYAQEEQRSIAVGIPCKKGGVEVQTVEDIG

SEQ ID NO: 203162 - protein, 80 aa, Oryza sativa
  unsure (1)..(80): unsure at all Xaa locations
  Clone ID: PAT_MRT4530_98372C.1.pep
XGQNLNGSSPIWCXSKSTNTPSTNLGDPKLMISGNTLGQLIPEGMAYLQAVSAHRVLKGQTSSPNKRPWRVEPAGAEGLA

SEQ ID NO: 203163 - protein, 77 aa, Oryza sativa
  Clone ID: PAT_MRT4530_98373C.1.pep
VFDIVELIHSLHVNHSMFQNSGQKKGHAILIIATVYSLSIICTRLFFCFMDEVMRLWKIEDAGSEFSLYDFSPTPGR

SEQ ID NO: 203164 - protein, 148 aa, Oryza sativa
  unsure (1)..(148): unsure at all Xaa locations
  Clone ID: PAT_MRT4530_98374C.1.pep
MANKFTTKPHXFDGLDSPYWCKKMKAYIMAEDYDIWKKIANPYVILDEIKTAAVKTGFESNCKAHNILLNGIPRSDFDRLSHFETAHEIWIALYNFHLGTSNNKELLKDVFKKXIYIKIEVKHGEAKTTYISLFSSVTWSTRKFSMEK

SEQ ID NO: 203165 - protein, 378 aa, Oryza sativa
  Clone ID: PAT_MRT4530_98375C.1.pep
MSSSLQCPDDPAPSMNVEAVLHMKEGVGETSYAKNSTLQKKSMDTVKSLVTESARDVYASLKPERFTLADLGCSSGTNALGMVEEIVRSVAEVCRGSSPPPEFSVLLNDLPTNDFNTIFSRLPEFTGKLKADADADAGDDPMVFLSGVPGSFYGRLFPSKNVHFVCSFSSLHWLSQVPPGLLDETNGPVNKGKMFISSTSPPAVAAAYSRQFRRDFSLFLRSRAAEVVAGGRMVVSMLGREGERHADRNTTLLWDLLSESFAALVSQGVVEQGKVDAYDAPFYAPSIGEIEEEVRRQGSFRMEVARAYEASLSGSGDARKDGRTVSMAVRAIQESMLGHHFGTEIVDALFAKYTELVTATMEREEVRSVQIGVVLTRL

SEQ ID NO: 203166 - protein, 1601 aa, Oryza sativa
  Clone ID: PAT_MRT4530_98376C.1.pep
MGSVSGIDDLVFPPGQTFRFGSLDFVTNNFGKISLLDSESNQSGENRLSVPFGFPNAAESYFKTISTESASNHSAEIASSPTTPDQDDGAYPPVLMKLPDDLVAVSIATASSSRRPRRKSASTLISPSFREVGVILQPLGTVSTDQLDGDYSSPTVDSRPTNIVEYDEFSSRYHDPDLDDFDGSLDDNYTPLYFGVFMANNETEEQRQARETEARRETERRRLEEEHQAQEQERLRREQQERERTAKEAEDRRQRALEAGRRARDLIGQQDVEGTPVFRTPQQNAVAAITLLDTLLNQNELNQSDHVVNILNQTKTMIAASVPVNSESVHTPTGSRVPHFRSHDYRHPSLSITGAGSNRRSRGHDERSIHSPPDQYRERRVERPRSPPRRRPVDLRDTIIQRRAARGHHHSPNRHDDDLDGVAAFTDDLRRVDWPAGFKPTGIEKYDAGGDNKAMANYLPVALADSARSWLHGLPRGTIGSWAELSDHFIANFQGTFERPGTQYDLYNVIQKSGESLRDYIRRFSEQRNKISDITDDVIIAAFTKGIRHEELVGKFGRKPPRTVKLMFEKANEYAKAEDAVTASKQSGPSWKQNKGTPATGGGGSNNHKDRKRKPAELVATASHSSRQRSRVNTFDKIMNSQCPHHPNSNHVAKDCFVYKQFADQYTKTARKNSDEEQSTSRKKDDGDTPAGFQDHRKELNHIFGGPLAYESKRKQKLTEREINAVQPDTPQYLRWSEIAIKFDRSDHPDRVVHPGRYPLVLDPVVRNVKLRRTLIDGGSALNILFAKTLDDMQIPRSELKPSNAPFHGVIPGLSATPLGQITLPVTFGTRENFRTENISFEVADFETAYHAILGRPALAKFMAVPHYTYMMMKMPGPRGVLSLRSDIKQAVTCDKESCDMAQTHEMASARENNKDIFAWKPSDMPGIPREVIEHSLHVKEDAKPIKQRLRRFAQDRKDAIKEELTKLLAAGFIKEVLHPDWLANPVLVRKKTGQWRMCVDYTDLNKSCPKDPFGLPRIDQVVDSTAGCELLSFLDCYSGYHQIRLKESDCLKTSFITPFGAYCYVTMPFGLKNAGATYQRMIQRCFSTQIGRNVEAYVDDVVVKTKQKDDLILDLEETFASIRAFRMKLNPEKCTFGVPSGKLLGFMVSHRGIQANPEKVTAILNMKPPSTQKDVQKPTGCMAALSRFVSRLGERGMPFFKLLKKTDNFQWGPEAQKAFEDFKKLLTEPPVLASPHPQEPLLLYVSATSQVVSTVLVVEREEEGHVQKVQRPIYFVSEVLADSKTRYPQVQKLLYGILITTRKLSHYFQGHSVTVVTSFPLGDILHNREANGRIAKWALELMSLDISFKPRISIKSQALADFVAEWTECQEDTPAENMEHWTMHFDGSKRLSGTGAGVVLISPTGERLSYVLWIHFSASHNVAEYEALLHGLRIAISLGIKRLIVRGDSQLVVNQVMKEWSCIDDNMMAYRQEVRKLEDKFEGLELSHVLRHNNEAADRLANFGSKRETAPSDVFVEHLYTPTVPHRDTTQDADTHDVAMVEADWREPFIRFLTSQELPCHAQKFPNRIPSRMCIKTPVQDQPGYTNDNVDIQIHVLQTL

SEQ ID NO: 203167 - protein, 282 aa, Oryza sativa
  unsure (1)..(282): unsure at all Xaa locations
  Clone ID: PAT_MRT4530_98377C.1.pep
MAYRQEVRKLEDKFDGLELSHVLRHNNEAADRLANFGSKRETAPSDVFVEHLYTPTVPHKDTTQEADTRDIAMVEADWREPFIRFLTSQELPQDKDEAERISRRSKLYVMHESELYKKSPSGFLQRCVSLEEGRQLLKDIHSGICGNHAAARTIVGKAYRQGCQFFARQIHLPAQELQTIPLSWPFAVWGLDMVGPFKKAVGGYTHLFVAIDKFSKWIEAKPVVTITXADNARDFFINSVHRFGVPNRIITDNGRQFTGGVFQDFCEDFGIKICYASVAHPM

SEQ ID NO: 203168 - protein, 1989 aa, Oryza sativa
  Clone ID: PAT_MRT4530_98378C.1.pep
MGSVSGIDDLVFPPGQTFRFGSLDFITNNFGKISLLDSESDQSGENRISVLFGFPNAAESYLKTILTESASNHSAEIASSSTTPDQDDGAYPPVLMKLPDDLAAVFTTTASSSRRPRRKSASTPISPSFREVGVILQPLGTVSTDQLDDYNSSPTVDSRPTDIVEYDEFSSRYNDFDDFDDFDGSLDDNYTPLYFGVFMANNETEEQRQARETEERRRLEEEHQAQEQERLRREQQDRERIAKEAEDRRQRALEAGRRARDLIGQQDVEGTPVFRTPQQNAVAAITLLDTLLNQNELNRSDHVVNILNQTKTMIAASVPVNSESVHTPTGSRVPHFRSHDYCHPSLSITGAGSNRRSRGHDERSVHSPPDLHRERRVERPRSPPRRRPVDLRDTIIQRRAARGHHHSPNRHDDDLDGVAAFIDDLRRVDWPAGFKPTGIEKYDGTTNPESWLTVYGLAIRAAGGDNKAMANYLPVALADSARSWLHGLPRGTIGSWAELRDHFIANFQGTFERPGTQYDLYNVIQKSGESLRDYIRRFSEQCNKISDITDDVIIAAFTKGIRHEELVGKFGRKPPRTVKLMFEKANEYAKAEDAVTASKQSGPSWKQNKGTPATGGGGSNNHKDRKRKPAELVAAASHSSRQRSRVNTFDKIMNSQCPHHPNSNHVAKDCFVYKQFADQYTKTARKNSDEEQSTSRKKDDGDTPAGFQDHRKELNHIFGGPLAYESKRKQKLTEREINAVQPDTPQYLRWSEIAIKFDRSDHPDRVVHPGRYPLVLDPVVRNVKLRRTLIDGGSALNILFAKTLDDMQIPRSELKPSNAPFHGVIPGLSASPLGQITLPVTFGTRENFRTENISFEVADFETAYHAILGRPALAKFMAVPHYTYMMMKMPGPRGVLSLRSDIKQAVTCDKESCDMAQTREMASAREDIRLAAATASEGEIPATKTSKSGESEAKTKKIPLDPSDPTKTANNKDIFAWKPSDMPGIPREVIEHSLHVKEDAKPIKQRLRRFAQDRKDAIKEELTKLLAAGFIKEVLHPDWLANPVLVRKKTGQWRMCVDYTDLNKSCPKDPFGLPRIDQVVDSTAGCELLSFLDCYSGYHQIRLKESDCLKTSFITPFGAYCYITMPFGLKNAGATYQRMIQRCFSTQIGRNVEAYVDDVVVKTKQKDDLISDLEETFASIRAFRMKLNPEKYIFGVPSGKLLGFMVSHRGIQANPEKVTAILNMKPPSTQKDVQKLTGCMAALSRFVSRLGERGMPFFKLLKKTDDFQWGPEAQKAFEDFKKLLTEPPVLASPHPQEPLLLYVSATSQVVSTVLVVEREEEGHVQKVQRPIYFVSEVLADSKTRYPQVQKLLYGILITTRKLSHYFQGHSVTVVTSFPLGDILHNREANGRIAKWALELMSLDISFKPRISIKSQALADFVAEWTECQEDTPAENMEHWTMHFDGSKRLSGIGAGVVLISPTGERLSYVLWIHFSASHNVAEYEALLHGLRIAISLGIKRLIVRGDSQLVVNQVMKEWSCIDDNMMAYRQERETAPSDVFVEHLYTPTVPHRDTTQNADTHNVAMVEADWREPFIRFLTSQELPQDKDEAERISRRSKLYVMHESELYKKSPSGILQRCVSLEEGRQLLKDIHSGICGNHAAARTIVGKAYRQGFFWPTAVSDADKIVRTCEGCQFFARQIHLPAQELQTIPLSWPFAVWGLDMVGPFKKAVGGYTHLFVAIDKFSKWIEAKPVVTITADNARDFFINIVHRFGVPNRIITDNGTQFTGGVFKDFCEDFGIKICYASVAHPMSNGQVERANGMILQGIKARVFDRLKPYAGKWVQQLPSVLWSLRTTPSRATGQSPFFLVYGAEAMLPSEVEFESLRFRNFREDRYDEDRVDDLNRLEEVREAALIRSARYLQGLRRYHNRNVRSRAFLVGDLVLRKIQTTRDRHKLSPLWEGPFIISEVTRPGSYRLKREDGTLVDNSWNIEHLRRSMLKLYHCISLS

SEQ ID NO: 203169 - protein, 78 aa, Oryza sativa
  Clone ID: PAT_MRT4530_98379C.1.pep
MGMLPSLLFWLPIPPVMLGLEEAAALRKLKEIGGMNSPAIGVAHQGVNVNRNGGVIEAECLVEWAGWEARTIVRAAPP

SEQ ID NO: 203170 - protein, 262 aa, Oryza sativa
  unsure (1)..(262): unsure at all Xaa locations
  Clone ID: PAT_MRT4530_9837C.1.pep
TCGSTVVLCNRGPKTGPYMAEVGPRWTRCTRXLTPAGAVGPTRQPHPRAWAADGRTPRGSHSAGGGAPTPRWSPPATTGAAKRRPREGREGGKEATVHGSPRGDGGDGGGGRSGGRRWRGLGRRGQRRSGGRRPKRRSGRGRRGCGEAEGGGAEVGGGPGRRRRRTGAQRRRRRERATSRARIRRGGRAARGGNGRRKRGEGLNRAGAREGGRKRKETGAAFSGSINGAGGIXERGFQTNPRERGREILGERERESRGAIPP

SEQ ID NO: 203171 - protein, 1011 aa, Oryza sativa
  unsure (1)..(1011): unsure at all Xaa locations
  Clone ID: PAT_MRT4530_98380C.1.pep
GDPPAGFQDHRKELNHIFGGPLXAYESKRKQKLTEREINAVQPDTPQYLRWSETAIKFDRSDHPDRVVHPGRYPLVLDPVVRNVKLRRTFIDGGSALNILFAKTLDDMQIPRSELKPSNAPFHGVIPGLSATPLGQITLPVTFGTRENFRTENICFEVADFETAYHAILRRPALAKFMAVPHYTYMMMKMPGPRGVLSLRSDIKQAVTCDKESCEMAQTREMASAREDIRLAATTASEGEVPATKVSKSGESEAKTKKIPLDPSDPTKTAVIGAEEVIEHSLHVKEDAKPIKQRLRRFAQDRKDAIKEELTKLLAAGFIKEVLHPDRLANPVLVRKKAGQWRMCVDYTDLNKSCPKDPFGLPRIDQEQLINKDDLISDLEETFASIRAFRMKLNPEKCTFGVPSGKLLGFMVSRRGIQANPEKVTAILNMKPPSSQKDVQKLTGCMAALSRFVSRLGERGMPFFKLKKTDNFQWGPEAQKAFEDFKKLLTEPPVLASPHPQEPLLLYVSATSQVVSTVLVVEREEEGHVQKVQRPIYFVSEVLANSKTRYPQVQKLLYGILITTRKLSHYFQGHSVTVVTSFPLVDILHNREANGRIAKWALELMSLDISFKPRTSIKLADFVAEWTECQEDTPAEKMEHWTMHFDGSKRLSGTRAGVVLISPTGERLSYVLWIHFSASHNVAEYEALLHGLRIAISLGIKRLIVQGDSQLVVNQVMKEWSCLDDNMTAYRQKARKLEDNFDGLELSHVLRHNNEATDRPANFGSKREVAPSDVFVEHLYEPTVPQKETTQVADTHDIAMIEADWREPLIRFLTSQELLQDKDEAERISRRSRLYVIHEAELYKKSPSGILQRCVSLEEGRQLLKDIHSGICGNHAAARTIVGKAYRQVGGYTHLFVAIDKFSKWIEAKPVVTITADKARDFFINIVHRFGVPNRIITDNGTQFTGGVFKDFCEDFGIKICYASVAHPMSNGQVERANGMILQGIKARVFDRLKPYAGKWVEQLPSVLWSL

SEQ ID NO: 203172 - protein, 83 aa, Oryza sativa
  Clone ID: PAT_MRT4530_98381C.1.pep
MAQICVSSTGVSEENRGGGGGGVEEGMEAVHSGVIGDGVDGTATERRDVATAGDCGCGDDKEGSVAGNGGALKWWRRVQEWVL

SEQ ID NO: 203173 - protein, 1974 aa, Oryza sativa
  Clone ID: PAT_MRT4530_98382C.1.pep
MFRFGSLDFVTNNFGKISLLDSESDQSGENRISVPFGFPNAAESYFKTISTESASNHSVEIASSPTTPDQDDGAYPPILMKLPDDLAAVSITTASPSRRPRRKSASTPISPSFREVGVILQPLGSVSTDQLDDYNSSSTVDSRPTDIVEYDEFSSRYNYADLDDFDGSLDDNYTPLYFGVFMANNETEEQRQARETEERRRLEEEHQAQEQERLRREQQERERTAKEAEDRRQRALEAGRRARDLIGQQDVEGTPVFRTPQQNAVAAITLLDTLLRENELNQSDHVVNILNQTKTMIAASVPVNSESVHTPTGSRVPHFRSHDYRHPSLSITGTGSNRRSRGHDERSVHSPPDHHRERRVERPRSPPRRHPFDLRDTIIQRRAARGYHHSPDRHDDDLDGVAAFTDDLRRVDWPAGFKPTGIEKYDGTTNPESWLTVYGLAIRAAGGDSKAMANYLPVALADSARSWLHGLPRGTIGSWAELRDHFIANFQGTFERPGTQYDLYNVIQKSGESLRDYIRRFSEQRNKISDITDDVIIAAFTKGIRHEELVGKFGRKPPRTVKLMFEKANEYAKAEDAVIASKQSGPSWKPKKDTPATGGGGSNNHKDRKRKPAELVATASHSSRQRSRVNTFDKIMNSQCPHHPNSNHVAKDCFIYKQFADQYTKTTRKNSDEEQSTSKKKDDGDAPAGFQDHRTELNHIFGGPLAYESKRKQKLTEREINAVQPDTPQYLRWSEIAIKFDRSDHPDRVVHPGRYPLVLDPVVRNVKLRRTLIDGGSALNILFAKTLDDMQIPRSELKPSNAPFHGVIPGLSATPLGQITLPVTFGTRENFRTENISFEVADFETAYHAILGRPALAKFMAVPHYTYMMMKMPGPRGVLSLRSDIKQAVTCDKESCDMAQIREMASAREDIRLAAATASEGEIPATKTSKSGESEAKTKKIPLDPSDPTKTANNKDIFAWKPSDMPGIPREVIEHSLHVKEDAKPIKQRLRRFAQDRKDAIKEELTKLLAAGFIKEVLHPDWLANPVLVRKKTGQWRMCVDYTDLNKSCPKDPFGLPRIDQIRLKESDCLKTSFITPFGAYCYVTMPFGLKNAGATYQRMIQRCFSTQIGRNVEAYVDDVVVKTKQKDDLISDLEETFASIRAFRMKLNPEKCTFGVPSGKLLGFMVSHRGIQANPEKVTAILNMKPPSTQKDVQKLTGCMAALSRFVSRLGERGMPFFKLLKKTDDFQWGPEAQKAFEDFKKFLTEPPVLASPHPQEPLLLYVSATSQVVSTVLVVEREEEGHVQKVQRPIYFVSEVLADSKTRYPQVQKLLYGILITTRKLSHYFQGHSVTVVTSFPLGDILHNREANGRIAKWALELMSLDISFKPRISIKSQALADFVAEWTECQEDTPAEKMEHWTMHFDGSKRLSGTGAGVVLISPTGERLSYLLWIHFSASHNVAEFEALLHGLRIAISLGIKRLIVRGDSQLVVNQVMKEWSFLDDNMMAYRQEVRKLEDKFDGLELSHVLRHNNEAADRLANFGSKREMAPSDVFVEHLYAPTVPHKDTTQVAGTHDVAMVEADWREPLIRFLTSQELPLDKDEAERISRRSKLYVMHEAELYKKSPSGILQRCVSLEEGRQLLKDIHSGICGNHAAARTIVGKAYRQGFFWPTAVSDADKIVRTCEGCQFFARQIHLPAQELQTIPLSWPFAVWGLDMVGPFKKAVGGYTHLFVAIDKFSKWIEAKPVVTITADNARDFFINIVHRFGVPNRIITDNGTQFTGGVFKDFCEDFGIKICYASVAHPMSNGQVERANGMILQGIKARVFDRLKPYAGKWVQQLPSVLWSLRTTPSRATGQSPFFLVYGAEAMLPSEVEFESLRFRNFREERYEEDRVDDLHRLEEVREAALIRSARYLQGLRRYHNRNVRSRAFLVGDLVLRKIQTTRDRHKLSPLWEGPFIISEVTRPGSYRLKREDGTLVDNSWNIEHLRRFYA

SEQ ID NO: 203174 - protein, 118 aa, Oryza sativa
  unsure (1)..(118): unsure at all Xaa locations
  Clone ID: PAT_MRT4530_98383C.1.pep
NKSLVDRSPPRPGQPPPQVAPPLSPDPAAAIXPPPRLRQSPPPLPTRLPTAAAAGSPPPLPXDLVEGSVRSLLPPSPEGAAADIAAHXKPVFPLPSFPLPFASSPLPPLPCSASPPPS

SEQ ID NO: 203175 - protein, 76 aa, Oryza sativa
  unsure (1)..(76): unsure at all Xaa locations
  Clone ID: PAT_MRT4530_98384C.1.pep
MELASCGGVGCVAVFSWEAAALLLASAAAASCVPCWLFCCRPELAARDXHFPIHGLLFGLSSRSSDLTTDSVDISC

SEQ ID NO: 203176 - protein, 1648 aa, Oryza sativa
  Clone ID: PAT_MRT4530_98385C.1.pep
MGSISGIDDLVFPPGQTFRFGSLDFVTNNFGKISLLDSESDQSGENRISVPFGFPNAAESYFKTILTESASNHSAEIASSPTTPDQDDGAYPPVLMKLPDDLAAVFTTTASSSRRPRRNSPTVDSRPTDIVEYDEFSSRYNDFDDFDDFDGSLDDNYTPLYFGVFMANNETEEQRQARETEERRRLEEEHQAQEQERLRREQQDRERTAKEAEDRRQRALEAGRRARDLIGQQDVEGTPVFRTPQQNAVAAITLLDTLLNQNELNQSDHVVNILNQTKTMIAASVPVNSESVHTPTGSRVPHFRSHDYRHPSLSITGAGSNRRSRGHDERSVHSPPDLHRERRVERPRSPPRHRPIDLRDTIIQRRAARGYHHSPDRHDDDLDGVAAFTDDLRRVDWPAGFKPTGIEKYDGTTNPESWLTVYGLAIRAAGGDSKAMANYLPVALADSARSWLHGLPRGTIGSWAELRNHFIANFQGTFERPGTQYDLYNVIQKSGESLRDYIRRFSEQRNKISDITDDVIIAAFTKGIRHEELVGKFGRKPPRTVKLMFEKANEYAKAEDAVTASKQSGPSWKQNKGMPATGGGGSNNHKDRKRKPAELVATASHSSRQRSRVNTFDKIMNSQCPHHPNSNHVAKDCFVYKQFADQYTKTARKNSDEEQSTSRKKDDGDAPAGFQDHRKELNHIFGGPLAYESKRKQKLTEREINAVQPDTPQYLRWSEIAIKFDRSDHPDRVVHPGRYPLVLDPVVRNVKLRRTLIDGLSATPLGRITLPVTFGTRENFRTENISFEVADFETAYHAILGRPALAKFMAVPHYTYMMMKMPGPRGVLSLRSDIKQAVTCDKESCDMAQTREMASAREDIRLAAATTSEGEIPATKTSKSGESEAKTKKIPLDPSDPTKTAVIGAEEVIEHSLHVKEDAKPIKQRLRRFAQDRKDAIKEELTKLLAAGFIKEVLHPDWLANPIRLKESDCLKTSFITPFGAYCYVTMPFGLKNAGATYQRMIQRCFSTQIGRNVEAYVDDVVVKTKQKDDLISDLEETFVSIRAFRMKLNPEKCTFGVPSGKLLGFMVSHRGIQANPEKVTAILNMKPPSTQKDVQKLTGCMAALSRFVSRLGERGMPFFKLLKKTDNFQWGPEAQKAFEDFKKLLTEPPVLASPHPQEPLLLYVSATSQVVSTVLVVEREEEGHVQKVQRPIYFVSEVLADSKTRYPQVQKLLYGILITTRKLSHYFQGHSVTVVTSFPLGDILHNREANGRIAKWALELMSLDISFKPRISIKSQALADFVAEWTECQEDTPAENMEHWTMHFDGSKRLSGTGAGVVLISPTGERLSYVLWIHFSASHNVAEYEALLHGLRIAISLGIKRLIVRGDSQLVVNQVMKEWSCIDDNMMAYRQEVRKLEDKFEGLELSHVLRHNNEAADRLANFGSKRETAPSDVFVEHLYTPTVPHKDTTQDADTHDIAMVEADWREPFIRFLTSQELPQDKDEAERISRRSKLYVMHESELYKKSPSGILQRCVSLEEGRQLLKDIHSGICGNHAAARTIVGKAYRQGFFWPTAVSDADKIVRTCEGCQFFARQIHLPAQELQTIPLSWPFAVWGLDMVGPFKKAVGGYTHLFVAIDKFSKWIEAKPVVTITADNARDFFINIWHTP

SEQ ID NO: 203177 - protein, 66 aa, Oryza sativa
  Clone ID: PAT_MRT4530_98386C.1.pep
MELASCGGVGCVAVFSWEAAALLLASAAAASWFVVRVELSLLRFDDGLRGHLLLSPGMLTPKSMAQ

SEQ ID NO: 203178 - protein, 73 aa, Oryza sativa
  Clone ID: PAT_MRT4530_98387C.1.pep
PSPNHPHHAKVSPPPSHPLPQRWAVPSCTAVNPAVGQPDTPADPTPSHPPSPPVPRKGSSYTSDQAVTHSRLW

SEQ ID NO: 203179 - protein, 73 aa, Oryza sativa
  Clone ID: PAT_MRT4530_98388C.1.pep
MLPQLGRLHPNPPRDKYYFDSSRKGNWPTPKTRGTDCGIVVFDIELPVFVIGDSCNPPSTEEVLEHSYNAEDN

SEQ ID NO: 203180 - protein, 126 aa, Oryza sativa
  unsure (1)..(126): unsure at all Xaa locations
  Clone ID: PAT_MRT4530_98389C.1.pep
SSDLALPPPPTNTSADHSGTRITQPXGISHVGRPPSFHDKAFPKPTQVYHMPTRGVPDQQQVRSQTILCQCHTHRRDRQVAAVLVRSFAAAEDRRSTAVGAFRSRRRAVVRRRACKPEPPSRRRRW

SEQ ID NO: 203181 - protein, 1094 aa, Oryza sativa
  unsure (1)..(1094): unsure at all Xaa locations
  Clone ID: PAT_MRT4530_9838C.1.pep
MPRYKPEYLFGVEGFVQELRTMSFVIGFGTAPFYAQIPHDRHEEKCRVKVTLNSNSEDIPSVMFEAGGRNYIHACQEVARIAIGELRDRYSDQLADTEYRYHPRQPQGSDRGRYLETEGIENDATTRHLVEMLWAMDESLAETVLAAQDREDRNRGKICKLEDKVDRLEKELAALKGEAPPQKARIRLTARKRALFVPHYQLAPKVCVVEKEVTPALADPPVIIISDDEEEESKRTHSKIEWVATQDDEDEPNEPSIDLRCSEELEXLFPPVSPLVPCSCQMVNTRSNGNGPSNNNNNNGENPTLAQVLAQQTQLMNMMMQQLQNQQNQGNNHALPQNTLAEFLRVRPPIFSSTTNPVEAGDWLHTIEKKLDLLQCTDQEKVSFASHKLHGPASEWWDHFRLNRTTAEPITWLEFTAAFRKTHIPSGVVSLKKKEFRLLTQGSRSVTEYLHEFNRLTRYAPEDVRNDEERQEKFLEGLNDELSYPLMTGDYYDFQKLVDKAIRQEDKYNRMEQKKRRIAQFKTQQGNNQKPRLTLGPQSMPQGGSSSVVRPQRQFFNNNAGNNIRNQALRPVAVSTQQQPAKKEQGSKPVVCFNCGDPGHYADKCPKPRRVKVVPAQSNSTAPASKARVNHVAAAEAQDAPDVILVKFLGHVISAGGVAVDPSNVESVTNWKQPKTVSEIRSFLGLAGYYRRFIENFSKIAKPMTRLLQKDVKYKWSEESLEAKPTLIDQVREAQINDPDIQEIKKNMRRGKAISFLEDEQGTVWLGERICVPDNKDLKDAILKEAHDTLYSIHPGSTKMYQDLKERFWWAIIVVAREDRHRARQVVAVLVCRFATVGDRRSIVAVIKPKSAAISTSSPSPSVGLPPSLWSPEGALRWIVLCKGYCHNSFPRYRGGIEAHGDMIGKRVVRQLASVTRGVQRGQCSSHGGRRVPDERIELATTMRGSEHYYRRPKWCRLRNPLRKTTHQEHIHQEYNKKNTFIKNRMERRRAPLPSPPPQTSPLPPPSSDGEEEGAAVFSTTTTTTVAGSRCRHLPGYRTTAASPPIAKPPQPPPLPPDLAEGRAPPLGHRTTAASAPAVEPPQSHRRHLLSRQI

SEQ ID NO: 203182 - protein, 1984 aa, Oryza sativa
  Clone ID: PAT_MRT4530_98390C.1.pep
MGPFSGIDDLVFPPGQTFRFGSLDFVTNNFGKISLLDSESDQSGENRISVPFGFPNAAETYFKTISIESASNHSAEIVPSPTTPDQDDGAYPPVLMKLPDDLAAVFTTTASSSRRPRRKSASTPISPSFREVGVILQPLGTVSTDQLDDYNSSPTVDSRPTDIVEYDEFSSRYNDFDDFDGSLDDNYTPLYFGVFMANNETEEQRQARETEERRRLEEEHQAQEQERLRREQQDRERIAKEAEDRRQRALEAGRRARDLIGQQDVEGTPVFRTPQQNAVAAITLLDTLLNQNELNRSDHVVNILNQTKTMIAASVPVNSESVHTPTGSRVPHFRSHDYRHPSLSITGAGSNRRSRGHDERSVHSPPDFHRERRVERPRSPPRRRPIDLRDTIIQRRAARGYHHSPDRHDDDLDGVAAFTDDLRRVDWPAGFKPTGIEKYDGTTNPESWLTVYSLAIRAAGGDNKAMANYLPVALADSARSWLHGLPRGTIGSWAELRDHFIANFQGTFERPGTQYDLYNVIQKSGESLREYIRRFSEQRNKISDISDDVIIAAFTKGIRHEELVGKFGRKPPRTVKLMFEKANEYAKAEDAVTASKQSGPSWKPKNTPATGGGGSNNHKDRKRKPEELVATAAHSSRQRSRVNTFDKIMNSQCPHHPNSNHVAKECFIYKQFAEQYTKSTRKNSDEEQSTSRKKDDGDTPAGFQDHRKELNHIFGGPMAYESKRKQKLTEREINAVQPDTPQYLRWSEIAIKFDRSDHPDRVVHPGRYPLVLDPVVRNVKLRRTLIDGGSALNILFAKTLDDMQIPRSELKPSNAPFHGVIPGLSATPLGQITLPVTFGTRENFRTENISFEVADFETAYHAILGRPALAKFMAVPHYTYMMMKMPGPRGVLSLRSDIKQAVTCDKESCDMAQTREMASAREEIRLAATTVSEGEVPAAKISKDIFAWKPSDMPGIPREVIEHSLHVKEDAKPIKQRLRRFAQDRKDAIKEELTKLLAAGFIKEVLHPDWLANPVLVRKKTGQWRMCVDYTDLNKSCPKDPFGLPRIDQVVDSTAGCELLSFLDCYSGYHQIRLKESDCLKTSFITPFGAYCYVTMPFGLKNAGATYQRMIQRCFSTQIGRNVEAYVDDVVVKTKQKDDLISDLEETFASIRAFRMKLNPEKCTFGVPSGKLLGFMVSHRGIQANPEKVTAILNMKPPSTQKDVQKLTGCMAALSRFVSRLGERGMPFFKLLKKTDNFQWGPEAQKAFEDFKQLLIKPPVLASPHPQEPLLLYVSATSQVVSTVLVVEREEEGHVQKVQRPIYFVSEVLADSKTRYPQVQKLLYGILITTRKLSHYFQGHPVTVVTSFPLGDVLHNREANGRIAKWALELMSLDISFKPRTSIKSQALADFVAEWTECQEDTPVEKIEHWTMHFDGSKRLSGTGAGVVLISPTGERLSYVLWIHFSASHNVAEYEALLHGLRIAISLGIKRLIVRGDSQLVVNQVMKEWSCLDDNMMAYRQEVRKLEDKFDGLELSHVLRHNNEAADRLANFGSKREAAPSDVFVEHLYTPTVPHKDTTQVADTHDVAMVEADWREPFIRFLTSQELPQDKDEAERISRRSKLYVMHESELYKKSPSGILQRCVSLEEGRQLLKDIHSGICGNHAAARTIVGKAYRQGFFWPTAVSDADKIVRTCEGCQFFARQIHLPAQELQTIPLSWPFAVWGLDMVGPFKKAVGGYTHLFVAIDKFSKWIEAKPVVTITADNARDFFINIVHRFGVPNRIITDNGTQFTGGVFKDFCEDFGIKICYASVAHPMSNGQVERANGMILQGIKARIFDRLKPYAGKWVQQLPSVLWSLRTTPSRATGQSPFFLVYGAEAMLPSEVEFESLRFRNFREERYEEDRVDDLHRLEEVREAALIQSARYLQGLRRYHNRNVRSRAFLVGDLVLRKIQTTRDRHKLSPLWEGPFIISEVTRPGSYRLKREDGTLVDNSWNIEHLRRFYA

SEQ ID NO: 203183 - protein, 1975 aa, Oryza sativa
  Clone ID: PAT_MRT4530_98391C.1.pep
MGSVSGINDLVFPPGQTFRFGSLDFVTNNFGKISLLDSESDQSGENRISVPFGLPNAAKSYFKTISIESASNHSGEIASSPTTPDQDDGAYPPILMKLPDDSAAVSITTASPSRRPRRKSASTPILPSFREVGVILQPLGTVSTDQLDGYYSSPTVDSRPTDIVEYDEFSSRYNDPDLDDFDGSLDDNYTPLYFGVFMADNETEEQRQARETEARRETERRRLEEERQAQEQERLRREQQERERTAKEAEDRRQRALEAGRRARDFIGQQDVEGTPVFRTPQQNAVAAITLLDTLLKENELNQSDHVVNILNQTKTMIAASVPVNSESVRTPTGSRVPHFRSHDYRHPSLSIAGVGSNRRSRGHDERSVHSPPDHHRERRVERPRSPPRRRPVDLRDTIIQRRAARGYHHSPDRHDDDLDGVAAFTDDLRRVDWPAGFKPTGIEKYDGTTNPESWLTVYGLAIRAAGGDSKAMANYLPVALADSARSWLHGLPRGTIGSWAELRDHFIANFQGTFERPGTQYDLYNVIQKSGESLRDYIRRFSEQRNKISDITDDVIIAPFTKGIRHEELVGKFGRKPPRTVKLMFEKANEYAKAEDAVTASKQSGPSWKPNKGTPATGGGGSNNHKDRKHCFVYKQFAEQYTKTTRKNSDEEQSTSRKKDDGDTPAGFQDHRKELNHIFGGPLAYESKRKQKLTEREINAVQPDTPQYLRWSEIAIKFDRSDHPDRVVHPGRYPLVLDPVVRNVKLRRTLIDGGSALNILFAKTLDDMQIPRSELKPSNAPFHGVIPGLSATPLGQITLPVTFGTRENFRTENISFEVADFETAYHAILGRPALAKFMAVPHYTYMMMKMPGPRGVLSLRSDIKQAVTCDKESCDMAQTREMASAREDIRLAAATASEGEVPATKISKSGESEAKTKKIPLDPSDSTKTANNKDIFAWKPSDMPGIPREVIEHSLHVKEDAKPIKQRLRRFAQDRKDAIKEELTKLLAAGFIKEVYHPDWLANPVLVRKKTGQWRMCVDYTDLNKSCPKDPFGLPRIDQVVDSTAGCELLSFLDCYSGYHQIRLKESDCLKTSFVTPFGAYCYVTMPFGLKNAGATYQRMIQRCFSTQIGRNVEAYVDDVVVKTKQKDDLISDLEETFASIRAFRMKLNPEKCTFGVPSGKLLGFMVSHRGNQANPEKVTAILNMKPPSTQKDVQKLTGCMAALSRFVSRHGERGMPFFKLLKKTDDFQWGPEAQKAFEDFKKLLTEPPVLASPHPQEPLLLYVSATSQVVSTVLVVEREEEGHVQKVQRPIYFVSEVLADSKTRYPQVQKLLYGILITTRKLSHYFQGHSVTVVTSFPLGDIRHNREANGRIAKWALELMSLDISFKPRISIKSQALADFVAEWTECQEDTPAEKMEHWTMHFDGSKRLSGTGAGVVLISPTGERLSYVLWIHFSASHNVAEYEALLHGLRIAISLGIKRLIVRGDSQLVVNQVMKEWSCLDDNMMAYRQEVRKLEDKFDGLELRHVLRHNNEAADRLANFGSKREVAPSDVFVEHLYTPTVPHKDTTQVAGTHDVAMVEVDWREPLIRFLTSQELPQDKDEAERISRRSKLYVMHEAELYKKSPSGILQCCVSLGEGRQLLKDIHSGICGNHAAARTIVGKAYRQGFFWPTAVSDADKIVRTCEGCQFFARQIHLPAQELQTIPLSWPFAVWGLDMVGPFKKAVGGYTHLFVAIDKFSKWIEAKPVVTITADNARHFFINIVHRFGVPNRIITDNGRQFTGGVFKDFCEDFGIKICYALVAHPMSNGQVERANGMILHGIKARVFDRLKPYAGKWVEQLPSVLWSLRTTPSRATGQSPFFLVYGAEAMLPSEVEFESLRFRNFREERYEKDRVDDLHRLEEVREAALIRSARYLQGLRRYHNRNVRSRAFLVGDLVLRKIQTTRDRHKLSPLWEGPFIISEVTRPGSYRLKREDGTLVDNSWNIEHLRRFYA

SEQ ID NO: 203184 - protein, 93 aa, Oryza sativa
  Clone ID: PAT_MRT4530_98392C.1.pep
MATGGEMEGFRTDTEPEIEPDITDPSEDETPVHRITFVRGPRTLSTAHKSTRPPGKKPKLDPETTTSEPWGLRVARASDHPHPAPGSCGWLED

SEQ ID NO: 203185 - protein, 85 aa, Oryza sativa
  unsure (1)..(85): unsure at all Xaa locations
  Clone ID: PAT_MRT4530_98393C.1.pep
MAAVAGGAARALSQAEQDVQMMLAGDVHLGTKNWDFQKERFVYQRRFDGIYLINLGKTWEKLALAXRGMVAFETPKNLLVNWAGP

SEQ ID NO: 203186 - protein, 1336 aa, Oryza sativa
  Clone ID: PAT_MRT4530_98394C.1.pep
MLWKKLVQFGKGFFERKEESTSTDMPLGTAIHNIEITRGRGGQLARAAGAVAKLIAKEGKSATLRLPSGEVRLVSQNCLATVGRFGSLDFVTNNFGKISLLDSGSNQSGENRISVPFGLPNAAKSYPKTISIESASNHSGEIASSPTTPDQDDGAYPPVLMKLPDDLAAISITTASPSRRPRRKSASTPISPSFREVGVILQPLGTVSTDQLDGYYSSPTVDSRPTDIVEYDEFSSLYNDPDLDDFDESLDDNYTPLFFGVFMANNETEEQRQARETEARRETERRRLEEEHQAQEQERQRREQQERERTAKEAEDRRQRALEAGRRARDLIGQQDVEGTPVFRTPQQNAVAAITLLDTLLKENELNQSDHVVNILNQTKTMIAASVPVNSESVYTPTGSRVPHFRSHDYRHPSLSITGAGSNRRSRGHDERSIHSPPDHHRERRVERPRSPPRRRPVDLRDTIIQRRAARGHHHSPDRHDDDLDGVAAFTDDLRRVDWPAGFKPTGIEKYDGTTNPESWLTVYGLAIRAAGGDNKAMANYLPVALADSARSWLHGLPHGTIGSWAELRDHFIANFQGTFERPGTQYDLYNVIQKSGESLRDYIRRFSEQRNKISDITDDVIIAAFTKGIRHEELVGKFGRKPPRTVKLMFEKANEYAKAEDAVTASKQSGPSWKPNKGTPATGGGGSNNHKDRKRKPEELVATATHSSRQRSRVNTFDKIMNSQCPHHPNSNHVAKDCFVYKQFAEQYTKTTRKNSDEEQSTSRKKDDGDTPAGFQDHRKELNHIFGGPLAYESKRKQKLTEREINAVQPDTPQYLRWSEIAIKFDRSDHPDRVVHPGRYPLVLDPVVRNVKLRRTLIDGGSALNILFAKTLDDMQIPRSELKPSNAPFHGVIPGLSATPLGQITLPVTFGTRENFRTENISFEVADFETAYHAILGRPALAKFMAVPHYTYMMMKMPGPRGVLSLRSDIKQAVTCDKESCDMAQTREMASAREDIRLAAAATSEGEVPATKTSKSGESEAKTKKIPLDPSDSTKTANNKDIFAWKPSDMPGIPREVIEHSLHVKEDAKPIKQRLRRFAQDRKDAIKEELTKLLAAGFIKEVLHPDWLANPVLVWKKTGQWRMCVDYTDLNKSCPKDPFGLPRIDQVVDSTAGCELLSFLDCYSGYHQIRLKESDCLKTSFITPFGAYCYVTMPFGLKNAGATYQRMIQRCFSTQIGRNVEAYVDDVVVKTKQKDDLILDLEETFASIRAFRMKLNPEKCTFGVPSGKLLGFMVSHRGIQANPEKVTAILNMKPPSTQKDVQKLTGCMAALSRFVSRLGERGMPFFKLLKKTDDF

SEQ ID NO: 203187 - protein, 463 aa, Oryza sativa
  Clone ID: PAT_MRT4530_98395C.1.pep
MGMLRWGAHLLLLLLAAATWTCAGAGAGVTSEYRRKLEATVDMPLDADVFRVPPGYNAPQQVHITLGDQTGTAMTVSWVTANELGSNTVRYGSSPEKLDRAAEGSHTRYDYFNYTSGFIHHCTLTGLTHATKYYYAMGFDHTVRTFSFTTPPKPAPDAPFKFGLIGDLGQTFDSNSTLAHYEANGGDAVLFVGDLSYADNYPLHDNNRWDTWARFVERSVAYQPWIWTAGNHELDYAPELGETVPFKPFTHRYPTPYRAAGSTEPFWYSVKIASAHVIVLASYSAYGKYTPQWTWLQEELATRVDRKLTPWLIVLMHSPWYNSNNYHYMEGETMRVQFERWLVDAKVDVVLAGHVHSYERSRRFANIDYNIVNGKATPAANVDAPVYITIGDGGNIEGIANNFTVPQPAYSAFREASFGHATLEIKNRTHAHYAWHRNHDGAKAVADAVWLTNRYWMPTNDDV

SEQ ID NO: 203188 - protein, 53 aa, Oryza sativa
  Clone ID: PAT_MRT4530_98396C.1.pep
GIIMTNIHSLYDTLVIYDTPFFLFLLEVVMFIYLFHYKCQFFKLRFEMQLNID

SEQ ID NO: 203189 - protein, 66 aa, Oryza sativa
  unsure (1)..(66): unsure at all Xaa locations
  Clone ID: PAT_MRT4530_98397C.1.pep
RTPWAGPPWAGPPLGRDRRWAGTAVGFXPSRGGGPGXPNFXLXKXXSXLTPPLQLARXFXNXRELG

SEQ ID NO: 203190 - protein, 119 aa, Oryza sativa
  Clone ID: PAT_MRT4530_98398C.1.pep
GAALASPSGRKYDYIINLTDRGKWSVFRPQLSSNGGRVVDVSPNLGNFLASVMTLFSRRKRLSLVILTLGKKELGFLLELMREGKLKTVVDSRHPFEKASEAWERSMSGHASGKVIVEM

SEQ ID NO: 203191 - protein, 936 aa, Oryza sativa
  unsure (1)..(936): unsure at all Xaa locations
  Clone ID: PAT_MRT4530_98399C.1.pep
MAACGAAAAEYSALLSLSCGPITRRRFAVSCRARPPGNLSAQQKKKRGKNIAPKQRSSNAKLLLTTEENGQLPSTSLRTSMERPQKSTSSEDDTNGAISQIDEKIAAIGNEQQEVLPYWGGHILISAYQDILLLNQARLQAIEDVDKILTEKEALQKKVDTLEMNLSKALATKGNINTDIPGDHLEKFTKEILIESALSGGNPAHLCESPLFMELTVLKEENMLLKADAQFLKAKIVEFAETEEFLFKLEKERSLLDATVRELEARFLVAQTDIWKVVPLQYDVWMEKVENLQHMLGCLKNHVEKYAALLDQHDDLHDKIDELEASLKEGKTSEFSPYVVELLQQKLKAAKSHHQAGHQETNTHIQVYQQLTEEFQDNLGKLIEESGRLEHSANSMPSEFWSHILLMIDGWFLERKIPNTDARMLREMAWKRDDRICEAYFACKGAKESDVMETFLKLSLSGNSVDSCQVGGLADVVAGLGKALQTKGHLVEIVLPKYDCMQLDQITNLKVLDVVIQSYFDGNLFSNNVWTGTVEGLPVYFIEPQHPSKFFWRAQYYGEHDDFKRYSYFSRAALELLYQSGKKIDIIHCHDWQTAFVFWAPLYWDIYATRGFSSARICFTCHNFEYQXLDRPDRMQDNAHGRINVAKGGIVYSNIVTTVSPTYALEVRSEGGRGLQDTLKMHSRKFVGILNGIDTGTWNPSTDRFLAVQYSATDLQGKAANKAFLRKQLGLYSEDASQPLVACITRLVPQKGLHLIRHAIYKTAELGGQFVLLGSSPVPHIQREFEGVADQFQKNNNIRLILKYDEALSHCIYAASDMFIIPSMFEPCGLTQMIAMRYGSVPIVRQTGGLCDSVFDFDDETIPVELRNGFTFARTDEQDLSSCLERAFSYYSRKPMVWKQLVQKDMQIDFSWDSPASQYENLYQSAVAQARGAAQT

SEQ ID NO: 203192 - protein, 109 aa, Oryza sativa
  Clone ID: PAT_MRT4530_9839C.1.pep
KSRLSHRSSPHAATRSPSRKPRFPDRSASPRPTGGSLDELLAVLDSPSLDDLAVYASNMATTALADRSASGGPRVAFTSGVWCDAALPLIKHYRDAVLGRYNRTMRPSP

SEQ ID NO: 203193 - protein, 163 aa, Oryza sativa
  Clone ID: PAT_MRT4530_983C.1.pep
MYIYMYICIYVCMCVCVYIYIYIYIYIYIYIYIYICLYMYVCMYIYIYIYIYTYIYIYIYIYIYIYIYIYIYTYIYIYMYTYIYIYMYIHTYTYIYIYMYIHIHVYTYTCIYIYMYIHIYIYIYKLVCPIYFYGQSMIFLHMGYLLGGALMVVWHVQFVWVIL

SEQ ID NO: 203194 - protein, 199 aa, Oryza sativa
  Clone ID: PAT_MRT4530_98400C.1.pep
MAQQQQQQGSGSGSASASSSSSGLHLLASPFGDTTYTKVFVGGLAWETTSERLRRFYDRFGEILEAVVITDRHSGRSKGYGFVTFRDPESARKACEDPTPVIDGRRANCNLASLGRAQPAVPLGRPRSAGSYFGVPVPRGVYVGGYGQHRTLPLGYYQGFPVPQYSNMFQFMEFHPQQILLANHLASSARPFLVGLFVP

SEQ ID NO: 203195 - protein, 64 aa, Oryza sativa
  Clone ID: PAT_MRT4530_98401C.1.pep
LMSSDDKMKELGGHLSYTHHRHRCTQGSWAGTMPAAWTRTMLTPGRQAAVWPQDRGGQTKREIC

SEQ ID NO: 203196 - protein, 225 aa, Oryza sativa
  unsure (1)..(225): unsure at all Xaa locations
  Clone ID: PAT_MRT4530_98402C.1.pep
MAQQQQQQGSGSGSASASSSSSGLHLLASPFGDTTYTKVFVGGLAWETTSERLRRFYDRFGEILEAVVITDRHSGRSKGYGFVSALRFFAAVDPAFSGCLFVCSWNCWLXTVVGLYKCHVDLVQVTFRDPESARKACEDPTPVIDGRRANCNLASLGRAQPAVPLGRPRSAGSYFGVPVPRGVYVGGYGQHRTLPLGYYQGFPXPQYRYDVLTFPMQLSALRWPI

SEQ ID NO: 203197 - protein, 76 aa, Oryza sativa
  Clone ID: PAT_MRT4530_98403C.1.pep
TIFLDSPFSLTPRALTNKVKGTPKILKQGSFIFKNTQKEPSTPTITFLLHPKKHLEPTLIKISLGTKLPSNTLHLP

SEQ ID NO: 203198 - protein, 97 aa, Oryza sativa
  unsure (1)..(97): unsure at all Xaa locations
  Clone ID: PAT_MRT4530_98404C.1.pep
RLSSSLFSVFXXLASSWFGPWWACSLSPSLXXGSLAAAASXPAWSLLPGALGGVPSCCLCXGLGFWVLVGCSFFFXLXVSSPLLLCSPGPSGXRVFS

SEQ ID NO: 203199 - protein, 58 aa, Oryza sativa
  Clone ID: PAT_MRT4530_98405C.1.pep
ARGRRRRRQVTASRRRSPVLGRIKLLKKRADNSVKIRWFFRDSKPLLKTTGGDRLYRF

SEQ ID NO: 203200 - protein, 122 aa, Oryza sativa
  Clone ID: PAT_MRT4530_98406C.1.pep
MFSTSPQDLMESCSRDDGRSLTSIPLFLSIEQSNTSRICRFTSSIKPFNGKYSSFSHLLMWSSLRDVRVTFCPKKQCNKDFKFGQYSMSTFVSCDSFGGAKLPSVSLWFWYIFGRSISPDFS

SEQ ID NO: 203201 - protein, 395 aa, Oryza sativa
  Clone ID: PAT_MRT4530_98407C.1.pep
MPVPGSQNGRPRPAKAETIHGLARAGDLAGVQRKLQENPALINDRNPVMSQTPLHVAAGYNNTGIVKFLLDFQGTDKVELEAKNMYGETPLHMAVKNSSCESAKLLLERGAHIEAKANNGMAPLHLAVWHALQSGDCSTCTESCSHHTLPHQEGKIPSNHIPGGAGKTMVARILGKLLHMVGVLPTDKVTEVQRTDLVGEFVGHTGPKTRRKIQDAEGGILFVDEAYRLIPMQKSDDKDYGVEALEEIMSVMDNGKIVVIFAGYCEPMKRVIASNDGFCRRVTKFFYFDDFTTTELAEILHLKMNNPTESSLLYGFKLDPSCSIEVVGELIARETTEQRRKQMNGGLVDTLLINARENLDLRLDFNCDDANTMITITLEDLEAGLKQISKQRQLQ

SEQ ID NO: 203202 - protein, 89 aa, Oryza sativa
  Clone ID: PAT_MRT4530_98408C.1.pep
MAEEERERGGEGVGSGSGRSGGGARGARRAGPCQPTCSTSVPYRAGLKAWAPYRDFFFEKSYALGPSTYKTIRFRSFGGFDPGFIRRGG

SEQ ID NO: 203203 - protein, 165 aa, Oryza sativa
  Clone ID: PAT_MRT4530_98409C.1.pep
MSGFGDGYVGTAQDAVKIRRLEKQREAERRKIEELKNKSSDGQPGLLQFGSSTSEKLTPNSMDYDFQILETAFKKETVGLVTREQYVEKGRRIANAKAEKEENEPLTITYSYWDGTGHRRVIQLFHFDVHEDVRTIADATKEKDEIPSTPSISMQCTPFSYYHYT

SEQ ID NO: 203204 - protein, 366 aa, Oryza sativa
  unsure (1)..(366): unsure at all Xaa locations
  Clone ID: PAT_MRT4530_9840C.1.pep
TGQPCRAPEPRTAKTTGWFATPEPPPLPPRRSAVRSRRRLLQHRSRLLFAGLPSVFRGDLRKCLPAGNRGVAATIPPPAASAASPVRRPTSPPPLPAPECRPLSRPGHGVARISPERRHPRRPLLPPXSTSPPAAPFRRARASAGAAVPSLGTVTXPSTSSTPRFRPEAAARRREPLHPPHRSGSAARPSSPVHRSAAPPPPSASQPRCRPRHRFPFGRTPPVSVVVFTVHPRRLVVSRRRLHRRHRSGVFHAILASVQPLPAALIVSSPAPVVVVVVLPSFPVVVAFVPPSSRSRPSSAFVKRAAAAPSSSSSSAPHRQALRRPRLAFVQGSPPKSSPRRSSPSFPAASAAPVRRCRSLASLRGG

SEQ ID NO: 203205 - protein, 184 aa, Oryza sativa
  unsure (1)..(184): unsure at all Xaa locations
  Clone ID: PAT_MRT4530_98410C.1.pep
MTREDHLSMKPMTAIDVEISSAFSFISTRSSRCPTSFSRQAPGEHQWQQWRRTRMQPMLLLPLRARPRSINKXQASATSAARVARARSVELFEERDRXKEEKSRRKEYVVEAGAKPFNTSYFIKLSEKFEGGSGVSMGSVDAWGTHVESAPERRGGDWGDRVTAEERRKVTGPTRSSSCVYLDV

SEQ ID NO: 203206 - protein, 322 aa, Oryza sativa
  unsure (1)..(322): unsure at all Xaa locations
  Clone ID: PAT_MRT4530_98411C.1.pep
MSGFGDGYVGTAQDAVKIRRLEKQREAERRKIEELKNKSSDGQPGLLQFGSSTSEILETAFKKETVGLVTREQYVEKRVNIRTKIEEEEKEKLQKLQQEEEELQMQKRKKRRVRGDPRLSFCDEIENGSDEDEFENRMKNLKRNMVLXKLGKDPTVETSFLPDREQARACEETTREXEPLTITYSYWDGTGHRRVIQVRKGDSIGEFLRAVQQQLAPEFREVRTTSVENLLYVKEDLIIPHQHSFYELIINKARGKSGPLFHFDVHEDVRTIADATKEKDESHAGKVVERHWYEKNKHIFPASRWEIYDPTKKWERYTIHGD

SEQ ID NO: 203207 - protein, 1991 aa, Oryza sativa
  Clone ID: PAT_MRT4530_98412C.1.pep
MGFVSGIDDLVFPPGQTFRFGSLDFVTNNFGKISLLDSESDQSGENRISVPFGFPNAAESYFKTISTESASNHSAEIASSPTTPDQDDGAYPPVLMKLPDDLAAVSTTTTSSSRRPRRKSASTPISPSFREVGVILQPLGTVSTDQLDDYNSSPTVDSRPTDIVEYDEFSSRYNDFDDFDDFDGSLDDNYTPLYFGVFMANNETEEQRQARETEERRRLEEEHQAQEQERLRREQQDRERTAKEAEDRRQRALEAGRRARDLIGQQDVEGTPVFRTPQQNAVAAITLLDTLLNQNELNQSDHVVNILNQTKTMIAASVPVNSESVHTPTGSRVPHFRSHDYRHPSLSITGAGSNRRSRGHDERSIHSPPDQYRERRVERPRSPPRRRPVDLRDTIIQRRAARGHHHSPNRHDDDLDGVAAFTDDLRRVDWPAGFKPTGIEKYDGTTNPESWLTVYGLAIRAAGGDNKAMANYLPVALADSARSWLHGLPRGTIGSWAELRDHFIANFQGTFERPGTQYDLYNVIQKSGESLRDYIRRFSEQRNKISDITDDVIIAAFTKGIRHEELVGKFGRKPPRTVKLMFEKANEYAKAEDAVTASKQSGPSWKQNKGTPATGGGGSNNHKDRKRKPAELVATASHSSRQRSRVNTFDKIMNSQCPHHPNSNHVAKDCFVYKQFADQYTKTARKNSDEEQSTSRKKDDGDTPAGFQDHRKELNHIFGGPLAYESKRKQKLTEREINAVQPDTPQYLRWSEIAIKFDRSDHPDRVVHPGRYPLVLDPVVRNVKLRRTLIDGGSALNILFAKTLDDMQIPRSELKPSNAPFHGVIPGLSATPLGQITLPVTFGTRENFRTENISFEVADFETAYHAILGRPALAKFMAVPHYTYMMMKMPGPRGVLSLRSDIKQAVTCDKESCDMAQTREMASAREDIRLAAATASEGEVPATKISKSGESEAKTKKIPLDPSDPTKTANNKDIFAWKPSDMPGIPREVIEHSLHVKEDAKPIKQRLRRFAQDRKDAIKEELTKLLAAGFIKEVLHPDWLANPVLVRKKTGQWRMCVDYTDLNKSCPKDPFGLPRIDQIRLKESDCLKTSFITPFGAYCYVTMPFGLKNAGATYQRMIQRCFSTQIGRNVEAYVDDVVVKTKQKDDLISDLEETFASIRAFRMKLNPEKCTFGVPSGKLLGFMVSHRGIQANPEKVTAILNMKPPSTQKDVQKLTGCMAALSRFVSRLGERGMPFFKLLKKTDDFQWGPEAQKAFEDFKKLLTEPPVLASPHPQEPLLLYVSATSQVVSTVLVVEREEEGHVQKVQRPIYFVSEVLADSKTRYPQVQKLLYGILITTRKLSHYFQGHSVTVVTSFPLGDILHNREVNGRIAKWALELMSLDISFKPRISIKSQALADFVAEWTECQEDTPAENMEHWTMHFDGSKRLSGTGAGVVLISPTGERLSYVLWIHFSASHNVAEYEALLHGLRIAISLGIKRLIVRGDSQLVVNQVMKEWSYLDDNMMAYRQEVRKLEDKFDGLELSHVLRHNNEAADRLANFGSKREAAPSDVFVEHLYTPTVPHKDTTQVAGTHDAAMVEVDWREPLIRFLTSQELPQDKDEAERISRRSKLYVLHEAELYKKSPSGILQRCVSLEEGRQLLKDIHSGICGNHAAARTIVGKAYRQGFFWPTAVSDADKIVRTCEGCQFFARQIHLPAQELQTIPLSWPFAVWGLDMVGPFKKAVGGYTHLFVAIDKFSKWIEAKPVVTITADNARDFFINIVHRFGVPNRIITDNGTQFTGGVFKDFCEDFGIKICYASVAHPMSNGQVERANGMILQGIKARVFDRLKPYAGKWVQQLPSVLWSLRTTPSRATGQSPFFLVYGAEAMLPSEVEFESLRFRNFREERYEEDRVDDLHRLEEVREAALIRSARYLQGLRRYHNRNVRSRAFLVGDLVLRKIQTTRDRHKLSPLWEGPFIISEVTRPGSYRLKREDGTLVDNSWNIEHLRRFYA

SEQ ID NO: 203208 - protein, 100 aa, Oryza sativa
  Clone ID: PAT_MRT4530_98413C.1.pep
AAAPPTCRASATPTTPSPAACSRRTSPCRASPCRARRREASSVSRTPVWLLLRRLSPAITAAAAARRSCPCCCASQSSLPTASTTPLIARSVTVTLTTNN

SEQ ID NO: 203209 - protein, 1966 aa, Oryza sativa
  Clone ID: PAT_MRT4530_98414C.1.pep
MGPFSGIDDLVFPPGQTFRFGSLDFITDNFGKISLLDSESNQSGENRISVPFGFPNAAESYFKTISTESASNHSAEIASSPMTPDQDDGAYPPVLMKLPDDLAAVSTTTASSSRRPRRKSASTPISPSFREVGVILQPLGTVSTDQLDDHYSPPTVDSRPTDIVEYDEFSSRYNDFHDFDDFDGSLDDDYTPLYFGVFMANNETEEQRQARETEERRRLEEEHQAQEQERLRREQQDRERIAKEAEDRRQRALEAGRRARDLIGQQDVEGTPVFRTPQQNAVAAITLLDTLLNQNELNRSDHVVNILNQTKTMIAASVPVNSESVHTPTGSRVPHFRSHDYRHPSLSITGAGSNRRSRGHDERSVHSPPDLHRERRVERPRSPPRRRPIDLRDTIIQRRAARGYHHSPDRHDDDLDGVAAFTDDLRRVDWPAGFKPTGIEKYDGTTNPESWLTVYGLAIRAAGGDNKAMANYLPVALADSARSWLHGLPRGTIGSWAELRDHFIANFQGTFERPGTQYDLYNVIQKSGESLRDYIRRFSEQRNKISDITDDVIIAAFTKGIRHEELVGKFGRKPPRTVKLMFEKANEYAKAEDAVTASKQSGPSWKPKNTPATGGGGSNNHKDRKRKPEELVATAAHSSRQRSRVNTFDKIMNSQCPHHPNSNHVAKECFIYKQFAEQYTKSTRKNSDEEQSTSRKKDDGDTPAGFQDHRKELNHIFGGPLAYESKRKQKLTEREINAVQPDTPQYLRWSEIAIKFDRSDHPDRVVHPGRYPLVLDPVVRNVKLRRTLIDGGSALNILFAKTLDDMQIPRSELKSSNAPFHGVIPGLSATPLGQITLPVTFGTRENFRTENISFEVADFETAYHAILGRPALAKFMAVPHYTYMMMKMPGPRGVLTLRSDIKQAVTCDKESCDMAQTREIASAREEIRLAATTESALITFLQNNKDIFAWKPSDMPGIPREVIEHSLHVKEDAKPIKQRLRRFAQDRKDAIKEELTKLLAAGFIKEVLHPDWLANPVLVRKKTGQWRMCVDYTDLNKSCPKDPFGLPRIDQIRLKESESDCLKTSFITPFGAYCYVTMPFGLKNAGATYQRMIQRCFSTQIGRNVEAYVDDVVVKTKQKDDLILDLEETFASIRAFRMKLNPEKCTFGVPSGKLLGFMVSHRGVQANPEKVTAILNMKPPSTQKDVQKLTGCMAALSRFVSRLGERGMPFFKLLKKTDNFQWGPEAQKAFEDLKQLLTKPPVLASPHPQEPLLLYVSATSQVVSTVLVVEREEEGHVQKVQRPIYFVSEVLADSKARYPQVQKLLYGILITTRKLSHYFQGHSVTVVTSFPLGDVLHNREANGRIAKWALELMSLDISFKPRTSIKSQALADFVAEWTECQEDTPVEKIEHWTMHFDGSKRLSGTGAGVVLISPTGERLSYVLWIHFSASHNVAEYEALLHGLRIAISLGIKRLIVRGDSQLVVNQVMKEWSCIDDNMMAYRQEVRKLEDKFDGLELSHVLRHNNEAADRLANFGSKRETAPSDVFVEHLYTPTVPHKDTTQDADTRDIAMVEADWREPFIRFLTSQELPQDKDEAERISRRSKLYVLHESELYKKSPSGILQRCVSLEEGRQLLKDIHSGICGNHAAARTIVGKAYRQGFFWPTAVSDADKIVRTCEGCQFFARQIHLPAQELQTIPLSWPFAVWGLDMVGPFKKAVGGYTHLFVAFDKFSKWIEAKPVVTITADNARDFFIHIVHRFGVPNRIITDNGTQFTGGVFKDFCEDFGIKICYASVAHPMSNGQVERANGMILQGIKARVFDRLKPYAGKWVQQLPSVLWSLRTTPSRATGQSPFFLVYGAEAMLPSEVEFESLRFRNFREERYEDDRVDDLHRLEEVREAALIQSARYLQGLRRYHNRNVRSRAFLVGDLVLRKIQTTRDRHKLSPLWEGPFIISEVTRPGSYRLKREDGTLVDNSWNIEHLRRFYA

SEQ ID NO: 203210 - protein, 63 aa, Oryza sativa
  Clone ID: PAT_MRT4530_98415C.1.pep
SSFNPVCFSHLKRARKAKTYECDGFRLDKCYVKNGTGCMPALVPDTKLYFCTIVLVLLFILAD

SEQ ID NO: 203211 - protein, 1980 aa, Oryza sativa
  unsure (1)..(1980): unsure at all Xaa locations
  Clone ID: PAT_MRT4530_98416C.1.pep
MGPNPKGGGGNRNSTPGLTLLGKVPRGSGRSLLPPNSRGGYSVVVVVALDMEAAAAAVAWEEPAAARDAEAAAVLDTEDASTAAPPCAPREMVVACVHGGSPSPAICRVDRHKVVRRQPPHHPPRIATADCTDARPRHATLAFHRRTAERRPSALGSRPRRLPASPHDHPLPLDLRRDAQKDFTLLIKENLDVIGLCVYMCWEGDAVELLSPPRRLELAGRSVVVPYHQIRVAGLGRRAAGRADVSKGQPAPTRGPHTSAALRKGEGRLASGPHWQRLYRGKEREGWSTGWWAPPGSGSRGGEGGAGRARLGLKADRRPWRPAAARAVTGGDRQRGRRRRPARRRRRRPKTTAHARRTAVLMGERGKEGGEGIPHRRTRRPARREKTAATTGDAEARTGGGGTLGESIEGLGKGRRPWRLELPAGDGGERGSHRRARRKKAPAVIRGNEAAAEVRAGSVSATAAMVRRGGGSSGGGSRLTEGGVWRPRERRRSRGAADFEGKWGGVVGERETREAATWPDFAGRVGERRGRERRGPTDERARGVEEVGGNRGVVGQLRRPWRRFRLREPEVRGGPDRWGLGKGQPAPTRGPHTSAALRKGEGRLASGPHWQRLYRGKEREGWSTGWWAPPGSGSRGGEGGAGRARLGLKADRRPWRPAAARAVTGGDRQRGRRRRPARRRRRRPKTTAHARRTAVLMGERGKEGGEGIPHRRTRRPARREKTAATTGDAEARTGGGGTLGESIEGLGKGRRPWRLELPAGDGGERGSHRRARRKKAPAVIRGNEAAAEVRAGSVSATAAMVRRGGGSSGGGSRLTEGGVWRPRERRRSRGAADFEGKWGGVVGERETREAATWPDFAGRVGERRGRERRGPTDERARGVEEVGGNRGVVGQLRRPWRRFRLREPEVRGGPDRWGLGKGQPAPTRGPHTSAALRKGEGRLASGPHWQRLYRGKEREGWSTGWWAPPGSGSRGGEGGAGRARLGLKADRRPWRPAAARAVTGGDRQRGRRRRPARRRRRRPKTTAHARRTAALMGERGKEGGEGIPHRRTRRPARREKTAATTGDAEARTGGGGTLGESIEGLGKGRRPWRLELPAGDGGERGSHRRARRKKAPAVIRGNEAAAEVRAGSVSATAAMVRRGGGSSGGGSRLTEGGVWRPRERRRSRGAADFEGKWGGVVGERETREAATWPDFAGRVGERRGRERRGPTDERARGVEEVGGNRGVVGQLRRPWRRFRLREPEVRGGPDRWGLGVMGSVSGIDDFVFPPGQAFRFGSLDFITNDFGNISLLDSDSNQSGENRVSAPFGVPNSAKIYSKFILIESASNHSDEISSSSTSPDRDDEAYPLILMKLPDDLAAVFTTTTSSPRRPRQRSASTPISLSSREVGVILQPLXVFMADNETEEQRQAREAEARREAERRXLEEERQAQEQERLRREQQERERATKEAEDRRQRALDAXTPVKGTPVFRTPQQNAVAAITLLDTLLKENELNQSDHVVNILNQTKTTIVASVPVNSGSVRTPTGSRVPHFRSHDYHQPSLSIAGAGSNRRSRGHDERSVHSPPEHHRERRVERPRSPPRRRPVDLRDTIIQRRAARGHRHSPDRYDDDLDGVAAFTNDLRRVDWPAGFKPTGIEKYDGTTNPKSWLTVYGLAIRAAGGDSKAMANYLPMALADSARSWLHGLPRGTIGSWAELRDHFIANFQGTFERPGTQFDLYNVIQNSGESLRDYIRRFSEQRNKISDITDDVIIAAFTKGIRHEELVGKFGRRPPKTVKLMFEKANEYAEAEDAVIASKQSGPSWKPKKDAPTMGGGGSNNHKDRKCKPEELVATTTHSSRQRSRVNTFDKIMNSQCPHHPNSNHAAKDCFVYKQFTEQYAKNTRKNSNGEQSTSKKKDDDDAPTETTIKFDRSDHADRVVHPGRYLLVIDPVVRNVKLRRTLIDGGSALNILFAKTLDDMQIPRSELKPSNAPFHGVIPGLSATPLG

SEQ ID NO: 203212 - protein, 1986 aa, Oryza sativa
  Clone ID: PAT_MRT4530_98417C.1.pep
MGPFSGIDDLVFPPGQTFRFGSLDFVTDNFGKISLFDSESDQSGENRISVPFGFPNAAETYFKTISIESASNHSAEIASSPTTPDQDDGAYPPILMKLPDDLAAVFTTTASSSRRPRRKSASTPISPSFREVGVILQPLGTVSTDQLDDYNSSPTVDSRPTDIVEYDEFSSRYNDFDDFNDFDGSLDDNYTPLYFGVFMANNETEEQRQARETEERRRLEEEHQVQEQERLRREQQDRERIAKEAEDRRQRALEAGRRARDLIGQQDVEGTPVFRTPQQNAVAAITLLDTLLNQNELNRSDHVVSILNQTKTMIAASVPVNSESVHTPTGSRVPHFRSHDYRHPSLSITGAGSNRRSRGRDERSVHSPPELHRERRVERPRSPPRRRPIDLRDTIIQRRAARVYHHSPDRHDDDLDGVAAFTDDLRRVDWPAGFKPTGIEKYDGTTNPESWLTVYGLAIRAAGGDNKAMANYLPVALADSARSWLHGLPRGTIGSWAELRDHFIANFQGTFERPGTQYDLYNVIQKSGESLREYIRRFSEQRNKISDISDDVIIAAFTKGIRHEELVGKFGRKPPRTVKLMFEKANEYAKAEDAVTASKQSGPSWKPKNAPATGGGGSNNHKDRKRKPEELVATAAHSSRQRSRVNTFDKIMNSQCPHHPNSNHVAKECFIYKQFAEQYTKSTRKNSDEEQSTSRKKDDGDTPAGFQDHRKELNHIFGGPLAYESKRKQKLTEREINAVQPDTPQYLRWSEIAIKFDRSDHPDRVVHPGRYPLVLDPVVRNVKLRRTLIDGGSALNILFAKTLDDMQIPRSELKPSNAPFHGVIPGLSATPLGQITLPVTFGTRENFRTENVSFEVADFETAYHAILGRPALAKFMAVPHYTYMMMKMPGPRGVLSLRSDIKQAVTCDKESCDMAQTREMASAREEIRLAATTESALITFLQNNKDIFAWKPSDMPGIPREVIEHSLHVKEDAKPIKQRLRRFAQDRKDAIKEELTKLLAAGFIKEVLHPDWLANPVLVRKKTGQWRMCVDYTDLNKSCPKDPFGLPRIDQVVDSTAGCELLSFLDCYSGYHQIRLKESDCLKTSFITPFGAYCYVTMPFGLKNAGATYQRMIQRCFSTQIGRNVEAYVDDVVVKTKQKDDLISDLEETFASIRAFRMKLNPEKCTFGVPSGKLLGFMVSHTGIQANPEKVTAILNMKPPSTQKDVQKLTGCMAALSRFVSRLGERGMPFFKLLKKTDNFQWGPEAQKAFEDFKQLLTKPPVLASPHPQEPLLLYVSATSQVVSTVLVVEREEEGHVQKVQRPIYFVSEVLADSKTRYPQVQKLLYGILITTRKLSHYFQGHPVTVVTSFPLGDVLHNREANGRIAKWALELMSLDISFKPRTSIKSQALADFVAEWTECQEDTPAENMEHWTMHFDGSKRLSGTGAGVVLISPTGERLSYVLWIHFSASHNVAEYEALLHGLRLAISLGIKRLIVRGDSQLVVNQVMKEWSCLDDNMMAYRQEVRKLEDKFDGLELSHVLRHNNEAADRLANFGSKREAAPSDVFVEHLYTPTVPHKDTTQVAGTHDVAMVEADWREPFMRFLTSQELPQDKDEAERISRRSKLYVMHESELYKKSPSGILQRCISLEEGRQLLKDIHSGICGNHAAARTIVGKAYRQGFFWPTAVSDADKIVRTCEGCQFFARQIHLPAQELQTIPLSWPFAVWGLDMVGPFKKAVGGYTHLFVAIDKFSKWIEAKPVVTITADNARDFFINIVHRFGVPNRIITDNGTQFTGGVFKDFCEDFGIKICYASVAHPMSNGQVERANGMILQGIKARVFDRLKPYAGKWVQQLPSVLWSLRTTPSRATGQSPFFLVYGAEAMLPSEVEFESLRFRNFREERYEEDRVDDLHRLEEVREAALIQSARYLQGLRRYHNRNVRSRAFLVGDLVLRKIQTTRDRHKLSPLWEGPFIISEVTRPGSYRLKREDGTLVDNSWNIEHLRRFYA

SEQ ID NO: 203213 - protein, 969 aa, Oryza sativa
  unsure (1)..(969): unsure at all Xaa locations
  Clone ID: PAT_MRT4530_98418C.1.pep
MAIRSDRSVTREQHACIHARHETSWPLVTPGRRREKEKLLVGGGGGGILLGPAVSAAGGATHYLLPAVSIFFLSQYVIDNIGXSQGTQTTIVDIQTHILQKYKRLQMQRERLKRAKPGSLTSAAGDSTPQANLDGSDETNLSETAPTKKNFNSAGQPNTSADPTPSRPPSPPVPRKGSSYTSDQAVTHSRLWPTGRPRRGGGEARPPTAVTGGVGSGGDGRKAAAHGRSSGVAGARERKTKAATTTRREEGRTSGGDTQRRGGEELGMEKATATTKVAGRRRRGMDSSPAREGDGVPVGFRRREAVAEMAHTAAELAAAAAWRGGGPSGDGMRPEMGGGGGARRARRYGVQVQTSEMSEENEMGKGNVMLNAFGERHHCVRHIQVDMVQSYNGTTEIARRLPVWKAEQMAPIGRVTMVNAVLISIPIYLLMAINVPKWVIKGIDKERNLLQVSLTCRVGNGMNVLFWEDNWIQGSSIRTLAPAVHAAVVARKRNRRTVREALQVALNRCWTADRLRRRGLPHPDRCVLCDQGDETIDHLLVACLESRQLWWFALRAIGLSDILPFNEPSFLLWLCDKRMKVAKAQRRGFDTVAALIAWTIWKERNNRVFNQQQKTWVEVAKVMAAEAELWRLANAAMPELPLPTTEWRAHHQIETNKVKYLITYMALKTLQVPSSFARPINRSFIGSSSSSSSSSQFSLRPKPASARLAASVAGERRLECRGGSSLHGCVDEGAAAASRRRQEQAVEIPIVLFPSVVFPGATVQLQAFEFRYRIMVHTLLQEGVTRFGVVYSGGGVGGGVAAGEVGCVAHVVECERLVDGRFFLTCVGGDRFRVVGAVRTKPYVVARVQPLADAPPSQERGGDGGGDMVRHLVERVEEQLKNVAALSDKLGWSRPPLPFRATCSPSSLSFAVAREVVEDREEQQALLRLDDAAARLAREGRYLERRSRYLAAIAAIKDALGGHLYCNDK

SEQ ID NO: 203214 - protein, 242 aa, Oryza sativa
  unsure (1)..(242): unsure at all Xaa locations
  Clone ID: PAT_MRT4530_98419C.1.pep
KRAKPGSLTSAAGDSTSQAILDGSDETNFDKTAPTRKIFSSGVGKKRARLSTTHCTQQVIPEEEAVGGPLLRRGESGSWITGHPGRPNSITPTLATGAXERVELYFRSSSYPLPLVAGPTAAQGEREGASACGPHWWRLKGRGGPPAGGPHRAAAQGGRGAWLLAWHGSSRPAMARRRRRTTAGGDRRRGETAAAGAKXGGGSRRRXRTRGGRRRSRGRGKEEXGDSSPASTTAGGKATMAA

SEQ ID NO: 203215 - protein, 136 aa, Oryza sativa
  Clone ID: PAT_MRT4530_9841C.1.pep
PALLLGVVLVDLLPGTCLAFQVRSRQVRPEGCSVRAGHVLPQGSPVLAGRGVSPGTPVGVGGGVLAYTLLGVDYNESSGDCAFLILDPHYTGADDLKKIVNGGWCGWKKSIDSKGRSFFLKDKFYNLLLPQRPNMV

SEQ ID NO: 203216 - protein, 280 aa, Oryza sativa
  unsure (1)..(280): unsure at all Xaa locations
  Clone ID: PAT_MRT4530_98420C.1.pep
HPHHVRVSPSPLKRQWVVPSCAAVNPAVGHRDTPADPTPSRPPSPPVHRKGSSYTSDQAVAHSRLWXARKSPGRMSAKGGAAXAGGVHGSAAQRGXVHRGPGPRGRGGAKPWDGRPRSAXADRAAGDGRHRGQPGHGTRWRTAAGDRRPAGGSGRQRGRRRSAXHACGERRRARERSGRGGKGGPHRRGDDDRRGKRRAAAALRTMADGVGHNLGKAMTGLGEGLTGVRGKRRFGDVWWQTSDRRCSGRGCITPRRSYQRQRAVRGLPRAAELGVTSWAP

SEQ ID NO: 203217 - protein, 81 aa, Oryza sativa
  Clone ID: PAT_MRT4530_98421C.1.pep
MAVSVGAGGTRGCGSPGRRWLPSVPGLRWPRTAAALGVAVAQDGGGLSTLDSRSLGIRSPETDEDDTNGGFHQRCTRGDSD

SEQ ID NO: 203218 - protein, 85 aa, Oryza sativa
  Clone ID: PAT_MRT4530_98422C.1.pep
GPEPQLQKAFPPPMVVVGALNPLQNWDRRYPAILRRKGKPVRVVEFPEAKHPFYFFPEFAGDIRNLVGENRAFVEDSIMSNQSIA

SEQ ID NO: 203219 - protein, 2005 aa, Oryza sativa
  Clone ID: PAT_MRT4530_98423C.1.pep
MGSVSGIDDLVFPPGQTFRFGSLDFVTNNFGKISLLDSVSAQSGENRLSVPFGLPNAAESYFKTISIELASNHSGEIASSPTTPDQDDGAYPPILMKLPDDSAAAPITTASSSRRPRRKSASTPISPSFREVGVILQPLGTVSTDQLDGHYSSPTVDSRPTDIVEYDEFSSRYNEPDLDDFDESLDDNYTPLYFGVFMADNETEEQRQARETEARREAERLRLEEERQAQEQERLRREQQERERTAKEAEDRRQRALEAGRRARDLIGQQDVEGTPVFRTPQQNAVAAITLLDTLLKENELNQSDHVVNILNQTKTMIAASVPVNSESVHTPTGSRVPHFRSHDYRHPSLSITGAGSNRRSKGHDGRSVHSPPDHHGERRVERPRSPPRRRPVDLRDTIIQRRAARGHHHSPDRHDDDLDGVAAFTDDLRRVDWPAGFKPTGIEKYDGTTNPESWLTVYGLAIRAAGGDSKAMANYLPVALADSARSWLHGLPRGTIGSWAELRDHFIANFQGTFERPGTQYDLYNVIQKSGESLRDYIRRFSEQRNKISDITDDVIIAAFTKGIRHEELVGKFGRKPPRTVKLMFEKANEYAKAEDAVTASKQSGPSWKPNKGTPATGGGGSNNHKDRKRKPAELVATASHSSRQRSRVNTFDKIMNSQCPHHPNSNHVAKDCFVYKQFADQYTKTTRKNSDEEQSTSRKKDDGDAPAGFQDHRKELNHIFGGPLAYESKRKQKLTEREINAVQPDTPQYLRWSEIAIKFDRSDHPDRVVHPGRYPLVLDPVVRNVKLRRTLIDGGSALNILFAKTLDDMQIPRSELKPSNAPFHGVIPGLSATPLGQITLPVTFGTRENFRTENISFEVADFETAYHAILGRPALAKFMAVPHYTYMMMKMPGPRGVLSLRSDIKQAVTCDKESCDMAQTREIASAREDIRLAAATTSEGEMPATKTSKSGESEAKTKKIPLDPSDSTKTANNKDIFAWKPSDMPGIPREVIEHSLHVKEDAQPIKQRLRRFAQDRKDAIKEELTKLLAAGFIKEVLHPDWLANPVLVRKKTGQWRMCVDYTDLNKSCPKDPFGLPRIDQVVDSTAGCELLSFLDCYSGYHQIRLKESDCLKTSFITPFGAYCYVTMPFGLKNAGATYQRMIQRCFSTQIGRNVEAYVDDVVVKTKKKDDLISDLEETFASIRAFRMKLNPEKCTFGVPSGKLLGFMVSHRGIQANPEKVTAILNMKPPSTQKDVQKLTGCMAALSRFVSRLGERGMPFFKLLKKTDDFQWGPEAQKAFEDFKKLLTEPPVLASPHPQEPLLLYVSATSQVVSTVLVVEREEEGHVQKVQRPTYFVSEVLANSKTRYPQVQKLLYGILITTRKLSHYFQGHSVTVVTSFPLGDILHNREANGRIAKWALELMSLDISFKPRISIKSQVLADFVAEWTECQEDTPAEKMEHWTMHFDGSKRLSGIGAGVVLISPTGERLSYVLWIHFSASHNVAEYEALLHVLRIAISLGIKRLILRGDSQLVVNQVMKEWSCLDDNMMAYRPELSHVLRHNNEAADRLANFGSKREAAPSDVFVEHLYTPTVPHKDTTQVAGIHDVVMVEADWREPLIRFLTSQELPQDKDEAERISRRSKLYVMHEAELYKKSPSGILQRCVSLEEGRQLLKDIHSGICGNHAAARTIVGKAYLQGFFWPTAVSDADKIVRTCEGCQFFARQIHLPAQGLQTIPLSWPFAVWGLDMVGPFKKAVGGYTHLFVAIDKFSKWIEAKPVVTITADNARDFFINIVHRFGVPNRIITDNGRQFTGGVFKDFCEDFGIKICYASVAHPMSNGQVERANGMILQGIKVRVFDRLKPYAGKWVKQLSSVLWSLRTTPSRATGQSPFFLVYGAEAMLPSEVEFESLRFRNFREERYEEDRVDDLHRLEEVREAALIQSARYLQGLRRYHNRNVRSRAFLVGDLVLRKIQTTRDRHKLSPLWEGPFIISEVTRPGSYRLKREDGTLVDNSWNIEHLRRFYA

SEQ ID NO: 203220 - protein, 966 aa, Oryza sativa
  Clone ID: PAT_MRT4530_98424C.1.pep
MPRRTSATAPFAQTSAETPLPPCTRVACRRRLSRSRALPPPQPASPPRGQARPPIPFSPPPPEPPPRHTTLPAAFFRLRSPFAFTPAAAATHRLHRRLRRVPLFPIRRPVAAFRRWEPLLLVDLWSAAASLRRLLSPSPCPSVSSTTSLSLTAPVSSRRFPRCAPPLPATPGLCAAVALVPAAAAASLVCALARPRRPAVPSRPIGLGRSRPSGARPRGRSPPWTRSTITPYSFGPEKIDFSTYDELNSEALRNLDPAVQHKLDGPWKRIASGRSSAALTLPPTPLPGAATRFFLFSSLSLSSSSSWRDRSSRLFFVESSRRQAAATDCISSADLRARHSCIAVRPPVVGFIFSVRSAPPASPTGPAVVVASTGQRSSPDGQTDDAARLLHLRHRSPPATPDSSVSSTTVDWGDELPALLLRRRSSPTTSHVLLRPSSTGSPDVRRSGPLGSEAASAGAGARRPLAPGYNDLCNRSSSSMRLHHQALGCRCVRSPRAAVPLPVVHTSTGCCSAKRHPPQHFYITGGLLAAASTWSCSCAVLSDRSFAAFVVFIAVRTSTTSSSALVIVSRSGYLYMATNIAIQAVGLTTRPSSSSSMIHRQCRRISLDYISLFSGNCALLRQFSLYAVLACPGVWQTLCDVSSFTVRLHRLFGVIFLTTAAIVSPSSSPVHPRAPWSTTPLPCVHDHSTAPHALPAARLPRHQLPDFDYIDHSYSTHSFIDHSSLAPFALATSTTAQRVIIRIEYSCWFLLQSKCPRCSRLDCGGMLEYMYSYIYRPLRLNTSDPRYAIFLSLYYPTLVSLPVYCDVIGGGGRRGWTWWSTPAPAAGGGTPRSPSCSRRLSASGPCSPHRLSRPTPGAEDGLGRRRPDLLLLRRRPPPTADALQLQRLLRRCRPPAPASPRDAESQIDSEHSNFFQNRNFQLENRDSKTFKSRFEKFENFQFEIRKLSNQDSKTFKSRFENFQIKI

SEQ ID NO: 203221 - protein, 364 aa, Oryza sativa
  Clone ID: PAT_MRT4530_98425C.1.pep
MEQRHKPTHPPLSSPIPQIPNPCNFRSCSLTTVPPAGDLIPAMRLRRAATRVLRPAYSTTQAGGPRTSSSNLSSELVMYVLRMHGGGRGLNNPVVDLEGACSLNQSPWDLACELENPNPLLASTLVFDAITYQRFFHFAFDGIVYIELIENMCDFIYPEDLFNKYLVHIPHRASFTFNNDNDEEMEVYDMIWKQQQGEEMKDLNPSQKEKQDGETKMVKDHMNVEPLVPEEDMLDKGIEDFGEKKASVWYYRKRWHCQNIVDGPKALCEYHLAKSHSNTPTSVKVATAHSKSCCTITMSHLLKSSFKPTLTGEASSLRAASASIQKNSQSHKRKAGNGLSDDGQSDKDYFVGGANNPHVKKGKQ

SEQ ID NO: 203222 - protein, 267 aa, Oryza sativa
  unsure (1)..(267): unsure at all Xaa locations
  Clone ID: PAT_MRT4530_98426C.1.pep
RAAHRPAAADEGDVERRERQRVRDRWKDGGEELLTVSTAAGAKDEDGGDDRRRGGTDGRRRHPRRRWRGVRRGDDDHGGLNCRPEMEGREKLTGSRGERRSGGIPATRGGGRESSCGGEANGGGXWRGGDSSGGGSRPKAAASGGARVXRRGRGRGRGRGRQMGETREGXLGEGFYGRERGGRGRGDGRNRRRRGGGERENGGIQNESRPLRACARAGRAEEWGGDVGARHGRSGAWRMAGNGGGGMGGFDGSSWSSGSNGWRWETT

SEQ ID NO: 203223 - protein, 76 aa, Oryza sativa
  Clone ID: PAT_MRT4530_98427C.1.pep
MPLCLSHSLHLTLPPSSPRCVALLSRTATASANEEAKAARFGDPDLLAGESSWPERMTPERMTRSYMTTQGRLLLV

SEQ ID NO: 203224 - protein, 88 aa, Oryza sativa
  unsure (1)..(88): unsure at all Xaa locations
  Clone ID: PAT_MRT4530_98428C.1.pep
PHAELAVNVQAELVHXRWAMLGAAGIFIPEFLTKIGILNTPSWYTAGEQEYFTDTTTLFIIELILIGWAEGXRWADIIKPGCVNNRPH

SEQ ID NO: 203225 - protein, 67 aa, Oryza sativa
  unsure (1)..(67): unsure at all Xaa locations
  Clone ID: PAT_MRT4530_98429C.1.pep
GTAAPAPCCRRWXPPEILXXXAAXQEVVAGDGWXLMCMFLSPLFLTVFSFFFLFFSCCWFVGFGXVG

SEQ ID NO: 203226 - protein, 101 aa, Oryza sativa
  Clone ID: PAT_MRT4530_9842C.1.pep
GVEERREAQGARVVATGDDAAPPPARRGGADDADRRGEADEDVLQEGVGDVVQRRRRSRHGQAAAAAAGLLVPAPRVHRGIQLISPNYFPQIENSYRYTRR

SEQ ID NO: 203227 - protein, 243 aa, Oryza sativa
  Clone ID: PAT_MRT4530_98430C.1.pep
MTVAGVAGRTSLAANTSDELPTESSPRPRCQHPSIDRISYGGGAEQQRGGGAREGEAVSLCPLPACASSSAFCGGDKKHGDRTPVTGALPEPNAKRELRVKDVRYSDLGDLRRKPARGVACGGGDEDIGRDGRSSRVVDPAAPPSRGLDPTPLAPEWVTAELEGGGSGSAALRRGGSAILSPGQQQQTSRAVDPAVPPSASREAMATTEIEGSRSGGTVLGPRRGVGDGGVRGQHIQQRHPQP

SEQ ID NO: 203228 - protein, 58 aa, Oryza sativa
  Clone ID: PAT_MRT4530_98431C.1.pep
TTSESCATWQLRLIKVGAPQTSSMHTSGYPSKWAQQVSGITPPQTTSPQQYSARLVYG

SEQ ID NO: 203229 - protein, 57 aa, Oryza sativa
  unsure (1)..(57): unsure at all Xaa locations
  Clone ID: PAT_MRT4530_98432C.1.pep
GLSSLCCRRLYLHLRYNGXCSIRLDGAPLGLTIICYFPIHHPYIYIRLSACHLSPIL

SEQ ID NO: 203230 - protein, 325 aa, Oryza sativa
  Clone ID: PAT_MRT4530_98433C.1.pep
MACPEARLNKDCKTARRLGLPVEVLQEGQPKVLHDAVDNIVVKAGWIVRVSSASGLAAALVQAENHAPAPAPVDQPLRVFIVPYLPPAEAPLILSKIEQASADDSVPGFIVINPNLLETKEKARLDIMHEISRVQNIRDKYRHPSSPATATAPLAPADVPNKPKPKPKDLKELKEQYLLAHLVAGHWRMASNILEYVDNFLFQSLREKDEEEVRIAMQRLQDDLQKKHHGSQHSVRRIAHELLGIATMSKWEYRKELPLPAAEDGMTMKKKLKCHAKKLRKLLTKHTLMGVVPLVWAKLEPMPMITSSGRTIKSNARFTGPEWTA

SEQ ID NO: 203231 - protein, 382 aa, Oryza sativa
  Clone ID: PAT_MRT4530_98434C.1.pep
MLIAGAILCLVASTAPAPALSAGRTTFSVSSFGAAGNGIADDSEIDGDVLAPPGMGYWPKARRPLQWLNFKWLDGFTIQGTGTVDGQSTLLRSVSPANVSQHWYVSGVKPTLIRFYSSFNVSVRNIRITNSPQCHLKFDSSGGIKVKNITISSPGDSLNTDGIHLQNTRDVDIRSSSIGCGDDCISIQTGCSNVHMKNINCNPGHGISLGGLGKDNSLACVSDVFAEHINVENALYGVRIKTWQGGKGTVRNVTFSNVRVANVATPIAIDQFYCDAGGGGARCGNRSDAVGITGVAYRRVAGTYTYQPVRLACSDARPCTGVSMADVRLSPASATGAGGLRQPLCWKSYGEAMGMIEPTGIACLQRSNGFVMPLTKPFNYTC

SEQ ID NO: 203232 - protein, 120 aa, Oryza sativa
  unsure (1)..(120): unsure at all Xaa locations
  Clone ID: PAT_MRT4530_98435C.1.pep
VEVLSELERRRLANIARNNEYLQELGLSAKSARQTKRPPTGKVIQTMRIQNWKVEDEIGARRSSRIASLPATVNYTEEILSRTRPRHSGGMGPSLTHVDTDXVSDLTVRCLRWVXSRIVK

SEQ ID NO: 203233 - protein, 196 aa, Oryza sativa
  Clone ID: PAT_MRT4530_98436C.1.pep
MGVISVNLDEWTDEEVNCLAGSGGNATVNTRYEAFLPENFKKPRHDCTTEERCNFIRKKYEFQQFVTDPQFSCPLRLNTKHAPDKNQQQQNCSARHGFGHAFRNSWKRKDTDNKGLKKMTDVGMVEFVGLIKVDIRRGTNLAVRDVMSSDPYVMLNLGHQTMKTKVIKNTLNPVWNERLMLSIPHPVPPLKLVHAL

SEQ ID NO: 203234 - protein, 316 aa, Oryza sativa
  Clone ID: PAT_MRT4530_98437C.1.pep
MGNASGRLDDIADAEMDDGGGGGNRAGAGDYSSSLRPMDRAGLPPYGGAGGSGGLVRPPSSAAGYSGGGGSSSPPGTPPRPHSPRMFVPQSPVTPLHRAVDGPPPVFNQILTSEQEEDHDGPPDKLIPTLLVWTLGGKNVYIEGSWDNWKSKQLVHKCGKDHCVMLGLASGVYRYRFIVDGERRFQPDRPREADIMGTISNLIDVHDYVPDSVDSVSELMAPPSPDSSYGFLAPDDKEFTKEPPALPPQLHLGVLNSRGGSGGKEGECAMPKHNVLGHVFIGKGTPPMVAALGTTFRFQSKFVTKVLYKAIQREDR

SEQ ID NO: 203235 - protein, 105 aa, Oryza sativa
  Clone ID: PAT_MRT4530_98438C.1.pep
LQQKGWLWSCGTPIIYQMERPTKKINKDDLTGEQIDNTQHTCTEYQYLKSDRTNYYRRPRSFLLLVPFKGSALGESSCSAASSVLVSLSPIASSSAGSDSFASSS

SEQ ID NO: 203236 - protein, 152 aa, Oryza sativa
  Clone ID: PAT_MRT4530_98439C.1.pep
GGGGGGGRFRGVTRRRIGGNPCAHPGERAAASPPRLPSLARRRRRPHARAAEPRQDASLRQPPGRRRRDGRHTQWPALPVRRARRRHRRAQPGHRRDAAAHPRACRQQAGPRGAQLRVPGEDGAVQDRAPPPPPYLPSRARRHRQRRRRHVL

SEQ ID NO: 203237 - protein, 59 aa, Oryza sativa
  Clone ID: PAT_MRT4530_9843C.1.pep
MGRWAVLALLGLDIGFKRNKFTSGPFCRGYPRFFTDIGSEYGSFLGAAMRLTGDMGQRA

SEQ ID NO: 203238 - protein, 43 aa, Oryza sativa
  Clone ID: PAT_MRT4530_98440C.1.pep
KLIVNINRDLSVIGIDAKVQWRSAPASMGLIGRYHANKSTCKV

SEQ ID NO: 203239 - protein, 54 aa, Oryza sativa
  unsure (1)..(54): unsure at all Xaa locations
  Clone ID: PAT_MRT4530_98441C.1.pep
MGAASCNLQGEKAVGQAGKXTAGGTGGSAWRADEGKQGSTVSAQQQIWNACLAS

SEQ ID NO: 203240 - protein, 1924 aa, Oryza sativa
  unsure (1)..(1924): unsure at all Xaa locations
  Clone ID: PAT_MRT4530_98442C.1.pep
MGPISGIDDLVFPPGQTFRFGSLNFVTNNFGKISLLDSESDQSGENRISVPFGFPNAAESYFKTISIESASNHSAEIASSSTSPDQDDGAYPPILMQLPDDLATVSITTASPSRRPGRKSASTPISPSFREVGVILQPLGTVSTDQLDGYHSSPTVDSRPTDIVEYDEFSSRYNYADLDDFDGSLDDNYTPLYFGVFMGXITETEEQCQARETEARRETERRRLEEEHQAQEQERLRREQQERERTAKEAEDRRQRALEAGRRARDLIGQQDVEGTPVFRTPQQNAVAAITLLDTLLKENELNQSDHVVNILNQTKTMIAASVPVNSESVHTPTGSRVPHSRSHDYRHLSLSITGAGSNRRSRGHDERSVHSPPDHHRERRVERPRSPPRRRPVDLRDTIIQRRAARGHHHAPDRHDDDLDGVAAFTDDLRRVDWPAGFKPTGIEKYDGTTNPESWLTVYGLAIRAAGGDSKAMANYLPVALADSARSWLHGLPRXAGETLREYIRRFXEQRNKISDITDDVIIAAFTKGIRHEELVGKFGRKPPKTVKLMFEKANEYAKAEDARTASKQSGPSWKPNKGTPAKGGGGSNNHKDRKRKPEELVATATHSSRQRSRVNTFDKIMNSQCPHHPNSNHVAKDCFVYKQFAEQYTKTTRKNSDEEQKIAIKFDRSDHPDRVVHPGRYPLVLDPVVRNVKLRRTLIDGGSALNILFAKTLDDMQIPRSELKPSNAPFHGVIPGLSATPLGQITLPVTFGTRENFRTENISFEVADFETTYHAILGRPALAKFMAVPHYTYMMTKMPGPRGVLSLRSDIKQAVTCDKESCDMAQTREMASAREDIRLAAATASEGEVPATKISKSGESEAKTKKIPLDPSDSTKTANNKDIFAWKPSDMPGIPREVIEHSLYVKEDAKPIKQRLRRFAQDRKDAIKEELTKLLAAGFIKEVLHPDWLANPVLVRKKTGQWRMCVDYTDLNKSCPKDPFGLPRIDQVVDSTAGCELLSFLDCYSGYHQIRLKESDCLKTSFITPFGAYCYVTMPFGLKNAGATYQRMIQRCFSTQIGRNVEAYVDDVVVKTKQKDDLISDLEETFASIRAFRMKLNPEKCTFGVLSGKLLGFMVSHRGIQANPEKITAILNMKPPSTQKDVQKLTGCMAALSRFVSRLGERGMPFFKLLKKTDDFQWGPDAQKAFEDFKKLLTEPPVLASPHPQEPLLLYIAAASQVVSTVLVVEREEEGHVQKVQRSIYFVSEVLADSKTRYPQVQKLLYGILITTRKLSHYFQSHSVTVVTSFPLGDILHNHEANGRIAKWALELMSLDISFKPRISIKSQALADFVAEWTECQEDTPAEKMEHWTMHFDGSKRLSGTGAGVVLISPTGERLSYVLWIHFSASHNVAEYEALLHGLRIAISLGIKRLIVRGDSQLVVNQVMKEWSCLDDNMMAYRQEVRKLEDKFDGLELSHVLRHNNEAADRLANFGSKREVAPSDVFVEHLYTPTVPHKDTTQIAGTHDVALVEADWREPLIRFLTSQELPQDKDEAERISRRSKLYVMHEAELYKKSPSGILQRCVSLEEGRQLLKDIHSGICGNHAAARTIVGKAYRQGFFWPTAVSDADKIVRTCEGCQFFARQIHLPAQELQTIPLSWPFAVWGLDMVGPFKKAVGGYTHLFVAIDKFSKWIEAKPVVTITADNARDFFINIVHRFGVPNRIITDNGRQFTGGVFKDFCEDFGIKICYASVAHPMSNGQVERANGMILQGIKARVFDRLKPYAGKWVKQLPSVLWSLRTTPSRATGQSPFFLVYGAEAMLPSEVIFESLRFRNFREERYEEDRVDDLHRLEEVREAALIQSARYLQGLRRYHNRNVRSRAFLVGDLVLRKIQTTRDRHKLSPLWEGPFIISEVTRPGSYRLKREDGTLVDNSWNIEHLRRFYA

SEQ ID NO: 203241 - protein, 523 aa, Oryza sativa
  Clone ID: PAT_MRT4530_98443C.1.pep
MYRYWCLAAPPMADQLVHLPQQLLVLLLFIAPFFFFFLIRSIRRRDGGSVRLPPSPWALPVIGHLHHLMGALPPQHAMRNIALRHGPLVRLRLGGLQVILASSVDAAREVMRTHDLAFATRPSTRVMQLVFPEGSQGIVFTPYGDSWRNLRKICTVELLSAKRVQSFRPIREEEVGRLLRAVAAASPARRAVNLSELISAYSADSTMRALIGSRFKDRDKFLMLLERGVKLFATPSLPDLYPSSRLAELISRRPRQMRRHRDEVYEFLDIIIKEHQENRSSSDDQEDLDLVDVLLRIQRKGDFPLSTDNIKTTIGDLFNGGSETTATTLKWIMAELIRNPRVMQKAQDEVRQVLGKHHKVTEEALRNLSYLHLVIKEGLRLHPPGLPLLLRESRTTSQVLGFHVPQGTMILVNMWAISRDPMYWDQAEEFIPERFEHVNIDYYGTDVKYMPFGVGRRICPGIAFGLVNLELVLASLLYHFNWELPDETELGNLDMKEEMGAIARRLHDLSLVPVIRHPLPVDM

SEQ ID NO: 203242 - protein, 65 aa, Oryza sativa
  Clone ID: PAT_MRT4530_98444C.1.pep
LNLFSRAITFPRLARLSLRRLLCQWRFPAPCKYSPVHLFSPRCPLVGPVPSLGRRRLPVLKLFVV

SEQ ID NO: 203243 - protein, 2021 aa, Oryza sativa
  Clone ID: PAT_MRT4530_98445C.1.pep
MGSVSGIDDLVFPPGQTFRFGSLDFVTNNFGKISLLDSESDQSGENRISVPFGFPNAAESYFKTISIESASNHSGEIASSPTSPDQDDGAYPPILMKLPDDLAAVSITTAYPSRRPRRKSASTPISPSFREVGVILQPLGTVSTDQLDGYNSSPTVDSRPTDIVEYDEFSSRYNDLDLDDFDGSLDDNYTPLYFGVFMAGNETEEQRQARETEARRETERRRLEEEHQAQEQERLRREQQERERTAKEAEDRRQRALEAGRRARDLIGQQDVEGTPVFCTPQQNAVAAITLLDTLLKENELNQSDHVVNILNQTKTMIAASVPVNSESVHTPTGSRVPHFRSHDYRHPSLSITGAGSNRRSRGHDERSVHSPPDHHRERRVERPRSPPRRRPVDLRDTIIQRRAARGYHHSPDRHDDDLDGVAAFTDDLRRVDWPAGFKPTGIEKYDGTTNPESWLTVYGLAIRAAGGDSKAMANYLPVALADSARSWLHGLPRGTIGSWAELRDHFIANFQGTFERPGTQYDLYNVIQKSGESLRDYIRRFSEQRNKISDITDDVIIAAFTKGIRHEELVGKFGRKPPRTVKLMFEKANEYAKAEDAITASKQSGPSWKPKKDTPASGGGGSNNHKDRKRKPAELVATASHSSRQRSRINTFDKIMNSQCPHHPNSNHVAKDCFVYKQFADQYTKTTRKNPDEEQSTSRKKDDGDTPAGFQDHRKELNHIFGGPLAYESKRKQKLTEREINAVQPDTPQYLRWSEIAIKFDRSDHPDRVVHPGRYPLVLDPVVRNVKLRRTLIDGGSALNILFAKTLDDMQIPRSELKPSNAPFHGVIPGLSATPLGQITLPVTFGTRENFRTENISFEVADFETAYHAILGRPTLAKFMAVPHYTYMMMKMPGPRGVLSLRSDIKQAVTCDKESCDMAQTREMASAREDIRLAAATASEGEVPATKTSKSGESEAKTKKIPLDPSDPTKTAIIGAELDYIFAWKPSDMPGIPREVIEHSLHVKEDAKPIKQRLRRFAQDRKDAIKEELTKLLAAGFIKEVLHPDWLANPVLVRKKTGQWRMCVDYTDLNKSCPKDPFGLPRIDQVVDSTAGCELLSFLDCYSGYHQIRLKESDCLKTSFITPFGAYCYVTMPFGLKNAGATYQRMIQRCFSTQIGRNVEAYVDDVVVKTKQKDDLISDLEETFASIRAFRMKLNPEKCTFGVPSGKLLGFMVSHRGIQANPEKVTAILNMKPPSTQKDVQKLTGCMEALSRFVSRLGERGMPFFKLLKKTDDFQWGPEAQKAFEDFKKLLTEPPVLASPHPQEPLLLYVSATSQVVSTVLVVEREEEGHVQKVQRPIYFVSEVLADSKTRYPQVQKLLYGILITTRKLSHYFQGHSVTVVTSFPLGDILHNREANGRIAKWALELMSLDISFKPRISIKSQALADFVAEWTECQEDTPVEKMEHWTMHFDGSKRLSGTGAGVVLISPTGERLSYVLWIHFSASHNVAEYEALLHGLRIAISLGIKRLIVRGDSQLVVNQVMKEWSCLDDNMMAYRQEVRKLEDKFDGLELSHVLRHNNEAADRLANFGSKREAAPSDVFVEHLYTPTVPHKDTTQFADTHDVAMVEADWREPLIRFLTSQELPQDKDEAERISRRSKLYVMHEAELYKKSPSGILQRCVSLEEGRQLLKDIHSGICGNHAAARTIVGKAYRQGFFWPTAVSDADKIVRTCEGCQFFARQIHLPAQELQTIPLSWPFAVWGLDMVGPFKKAVGGYTHLFVAIDKFSKWIEAKPVVTITADNARDFFINIVHRFGVPNRIITDNGRQFTGGVFKDFCEDFGIKICYASVAHPMSNGQVERANGMILQGIKARVFDRLKPYAGKWVQQLPSVLWSLRTTPSRATGQSPFFLVYGAEAMLPSEVEFESLRFRNFREERYEEDRVDDLHRLEEVREAALIRSARYLQGLRRYHNRNVRSRAFLVGDLVLRKIQTTRDRHKLSPLWEGSFIISEVTRPSSYRLKREDGTLVDNSWNIEHLRRFYA

SEQ ID NO: 203244 - protein, 1995 aa, Oryza sativa
  Clone ID: PAT_MRT4530_98446C.1.pep
MGSISGIDDLVFPPGQTFRFGSLDFVTNNFGKISLLDSESDQSGENQISAPFGLPNTAESYFKTISTESASNHSGEIASSPTSPDQDDGAYPPILMKLPDDLAAVSITTASPSRRPRRKSASTPISPSFREVGVILQPLGTVSTDQLDGDYSSPTVDSRPTDIVEYDEFSSRYHDPDLDDFDGSLDDNYTPLYFGVFMANNETEEQRQARETEARRETERRRLEEEHQAQEQERLRREQQERERIAKEAEDRRQRALEAGRRARDLIGQQDVEGTPVFRTPQQNAVAAITLLDTLLRENELNQSDHVVNILNQTKTMIAASVPVNSESVHTPTGSRVPHFRSHDYRHPSLSITGAGSNRRSKGHDERSVHSPPDPHRERRVERPRSPPRRRPVDLRDTIIQRRAARGYHHSPDRHDDDLDGVAAFTDDLRRVDWPAGFKPTGIEKYDGTTNPESWLTVYGLAIRAAGGDSKAMANYLPVALADSARSWLHGLPRGTIGSWAELRDHFIANFQGTFERPGTQYDLYNVIQKSGESLRDYIRRFSEQRNKISDITDDVIIAAFTKGIRHEELVGKFGRKPPRTVKLMFEKANEYAKAEDAVTASKQSGPSWKPKKDMPASGGGGSNNHKDRKRKPAELVATANHSSRQRSRVNTFDKIMNSQCPHHPNSSHVAKDCFVYKQFADQYTKTTRKNPDEEQSTSRKKDDGDTPAGFQDHRKELNHIFGGPLAYESKRKQKLTEREINAVQPDTPQYLRWSEIAIKFDRSDHPDRVVHPGRYPLVLDPVVRNVKLRRTLIDGGSALNILFAKTLDDMQIPRSELKPSNAPFHGVIPGLSATPLGQITLPVTFGTRENFRTENISFEVADFETAYHAILGRPALAKFMAVPHYTYMMMKMPGPRGVLSLRSDIKQAVTCDKESCDMAQTREMASAREDIRLAAATASEGEIPATKTSKSGESEAKTKKIPLDPSDPTKTANNKDIFAWKPSDMPGIPREVIEHSLHVKEDAKPIKQRLRRFAQDRKDAIKEELTKLLAAGFIKEVLHPDWLANPVLVRKKTRQWRMCVDYTDLNKSCPKDPFGLPRIDQIRLKESDCLKTSFITPFGAYCYVTMPFGLKNTGATYQRMIQRCFSTQIGRNVEAYVDDVVVKTKQKDDLISDLEETFASIRAFRMKLNPEKCTFGVPSGKLLGFMVSHRGIQANPEKVTAILNMKPPSTQKDVQKLTGCMAALSRFVSRLGERGMPFFKLLKKTDDFQWGPEAQKAFEDFKKLLTEPPVLASPHPQEPLLLYVSATSQVVSTVLVVEREEEGHVQKVQRPIYFVSEVLADSKTRYPQVQKLLYGILITTRKLSHYFQGHSVTVVTSFPLGDILHNREANGRIAKWALELMSLDISFKPRISIKSQALADFVAEWTECQEDTPVEKMEHWTMHFDGSKRLSGTGAGVVLISPTGERLSYVLWIHFSASHNVAEYEALLHGLRIAISLGIKRLIVRGDSQLVVNQVMKEWSCLDDNMMAYRQEVRKLEDKFDGLELSHVLRHDNEAADRLANFRSKREMAPSDVFVEHLYTPTIPHKDTTQVAGTHDVAMIEADWREPLIRFLTSQELPQDKDEAERISRRSKLYVMHEAELYKKSPSGILQRCVSLEEGRQLLKDIHSGICGNHAAARTIVGKAYRQGFFWPTAVSDADKIVRTCEGCQFFARQIHLPAQELQTIPLSWPFAVWGLDMVGPFKKAVGGYTHLFLAIDKFSKWIEAKPVITITADNARDFFINIVHRFGVPNRIITDNGTQFTGGVFKDFCEDFGIKICYASVAHPMSNGQVERANGMILQGIKARVFDRLKPYAGKWVQQLPSVLWSLRTTPSRATGQSPFFLVYGAEAMLPSEVEFESLRFRNFREERYEEDRVDDLHRLEEVREAALIRSARYLQGLRRYHNRNVRSRAFLVGDLVLRKIQTTRDRHKLSPLWEGPFIISEVTRPGSYRLKREDGTLVDNSWNIEHLRRFYA

SEQ ID NO: 203245 - protein, 2012 aa, Oryza sativa
  Clone ID: PAT_MRT4530_98447C.1.pep
MGPFSGIDDLVFPPGQTFRFGSLDFVTDNFGKISLFDSESDQSGENRISVPFGFPNAAETYFKTISIESASNHSAEIASSPTTPDQDDGAYPPVLMKLPDDLAAVSTTTASSSRRPRRKSVSTPTSPSFREVGVILQPLGTVSTDQLDDHYSSPTVDSHPTDIVEYDEFSSRYHDPDLDDFDGSLDDNYTPLYFGVFMANNETEEQRQARETEERRRLEEEHQAQEQERLRREQQDRERIAKEAEDRRQRALEAGRRARDLIGQQDVEGTPVFRTPQQNAVAAITLLDTLLNQNELNRSDHVVNILNQTKTMIAASVPVNSESVHTPTGTRVPHFRSHDYRHPSLSITGAGSNRRSRGHDERSVHSPPDLHRERRVERPRSPPRRRPIDLRDTIIQRRAARGYHHSPDRHDDDLDGVAAFTDDLRRVDWPAGFKPTGIEKYDGTTNPESWLTVYGLAIRAAGGDNKAMANYLPVALADSARSWLHGLPRGTIGSWAELRDHFIANFQGTFEHPGTQYDLYNVIQKSGESLRDYIRRFSEQRNKISDITDDVIIAAFTKGIRHEELVGKFGRKPPRTVKLMFEKANEYAKAEDAVTASKQSGPSWKQNKGTPATGGGGSNNHKDRKRKPAELVATASHSSRQRSRVNTFDKIMNSQCPHHPNSNHVAKDCFVYKQFADQYTKTARKNTDEEQSTSRKKDDGDTPAGFQDHRKELNHIFGGPLAYQSKRKQKLTEREINAVQPDTPQYLRWSEIAIKFDRSDHPDRVVHPGRYPLVLDPVVRNVKLRRTLIDGGSALNILFAKTLDDMQIPRSELKPSNAPFHGVIPGLSATPLGQITLPVTFGTRENFRTENISFEVADFETAYHAILGRPALAKFMAVPHYTYMMMKMPGPRGVLSLRSDIKQAVTCDKESCDMAQTREMASAREDIRLAAATASEGEIPATKTSKSGESEAKTKKIPLDPSDSTKTANNKDIFAWKPSDMPGIPREVIEHSLHVKEDAKPIKQRLRRFAQDRKDAIKEELTKLLAAGFIKEVLHPDWLANPVLVRKKTGQWRMCVDYTDLNKSCPKDPFGLPRIDQVVDSTAGCELLSFLDCYSGYHQIRLKESDCLKTSFITPFGAYCYVTMPFGLKNAGATYQRMIQRCFSTQIGRNVEAYVDDVVVKTKQKDDLISDLEETFASIRAFRMKLNPEKCTFGVPSGKLLGFMVSHRGIQANPEKVTAILNMKPPSTQKDVQKLTGCMAALSRFVSRLGERGMPFFKLLKKTDSFRWGPEAQKAFEDFKKLLTEPPVLASPRPKEPLLLYVSATSQVVSTVLVVEREEEGHVQKVQRPIYFVSEVLADSKTRYPQVQKLLYGILITTRKLSHYFQGHSVTVVTSFPLGDILHNREANGRIAKWALELMSLDISFKPRISIKSQALADFVAEWTERQEDTSAENMEHWTMHFDGSKRLSGTGAGVVLISPTGERLSYVLWIHFSASHNVAEYEALLHGLRIAISLGIKRLIVRVDSQLVVNQVMKEWSCLDDNMMAYRQEVRKLEDKFDGLELSHVLRHNNEAADRLANFGSKRETAPSDVFVEHLYTPTVPHKDTIQDADTHDVAMVEADWREPFIRFLISQELPQDKDEAERISRRSKLYVMHESELYKKSPSGILQRCVSLEEGRQLLKDIHSGICGNHAAARTIVGKAYRQGFFWPTAVSDADKIVRTCEGCQFFARQIHLPAQELQTIPLSWPFAVWGLDMVGPFKKAVGGYTHLFVAIDKFSKWIEAKPVVTITADNARDFFINIVHRFGVPNRIITDNGTQFTGGVFKDFCEDFGIKICYASVAHPMSNGQVERANGMILQGIKARVFDRLKPYAGKWVQQLPSVLWSLRTTPSRATGQSPFFLVYGAEAMLPSEVEFESLRFRNFREDRYEEDRVDDLHRLEEVREAALIRSARYLQGLRRYHNRNVRSRAFLVGDLVLRKIQTTRDRHKLSPLWEGPFIISEVTRPGSYRLKREDGTLVDNSWNIEHLRRFYA

SEQ ID NO: 203246 - protein, 60 aa, Oryza sativa
  Clone ID: PAT_MRT4530_98448C.1.pep
FFFFFFFFFFFFFFFFFFFFFFFFLKILNKGFNKGWNLFKPIFRPKLTNKNSAIFTWWVV

SEQ ID NO: 203247 - protein, 1875 aa, Oryza sativa
  Clone ID: PAT_MRT4530_98449C.1.pep
MGSVSGIDDLVFQPGQAFRFGSLDFVTNNFGKISLLDSESDQSGESRISVPFGVPNAAEIYSKSISIESASNHSGEIASSPTSSDRDDGAYPPILMKLPDDLAAVFTTTASPSRRPRRKSASTPISPSSREVGVIHQPLGSVSTDQLDGYWSSPAVDSRPTEIVEYNEFGFRNNDPDLDDFDESLEDNYTPLYFGVFMADNETEEQRQARETEARRESERCRLEEERQVQEQERLRREQQERERAAKEAEDRRLRALETGHRARDLIGQQDVEGTPVFRTPQQNAVAAITLLDTLLKENELNQSDHVVNILNQTKTMIAASVPVNSGSVRTPSGSRVPHLRSHDYHQPSLSIAGAGSNRRSRGHDERSVHSPPDHHRERRVERPRSPPRRRPVDLRETIIQRRAARGHHHSADRHDNDLDGVAAFTNDLRRVDWPAGFKPTRIEKYDGTTNPESWLTVYGLAIRAAGGDSKAMANYLPVALADSARSWLHGLPRGTIGSWAELRNHFIANFQGTFERPSTQFDLYNNSNITDDVIIAAFTKGIRHEELVGKFGRKPPKTVKLMFEKANEYAKAEDAVIASKQSGSSWKPKKDTPATGGGGSNNHKDRKRKPEELVATATHSSRQRSRVNTFDKIMNSQCPHHPNSNHAAKDCFVYKQFAEQYTKTTRKNSDEEQSTSKKKDDGDPPAGFQDHRKELNHIFGGPLAYESKRKQKLTEREINAVQPDTPQYLRWSETAIKFDRSDHPDRVVHPGRYPLVLDPVVRNVKLRRTLIDGGSALNILFAKTLDDMQIPRSELKPSNAPFHGVIPGLSATPLGQITLLVTFGTRENFRTENICFEVADFETAYHAILGRPALAKFMAVPHYTYMMMKMPGPRGVLSLRSDIKQAVTCDKESCEMAQTREMASAREDIRLAATTASEGEVPATKILKSGESEAKTKKIPLDPSDPTKTAVIGAELDWYHQIRLKESDCLKTSFITPFGAYCYITMPFGLKNAGATYQRMIQRCFSMQISRNVEAYVDDVVVKTKQKDDLISDLEETFASIRAFRMKLNPEKCTFGVPSGNLLGFMVSHRGIQANPEKVTAILNMKPPSSQKDVQKLTGCMAALSRFVSRLGERGMPFFKLLKKTDDFQWGPEAQKAFEDFKKLLTEPPVLASPHPQEPLLLYVSATSQVVSTVLVVEREEEGHVQKVQRPICFVSEVLADSKSRYPQVQKLLYGILITTRKLSHYFQGHSVTVVTSFPLGDILHNREANGRIAKWALELMSLDISFKPRTSIKSQALADFVAEWTECQEDTPAEKMEHWTMHFDGSKRLSGTGAGVVLISPAGERLSYVLWIHFSASHNVAEYEALLHGLRIAISLGIKRLIVRGDSQLVVNQVMKEWSCLDDNMTAYRQEVRKLEDKFDGLELSHVLRHNNEAAERLANFGSKREVAPSDVFVEHLYEPTVPQKETAQVADTHNIAMIEADWREPLIRFLTSQELPQDKDEAERISRRSRLYVIHEAELYKKSPSGILQRCVSLEEGRQLLKDIHSGICGNHAAARTIVGKAYRQSFFWPTAVSDADKIVRTCEGCQFFARQIHLPAQELQTIPLSWPFAVWGLDMVGPFKKAVGGYTHLFVAIDKFSKWIEAKPVVTITADKAQDFFINIVHRFGVPNRIITDNGTQFTGGVFKDFCEDFGIKICYASVAHPMSNGQVERANGMILQGIKARVFDRLKPYAGKWVEQLPSVLWSLCTTPSRATGQSPFFLVYGAEAMLPSEVEFESLRFRNFREERYEEDRVDDLHRLEEVREAALIQSARYLQGLRRYHNRNVRSRAFLVGDLVLRKIQTTRDQHKLSPLWEGPFIISEVTRPGSYRLKREDGTLIDNSWNIEHLRRFYA

SEQ ID NO: 203248 - protein, 49 aa, Oryza sativa
  Clone ID: PAT_MRT4530_9844C.1.pep
RARVRRSKRYAYCMALCYTNLDYTCKLRVYVARHVRYIWIVCNNLVKSH

SEQ ID NO: 203249 - protein, 498 aa, Oryza sativa
  unsure (1)..(498): unsure at all Xaa locations
  Clone ID: PAT_MRT4530_98450C.1.pep
RLRSTILLKRGNNSKAEYNHRTQQATPTMQTCKGNTRMVSPPPLKRQWAVPSCAAVNPAAGQPDTPADPTPSRPPSPPVPRKGSSYSSDQAVTHSRLWQALKWTSLTSAKGRPAPTRGPHMSASQRGRAHGGHGPHVASGARPPRGRPRSAXADRTAGDGRAAARARPRAASPARPTGAARTRAPMVTAGDXGAAERHPRERREGGNERSGPRLTPRQRRRRKRRPERRKTAARFGMTRATVLRRSAGETKGRTESATTRRSRWRWRRVGKRSGAATAANRRSAATAEREVXARGHGRGGGGRRAIGGRGAPRRCEASGSDSATWGGXERRQAAAGVGGGGGRRWCXVATVLRRRGGEMERTPGCGTVWRSXMAHLXGAATAGAAAVRGWRSPASGGDGDRRGELGRGRGGLGKTGKKEEEATGSGEWGGVVAGVAARRGVDSRGERGGVGRDVVARWKGTRVHAGWDEGRRGIGGGSGRRGRRLELAGGCHKLSLTH

SEQ ID NO: 203250 - protein, 162 aa, Oryza sativa
  unsure (1)..(162): unsure at all Xaa locations
  Clone ID: PAT_MRT4530_98451C.1.pep
RRPTLPGAAKPDAELAGKSXGSVKGGGEGPNGNAGRGPNKPMKAPCAFLALMEEFRRSLRDLXPKNISVAAVGXSMPRDMVDSPLTRELGNELLYASARLNXTSWREYNKALAAYTEGESAANNAPAQDEEEDDEEESDKYKSAVSDEAGDGALDEDEYYDE

SEQ ID NO: 203251 - protein, 1806 aa, Oryza sativa
  unsure (1)..(1806): unsure at all Xaa locations
  Clone ID: PAT_MRT4530_98452C.1.pep
MTYRLSNYFLYEQMADRDEEQILYDTIAEGSSQYWNEEEGNEDPNQYLNEEGNVERDAEGNQEGHVERDVEGNLEEEASGSQPSAGQKRARGQRGAVKKLEGRHIITEVDEDGRPSAPAEAAKNYTPNFDTFPKLRDHWDEFVAYKTSQQGQAMLERNKENAAKKKYHHHLGSGGYSVAMPKWEEMEASLLERGIKPATAKWPDRSKFWYYAHGGTLNPVDGSLVFSDQIREAARRLTDAVEASSQGTFRPDSEKDELSLALQTPEHPGRTRGKGVIPWKIGFREDIHTYRIRMRSKRDTEAKIVDLEYRVSSYELSMQEEVARKVDERMAAHRSHDPQPTIPPAMVSPSGNRSSCASTGQVGSQSMDAMQTQDETTCPVDDITQRIPCELHIPLKNLSIKVASGMAIPMDPSGTYHCRPIPAGYSKVEVQLVEGAYEDLELDYPRGDGETHLRDTSHAIILWRKCTVSTSGSCTDSSSGSCTDSSASSSSDTFQVKGSPXAPPTAPTRATKKAKXVRRQLKPRSPEKKIPIDPSVRNFFRGMSAPAKEAIKLSDYERTLKKASSRKSKPVPQLGEQPNQEIEPLVTGEDFGIQEFINDTKLTTDQLLRGAPIEKAEVKYMYELGKPLVKPEQLQSLPTQMYKFHQLYMEMSATGREMIGARIRDTDFLQGDDILWINFKGIYELYQLDALDVSIMSCWILMEIQRARRWGVFDTGFIDPQKVNVAMLDQYPQATEENLIHLLKAQHYKTFILLPYNTDGRSLLTALFLQQILLLQEFAEFDARDDHCQIPRSELKPSNAPFHGVIPGLSATPLGQITLPVTFGTRENFRTENISFEVADFETAYHAILGRPALAKFMAVPHYTYMMMKMPGPRGVLSLRSDIKQAVTCDKESCDMAQTREMASAREDIRLAAATASEGEEPATKISKSGESEAKTKKIPLDPSDPTKTAVIGAEEVIEHSLHVKEDAKPIKQRLRRFAQDRKDAIKEELTKLLAAGFIKEVLHPDWLANPVLVRKKTGQWRMCVDYTDLNKSCPKDPFGLPRIDQVVDSTAGRELLSFLDCYSGYHQIRLKESDCLKTSFITPFGAYCYVTMPFGLKNAGATYQRMIQRCFSTQIGRNVEAYVDDVVVKTKQKDDLISDLEETFASIRAFRMKLNPEKCTFGVPSGKLLGFMVSHRGIQANPEKVTAILNMKPPSTQKDVQKLTGCMAALSRFVSRLGERGDKGFRQVQALSMRDETTGGEEDKANQHWQNHAAMEVKKPVGSHGKRGDTSQQRMRRPVGEDVDAQQRQHNKSAVQAEAPIGSGEGKPAETPVGGGEGKPVGEDVGAQQRRHNRPAVQARTPVGGSEGKPVGEDVGAQQRRHNRPAVQARTPVGGGEGEPVGEDVGAQQRRHNRPAVQARTPVGGGEGEPVGEDVGAQQRRHNRPAVQARTPVGGDEGEPVGEDVGAQQWRHNRPAVQARTPVGGDEGEPVGEDVDAQQRRHKGQPCRRGHQSAATKASRSVKTRPTTAHNRPAVQARTPVGGDEGEPVGEDARTPVGGDKGEPVGEDVGAQQRRHNRPAVQAWTPVGGDEGKPVGEDVGAQQRRHNRPAVQVEAPIGSGEGKPVGEDVDAQQRWHNKSAVQAEAETPVGGGEGKPVGEDVDAQQRWHNRPAVQAETPVGRGEGKPVGEDVDAQQRRHNRPAVQAEAPIGSGEGKPVGEDVDAQQRRHNKSAVQAEAETPVGSGEGKPIGEDVDAQQRRHKGQPCRRKHQSAVTKASRSAETPVGGDEGKPVGEDVDAQQRRHKGQPCRRKHQSAAAKASQSVKT

SEQ ID NO: 203252 - protein, 123 aa, Oryza sativa
  Clone ID: PAT_MRT4530_98453C.1.pep
LHLANYTEHMLANPTASTNRATEPKHPTERGTHSKIDEAQWRARTSSAPGGGCTSSTSGPADGQPPLASGRPRARPADGRTPRGRHGRARALASRGSRATPSPLAASSSACHLSGHGGGDSHC

SEQ ID NO: 203253 - protein, 1902 aa, Oryza sativa
  Clone ID: PAT_MRT4530_98454C.1.pep
MGSVTGIDDLVFPPGQAFRFGSLDFITSNFGKISLLDSESNQSGENRISAPFGFPNAAETYFKTISIESASNHSAEIASSPTTQDQEDGAYPPVLMKLPDDLAAVFTTTASSSRRPRRKSASTPISPSFREVGVILQPLGTTEEQRQARETEERRRLEEEHQAQEQERLRREQQDRERIAKEAEDRRQRALEAGRRARDLIGQQDVEGTPVFRTPQQNAVAAITLLDTLLNQNELNRSDHVVNILNQTKTMIAASVPVNSESVHTPTGSRVPYFRSHDYRHPSLSITGAGSNRRSRGHDERSVHSPPDLHRERRVERPRSPPRRRPIDLRDTIIQRRAARGYHHSPDRHDDDLDGVAAFTDDLRRVDWPAGFKPTGIEKYDGTTNPESWLTVYGLAIRAAGGDNKAMANYLPVALADSARSWLHGLPRGTIGSWAELRDHFIANFQGTFERPGTQYDLYNVTQKSGESLREYIRRFSEQRNKISDISDDVIIAAFTKGIRHEELVGKFGRKPPRTVKLMFEKANEYAKAEDAVTASKQSGPSWKPKNTPATGGGGSNNHKDRKRKPEELVATAAHSSRQRSRVNTFDKIMNSQCPHHPNSNHVAKECFIYKQFAEQYTKSIRKNSDEEQSTSRKKDGGDTPAGFQDHRKELNHIFGGPLAYESKRKQKLTEREINAVQPDTPQYLRWSEIAIKFDRSDHPDRVVHPGRYPLVLDPVVRNVKLRRTLIDGGSALNILFAKTLDDMQIPRSELKPSNAPFHGVIPGLSATPLGHITLPVTFGTRENFRTENISFEVADFETAYHAILGRPALAKFMAVPHYTYMMMKMPGPRGVLSLRSDIKQAVTCDKESCDMAQTREMASAREEIRLAATTESALITFLQNNKDIFAWKPSDMPGIPREVIEHSLHVKEDAKPIKQRLRRFAQDRKDAIKEELTKLLAAGFIKEVLHPDWLANPVLVRKKTGQWRMCVDYTDLNKSCPKDPFGLPRIDQIRLKESDCLKTSFITPFGAYCYVTMPFGLKNAGATYQRMIQRCFSTQIGRNVEAYVDDVVVKTKQKDDLILDLEETFASIRAFRMKLNPEKCTFGVPSGKLLGFMVSHRGIQANPEKVTAILNMKPPSTQKDVQKLTGCMAALSRFVSRLGERGMPFFKLLKKTDNFQWGPEAQKAFEDFKQLLTKPPVLASPHPQEPLLLYVSATSQVVSTVLVVEREEEGHVQKVQRPIYFVSEVLADSKTRYPQVQKLLYGILITTRKLSHYFQGHSVTVVTSFSLGDVLHNREANGRIAKWALELMSLDISFKPRTSIKSQALADFVAEWTECQEDTPVEKIEHWTMHFDGSKRLSGTGAGVVLISPTGERLSYVLWIHFSASHNVAEYEALLHGLRIAISLGIKRLIVRGDSQLVVNQVMKEWSCIDDNMMAYRQEVRKLEDKFDGLELSHVLRHNNEAADRLANFGSKREAAPSDVFVEHLYTPTVPHKDATQVTGTHDVAMVEADWREPFIRFLTSQELPQDKDEAERISRRSKLYVMHESELYKKSPSGILQRCVSLEEGRQLLKDIHSGICGNHAAARTIVGKAYRQGFFWPTAVSDADKIVRTCEGCQFFARQIHLPAQELQTIPLSWPFAVWGLDMVGPFKKAVGGYTHLFVAIDKFSKWIEAKPVVTITADNARDFFITIVHRFGVPNRIITDNGTQFTGGVFKDFCEDFGIKICYASVAHPMSNGQVERANGMILQGIKARVFDRLKPYAGKWVSQLPSVLWSLRTTPSRATGQSPFFLVYGAEAMLPSEVEFESLRFRNFREEHYEEDRVDDLHRLEEAREAALIQSARYLQGLRRYHNRNVRSRAFLVGDLVLRKIQTTRDRHKLSPLWEGPFIISEVTRPGSYRLKREDGTLVDNSWNIEHLRRFYA

SEQ ID NO: 203254 - protein, 1785 aa, Oryza sativa
  unsure (1)..(1785): unsure at all Xaa locations
  Clone ID: PAT_MRT4530_98455C.1.pep
MGSVSGIDDLVFPPGQTFRFGSLDFITNNFGKISLLDSESDQSGENRLSVPFGFPNAAESYFKTISTESASNHSAEIASSTTTPDQDDGAYPPVLMKLPDDLAAVFTMTASSSRRPRRKSASTPLSPSFREVGVILQPLGTVSTDQLDDYNSSPTVDSRPTDIVEYDEFSSRYDDFDDFDGSLDDNYTPLYFGVFMANNETEEQRQARETEERRRLEEEHQVQEQERLRREQQDRERIAKEAEDRRQRALEAGRRARDLIGQQDVEGTPVFRTPQQNAVAAITLLDTLLNQNELNRSDHVVNILNQTKTMIAASVPVNSEXVHTPTGSRXSNRRSRGHDERSVHSPPDLHRERRVERPRSPPRRRPIDLRDTIIQRRAARGYHHSPDRHDDDLDGVAAFTDDLRRVDWPAGFKPTGIEKYDGTTNPESWLTVYGLAIRAAGGDNKAMANYLPVALADSARSWLHGLPRGTIGSWAELRDHFIANFQGTFERPGTQYDLYNVIQKSGESHRDYIRRFSEQRNKISDITDDVIIAAFTKGIRHEELVGKFGRKPPRTVKLMFEKANEYAKAEDAVTASKQSGPSWKQNKGTPATGGGGSNNHKDRKRKPAELVATASHSSRQRSRVNTFDKIMNSQCPHHPNSNHVAKDCFVYKQFADQYTKTARKNSDEEQSTSRKKDDGDTPAGFQDHRKELNHIFGGPLAYESKRKQKLTEREINAVQPDTPQYLRWSEIAIKFDRSDHPDRVVHPGRYPLVLDPVVRNVKLRRTLIDGGSALNILFAKTLDDMQIPRSELKPSNAPFHGVIPGLSATPLGQITLPRTSAFEVADFETAYHAILGRPALAKFMAVPHYTYMMMKMSGPRGVLSLRSDIKQAVTCNKESCDMAQTREMASAREDIRLAAATASEGEVPATKISKSGESEAKTKKIPLDPSDPTKTANNKDIFAWKPSDMPGIPREVIEHSLHVKEDAKPIKQRLRRFAQDRKDAIKEELTKLLAAGFIKEVLHPDWLANPVLVRKKTGQWRMCVDYTDLNKSCPKDPFGLPRIDQVVDSTADCELLSFLDCYSGYHQIRLKESDCLKTSFITPFGAYCYVTMPFGLKNAGATYQRMIQRCFSTQIGRNVEAYVDDVVVKTKQKDDLISDLEETFVSIRAFRMKLNPEKCTFGVPSGKLLGFMVSHRGIQANPEKVTAILNMKPPSTQKDVQKLTGCMAALSRFVSRLGERGMPFFKLLKKTDNFQWRPEAQKAFEDFKKLLTEPPVLASPHPQEPLLLYVSATSQVVSTVLVVEREEEGHVQKVQRPIYFVSEVLADSKTRYPQVQKLLYGILITTRKLSHYFQANGRIAKWALELMSLDISFKPRISIKSQALADFVAEWTECQEDTPAENMEHWTMHFDGSKRLSGTGAGVVLISPTGERLSYVLWIHFSASHNVAEYEALLHGLRIAISLGIKRLIVRGDSQLVVNQVMKEWSCIDDNMMAYRQEVRKLEDKFEGLELSHVLRHNNEAADRLANFGSKREAAPSDVFVEHLYTPTVPHKDTTQDADTHDVAMVEADWREPFIRFLTSQELPQDEDEAERISRRSKLYVMHESELYKKSPSGILQRCVSLEEGRQLLKDIHSGICGNHAAARTIVGKAYRQGFFWPTAVSDADKIVRTCEGCQFFARQIHLPAQELQTIPLSWPFAVWGLDMVGPFKKAVGGYTHLFVAIDKFSKWIEAKPVVTITADNARDFFINIVHRFGVPNRIITDNGTQFTGGVFKDFCEDFGIKICYASVAHPMSKDRGAALAEVVN

SEQ ID NO: 203255 - protein, 311 aa, Oryza sativa
  unsure (1)..(311): unsure at all Xaa locations
  Clone ID: PAT_MRT4530_98456C.1.pep
MRVYIFIVGLLLSPPTVLSLLLGTSQGTQTTIVDIQIHVLQKXKRLQMQRKRXKRAKPGSLTSAAGDSTPQAILDGSDETNFDKTAPTRKIFSSAGQPDTPADPTPSRPPSPPVPRKGSSYTSDQAVTHSRLWXAGRPWRGDDGARPPAVTGGAGXAAAGAKAAAAAEDDGARGRPARRKKAAATTGDAEARTGGGDTLGEDGEALGEETTTTAAXIAGRRWRGGKNSPAREGRGAPVGFRRREAAAGKALAAAKLTAAAVWRGGDSSGGGSRPKAAASGGTSNKRRERDRRHGRARRVRKTREEDAGSDL

SEQ ID NO: 203256 - protein, 889 aa, Oryza sativa
  Clone ID: PAT_MRT4530_98457C.1.pep
MSAAAVTRRINAGGLRVEVTNGNGAAGVYVAAAAAPCSPAAKRVNDGGGKDDVWVAVDEADVSGPSGGDGVRPTLFRTYKVKGSILHPYRFLILVRLIAIVAFFAWRVRHKNRDGAWLWTMSMAGDVWFGFSWALNQLPKLNPIKRVADLAALADRQQHGTSGGGELPGVDVFVTTVDPVDEPILYTVNSILSILAADYPVDRYACYLSDDGGTLVHYEAMVEVAKFAELWVPFCRKHCVEPRAPESYFAMKTQAYRGGVAGELMSDRRRVRREYEEFKVRIDSLFSTIRKRSDAYNRAKDGKDDGENATWMADGTHWPGTWFEPAENHRKGQHAGIVQVLLNHPTSKPRFGVAASVDNPLDFSGVDVRLPMLVYISREKRPGYNHQKKAGAMNALLRVSALLSNAPFIINFDCDHYVNNSQAFRAPMCFMLDRRGGGDDVAFVQFPQRFDDVDPTDRYANHNRVFFDGTTLSLNGLQGPSYLGTGTMFRRAALYGLEPPRWGAAGSQIKAMDNANKFGASSTLVSSMLDGANQERSITPPVAIDGSVARDLAAVTACGYDLGTSWGRDAGWVYDIATEDVATGFRMHQQGWRSVYTSMEPAAFRGTAPINLTERLYQILRWSGGSLEMFFSHSNALLAGRRLHPLQRIAYLNMSTYPIVTVFIFFYNLFPVMWLISEQYYIQQPFGEYLLYLVAIIAMIHVIGMFEVKWSGITVLDWCRNEQFYMIGSTGVYPTAVLYMALKLFTGKGIHFRLTSKQTTASSGDKFADLYTVRWVPLLIPTIVVLAVNVGAVGVAVGKAAAWGLLTEQGRFAVLGMVFNVWILALLYPFALGIMGQRGKRPAVLFVATVMAVAAVAIMYAAFGAPYQAGLSGVAASLGKAASLTGPSG

SEQ ID NO: 203257 - protein, 60 aa, Oryza sativa
  Clone ID: PAT_MRT4530_98458C.1.pep
THTCAENRMHPYVCNFFPCEGMPHCVVPVMFSNFLCLFMPHFLAYGASVPIETPKFAVHF

SEQ ID NO: 203258 - protein, 59 aa, Oryza sativa
  Clone ID: PAT_MRT4530_98459C.1.pep
IRGSARLGVINLFIHLFISIVLITNGNCHWYKLCLFNLTYVLNWVVYLRLCSISEAVLF

SEQ ID NO: 203259 - protein, 128 aa, Oryza sativa
  unsure (1)..(128): unsure at all Xaa locations
  Clone ID: PAT_MRT4530_9845C.1.pep
MEHIERALITLADRSAITISPGKTNRLVPIFVTVRMRVSRHSSLAGASVLAPGDGTLVLVRYMPGFIPTIISKTLYEEGRTCRLLNXHVVDKGDRSVTGLTLVMSPEDNRVPTLHLLPAEWRSTRTQE

SEQ ID NO: 203260 - protein, 102 aa, Oryza sativa
  unsure (1)..(102): unsure at all Xaa locations
  Clone ID: PAT_MRT4530_98460C.1.pep
PDSLSGAQQQCQQLSARGYPSPLRIRLTPCASARSHGTFLLFALQSSHLNICYYHQDLHRRRSAQGSRHWVLRAAFRVSLEGPKLTRTQLFXYKVVXIVSRI

SEQ ID NO: 203261 - protein, 138 aa, Oryza sativa
  Clone ID: PAT_MRT4530_98461C.1.pep
AIFSSSKLSSHLTPPPQITSNSPRSIPACLTTTIPIIQAFHPSQHLAHAWRVERDREGIKECWFQPTGLQQQHFVFLHLIWRFRRVMSHIQRRIVTSLSSKERNPVLSYASCVVSALPRVVRAMSDLLQLGSCPVGLP

SEQ ID NO: 203262 - protein, 109 aa, Oryza sativa
  Clone ID: PAT_MRT4530_98462C.1.pep
TPHHLKLLIHPNLPHAWIRERDREEGRTTTSAYEVIDSRFGASGSCNSSLSNCRTNPEILRFTLLIRRFRRVTSHIPRRIVTTLSSKERIPVMSYVSCVVIALPRAARQ

SEQ ID NO: 203263 - protein, 385 aa, Oryza sativa
  unsure (1)..(385): unsure at all Xaa locations
  Clone ID: PAT_MRT4530_98463C.1.pep
MACGIGRWSRAAAVGVNRQAAAGELDLRPGVLLSLSRFRPKRQRVKQRGGGHGRCGAASSRALTGTENGKGEWRGTKTTSSSGSRLASSLVSSAGSRSXLQFCSFYFFRIKQPXCQQTRSTKESKPVRRCSAPPAPPTTAASSPTASTTRLLDDDSSSSAGAGNSHVVIDIDDDDGGVGDSDDSACSSSSAEGPCCAVCMEPLEWVAVGPCGHAGVCSVCAARIRSSRSWQPDLRCCICRAHCPFVVVTRAAAAAAPAAMPAVNSYQEWRARGYYWYCTTMLAYFDDVEQYRATRAIARGEVKGGAAVDVDGNDGGGGGRRTLSSCVDVFRFLLIVAIFALFGVLFGSVFSSLTAGGRATPGDNLAFISACAAVSMLGSILFYFA

SEQ ID NO: 203264 - protein, 128 aa, Oryza sativa
  Clone ID: PAT_MRT4530_98464C.1.pep
GYSSRENLFPLIYEFPSPSMAPLWRFSIVLVISSAFHRSSIQDFGGKWVAATRPSPLQDNPEILRFTLLIRRFRRVTSHIPRRIVTTLSSKERILVMSYVSCVVIALPRAARAMSDLLQLGSCSVGLP

SEQ ID NO: 203265 - protein, 487 aa, Oryza sativa
  Clone ID: PAT_MRT4530_98465C.1.pep
MTSSSPRDENLLPLPAACTGSRPARVSHGVHGCQHRRPGYVSPPYHRQVLGLLVNWELNNQMRDHDDDVPVAKRRRRLCVQVQPAGAGAAAAGIPEDIVEEILLRLPVKSVLRFRSVCKSWRAMVADPCFARLQLRHSTAAERRRHPPSMLVLPWWGWRPQRQQMQGTIGFFRYPGHGAAAELAHVRAWWSPTSHAAAADWDDGADWELPLQCNGLVLVFSMEKSLSSSLMFVCNPATKKLAVVPPGTPDAHGNQSVGFGADKSTGKIDMKVVRCFARSDESVGCEVFSLGSPAWRPVADSPCPVRAGAASPCILGAIYWITTAAPTPGMLRFDVRREVFDDFPSPPCVHHDGTSPATATLTELSGNKLCYAHVVAGHTVELWTMAAASAADDGPRWSRHCAVELWRPTQLVVPFADDRHGGIFFNLDLAVIDRHDTQRQVVERVVDMNKEMTYFHSRDKQYYINRGFRWMHHVSHCRESLVSVKAN

SEQ ID NO: 203266 - protein, 291 aa, Oryza sativa
  Clone ID: PAT_MRT4530_98466C.1.pep
MMGIVVVKHAELEFGFLDGIWGGEVSWDLSLMRKRKNNRGGRRRGFPLPTLCPEVGRTPKGGFWAKKAPKLILPKFMGGLGFRDMRLFNQALLARQAWRLIQFPDSLCARLLKAKYFPNSELIDAVFLGDSSVTWKSLEYGLQLLKKGLIWRIGDGTKKFSKLNCLNIRQDFLAWHYEKSGLFSIQSAYKLVLHARLDSNLGSSSSAANGERSIWGSISKTPVPHKIKIFAWRLANKGLATIRNRCSRNLEVDATYRICGMEVEDEFHAVISCMRARALRESLRSCWKLPA

SEQ ID NO: 203267 - protein, 62 aa, Oryza sativa
  Clone ID: PAT_MRT4530_98467C.1.pep
TAAIATSPCQPPCRPPPYPHRSSPPLPSPDLQEEKGPDKLPPPPPPPPLPPPPPRHACASLQ

SEQ ID NO: 203268 - protein, 139 aa, Oryza sativa
  Clone ID: PAT_MRT4530_98468C.1.pep
ALISLLLPKSHPIAQDQSLHVRSQQSPSSKLSIHPNILHMHGELREIEIGEESGGFSLHGCSSNMTLFPSIWSSISIIAARMWLQLISVEAALDSEIPESNEPYPEEDSDYPQQQGEDSGYELCFLCGHCSTEGGEGNE

SEQ ID NO: 203269 - protein, 110 aa, Oryza sativa
  Clone ID: PAT_MRT4530_98469C.1.pep
KKKANLRGLIGRGEKISGGAQPHSRGLFWGGAPNSRAKPNFLTPPQKILNPFRGVNPRFGANREKEFVPKGPCPFFFGKLGGVKTRGTQGETTPGRGPKGAPRGTTQGTL

SEQ ID NO: 203270 - protein, 52 aa, Oryza sativa
  unsure (1)..(52): unsure at all Xaa locations
  Clone ID: PAT_MRT4530_9846C.1.pep
DXEXIIXLXTGHXCQFIPTSXVESYXSMSGFXSFFLQKEATIRGIVACARLA

SEQ ID NO: 203271 - protein, 164 aa, Oryza sativa
  unsure (1)..(164): unsure at all Xaa locations
  Clone ID: PAT_MRT4530_98470C.1.pep
PEEDVLKLNIDGSFRPNELXGGWDYVIRDADAHVIQAGAGNSSRLQDAFHAEVLAAVKAVEAISHGGMAYIHLESDLLMLVQALKEGNLQYAAMGVLVLEAKKIITSAFISXELAXCPRECNKLADAIASIGCNSPQNTVQLPYHQVPCAFFSIFSTATLVFLG

SEQ ID NO: 203272 - protein, 45 aa, Oryza sativa
  unsure (1)..(45): unsure at all Xaa locations
  Clone ID: PAT_MRT4530_98471C.1.pep
YRMVCGVLLERTMMEVLSAVRCIREVLVXVVVRMHEALSKKKKEI

SEQ ID NO: 203273 - protein, 223 aa, Oryza sativa
  unsure (1)..(223): unsure at all Xaa locations
  Clone ID: PAT_MRT4530_98472C.1.pep
MASRSGDRRLAVVAFAAAVLLSAAEGLGVNWGTMASHPLPPRAVVRMLQDNGISKVKLFDADAGTMEALAGSGVEVMVAIPNNLLDLLTDYDAARDWVHENVSRYSFDGGVNIKYVAVGNEPFLSSLNGTFLNVTFPALQNIQRALYDAGHGDTIKATVPLNADVYNSPENMQVPSAGRFRPDIXGLMTEIVQFPDQSGAPFTVNIYPFLSLYGNDNFPLDYA

SEQ ID NO: 203274 - protein, 72 aa, Oryza sativa
  Clone ID: PAT_MRT4530_98473C.1.pep
MEERGLPSRELAPPDTVLKGRGGPIVVDELPEPAFPIIVSLCKLILGNSPEMTLVLILRDEDGLNSSIWESS

SEQ ID NO: 203275 - protein, 893 aa, Oryza sativa
  Clone ID: PAT_MRT4530_98474C.1.pep
MVNALSAKPYHPVFSVSHGTSASSSSQHPYMARQLLEHPEYNPRMHRTHPSLQPTIEAASTSMTSHVKEPCYQENVGDSNPGMSLLRSTAVSSRDVENKSPNLGDRVHADVSEIYSTLDHQTSANSMQIQYAPQVVRQPSQQSLHSDVTETYSAFGHQSAASNIQRQFAPRVTRQASHRSLYESSNSSLWTGPHDDSQMELFRPSSSRRISTNVISGELPRINLQSETMMGNADFNQQNLRRQISLRENTESHSFGTYNELPRTSSFLRRQSSESSQLNSASVKCSPGSGSSSTTMGPPRPFNTVSGGASSLLGSPLSSMSGGSSSGGNPDHQGTVLSSIYQPDGYNINSTLPLRMRTHAREAYATSVLPQATRRSHQVNFDSAERRPQYVQQRGLDDTINSNMLSARQQFQRQVERQLQRQLERQLQRQLERQLQRQVQRQLQRHHERAAASEAHPFYGNDETSVRMNPTEEFLDIVKDHEAFFLSFYHPSRIPARVMNTVDQCYGVDMEREMPHQESHPTPGCGTELSHKNDTSGFERSDVDVAHIHDSKRLNNEELNALLLHRKFSSLNKGNYRLFHIEGHVLQCSIDQCGSRFIQQKLPTATPDEKLMVFKEIMPHFLEMVTDVFGNYVLQKAVELSDLDQKIQIAKELNSNIMKCIHDPNANHVVQKCIEHVPPRFIQFFVESMYGRVVELSVHPYGCRVIQRILEYFDSSIQEIFLEEIIEEVYYMAKDQYANYVVQNILQHGKALVRSAIIKKFIGRVVAMSKQKFASNVIEKCLIFGSYDEKQKIINEVIGTTDLVRSGETEALVVMVNDQYANYVVQKVIETCDEWQRKLILRRLRAHHSLLHDCTYAKHVVARLDRLIDIGERKMANPRRPRRHGKDPVPPLT

SEQ ID NO: 203276 - protein, 376 aa, Oryza sativa
  Clone ID: PAT_MRT4530_98475C.1.pep
AAPSMWDNLAGGGGGSAGLNNEELNALLLHRKFSSLNKGNYRLFHIEGHVLQCSIDQCGSRFIQQKLPTATPDEKLMVFKEIMPHFLEMVTDVFGNYVLQKMIEHGAPFQRREITACLFGSVSSLSCQLYGCRVVQRAVELSDLDQKIQIAKELNSNIMKCIHDPNANHVVQKCIEHVPPRFIQFFVESMYGRVVELSVHPYGCRVIQRILEYFDSSIQEIFLEEIIEEVYYMAKDQYANYVVQNILQHGKALVRSAIIKKFIGRVVAMSKQKFASNVIEKCLIFGSYDEKQKIINEVIGTTDLVRSVQVMVNDQYANYVVQKVIETCDEWQRKLILRRLRAHHSLLHDCTYAKHVVARLDRLIDIGGTQSVSLIT

SEQ ID NO: 203277 - protein, 80 aa, Oryza sativa
  Clone ID: PAT_MRT4530_98476C.1.pep
EVDTQGRMHILNMGDINTAEESFHWACNPLSKMTLSNLESSKRPAQVSHHSSTFRGHLELPLHFGEPPNYSSPKTMHSFA

SEQ ID NO: 203278 - protein, 188 aa, Oryza sativa
  Clone ID: PAT_MRT4530_98477C.1.pep
QMYGPKEDRKLAIVLVGLPARGKTFTAAKLTRYLRWLGHETKHFNVGKYRRLKHGINQTADFFRGDNKEGVEARNEVAALAMEDMLSWMQEGGQVGIFDATNSTRNRRNMLMKMAEGKCKIIFLETICNDQNVLERNMRLKVQRSPDYAEQTDFEAGVRDFKERLAYYEKVYEPVEEGSYVKMIDMVS

SEQ ID NO: 203279 - protein, 1019 aa, Oryza sativa
  unsure (1)..(1019): unsure at all Xaa locations
  Clone ID: PAT_MRT4530_98478C.1.pep
MAGPTIEGGGAQSPATAGGTGSDGAQRGKRREETEAVREREVAELTEGHGDGEXSSRRREAAALHRSTMRRGSRRRKAATGRRMGKNGTRRSRRCGRCVAAAAGVKANGDRRRKKAAGRVVWRGGGSGGGGEKGMGGRACPCGSEANGGRGVAESSEVRPEATTGVAEDGNGSGPGGGDRGRGGRQRPAEGAPATWASGARTAPIFGGEMGEKVEEGEDVGWTTSARARERGGARGKRRRGVAQAAMAVGVGRREDLQDLESTAILLGFDDLQEKYWRRGMNSLIRKSKDEEDEEIIMFWLPALYLLTSNGGIEKRVRHTSSQYSEEKLRNILEGHEKNCLVAFRMEPNIFRAIVTYLRTEHLLRDTRGITVEEKLGHFLYMISHNASYEDLQHEFHHSGETIHRHIKAVFKVIPSLTYRFIKQTTRVETHWKISTDQLFFPYFQNCLGAIDGTHVPITISQDLQAPYRNRKGTLSQNVMLVCDFDLNFLFIPSGWEGSATDARVLRSAMLKGFNVPQGKYYLVDGGYANTPSFLAPYRGVRYHLKEFGRGQQRPRNYKELFNHRHAILRNHIERAIGVLKKRFPILKVGTHHRIKNQVKIPVATVVFHNLIRMLNGDEGWLNHQGSNISPEQFIDVPEGDDEYSNDVMSLNSQVDDGNAQQCLEEGHFHDCKRLYTTQVVKCKRLYTTLHNCVNLETKFCLGWKISISTPSVTSLTLDNPMDGIVVLKDMKSLVRASVRLNRQWPHDDFDARDLRNYLWTLSGIENLKFYCGRRKLTIQNSLQWCPKFFNLVSLTLGHWCLHGNFYTLIVFLQNSPRLEKLTLILGNDHWKTFEASIGDKLDERSFTCEHLMSVKVRCSEDDPMLWQKRFGRLPKLWWRGRKLDDGVAELTKSGLGLSPLAAAIFPSSDLRLSPDRRHQLVKLRVAMHSFNAPLRAMPHLALTNPNEKRGTQLGSTVFTWCGSRLRKPDGCTPVAISSWTQILCLWPLKSHRDFTSSLPSDLIQWTGLLGPSTGLAHC

SEQ ID NO: 203280 - protein, 205 aa, Oryza sativa
  Clone ID: PAT_MRT4530_98479C.1.pep
PSPNHPHHAKVSPPPLKRQWAVPSCAAVNPAAGQPDTPADPTPSRPPSPPVPRKGSSYTSDQAVTHSRLWGGGAGKRAPHVSSTRGERWGLGHVGPTGSGSKREREGRLAARHGSSRPAGHGAAAAAARAVTGGDRRRGRRRRPARRRRRRPKTMAHARRAADLMGERKGRRRGDSSPASTAADAKEEGGGDDRRAEARTAGSDT

SEQ ID NO: 203281 - protein, 154 aa, Oryza sativa
  Clone ID: PAT_MRT4530_9847C.1.pep
MASCAGLPGVAYEIMRANGLTRAWQSAKKGWGFSTCNPTEWASDSMASKWQLPSAQAYVQAHETVQFAALSSDQLQPTVQMQRMGKQACLANKCKSRQHHQGIRLRLITKVIHGEDACNLALAKQEHDGKGKREPIAGLTFVRVTNMTKPTGNS

SEQ ID NO: 203282 - protein, 175 aa, Oryza sativa
  unsure (1)..(175): unsure at all Xaa locations
  Clone ID: PAT_MRT4530_98480C.1.pep
LHAINVMHLEKNVFDNIVGTLLDMPKKTKDVLQSRMVLVEMGIREELHPKEGEKNGKVYLPPACFTLTPAVKKSFCKSHRDVRVPIGFSSNISGLVSMKDLSVSGDNSRDSHVVLTVFLAIAIKTIHPEHLXVAISRLCYFLNAVSQKVISLKELGSRRALAQYTKSRVGINNTE

SEQ ID NO: 203283 - protein, 426 aa, Oryza sativa
  Clone ID: PAT_MRT4530_98481C.1.pep
MSSSHLHSLLLPPLSLPLSFLPRGRIDPAATATALAREADGDSGGGSGGDDYPRGGGDSSSGGRRRQRRPRGARRLPARARSEAAAATAPRAREERGGGGGGFSGGRQRQRRPRGARRLPARARSEAVAAVAPRARSGNGNNGSGARREAAAAVAPLTRAVATAHAQGARRRRRWLPARVAAMAAIRGGGGGSRRAQRRRLVRETAVAVAPRARRGVTAERGWTGMGVAAHLGLSAIAIRSPASFPFPTAAGARGRVGSAQPVGPKLLSSPLPPAATPAVPRRLLFPVAAGIWDFLSGGGAGGAAAASLAVRGGMQLFRQGDVAGSVAEFDRAIELDQRQKKYLWQRGLSLYYLDRFEEGAEQFRLDVAANPNDTEESIWCFLCEAQLYGVDEARKRFLEVGLDSRSVMREAYALFKDGGDPEKVV

SEQ ID NO: 203284 - protein, 1991 aa, Oryza sativa
  Clone ID: PAT_MRT4530_98482C.1.pep
MGSVSGIDDLVFPPGQTFRFGSLDFITNNFGKISLLDSESDQSGENRISVPFGFPNAAESYFKTISTESASNHSAEIASSPTTPDQDDGAYPPVLMKLPDDLAAVFTTTASSSRRPRRKSASTPISPSFREVGVILQPLGTVSTDQLDDYNSSPTVDSRPTDIVEYDEFSSRYNDLNDFDDFDGSLDDNYTPLYFGVFMANNETEEQRQARETEERRRLEEEHQAQEQERLRREQQDRERTAKEAEDRRQRALEAGRRARDLIGQQDVEGTPVFRTPQQNAVAAITLLDTLLNQNELNRSDHVVNILNQTKTMIAASVPVNSESVHTPTGSRVPHFRSHDYRHPSLSITGAGSNRRSRGHDERSVHSPPDLHRERRVDRPRSPPRRHPIDLRDTIIQRRAARGYHHSPDRRDDDLDGVAAFTDDLRRVDWPAGFKPTGIEKYDGTTNPESWLTVYGLAIRAAGGDNKAMANYLPVALADSARSWLHGLPRGTIGSWAELRDHFIANFQGTFERPGTQYDLYNVIQKSGESLRDYIRRFSEQRNKISDITDDVIIAAFTKGIRHEELVGKFGRKPPRTVKLMFEKANEYAKAEDAVTASKQSGPSWKQNKGTPATGGGGSNNHKDRKRKPAELVATASHSSRQRSRVNTFDKIMNSQCPHHPNSNHVAKDCFIYKQFADQYTKTARKNPGEEQSTSRKKDDGDTPAGFQDHRKELNHIFGGPLAYESKRKQKLTEREINAVQPDTPQYLRWSEIAIKFDRSDHPDRVVHPGRYPLVLDPVVRNVKLRRTLIDGGSALNILFAKTLDDMQIPRSELKPSNAPFHGVIPGLSATPLGQITLPVTFGTRENFRTENISFEVADFETAYHAILGRPALAKFMAVPHYTYMMMKMPGPRGVLSLRSDIKQAVTCDKESCDMAQTREMASAREDIRLAAATASEGEVPATKISKSGESEAKTKKIPLDPSDPTKTANNKDIFAWKPSDMPGIPREVIEHSLHVKEDAKPIKQRLRRFAQDRKDAIKEELTKLLAAGFIKEVLHPDWLANPVLVRKKTGQWRMCVDYTDLNKSCPKDPFGLPRIDQIRLKESDCLKTSFITPFGAYCYITMPFGVKNAGATYQRMIQRCFSTQIGRNVEAYVDDVVIKTKQKDDLISDLEETFASIRAFRMKLNPEKCTFGVPSGKLLGFMVSHRGIQANPEKVTAILNMKPPSTQKDVQKLTGCMAALSRFVSRLGERGMPFFKLLKKTDNFQWGPEAQKAFEDFKKLLTEPPVLASPHPQEPLLLYVSATSQVVSTVLVVEREEEGHVQKVQRPIYFVSEVLADSKTRYPQVQKLLYGILITTRKLSHYFQGHSVTVVTSFPLGDILHNREANGRIAKWALELMSLDISFKPRISIKSQALADFVAEWTECQEDTPAENMEHWTMHFDGSKRLSGTGAGVVLISPTGERLSYVLWIHFSASHNVAEYEALLHGLRIAISLGIKRLIVRGDSQLVVNQVMKEWSCLDDNMMAYRQEVRKLEDKFDGLELSHVLRHNNEAADRLANFGSKREAAPSDVFVEHLYTPTVPHKDTTQDADTYDVAMVEADWREPLIRFLTSQELPQDKDEAERISRRSKLYVMHESELYKKSPSGILQRCVSLEEGRQLLKDIHSGICGNHAAARTIVGKAYRQGFFWPTAVSDADKIVRTCEGCQFFARQIHLPAQELQTIPLSWPFAVWGLDMVGPFKKAVGGYTHLFVAIDKFSKWIEAKPVVTITADNARDFFINIVHRFGVPNRIITDNGTQFTGGVFKDFCEDFGIKICYASVAHPMSNGQVERANGMILQGIKARVFDRLRPYAGKWVQQLPSVLWSLRTTPSRATGQSPFFLVYGAEAMLPSEVEFESLRFRNFREERYEEDRVDDLHRLEEAREAALIRSARYLQGLRRYHNRNVRSRAFLVGDLVLRKIQTTRDRHKLSPLWEGPFIISEVTRPGSYRLKREDGTLVDNSWNIEHLRRFYA

SEQ ID NO: 203285 - protein, 1899 aa, Oryza sativa
  Clone ID: PAT_MRT4530_98483C.1.pep
MGSVSGIDDLVFPPGQTFRFGSLDFVTNNFGKISLLDSVSDQSGENRISVPFGLPNAAESYFKTISIESASNHSGEIASSPTTPDQDDGAYPPILMKFPDDLAAISIMTASPSRRPRRKSASTPISPSFREVGVILQPLGTVSTDQLDDYYSSPTVDSRPTDIVEYDEYCSRYNDPDLDDFDESLDDNYTPLYFGVFMADNETEEQRQARETEARRETERRRLEEERQAQEQERLRREQQERERMSRPELTQRAFLTREGAPEGGLAGTADGRGTRPRPDGHRRRPPARRSGTRERGGKGEANGAVFGSPRSTATTGTAAEAEEGGGAVRDGEGDGAPAVGERNGGADGVDDDAAKPTEVTPSGEEVRSDGGGEPELVGDGGEKMRRRDPDSDGRRARDLIGQQDVEGTPVFRTPQQNAVAAITLLDTLLKENELNQSDHVVNILNQTKTMIAASVPVNSESVHTPTGSRVPHFRSHDYRHPSLSITGAGSNRRSRGHDERSVHSPPDHHRERRVERPRSPPRRRPVDLRDTIIQRRAARGHHHSPDRHDDDLDGVAAFTDDLRRVDWPAGFKPTGIEKYDGTTNLESWLTVYGLAIRAAGGDSKAMANYLPVALADSARSWLHGLPRGTIGSWAELRDHFIANFQGTFERPGTQYDLYNVIQKSGESLRDYIRTVKLMFEKANEYAKAEDAVTASKQSGPSWKPNKGTLATGGGGSNNHKDRKRKPEELVATATHSSRQRSRVNTFDKIMNSQCPHHPNSNHVAKDCFVYKQFAEQYTKTTRKNSDEEQSTSRKKDDGDTPAGFQDHRKELNHIFGGPLAYESKRKQKLTEREINAVQPDTPQYLRWSEIAIKFDRSDHPDRVVHPGRYPLVLDPVVRNVKLRRTLIDGGSALNILFAKTLDDMQIPRSKLKPSNAPFHGVIPGLSATPLGQITLPVTFGTRENFRTENISFEVTDFETAYHAILGRPALAKFMAVPHYTYMMMKMPGPRGVLSLRSDIKQAVTCDKESCDMAQTREMASAREDIRLAAATASEGEVPATKTSKSGESEAKTKKIPLDPSNPTKTANNKDIFAWKPYDMPGIPREVIEHSLHVKEDAKPIKQRLRRFAQDRKDAIKEELTKLLAAGFIKEVLHPDWLANPVLVRKKTGQWRMCVDYTDLNKSCPKDPFGLPRIDQVVDSTAGCELLSFLDCYSGYHQIRLKESDCLKTSFITPFGAYCYVTMPFGLKNAGATYQRMIQRCFSTQIGRNVEAYVDDVVVKTKQKDDLISDLEETFASIRAFRMKLNPEKCTFGVPSGKLLGFMVSHRGIQANPEKVTAILNMKPPSTQKDVQKLTGCMAALSRFVSRLGERGMPFFKLLKKTDDFQWGPEAQKAFEDFKKLLTEPPVLASPHPQEPLLLYVSATSQVVSTVLVVEREEEGHVQKVQRPIYFVSEVLADSKTRYPQVQKLLYDISFKPRISIKSQALADFVAEWTECQEDTPAEKMEHWTMHFDGSKRLSGTGAGVVLISPTGERLSYVLWIHFSASHNVAEYEALLHGLRIAISLGIKRLIVRGDSQLVVNQVMKEWSCLDDNMMAYRQEVRKLEDKFDGLELSHVLRHNNEAADRLANFGSKREAAPSDVFVEHLYTPTVPHKDTTQVAGTHDVAMVEADWREPLIRFLTSQELPQDKDEAERISRRSKLYVMHEAELYKKSPSGILQRCVSLEEGRQLLKDIHSGICGNHAAARTIVGKAYRQGFFWPTAVSDADKIVRTCEGCQFFTRQIHLLAQELQTIPLSWPFAVWGLDMVGPFKKAVGGYTHLFVAIDKFSKWIEAKPVVTITADNARDFFINIVHRFGVPNRIITDNGRQFTGGVFKDFCEDFGIKICYASVAHPMSNGQNAMKRTEWMICTDWKKSAKQL

SEQ ID NO: 203286 - protein, 1991 aa, Oryza sativa
  Clone ID: PAT_MRT4530_98484C.1.pep
MGSVTGIDDFVFPPGQTFRFGSLDFVTNNFGKISLLDSESDQSGDNRLPVPFGFPNAAESYFKTISIESASNHSAEIASTPTTPDQDDEPYPSILMQLPDDSAAVSTATPSPSRRPGRKSVLTPISPSFREVGVILQPLGTVSTDQLDGYYSSPTVDSRPTEIVEYDEFGSRYYDDADLDDFDGSLEDNCTPLFFGVFMADNETEEQRQAREAETRCEIERRRLEQERQAQEQERLRREQQVHERNAKEAEDRRQRTLEAGRRARDLIGQQDVEGIPVFRTPQQNAVAAITLLDTLLKENEHNQSDHVINILNQTKTMIAASVPVNSESVHTPTGSRVPHFRSQDYRHPSLSITGAGSNRRSRGHDERSVHSPPDYRGERRVERPRSPPRRRPIDLRDTIMQRRAARGRHHSPDRYDDDLDGVAAFTDDLRRVDWPAGFKPTGIEKYDGTTNPESWLTVYGLAIRAAGGDNKAMANYLPVALADSARSWLHGLPRGTIGSWAELRDHFIANFQGTFERPGTQYDLYNVIQKSGESLREYIRRFSEQRNKISDITDDVIIAAFTKGIRHEELVGKFGRKPPRTVKLMFEKANEYAKAEDAVTASKQSGPSWKPKNTPATGGGGSNNHKDRKRKPEELVATAAHSSRQRSRVNTFDKIMNSQCPHHPNSNHVAKECFIYKQFAEQYTKSTRKNSDEKQSTSRKKDDGDTPAGFQDHRKELNHIFGGPMAYESKRKQKLTEREINAVQPDTPQYLRWSEIAIRFDRSDHPDRVVHPGRYPLVLDPVVRNVKLRRTLIDGGSALNILFAKTLDDMQIPRSELKSSNAPFHGVIPGLSATPLGQITLPVTFGTRENFRTENISFEVADFETAYHAILGRPALAKFMAVPHYTYMMMKMPGPRGVLTLRSDIKQAVTCDKESCDMAQTREMASAREEIRLAATTESALITFLQNNKDIFAWKPSDMPGIPREVIEHSLHVKEDAKPIKQRLRRFAQDRKDAIKEELTKLLAAGFIKEVLHPDWLANPVLVRKKTGQWRMCVDYTDLNKSCPKDPFGLPRIDQVVDSTAGCELLSFLDCYSGYHQIRLKESDCLKTSFITPFGAYCYVTMPFGLKNAGATYQRMIQRCFSTQIGRNVEAYVDDVVVKTKQKDDLILDLEETFASIRAFRMKLNPEKCTFGVPSGKLLGFMVSHRGIQANPEKVTAILNMKPPSTQKDVQKLTGCMAALSRFVSRLGERGMPFFKLLKKTDNFQWGPEAQKAFEDFKQLLTKPPVLASPHPQEPLLLYVSATSQVVSTVLVVEREEEGHVQKVQRPIYFVSEVLADSKTRYPQVQKLLYGILITTRKLSHYFQGHSVTVVTSFPLGDVLHNREANGRIAKWALELMSLDISFKPRTSIKSQALADFVAEWTECQEDTPVEKIEHWTMHFDGSKRLSGTGAGVVLISPTGERLSYVLWIHFSASHNVAEYEALLHGLRIAISLGIKRLIVRGDSQLVVNQVMKEWSCIDDNMMAYRQEVRKLEDKFDGLELSHVLRHNNEAADRLANFGSKREAAPSDVFVEHLYSPTVPHKDATQVADTHDIAMVEADWREPLIRFLTSQELPQYKDEAERISRRSKLYVMHEAELYKKSPSGILQRCVSLEEGRQLLKDIHSGICGNHAAARTIVGKAYRQGFFWPTAVSDADKIVRTCEGCQFFARQIHLPAQELQTIPLSWPFAVWGLDMVGPFKKAVGGYTHLFMAIDKFSKWIEAKPVVTITADNARDFFINIVHRFGVPNRIITDNGTQFTGGVFKDFCEDFGIKICYASVAHPMSNGQVERANGMILQRIKARVFDRLKPYAGKWVSQLPSVLWSLRTTPSRATGQSPFFLVYGAEAMLPSEVEFESLRFRNFREERYEEDRVDDLHRLEEVREAALIQSARYLQGLRRYHNRNVRSRAFLVGDLVLRKIQTTRDRHKLSPLWEGPFIISEVTRPGSYRLKREDGTLVDNSWNIEHIRRFYA

SEQ ID NO: 203287 - protein, 140 aa, Oryza sativa
  unsure (1)..(140): unsure at all Xaa locations
  Clone ID: PAT_MRT4530_98485C.1.pep
MAAEIQTAVRLPVVPAPRLFHGGHALNRPRRTHHHRQSSEGTLPFPSXLHGAQTAAAATPCGRREAQVLATTAGCEERRVAWEPAAAGRGRRRVARELAAAAGCEGRRATQEPAATGRGRRHAAQVEDGAGARQQVFGCC

SEQ ID NO: 203288 - protein, 383 aa, Oryza sativa
  unsure (1)..(383): unsure at all Xaa locations
  Clone ID: PAT_MRT4530_98486C.1.pep
PAPSSFGRQVGPAAPPVSSSLFLXATSPVTTHGRLSCPTSPLPQPTSSTLRRSRPTVGPRRPRPRSPPPFSPSKTGAEPPHSPTSPAPLPPSNPPLPATFSPPRSLDTSPPCSRAPPLSGELRPADSAAPPTAAPIRHHCRLRGAVPQPGLYSISPLRLWNTAASCTTSLPRRRRLQPAAAAALVVAAPRRLRRRQRCAKLYLGLCSVSPFHRRNHLSAVDPSSATAVVVSNHRSSPLRSPISLPNRSNIFPRSCRPSAAAPPWSGVVGTPFPSPPVPVAAIFSAAGHLPVVVSPSPSSVRIPIAPSPFSPSAAPHARHRDALPSPVVVWPRARSRRAMAGRVGLGRARAPAARXAAVDRVHHEPPPXPADVWGPPVGAGSPC

SEQ ID NO: 203289 - protein, 358 aa, Oryza sativa
  Clone ID: PAT_MRT4530_98487C.1.pep
MDIDGQPGQGQPRQGQQGHGRGHGRVSGSHSTIEPRNVAAAGRGRGSPLSLNDMPGGRSIIDKRFKNKDLGSFLTKSSASTCSPHPSPSTHGDDAPVESIAEEVLEEPVQCLETVIENTQEQPELEDAAYCFYCFLFRQEADHEKFGHVVFSKTGYDNWKHAYRAFPTHVGGVSGCHNKARRCADDFKNQRASISHKVDTVSKESEKLYEIRLTASLDIARYLISQGHAFRGHDESPSSLNKGNFLELFDWYKQRSEEVRVAFGELCPDNARMTSHRIQKELCNSCAQQISKEIKQEIGHNLFSILIDESRDISIAEQMAVIVRFVNHKGMVVERFLGLKHVEDTTSNALKKALLEML

SEQ ID NO: 203290 - protein, 2191 aa, Oryza sativa
  unsure (1)..(2191): unsure at all Xaa locations
  Clone ID: PAT_MRT4530_98488C.1.pep
MGSVSGIDDLVFPPGQTFRFGSLDFVTNNFGKISLIDSELDQSGENRISVPFGLPNAAESYFKTISTESASNHSGEIASSPTTPDRDDGAYPPILMKLPDDLAAISITTASPSRRPRQKSASTPISPSFREIGVIIQPLGTVSTDQLDGYYSSPTVDSRPTEIVEYDEFSSRYNDPHLDDFDGSLDDNYTPLYFGVFMADNETEEQRQARETEARRETERRRLEEEHQAQEQERLRREQQERERTAKEAEDRRQRALEAGRRARDLIGQQDVEGTPVFRTPQQNAVAAITLLDTLLKENELNQSDHVVNILNQTKTMIAASVPVNSESIHTPTGSRVPHFRSHDYRHPSLSITGAGSNRRSRAFTDDLRRVDWPAGFKPTGIEKYDGTTNPESWLTVYGLAIRAAGGDSKAMANYLPVALADSARSWLHGLPRGTIGSWAELRDHFIANFQGTFERPGTQYDLYNVIQKSGESLRDYIRRFSEQRNKISDITDDVIIAAFTKGIRHEELVGKFGRKPPRTVKLMFEKANEYAKAEDAVTASKQSGPSWKPKKDTPASGGGGSNNHKDRKRKPAELVATASHSSRQRSRVNTFDKIMNSQCPHHPNSNHVAKDCFVYKQFADQYAKSTRKNPDEEQSTSRKKDDGDTPAGFQDHRKELNHIFGGPLAYESKRKQKLTEREINAVQPDTPQYLRWSEIAIKFDRSDHPDRVVHPGRYPLVLDPVVRNVKLRRTLIDGGSALNILFAKTLDDMQIPRSELKPSNAPFHGVIPGLSATPLGQITLPVTFGTRENFRTENISFEVADFETAYHAILGRPALAKFMAVPHYTYMMMKMPGPRGVLSLRSDIKQAVTCDKESCDMAQTREMASAREDIRLAAATASEGEVPATKISKSGEGEAKTKKIPLDPSDPTKIAVIGAEEVIEHSLHVKEDAKPIKQRLRRFAQDRKDAIKEELTKLLAAGFIKEVLHPDWLANPVLVRKKTGQWRMCVDYTDLNKSCPKDPFGLPRIDQVVDSTAGCELLSFLDCYSGYHQIRLKESDCLKTSFITPFGAYCYVTMPFGLKNAGATYQRMIQRCFSTQIGRNVEAYVDDVVVKTKQKDDLILDLEETFASIRAFRMKLNPEKCTFGVPSGKLLGFMVSHRGIQANPEKVTAILNMKPPSTQKDVQKLTGCMAALSRFVSRLGERGMPFFKLLKKTDNFQWGPVTPRNLAQISRLFCALNPCPGPARQGAAGADRWVPGVSGSRGLGPPWTGFTRAPGLARPTIEGGGAQSPATAGGTGSGGAQRGKRREETEAVREREVAELTEGHGDGESSRRREAAALHRSTRRRGSRRRKAATGRRMGKSGTRRSRRCSRCVAAAAGVKANGDRRRKKAAGRGSGSGGDDMRLEAVAAAQRGSDGSGGGGRLEIAGERRRRGSAWRARGRGEGRGAADFEGKWGGVVGVWRLGVASIPAGREGEWGGMWSRGGRGLGSTPVGTRGGPEAQKAFEDFKKLLTEPPVLASPHPQEPLLLYVSATSQVVSTVLVVEREEEGHVQKVQRPIYFVSEVLADSKTRYPQVQKLLYGILITTRKLSHYFQGHSVTVVTSFPLGDILHNREANGRIAKWALELMSLDISFKPRISIKSQALADFVAEWTECQEDTPAENMEHWTMHFDGSKRLSGTGAGVVLISPTGERLSYVLWIHFSASHNVAEYEALLHGLRIAISLGIKRLIVRGDSQLVVNQVMKEWSCLDDNMMAYRQEVRKLEDKFDGLELSHVLRHNNEAADRLANFGSKREAAPSDVFVEHLYTPTVPHKDTTQVAGTHDTAMVEVDWREPLIRFLTSQELPQDKDEAERISRRSKLYVLHEAELYKKSPSGILQRCVSLEEGRQLLKDIHSGICGNHAAARTIVGKAYRQGFFWPTAVSDADKIVRTCEGCQFFARQIHLPAQELQTIPLSWPFAVWGLDMVGPFKKAVGGYTHLFVAIDKFSKWIEAKPVVTITADNARDFFINIVHRFGVPNRIITDNGTQFTGEVFKDFCEDFGIKICYASVAHPMSNGQVERANGMILQGIKARVFDRLKPYAGKWVQQLPSVLWSLRTTPSRATGQSPFFLVYGAEAMLPSEVEFESLRFRNFREERYEEDRVDDLHRLEEVREAALIRSARYLQGLRRYHNRNVRSRAFLVGXPGSYRLKREDGTLVDNSWNIEHLRRFYA

SEQ ID NO: 203291 - protein, 87 aa, Oryza sativa
  unsure (1)..(87): unsure at all Xaa locations
  Clone ID: PAT_MRT4530_98489C.1.pep
GAGEKRGRLGGKKGREGAWVYRAAMSVWKPTLGGQGXELALGARGQNGDRGGXTPTGKRERGREGKRKGERGLAPCLFGKRMRERGR

SEQ ID NO: 203292 - protein, 66 aa, Oryza sativa
  unsure (1)..(66): unsure at all Xaa locations
  Clone ID: PAT_MRT4530_9848C.1.pep
GFXVGVTIATSSYDELNLEVGEYISQKEAMGIKGRGDREEDEQLLRAIKLSMGDNSVTDQTRGQQH

SEQ ID NO: 203293 - protein, 2004 aa, Oryza sativa
  Clone ID: PAT_MRT4530_98490C.1.pep
MGSVSGIDDLVFPPGQTFRFGSLDFVTNNFGKISLLDSESDQSGENRISVPFGLLNAAESYFKTISIELASNHSGEIASSPMSPDQDDEAYPPILMKLPDDLAAVSITTTSPSRRPRRKSASTPISPSFREVGVILQPLGTVSTDQLDGYYSSPTVDSRPTDIVEYDESSSRYNDPDLDDFDGSLDDNYTPLYFGVFMADNETEEQRQARETEARRETERRRLEEERQAQEQERLRREQQERERTAKEAEDRRQRALEAGRRARDFIGQQDVEGTPVFRTPQQNAVAAITLLDTLLKENELNQSDHVVNILNQTKTMIAASVPVNSESVRTPTGSRLPHFRSHDYRHPSLSITGAGSNRRSRGHDERSVHSPPDHHRERRVERPRSPPRRRPVDLRDTIIQRRAARGHHHSPDRHDDDLDGVAAFTDDLRRVDWPAGFKPTGIEKYDGTTNPESWLTVYGLAIRAAGGDSKAMANYLPVALADSARSWLHGLPRGTIGSWAELRDHFIANFQGTFERPGTQFDLYNVVQKSGESLRDYIRRFSEQRNKISDITDDVIIAAFTKGIRHEELVGKFGRKPPRTVKLMFEKANEYAKAEDAVTASKQSGPSWKPKKDTPATGGGGSNNHKDRKRKPEELVATAIHSSRQRSRVNTFDKIMNSQCPHHPNSNHVAKDCFVYKQFAEQYTKTTRKNSDEEQSTSRKKDDGDTPVGFQDHRKELNHIFGGPLAYESKRKQKLTEREINAVQPDTPQYLRWSEIAIKFDRSDHPDRVVHPGRYPLVLDPVVRNVKLRRTLIDGGSALNILFAKTLDDMQIPRSELKPSNAPFHGVIPGLSATPLGQITLPVTFGTRENFRTENISFEVADFETAYHAILGRPALAKFMAVPHYTYMMMKMPGPRGVLSLRSDIKQAVTCDKESCDMAQTREMASAREDIRLAAATASEGEVPATKTSKSGESEAKTKKIPLDPSNPTKTANNKDIFAWKPSDMPGIPREVIEHSLHVKEDAKPIKQRLRRFAQDRKDAIKEELTKLLAAGFIKEVHHPDWLANPVLVRKKTGQWRMCVDYTDLNKSCPKDPFGLPRIDQIRLKESDCLKTSFITPFGAYCYVTMPFGLKNAGATYQRMIQRCFSTQIGRNVEAYVDDVVVKTKQKDDLISDLEETFASIRAFRMKLNPEKCTFGVPSGKLLGFMVSHRGIQANPEKVTAILNMKPPSTQKDVQKLTGCMAALSRFVSRLGERGMPFFKLLKKTDDFQWGPEAQKAFEDFKKLLTEPPVLASPHPQEPLLLYVSATSQVVSTVLVVEREEEGHVQKVQRPIYFVSEVLADSKTRYPQVQKLLYGILITTRKLSHYFQGHSVTVVTSFPLGDILHNREANGRIAKWALELMSLDISFKPRISIKSQALADFVAEWTECQEDTPAEKMEHWTMHFDGSKRLSGTGAGVVLISPTGERLSYVLWIHFSASHNVAEYEALLHGLRIAISLGIKRLIVRGDSQLVVNQVMKEWSCLDDNMMAYRQEVRKLEDKFDGLELSHVLRHNNEAADRLANFGSKREVAPSDVFVEHLYTPTVPHKDTTQVAGTHDVAMVEADWREPLIRFLTSQELPQDKDEAERISRRSKLYVMHEAELYKKSPSGILQRCVSLEEGRQLLKDIHSGICGNHAAARTIVGKAYRQGFFWPTAVSDADKIVRTCEGCQFFARQIHLPAQELQTIPLSWPFAVWGLDMVGPFKKAVGGYTHLFVAIDKFSKWIEAKPVVTITADNAPDFFINIVHRFGVPNRIITDNGRQFTGGVFKDCCEDFGIKICYASVAHPMSNGQVERANGMILQGIKARVFDRLKPYAGKWVEQLPSVLWSLRTTPSRATGQSPFFLVYGAEAMLPSEVEFESLRFRNFREERYEEDRVDDLHRLEEVREAALIQSARYLQGLRRYHNRNVRSRAFLVGDLVLRKIQTTRDRHKLSPLWEGPFIISAVTRPGSYRLKREDGTLVDNSWNIEHLRRFYASAYHCTSLS

SEQ ID NO: 203294 - protein, 127 aa, Oryza sativa
  unsure (1)..(127): unsure at all Xaa locations
  Clone ID: PAT_MRT4530_98491C.1.pep
IWSIAHNRGHGYSNSFTLARGAQLYPQDTIHRHVTVSSCAHDEHVTTSSDCDKTLHITXPNHPHHAXGFTPTPRKAAGSPLVRRGESGSWTTGHPGRPNSITPTLATXPRKGSSYTSDQAVTHSRLW

SEQ ID NO: 203295 - protein, 86 aa, Oryza sativa
  unsure (1)..(86): unsure at all Xaa locations
  Clone ID: PAT_MRT4530_98492C.1.pep
XLTPSAYAHRLGDKXFHQHNTTCRGVFLPFTRTLFMVFKVTHRAHTYSTTXIPGYSGEAPSXYXTPLGPSIHISGASSTGHRPXHA

SEQ ID NO: 203296 - protein, 223 aa, Oryza sativa
  unsure (1)..(223): unsure at all Xaa locations
  Clone ID: PAT_MRT4530_98493C.1.pep
PSPNHPHHAKVSPPPLKRQWAVPSCAAVNPAAGQPDTPADPTPSRPPSPPVPRKGSSYTSDQAVTHSRLWKRTAADVSKGPAPTGGPHTSASQRGRALVHGPTRQRLKGGARLASGPHGSGFTSRCTGQARYQAGRPAMXGGGAGMRPPPTASXGAVGGRRRDRLRPKATASARRGRRRTGKKKEGKEGEGDLTGGAAMAGGEKRGRRRRPAMPRCGRATATP

SEQ ID NO: 203297 - protein, 38 aa, Oryza sativa
  Clone ID: PAT_MRT4530_98494C.1.pep
HAARTRARGPYIGRPLFFFFFNGTGESLYPKTINSLLP

SEQ ID NO: 203298 - protein, 98 aa, Oryza sativa
  Clone ID: PAT_MRT4530_98495C.1.pep
IRLSTPIIVILESGLILRPCDYCDYKIYHNVKRISSASLNITKNSEAYFTSIPTVVFLWPAIENLSFRLMPFDSLFLTLCIPPINFIGGMIFPFFCNG

SEQ ID NO: 203299 - protein, 361 aa, Oryza sativa
  unsure (1)..(361): unsure at all Xaa locations
  Clone ID: PAT_MRT4530_98496C.1.pep
MSSPEIYFHVPDHKYRGFFFLYRTKLASKTIEHKEEGLTYIDKLPVXPYFLASTDRAGAQASALYFQHARYRVRYYKHLSQQPNTELVEDSYHMKLVGEDELSDEFIREMEFFMRFEEDGTFDWYFYPDYCWLAALNDYQRLVPINCVGEEYAYWDDYRGYFNSYHTELQYLDFCKALSKELKWMEDYVLNKLPSSKWGXRICSRGAYXQAIKIAXTAFPKITAALAYNAXYYDCLQHMRFYVAYCKDMDSLYFEIWQRVNMQKKSFRDSLEEVYNLNKFPSRQDKMKDALENNCSHMETVFHVCTASVTSEIAEDKALELIAKAVESRMNKAKFYEQYIEKKIDIAQAIGLISTDGTEAT

SEQ ID NO: 203300 - protein, 63 aa, Oryza sativa
  Clone ID: PAT_MRT4530_98497C.1.pep
MNMVSGFPLDTDNNNDIRKICFRIRVRSYSILICIRDSPYLFPYSSYPYSFPYPAKNMKTNMV

SEQ ID NO: 203301 - protein, 89 aa, Oryza sativa
  Clone ID: PAT_MRT4530_98498C.1.pep
GQRSSPPPPRPWAAFGLVAFRTTRTSPSRSWRAHAPHGRRRLAGLEGRRRRGRSSYGCRRVCGGCADIHLTSRAGVGSRSRGGGRRRLA

SEQ ID NO: 203302 - protein, 80 aa, Oryza sativa
  unsure (1)..(80): unsure at all Xaa locations
  Clone ID: PAT_MRT4530_98499C.1.pep
RPRVRPPPPPPWPPPPPPPPPPSPATTSASASALDYPPSPSAPSTPPPPSPXRPNPLTPSTPPRHRELHESDSAAPEEPP

SEQ ID NO: 203303 - protein, 132 aa, Oryza sativa
  Clone ID: PAT_MRT4530_9849C.1.pep
MVAETTALRRAWGAGGAAAAAAATRCTREAGGAAAAAVFSGNGDTARAGSRSSRRRRRRARRGMRRLVLAARRRRLVPLATRRRLAFSSSSRRSPASPSATVVPAAPSHLRSSHCATSVAIIPVASPPKESS

SEQ ID NO: 203304 - protein, 161 aa, Oryza sativa
  Clone ID: PAT_MRT4530_984C.1.pep
MEVAAPVTNAGGSTMGPQYKHGEEGKNKEMASPALEESGGARRRRPVACSDRSADDHGMVLARFLRFVRQRLHHLIEFLGAASSERVPRAWRHAAQSRQVQGGTRLVRAKRVRAQARRRVARGDARVVRAVAGPGEANTRTFADHEHAQTFSIIQFVLICS

SEQ ID NO: 203305 - protein, 64 aa, Oryza sativa
  unsure (1)..(64): unsure at all Xaa locations
  Clone ID: PAT_MRT4530_98500C.1.pep
SIGSPSPHSSPPPSXPTQGFQHTLQGTGGQGVAHPXAPHIPTLHLRIRVSRAIYHPSHTFHSTR

SEQ ID NO: 203306 - protein, 136 aa, Oryza sativa
  Clone ID: PAT_MRT4530_98501C.1.pep
MGIPKYFIAQKGGLGSARRRWIKSTASESSGGVRADPDGTGRSWAGLSAADSDDSDECEAVTGGSRTALSGGGSRRPAGKSRRQSVDLRRGSTFVLGGGGAWCGGSRRRYAGESRRQQVGLWQQRADPDHQWADLR

SEQ ID NO: 203307 - protein, 64 aa, Oryza sativa
  Clone ID: PAT_MRT4530_98502C.1.pep
YEKKKDRSILLKHQLFTRKTMFWNFLKYFEKGVKGDPFNRTPEVNMGKQENLFGIKKGGYFLKL

SEQ ID NO: 203308 - protein, 461 aa, Oryza sativa
  Clone ID: PAT_MRT4530_98503C.1.pep
MTTWDLLESTTLIRQAFVACCCCCGGGWGGRMLIAADFPGDSTVSRCAFPGGIALRLFVDWRIRRRRVCACKMFDTGSQRGRVKQLVAFAKKRRRPKKQPSRRPWWKAWFSDWNDEEESLSGWREDEELLEEVGGEEGLSDDEKFETWKRKAEAIVELREARQDAMNAEGRSWEDWIGGGSSTAGDGGGDWGGDLDVSDLITDDPTEIVRDKGLIETFRDSVDEDYNDMLFEDRVFLYASTNSAKFLALLIVIPWVLDFLVHDYVLMPFLERYVQKVPLAAELLDVRRSQKLLMVKDINTEKARYRFEVEIGKSPPLSDDELWIELRDEWRLENRKAFANIWSDMVYGISLFLLMYFNQSKVAMLKFTGYKLLNNISDSGKAFLIILVSDILLGYHSESGWHSLVEVILEHYGLEADQAAITFFVCLVPVALDVFIKFWVYKYLPRLSPSVGNILDEIKRH

SEQ ID NO: 203309 - protein, 455 aa, Oryza sativa
  Clone ID: PAT_MRT4530_98504C.1.pep
MGKKPGGAGAGAGWLATVRKVFKPGTSKDPRLAKKRGGDENAAGGGGGGVGQAVEILSMEHFPAAETSPEVTTNEGSGGSAFGRERLHVGRDEAEGAWRARRGMAASRAVRNAAARGRAAGREERAAVRIQAFYRGYLALVRGHQVRRQVHLTMRCMQALVRAQARVRARRLTSHVALARPAPHAAGLQYSCGHRGRFVAPDQQNDGDEDDAGETETTMPHMVARPRRNSSHIVDERPPFNSGWRDAVPYGEGRRRHDPGPRREMAPIPTSTYGYQQQREEQDECTVGWQWLEQCMAGVQPPRHVPEHHVVVAAAAETSYVTAAATDGVSEKTVEMDAGRKLCPAKDLYPVRPPAVPGYMAATQSARAKARMAPASAHVAPRAAQSHARSRSSSVALAGASTATSGWSTNNNCSGGAGGRAPLHRAGYSPESSCSGDRTPPPPPQGGGRGRAAYA

SEQ ID NO: 203310 - protein, 104 aa, Oryza sativa
  unsure (1)..(104): unsure at all Xaa locations
  Clone ID: PAT_MRT4530_98505C.1.pep
MSGFVVQGSNQDDRYGPIGSCYPVTAGVLIAKELEQAVTAKVFGLSNCRSSTXTLVRSSWSIYVPTESHNFCCAVKLFDEFQPIGLHQDIQGPPFPRQEVVPGH

SEQ ID NO: 203311 - protein, 162 aa, Oryza sativa
  Clone ID: PAT_MRT4530_98506C.1.pep
SAEGHTIAGRIKIDVAKGFGLPAKTSNTKVILNGGQRVTFARPDGYFAFHNVPAGTHLIEVSSLGYLFSPVRVDISARNPGHIQAALTENRRVLNELVREPFSIMSLLKSPMGMMLGFMVIMVFVMPKMMENIDPEEIKQAQEQMRNSPVPSFSGLLARANS

SEQ ID NO: 203312 - protein, 79 aa, Oryza sativa
  unsure (1)..(79): unsure at all Xaa locations
  Clone ID: PAT_MRT4530_98507C.1.pep
LQVGGFVTGSLRFDSIPRRRHAWMDFSRWFVCXVQXGGGXXAGXGCGSRRTSSTMRAPPARRGGSRRRRXHVXGRPAAA

SEQ ID NO: 203313 - protein, 205 aa, Oryza sativa
  Clone ID: PAT_MRT4530_98508C.1.pep
MAARLLLLVLFAVVAARVGAAAAYQPGSAEGHTIAGRIKIDAASAIAKGFGLPAKTSNTKVILNGGQRVTFARPDGYFAFHNVPAGTHLIEVSSLGYLFSPVRVDISARNPGHIQAALTENRRVLNELVLEPLREEQYYEKREPFSIMSLLKSPMGMMLGFMVIMVFVMPKMMENIDPEEIKQAQEQMRNSPVPSFSGLLARANS

SEQ ID NO: 203314 - protein, 141 aa, Oryza sativa
  Clone ID: PAT_MRT4530_98509C.1.pep
PGWKKGMKVTFEGMGDERPGCLPGDAVFTISERKHKVFKRKGNDLVLKAEVPLVSALTGWSFSFRLIGGEKMSFTFRDEVISPGYEKVVAGEGMPVVAAGGGGEKAAAARGDLRVKFDVVFPKNLTGEQRAGLASILRACP

SEQ ID NO: 203315 - protein, 108 aa, Oryza sativa
  Clone ID: PAT_MRT4530_9850C.1.pep
MGDGARGRCGRATDGNPAPVGVGRPWVTRASRGKRVGRMAVQLLALSCCWWGRTGGDPGQGPGGKGSFSLAPSEGPLRIVDIRFYRAELFCGLSVSFLLSHLFWYLLG

SEQ ID NO: 203316 - protein, 143 aa, Oryza sativa
  Clone ID: PAT_MRT4530_98510C.1.pep
MALLLSPTVSFLASSSASPPRARALPASANVASTIPAPRLQCKNLSSQSPLNASFTKKRLVSVHASAEAGAEEAGTDQPEEPKPTVSIETMPLETKQKMIMEQRAKMKLAKKLRQRRRRLVQKRRLRKKGRWPPSKMKKLKNV

SEQ ID NO: 203317 - protein, 236 aa, Oryza sativa
  unsure (1)..(236): unsure at all Xaa locations
  Clone ID: PAT_MRT4530_98511C.1.pep
PSPNHPHHAKVSPPPLKRQWAVPSCAAVNPAAGQPDTPADPTPSRPPSPPVPRKGSSYTSDQAVTHSRLWXARGGAARHAGPTGSGTRGEGGGGWQVGPTRRWLKGEAREAPAGLGSASKPTGGHGDRRRHARSPAVTGGAGDGGXSAKAAAAAEDDGTRAEGGGAHGREGRKEEERGFLTGXTAAGAKEENGGDDRXCRGANGRRRHPRREHRGVREGKXDHGGLNCRPETEGRE

SEQ ID NO: 203318 - protein, 383 aa, Oryza sativa
  unsure (1)..(383): unsure at all Xaa locations
  Clone ID: PAT_MRT4530_98512C.1.pep
MVAPQALLVARGSEGRAPSSLFQVVEVISAKLILISFAVHGGPRRPQGELGWENRFCAVDEEEGRFPAGDSTPQAILDGSDETNFDKTAPTRKIFSSGLTSARGGAGADRRAPLVSDTKRGKGGWLASGPYWQRHKGKGEGGAGMWAPRAVAQGGXEWAAACSARLKPAGHGEATTAHDRRRXTGGAGRRRRPARRRRRQPKTTAHARRAAALTGERKGRRKRDSSPRRWRRPAWEETSGDDRRRGGTDGRRRHPRRRWRGVRRGDDDHGGLNCRPEMEGREKLTGSRGERCSGGIPATRGGGRESSCGGEANGGGGLARRXSSGGGSRPKAAASGGTSNKRRERDRRHGRARRVRKTREXTRGAIYRCGRGRTWPGRWPIWP

SEQ ID NO: 203319 - protein, 3395 aa, Oryza sativa
  Clone ID: PAT_MRT4530_98513C.1.pep
MVNTRSNGNGPNNPNNNNNGENPTLAQVLAQQTQLMNMMMQQFQNQQNQGNNHAPPQNKLAEFLRVRPPVFSSTTNPVEASDWLHAIEKKLDLLQCTDQEKVSFASHQLHGPASEWWDHFRLNRTTAEPITWLEFTAAFRKTHIPSGVVSLKKKEFRSLSQGSRSVTEYLHEFNRLARYAPEDVRNDEERQEKFLGGLNDELSYPLMVGDYPDFQKLVDKAIRQEDKYNRMEQKKRRIAQFKTQQGNNQKPRLTLGPQPMPQGGSSSVVRPQRQFFNNNAGNNIRNQAPRPVAAPAQQQPAKREQGNKPVVCFNCGDPGHYADKCPKPRRVKVVSAQSNSAVPASKARVNHVAAAEAQDAPDVILGTFLVNSVPATVLFDSGATHSFLSMSFAGNHGMEVEDLRRPLMVSTPSNQALSLQRSPSVRIEIQGVPFLANLILLESKDLDVILGMDWLARHKGVIDCANRKVTLNSYDGRVVTVHALSSESLRSRLNQITLEEIPIVREYPDVFPDDLPGMPPKRDIEFRIDLVPGTTPIHKRPYRMAANELAEVKRQVDDLLQKGYIRPSSSPWGAPVIFVEKKDHTQRMCVDYRALNDVTIKNKYPLPRIDDLFDQLKGATVFSKIDLRSGYHQLRIKEEDIPKTAFTTRYGLFECTVMSFGLTNAPAFFMNLMNKVFMEYLDKFVVVFIDDILIYSRTKEEHEELLRLALEKLREHQLFIENFSKIAKPMTRLLQKDVKYKWSEECEQSFQELKSRLISAPILILPDPKKGFQVYCDASKLGLGCVLMQDGKVVAYASRQLRPHEKNYPTHDIELAAVVHALKIWRHYLFGTHTEVYTDHKSLKYIFTQPDLNMRQRRWLELIKDYDMGIHYHPGKANVVADALSRKGHCNATEGRQLPLELCKEFERLNLGIVGRGFVAALEAKPTLIDQVREAQINDPDIQEIKKNMRRGKAIGFLEDEQGTVWLGERICVPDNKDLKDAILKEAHDTLYSIHPGSTKMYQDLKERFWWASMKREIAEYVAVCDVCQRVKAEHQKPAGLLQPLKIPEWKWEEIGMDFITGLPRTSSGHDSIWVIVDRLTKVAHFIPVKTTYSGSRLAELYMARIVCLHGVPKKIVSDRGSQFTSNFWKKLQEEMGSKLNFSTAYHPQTDGQTERVNQILEDMLRACALDFSGSWDKNLPYAEFSYNNSYQASLQMAPYEALYGRKCRTPLLWDQTGERQVFGTDILREAEEKVKIIQERLRVAQSRHKSYADNRRRDLSFEEGDYVYLRVTPFRGVHRFHTKEKLAPRFVGPYKIVSRRGEVAYQLELPQSLAGIHNVFHVSQLKKCLRVPTEEANIEQIEVQEDLTYVEKPIRILETTPGLEWYIPSLEIELCSRGGCSEWLGLYNRGSHTCKRLEFWIEIPGVTGKISLLDSVSDQSGENRISAPFGLPNAAESYFKTISIELASNHSGEIASSPTSPDQDDGAYPPILMKLPDDLAAVSITTASPSRRPRRKSASTPTSPSFREVGVILQPLGTVSTDQLDGYYSSPTVDSRPTDIVEYDEFSSRYNDPDLDDFDGSLDDNYTPLYFGVFMADNETEEQRQARETEARRETERRRLEEEHQAQEQERLRREQQERERTAKEAEDRRQRALEAGRRARDLIGQQDVEGTPVFRTPQQNAVAAITLLDTLLKENELNQSDHVVNILNQTKTMIAASVPVNSESVHTPTGSRVPHFRSHDYRHPSLSITGAGSNRRSRGHDERSVHSPPDHHRERRVERPRSPPRRRPVDLRDTIIQRRAARGHHHSPDRHDDDLDGVAAFTDDLRRVDWPAGFKPTGIEKYDGTTNPESWLTVYGLAIRAAGGDSKAMANYLPVALADSARSWLHGLPRGTIGSWAELRDHFIANFQGTFERPGTQYDLYNVIQKSGESLRDYIRRFSEQRNKISDITDDVIIAAFTKGIRHEELVGKFGRKPPRTVKLMFEKANEYAKAEDAVTASKQSGPSWKPNKGTPAKGGGGSNNHKDRKRKPEELVATATHSSRQRSRVNTFDKIMNSQCPHHPNSNHVAKDCFVYKQFAEQYTKTTRKNSDEEQSTSRKKDDGDTPAGFQDHRKELNHIFGGPLAYESKRKQKLTEREINAVQPDTPQYLRWSEIAIKFDRSDHPDRVVHPGRYPLVLDPVVRNVKLRRTLIDGGSALNILFAKTLDDMQIPRSELKPSNAPFHGVIPGLSATPLGQITLPVTFGTRENFRTENISFEVADFETTYHAILGRPALAKFMAVPHYTYMMMKMPGPRGVLSLRSDIKQAVTCDKESCDMAQTREMASAREDIRLAAATASEGEVPATKISKSGESEAKTKKIPLDPSDSTKTANNKDIFAWKPSDMPGIPREVIEHSLYVKEDAKPIKQRLRRFAQDRKDAIKEELTKLLAAGFIKEVLHPDWLANPVLVRKKTGQWRMCVDYTDLNKSCPKDPFGLPRIDQVVDSTAGCELLSFLDCYSGYHQIRLKESDCLKTSFITPFGAYCYVTMPFGLKNAGATYQRMIQRCFSTQIGRNVEAYVDDVVVKTKQKDDLISDLEETFASIRAFRMKLNPEKCTFGVPSGKLLGFMVSHRGIQANPEKITAILNMKPPSTQKDVQKLTGCMAALSRFVSRLGERGMPFFKLLKKTDDFQWGPDAQKAFEDFKKLLTEPPVLASPHPQEPLLLYIAAASQVVSTVLVVEREEEGHVQKVQRPIYFVSEVLADSKTRYPQVQKLLYGILITTRKLSHYFQGHSVTVVTSFPLGDILHNREANGRIAKWALELMSLDISFKPRISIKSQALADFVAEWTECQEDTPAEKMEHWTMHFDGSKRLSGTGAGVVLISPTGERLSYVLWIHFSASHNVAEYEALLHGLRIAISLGIKRLIVRGDSQLVVNQVMKEWSCLDDNMMAYRQEVRKLEDKFDGLELSHVLRHNNEAADRLANFGSKREVAPSDVFVEHLYTPTVPHKDTTQVAGTHDVALVEADWREPLIRFLTSQELPQDKDEAERISRRSKLYVMHEAELYKKSPSGILQRCVSLEEGRQLLKDIHSGICGNHAAARTIVGKAYRQGFFWPTAVSDADKIVRTCEGCQFFARQIHLPAQELQTIPLSWPFAVWGLDMVGPFKKAVGGYTHLFVAIDKFSKWIEAKPVVTITADNARDFFINIVHRFGVPNRIITDNGRQFTGGVFKDFCEDFGIKICYASVAHPMSNGQVERANGMILQGIKARVFDRLKPYAGKWVKQLPSVLWSLRTTPSRATGQSPFFLVYGAEAMLPSEVEFESLRFRNFREERYEEDRVDDLHRLEEVREAALIQSARYLQGLRRYHNRNVRSRAFLVGDLVLRKIQTTRDRHKLSPLWEGPFIISEVTRPGSYRLKREDGTLVDNSWNIEHLRRFYA

SEQ ID NO: 203320 - protein, 88 aa, Oryza sativa
  Clone ID: PAT_MRT4530_98514C.1.pep
MSSSLLSGAEVREGSEEGSPLSEMEECGCQWEEGGDSVGVVVRGRGRGGVTLVRGGGTRLTVGARGDGIICCQGHRAGRGQRRCHPCL

SEQ ID NO: 203321 - protein, 1964 aa, Oryza sativa
  Clone ID: PAT_MRT4530_98515C.1.pep
MGSISGIDDLVFPPGQTFRFGSLDFITNNFGKISLLDSESDQSGENRLSVPFGFPNAAESYFKTTSTESASNHSAEIASSPTIPDQDDGAYPPVLMKLPDDLAAVFTTTAPSSRRPRRKSASTPISPSFREVGVILQPLGTVSTDQLDDYNSSPTVDSRPTDIVEYDEFSSRYNDFDDFDDFDGSLDDNYTPLYFGVFMANNETEEQRQARENEERRRLEEEHQAQEQERLRREQQDRERTAKEAEDRRQRALEAGRRARDLIGQQDVEGTPVFRTPQQNAVAAITLLDTLLNQNELNQSDHVVNILNQTKTMIAATVPVNSESVHTPTGSRVPHFRSHDYRHPSLSITGAGSNRRSRGHDERSVHSPPELHRERRVERPRSPPRRRPIDLRDTIIQRRAARGHHHSPDRRDDDLDGVAAFTDDLRRVDWPAGFKPTGIEKYDGTTNPESWLTVYGLAIRAAGGDNKAMANYLPVALADSARSWLHGLPRGTIGSWAELRDHFIANFQGTFERPGTQYDLYNVIQKSGESLRDYIRRFSEQRNKISDITDDVIIAAFTKGIRHEELVGKFGRKPPRTVKLMFEKANEYAKAEDAVTASKQSGPSWKPKNTPATGGGGSNNHKDRKRKPEELVATAAHSSRQRSRVNTFDKIMNSQCPHHPNSNHVAKECFIYKQFAEQYTKSTRKNSDEEQSTSRKKDDGDTPAGFQDHRKELNHIFGGPMAYESKRKQKLTEREINAVQPDTPQYLRWSEIAIKFDRSDHPDRVVHPGRYPLVLDPVVRNVKLRRTLIDGGSALNILFAKTLDDMQISRSELKPSNAPFHGVIPGLSATPLGQITLPVTFGTRENFRTENISFEVADFETAYHAILGRPALAKFMAVPHYTYMMMKMPGPRGVLTLRSDIKQAVTCDKESCDMAQTREMASAREEIRLAATTESALITFLQNNKDIFAWKPSDMPGIPREVIEHSLHVKEDAKPIKQRLRRFAQDRKDAIKEELTKLLAAGFIKEVLHPDWLANPVLVRKKTGQWRMCVDYTDLNKSCPKDPFGLPRIDQIRLKESDCLKTSFITPFGAYCYVTMPFGLKNAGATYQRMIQRCFSTQIGRNVEAYVDDVVVKTKQKDDLISDLEETFASIRAFKMKLNPEKCTFGVPSGKLLGFMVSHRGIQANPEKVTAILNMKPPSTQKDVQKLTGCMAALSRFVSKLGERGMPFFKLLKKTDNFQWGPEAQKAFEDFKQLLTKPPVLASPHPQEPLLLYLSATSQVVSTVLVVEREEEGHVRKVQRPIYFVSEVLTDSKTRYPQVQKLLYGILITTRKLSHYFQGHSVTVVTSFPLGDVLHNREANGRIAKWALELMSLDISFKPRTSIKSQALADFVAEWTECQEDTPVEKIEHWTMHFDGSKRLSGTGAGVVLISPTGERLSYVLWIHFSASHNVAEYEALLHGLRIAISLGIKRLIVRGDSQLVVNQVMKEWSCIDDNMMAYRQEVRKLEDKFDGLELSHVLRHNNEAADRLANFGSKREAAPSDVFVEHLYSPTVPHKDATQVADTHDIAMVAADWREPFIRFLTSQELPQDKDEAERISRRSKLYVMHEAELYKKSPSGILQRCVSLEEGRQLLKDIHSGICGNHAAARTIVGKAYRQGFFWPTAVSDADKIVRTCEGCQFFARQIHLPAQELQTIPLSWPFAVWGLDMVGPFKKAVGGYTHLFVAIDKFSKWIEAKPVVTITADNARDFFINIVHRFGVPNRIITDNGTQFTGGVFKDFCEDFGIKICYASVAHPMSNGQVERANGMILQGIKARVFDRLKPYAGKWVSQLPSVLWSLRTTPSRATGQSPFFLVYGAEAMLPSEVEFESLRFRNFREERYEEDRADDLHRLEEVREAALIQSARYLQGLRRYHNRNVRSRAFLVGDLVLRKIQTTRDRHKLSPLWEGPFIISEVTRPGSYRLKREDGTLVDNSWNIEHLRRFYA

SEQ ID NO: 203322 - protein, 157 aa, Oryza sativa
  Clone ID: PAT_MRT4530_98516C.1.pep
MAPQVMESEVVARALVLLVEAHLGGRAAIHLDSLAVAAHLLCRQEPSALISYLRAEKMETKNGANEDTSKVNLWGNALSKCGYLLMVTAEDYWAEHAIHRPELAASADAPMFRVGASTAWQEASPADLPPLRPPGRHLDASSSAASMLGREEGEEEK

SEQ ID NO: 203323 - protein, 1986 aa, Oryza sativa
  Clone ID: PAT_MRT4530_98517C.1.pep
MGPFSGIDDLVFPPGQTFRFGSLDFVTNNFGKISLLDSESDQSGENRISVPFGFPNAAETYFKTISIESASNHSAEIASSPTTPDQDDGAYPPVLMKLPDDLAAVSTSTASSSRRPRRKSAPTPIPPSFREVGVILQPLGTVSTDQLDDYNSSPTVDSRPTDIVEYDEFSSRYNDFDDYDDFDGSLDDNYTPLYFGVFMANNETEEQRQARETEERRRLEEEHQAREQERLRREQQDRERIAKEAEDRRQRALEAGRRARDLIGQQDVEGTPVFRTPQQNAVAAITLLDTLLNQNELNRSDHVVNILNQTKTMIAASVPVNSESVHTPTGSRVPHFRSHDYRHPSLSITGAGSNRRSRGHDERSVHSPPDLHRERRVERPRSPPRRRPIDLRDTIIQRRAARGYHHSPDRHDDDLDGVAAFTDDLRRVDWPAGFKPTGIEKYDGTTNPESWLTVYGLAIRAAGGDNKAMANYLPVALADSARSWLHGLPRGTIGSWAELRDHFIANFQGTFERPGTQYDLYNVIQKSGESLREYIRRFSEQRNKISDITDDVIIAAFTKGIRHEELVGKFGRKPPRTVKLMFEKANEYAKAEDAVTASKQSGPSWKPKNTPATGGGGSNNHKDRKRKPEELVATAAHSSRQRSRVNTFDKIMNSQCPHHPNSNHVAKECFIYKQFAEQYTKSTRKNSDEEQSTSRKKDDGDTPAGFQDHRKELNHIFGGPLAYESKRKQKLTEREINAVQPDTPQYLRWSEIAIKFDRSDHPDRVVHPGRYPLVLDPVVRNVKLRRTLIDGGSALNILFAKTLDDMQIPRSELKPSNAPFHGVIPGLSATPLGQITLPVTFGTRENFRTENISFEVADFETAYHAILGRPALAKFMAVPHYTYMMMKMPGPRGVLSLRSDIKQAVTCDKESCDMAQTREMASAQEEIRLAATTESALITFLQNNKDIFAWKPSDMPGIPREVIEHSLHVKEDAKPIKQRLRRFAQDRKDAIKEELTKLLAAGFIKEVLHPDWLANPVLVRKKTGQWRMCVDYTDLNKSCPKDPFGLPRIDQVVDSTAGCELLSFLDCYSGYHQIRLKESDCLKTSFITPFGAYCYVTMPFGLKNAGATYQRMIQRCFSTQIGRNVEAYVDDVVVKTKQKDDLISDLEETFASIRAFRMKLNPEKCTFGVPSGKLLGFMVSHRGIQANPEKVTAILNMKPPSTQKDVQKLTGCMAALSRFVSRLGERGMPFFKLLKKTDNFQWGPEAQKAFEDFKQLLTKPPVLASPHPQEPLLLYVSATSQVVSTVLVVEREEEGHVQKVQRPIYFVSEVLADSKTRYPQVQKLLYGILITTRKLSHYFQGHPVTVVTSFPLGDVLHNREANGRIAKWALELMSLDISFKPRTSIKSQALADFVAEWTEYQEDTPVEKIEHWTMHFDGSKRLSGTGAGVVLISPTGERLSYVLWIHFSASHNVAEYEALLHGLRIAISLGIKRLIVRGDSQLVVNQVMKEWSCIDDNMMAYRQEVRKLEDKFDGLELSHVLRHNNEAADRLANFGSKREAAPSDVFVEHLYTPTVPHKDATQVVGTHDVAMVEADWREPFIRFLTSQELPQDKDEAERISRRSKLYVMHESELYKKSPSGILQRCVSLEEGRQLLKDIHSGICGNHAAARTIVGKAYRQGFFWPTAVSDADKIVRTCEGCQFFARQIHLPAQALQTIPLSWPFAVWGLDMVGPFKKAVGGYTHLFVAIDKFSKWIEAKPVVTITADNARDFFINIVHRFGVPNRIITDNGTQFTGGVFKDFCEDFGIKICYASVAHPMSNGQVERANGMILQGIKARVFDRLKPYAGKWVSQLPSVLWSLRTTPSRATGQSPFFLVYGAEAMLPSEVEFESLRFRNFREERYEEDRVDDLHRLEEVREAALIQSARYLQGLRRYHNRNVRSRAFLVGDLVLRKIQTTRDRHKLSPLWEGPFIISEVTRPGSYRLKREDGTLVDNSWNIEHLRRFYA

SEQ ID NO: 203324 - protein, 2013 aa, Oryza sativa
  Clone ID: PAT_MRT4530_98518C.1.pep
MGSISGIDGLVFPPGQTFRFGSLDFVTNNFGKISLLDSESDQSGENRISVPFGFPNAAESYFKTISTESASNHSAEIASSPTIPDQDDGAYPPVLMKLPDDLAAVSTTTASSSRRPRRKSASTPISPSFREVGVILQPLGTVSTDQLDDYNSSPTVDSRPTDIVEYDEFSSRYNDFDDFDDFDGSLDDNYTPLYFGVFMANNETEEQRQARETEERCRLEEEHQAQEQERLRREQQDRERTAKEAEDRRQRALEAGRRARDLIGQQDVEGTPVFRTPQQNAVAAITLLDTLLNQNELNRSDHVVNILNQTKTMIAASVPVNSESVHTPTGSRVPHFRSHDYRHPSLSITGAGSNRRSRGHDERSVHSPPDLHRERRVERPRSPPRRRPIDLRDTIIQRRAARGYHHSPDRHDDDLDGVAAFTDDLRRVDWPAGFKPTGIEKYDGTTNPESWLTVYGLAIRAAGGDNKAMANYLPVALADSARSWLHGLPRGTIGSWAELRDHFIANFQGTFERPGTQYDLYNVIQKSGESHRDYIRRFSEQRNKISDITDDVIIAAFTKGIRHEELVGKFGRKPPRTVKLMFEKANEYAKAEDAVTASKQSGPSWKQNKGTPATGGGGSNNHKDRKRKPAELVATASHSSRQRSRVNTFDKIMNSQCPHHPNSNHVAKDCFVYKQFADQYTKTARKNSDEEQSTSRKKDDGDTPAGFQDHRKELNHIFGGPLAYESKRKQKLTEREINAVQPDTPQYLRWSEIAIKFDRSDHPDRVVHPGRYPLVLDPVVRNVKLRRTLIDGGSALNILFAKTLDDMQIPRSELKPSNAPFHGVIPGLSATPLGQITLPVTFGTRENFRTENISFEVADFETAYHAILGRPALAKFMAVPHYTYMMMKMSGPRGVLSLRSDIKQAVTCNKESCDMAQTREMASAREDIRLAAATASEGEVPATKISKSGESEAKTKKIPLDPSDPTKTANNKDIFAWKPSDMPGIPREVIEHSLHVKEDAKPIKQRLRRFAQDRKDAIKEELTKLLAAGFIKEVLHPDWLANPVLVRKKTGQWRMCVDYTDLNKSCPKDPFGLPRIDQVVDSTADCELLSFLDCYSGYHQIRLKESDCLKTSFITPFGAYCYVTMPFGLKNAGATYQRMIQRCFSTQIGRNVEAYVDDVVVKTKQKDDLISDLEETFVSIRAFRMKLNPEKCTFGVPSGKLLGFMVSHRGIQANPEKVTAILNMKPPSTQKDVQKLTGCMAALSRFVSRLGERGMPFFKLLKKTDNFQWRPEAQKAFEDFKKLLTEPPVLASPHPQEPLLLYVSATSQVVSTVLVVEREEEGHVQKVQRPIYFVSEVLADSKTRYPQVQKLLYGILITTRKLSHYFQGHSVTVVTSFPLGDILHNREANGRIAKWALELMSLDISFKPRISIKSQALADFVAEWTECQEDTPAENMEHWTMHFDGSKRLSGTGAGVVLISPTGERLSYVLWIHFSASHNVAEYEALLHGLRIAISLGIKRLIVRGDSQLVVNQVMKEWSCIDDNMMAYRQEVRKLEDKFEGLELSHVLRHNNEAADRLANFGSKREAAPSDVFVEHLYTPTVPHKDTTQDADTHDVAMVEADWREPFIRFLTSQELPQDEDEAERISRRSKLYVMHESELYKKSPSGILQRCVSLEEGRQLLKDIHSGICGNHAAARTIVGKAYRQGFFWPTAVSDADKIVRTCEGCQFFARQIHLPAQELQTIPLSWPFAVWGLDMVGPFKKAVGGYTHLFVAIDKFSKWIEAKPVVTITADNARDFFINIVHRFGVPNRIITDNGTQFTGGVFKDFCEDFGIKICYASVAHPMSNGQVERANGMILQGIKARVFDRLKPYAGKWVQQLPSVLWSLRTTPSRATGQSPFFLVYGAEAMLPSEVEFESLRFRNFREERYEEDRVDDLHRLEEAREAALIRSARYLQGLRRYHNRNVRSRALLVGDLVLRKIQTTRDRHKLSPLWEGPFIISEVTRPGSYRLKREDGTLVDNSWNIEHLRRFYA

SEQ ID NO: 203325 - protein, 2055 aa, Oryza sativa
  Clone ID: PAT_MRT4530_98519C.1.pep
MGSISGIDGLVFPPGQTFRFGSLDFVTNNFGKISLLDSESDQSGENRISVPFGFPNAAESYFKTISTESASNHSAEIASSPTIPDQDDGAYPLVLMKLPDDLAAVSTTTASSSRRPRRKSASTPISPSFREVGVILQPLGTVSTDQLDDYNSSPTVDSRPTDIVEYDEFSSRYNDFDDFDGSLDDNYTPLYFGVFMANNETEEQRQARETEERRRLEEEHQAQEQERLRREQQDRERTAKEAEDRRQRALEAGRRARDLIGQQDVEGTPVFRTPQQNAVAAITLLDTLLNQNELNQSDHVVNILNQTKTMIAASVPVNSESVHTPTGSRVPHFRSHDYRHPSLSITGAGSNRRSRGHDERSVHSPPDLHRERRVERPRSPPRRRPIDLRDTIIQRRAARGYHHSPDRHDDDLDGVAAFTDDLRRVDWPAGFKPTGIEKYDGTTNPESWLTVYGLAIRAAGGDSKAMANYLPVALADSARSWLHGLPRGTIGSWAELRDHFIANFQGTFERPGTQYDLYNVIQKSGESLRDYIRRFSEQRNKISDITDDVIIAAFTKGIRHEELVGKFGRKPPRTVKLMFEKANEYAKAEDAVTASKQSGLSWKQNKGTPATGGGGSNNHKDRKRKPAELVATASHSSRQRSRVNTFDKIMNSQCPHHPNSNHVAKDCFVYKQFADQYTKTARKNSDEEQSTSRKKDDGDAPAGFQDHRKELNHIFGGPLAYESKRKQKLTEREINAVQPDTPQYLRWSEIAIKFDRSDHPDRVVHPGRYPLVLDPVVRNVKLRRTLIDGGSALNILFAKTLDDMQIPRSELKPSNAPFHGVIPGLSATPLGQITLPVTFGTRENIRTENISFEVADFETAYHAILGRPALAKFMAVPHYTYMMMKMPGPRGVLSLRSDIKQAVTCDKESCDMAQTREMASAREDIRLAAATASEGEIPATKTSKSGESEAKTKKIPLDPSDPTKTANNKDIFAWKPSDMPGIPREVIEHSLHVKEDAKPIKQRLRRFAQDRKDAIKEELTKLLAAGFIKEVLHPDWLANPVLVRKKTGQWRMCVDYTDLNKSCPKDPFGLPRIDQVVDSTAGCELLSFLDCYSGYHQIRLKESDCLKTSFITPFGAYCYVTMPFGLKNAGATYQRMIQRCFSTQIGRNVEAYVDDVVVKTKQKDDLISDLEETFVSIRAFRMKLNPEKCTFGVPSGKLLGFMVSHRGIQANPEKVTAILNMKPPSTQKDVQKLTGCMAALSRFVSRLGERGMPFFKLLKKTDNFQWGPEAQKAFEDFKKLLTEPPVLASSHPQEPLLLYVSATSQVVSTVLVVEREEEGHVQKVQRPIYFVSEVLADSKTRYPQVQKLLYGILITTRKLSHYFQGHSVTVVTSFPLGDILHNREANGRIAKWALELMSLDISFKPRISIKSQALADFVAEWTECQEDTPAENMEHWTMHFDGSKRLSGTGAGVVLISPTGERLSYVLWIHFSASHNVAEYEALLHGLRIAISLGIKRLIVRGDSQLVVNQVMKEWSCLDDNMMAYRQEVRKLEDKFDGLELSHVLRHNNEAADRLANFGSKREVAPSDVFVEHLYTPTVPHKDTTQVAGTHDVAMVETDWREPLIRFLTSQELPQDKDEAERISRQSKLYVMHESELYKKSPSGILQRCVSLEEGRQLLKDIHSGICGNHAAARTIVGKAYRQGFFWPTAVSDADKIVRTCEGCQFFARQIHLPAQELQTIPLSWPFAVWGLDMVGPFKKAVGGYTHLFVAIDKFSKWIEAKPVVTITADNARDFFINIVHRFGVPNRIITDNGTQFTGGVFKDFCEDFGIKICYASVAHPMSNGQVERANGMILQGIKARVFDRLKPYAGKWVQQLPSVLWSLRTTPSRATGQSPFFLVYGAEAMLPSEVEFESLRFRNFREERYEEDRVDDLHRLEEAREAALIRTSQGTQTTIVDIQTHALQKYKRLQMQRKRYKRAKPEDLTPAAGDSIPQANLDGSDETNLSETAPTEKNFNSGVGEKRARLSTTHCTQQVIPEEEAVGGPLLRRGESGSWTTEHLGRPNSITPTLATGA

SEQ ID NO: 203326 - protein, 76 aa, Oryza sativa
  Clone ID: PAT_MRT4530_9851C.1.pep
IYQEQPIHPKQDPNWEIRNNSTHMVICYGPSTRLVFLAVSNKKNSGKFLEPISVEPHATMGIWHSGHAHRLPFNHL

SEQ ID NO: 203327 - protein, 43 aa, Oryza sativa
  Clone ID: PAT_MRT4530_98520C.1.pep
FVCCLDSGSLVAPVYFEIVAEVPPIRGMPWENLSYLPQASVGN

SEQ ID NO: 203328 - protein, 316 aa, Oryza sativa
  Clone ID: PAT_MRT4530_98521C.1.pep
MVSKKKKTVSRHTTESEEGRHSFEIVGYSLKKGIGVDEFVESATFAVGGYDWCIRFYPDGKGDGAKDYISVYLELLTKDCAVRAAYDLRLVNLATGLPKSVYSETTHRMFNSEDSSKFAPHYATFMHRSQLEMEASGYIKDDRLTIECFVTVVVQESMASNTVKAHELIKVPPSDILENFGELLEKGEGADVTFVVGGEKIAAHKIVLAARGLLHFIYTDSLPDMDDLSDDDYYEMIRLLLVAADRYAMDRMKLQCESILGEHLDVQTVATTLALADQHNCNGLKDVCIEFIATQNKMDDVVATEGYAEDLPFCLS

SEQ ID NO: 203329 - protein, 61 aa, Oryza sativa
  Clone ID: PAT_MRT4530_98522C.1.pep
MTTTAVALSSPHVAIFLHGNLEEEGEVGEEHKEEEERERASGGGQGHKQIIASVEDEEAME

SEQ ID NO: 203330 - protein, 60 aa, Oryza sativa
  unsure (1)..(60): unsure at all Xaa locations
  Clone ID: PAT_MRT4530_98523C.1.pep
VLAWVKEKKPSIRNARMIKEVDWGPNXDILQVYFYLTTPLLVHRRQEIKFYTFWIRIQAS

SEQ ID NO: 203331 - protein, 91 aa, Oryza sativa
  Clone ID: PAT_MRT4530_98524C.1.pep
KTSYSGSIQLFVVWHHLGTHHSACMSLGLFNWPSNKFSFHNCNVTLKTNPFHTHGVPSSVPSSKFHHHSCITNSHNIQPSLCMPPANIVVL

SEQ ID NO: 203332 - protein, 45 aa, Oryza sativa
  Clone ID: PAT_MRT4530_98525C.1.pep
FLHSLFVNEILALILKFLQSVVEYTDAGLGYQTWLCTGYPLHKIL

SEQ ID NO: 203333 - protein, 113 aa, Oryza sativa
  unsure (1)..(113): unsure at all Xaa locations
  Clone ID: PAT_MRT4530_98526C.1.pep
ALSMLCCWIENPNSDAFKRHLARVADFLWVGEDGMKVRVCAGQLWDVAFAVQAILACSIAEEFGSTLKKAHGFIKTSQXYRHISKGGWAFQVADQGWQVSDCTAEALKVQIKI

SEQ ID NO: 203334 - protein, 133 aa, Oryza sativa
  Clone ID: PAT_MRT4530_98527C.1.pep
MPAREGGGLTIGKREGNSGGDEDSWSEARAMKVDEETVPGGSSLTTTTGVKTTSWFTGVGDGNVLDVATFLEARFRRTIPKPISSSDFCLSCSGASDCHKMPMLAGLRGGEWIHLVSRSLPLKPKGMDGDSLV

SEQ ID NO: 203335 - protein, 719 aa, Oryza sativa
  Clone ID: PAT_MRT4530_98528C.1.pep
MWKLKIAEGGPWLKSGNSHVGRETWEFDPNFGTSEEREAVEAARIEFQKNRFRTRHTSDVLARMQLAKANNFSIDLQKEKDGNPINIDTATVSDILKKALSYFSAIQAYDGHWPGDFPGPLFTTATMIIVLYVTESLTITLSSEHHKEICRYLYNRQVLGVFDWSGVNPIPPELFLLPSFVPIQPGRLWSHFRMAFIPMSYLYGKKFVGPITRLVISLREELHIHPYKKIDWKEARKLCAKEDAYNPHMWLQECLSDCLYSFGEPFLTRWPISYMRKRALYQIAEFLKYEDENSQYICIGAAQKALSMLCCWIENPNSDAFKRHLARVADFLWVGEDGMKVRVCAGQLWDVAFAVQAILACSIAEEFGSTLKKAHGFIKTSQIMDNPSGDFSRKYRHISKGGWAFQVADQGWQVSDCTAEALKALLLLSKCLSDGADYQMETYCYFDAVNVLLSLQNPNGGYGAWELARTYPWMEIFNMTEIYADIIVEHQYVECTSSVIQALALFREKYPGHRKDEIDQCIRKATEFIEKLQNDDGSWFGSWGICFTYGTWFAIEGLSAVGQCYDDSTCIRKACKFLLSKQLTNGGWGESHLSSRTKAYTNLDGEKSHIVNTAWAMLALMKAGQVERDPAPLHKAARLIMSMQLSDGDFPQEEMIGSFLKNGPLCYMAYRNIFPIWALGEYQKLVFQNYQTSSIKQTNIAPSAGNAALKNSASTTAPT

SEQ ID NO: 203336 - protein, 56 aa, Oryza sativa
  Clone ID: PAT_MRT4530_98529C.1.pep
WEGAKFQGNNHFPKRIHVFCGLEVNLHFIYFPFTPYRLIRVIPTPKFFFYEADRKR

SEQ ID NO: 203337 - protein, 482 aa, Oryza sativa
  unsure (1)..(482): unsure at all Xaa locations
  Clone ID: PAT_MRT4530_9852C.1.pep
MAMSRLSFRPRPLDIHKKLPILKSAREFEDDDPTAAAVAVARAGVLLRQSAPELTAATTATEGEGNPTPTKKNIQEIPTPQFDAVDTYERDYTRTFAQPTCYIRGRGARAEIGEFVEYDLDNEDEDWLEDFNNERKNLNPEKNLLRHHYVIPPVKHVFLLQFEMVLHYRLEVLLFKLEILDHKARERAGAITPTFIGPVPVLLQLDAAMENCFSVQALQYLSVRYGVFQAVYSYWKDKRERWQKPILRRLQPPPPVNDTNPYNVFRPREKAHRLHTRRMQRRENNIQSFEKLRMVRRNLDQAKALMDALVKREETKREAMECEVNLRRIQMKYKHEAQLVDEGTALSGFQQVSSRFGSSEDDYADSDDTTTEQPYIRPPVFRPRFADHKLSVIPTLRIKRERELKRRPQQNGWVFKRDPEEPVLLFTRPLDPEKLLAXRCRGRIGRGGRIIFDRWNPLLQTPIGQETSYYVPYSRRPPSPES

SEQ ID NO: 203338 - protein, 542 aa, Oryza sativa
  Clone ID: PAT_MRT4530_98530C.1.pep
MSVALYARGGGCGAKAAAARRSGRGGGGRRRAAVVLLLALAYVAGLLVFVLAGGGGVGVGGRVEVGREVGVMTVASLRRRRAAAAAAPQPGSVYRSHLVFERLWPDIRDDASSASAAASSLSSTSWRRSMLMTSHYQNPGELWMPCVNRKLIRPELPPSNGYLMIEANGGLNQQRLSICDAVAVASLLNATLVIPAFHFNSVWRDHSKFGDIFDEDHFIETLKEHVRVVKELPVDVLTRFDHNISSIPNMRTKAYSSPNHYMQKVLPKLLELGAVRIAPFSNRLAQSVPSNLQALRCFVNYQALRFAEPIRVLAEDMVERMDMVAFSCCTYDGGLKEKTEMENARERSWRGKFHRHGRVINPEANRRDGKCPLTPLEVGMMLRGMGFDNTTSLYVASGKIYNAEKYMAPLRQMFPLLATKDTLALPEELAEFEGHSSRLAALDYSVCLPSEVFVTTQGGNFPHFLMGHRRYLFGGNARTIKPDKRKLVLSFDDPNIRWNRFKRHMQDILHHSDMRGTALRKPNDSIYTFPMPECMCQQDGMM

SEQ ID NO: 203339 - protein, 59 aa, Oryza sativa
  Clone ID: PAT_MRT4530_98531C.1.pep
MPQGKTALSSITIAALEGLGFAYPACATPASHGSSYSHHAAPTAIIMPTSYRSYHANPR

SEQ ID NO: 203340 - protein, 278 aa, Oryza sativa
  Clone ID: PAT_MRT4530_98532C.1.pep
MWLNCLPSLLKRSHPCVFRPRHPNASVSIYRLDSDPRAHCFMNPSTPRSLASPVSTPPTMHVVYRIYSTGSWKCSWKAYNPYVTYKHPYAGHVNLFLKQRISWILDEHMLNHQGRPWGVSRAQARGPQNPGAHMADGPWPMAKTEDEEERRKGWKAKRFDSCSHRLDHASCVASITPLVNHSSLQTLRRKDQSELQKPSRQDRPDEILRLADYHAAGLSSRLVASRRLASQGVEPSRPSGQPPGGGGAARPHRPIDGSAAPGAYRLQPAALLLEVIFF

SEQ ID NO: 203341 - protein, 98 aa, Oryza sativa
  Clone ID: PAT_MRT4530_98533C.1.pep
DRKTAREWIIFWEGHTSIIRHSFHGTVFFTFFFIFCVTFGIPFMAQFAFAIFFISCPVLHSIVMLFGLIIVLLSQLEPINDISTIKSQSAFFVLKGRL

SEQ ID NO: 203342 - protein, 98 aa, Oryza sativa
  Clone ID: PAT_MRT4530_98534C.1.pep
MNKRQEVDVKRQHHRAGPRSTSEQERELSPTGDEEEKRHLRRSSPPPSDSPSQCSHVPPLPLPNLWGLVTPDAAAVRFAGHARHHRRTRRAEASPAST

SEQ ID NO: 203343 - protein, 101 aa, Oryza sativa
  Clone ID: PAT_MRT4530_98535C.1.pep
MGGEWGSHRQCHFYYFHRQRSPVILPPDLTPIATTDAVAESMLRLEGAAIVESTHLEAGYGRGEWEGHRRHTLYCATATSLLPYHHQICLPLPSSPSLSLH

SEQ ID NO: 203344 - protein, 58 aa, Oryza sativa
  Clone ID: PAT_MRT4530_98536C.1.pep
QPGLYCMFLRDTLDDRQSLQTVASCCLQCICRTEHALGLLKNSCAGQLEYCRPLNEPT

SEQ ID NO: 203345 - protein, 1015 aa, Oryza sativa
  unsure (1)..(1015): unsure at all Xaa locations
  Clone ID: PAT_MRT4530_98537C.1.pep
MAGSRPARETTTDAPAEPSSDGAVAAAPSAAAAAEGDAEITRPRNDKRGYRRVVLPNALECLLVSDPDTDKVSVLSLAPSIGDVPGVLAAASMNVSVGYFCDPERLPGLAHFLEHMLFYASEKYPVEDDYSKYIAXHGGSTNAFTCRERTNFYFDVNNSCLDDALDRFAQFFIKPLISPDATLREINAVDSENKKNLLSDPLRMSQLQKHFCSESHPYHKFSTGNLDTLLVNPNKEGLDTLEELIKFYNSHYSANLMQLVVYGKESLDNLQNLVENKFSDVRNTGRESFSFHGHPCSSEHLQIIVKAVPIKEGHTLRIQWPITPNIQHYKEGPCKYVSRLVGHEGEGSLFYVLKNLGWAMSLYAWEGDWSYEFSFFNVVIQLTDVGYEHMEDIIGLLFRYIALLQTSGTRQWIFDELVAISEMGFHYRDKSPPIHYVVNISSNMQIFPPEDWLIASSVPSKFSPDAIQNILNDLTPDNVRIFWESKKFEGQTNLTEPWYGTSYSVEAVTPSIIQKWVNMAPMEDLHIPKPNIFIPSDLSLKNVEEKGSFPCMLRKTMFSRVWYKPDTMFFTPKAYVKMDFHCPLSNSSPESTVLTDMFTRLIMDYLNDFAYDAQIAGLYYFIRPSDTGFQITMVGYNDKMRTLLDTVIGKIAEFEVKVDRFAVIKETIIKDYENFKFRQPYEQAFYYCSLILEEQTWAWDEKLAAVSQIEASDLQIFLPRLLGKTFIECYFAGNMEPGEAKSVIQHVEDILFNAPISFCKALPPSQHLTKRIVKLERGWRYYYPALCLNHQDEKNSSILHYIQIHQDDLKKNVLLQLLALVAKQPAFHQLRSVEQLGYITVLTQRNDSGVRGLQFIIQSTVKDPSNLDDRVEAFLNMFEGTLYQMPDEEFKSNVNALIDMKLEKYKNIREESAFFWKEISEGTLKFDRKEVEVAALRDLKKEELIEFFNNHVKVNAPQKKILSIQVYGGLHSSEYEKIVHDEPRPNSYQITDIFNFRRSRPLYGSYKGGVGQMKL

SEQ ID NO: 203346 - protein, 997 aa, Oryza sativa
  Clone ID: PAT_MRT4530_98538C.1.pep
MDSRPPETDAPAEAVPPAAAAAAAAAGDVEITRPRNDKRGYRRVVLPNDLECLLVSDPDTDKAAASMNVSVGYFCDPEGLEGLAHFLEHMLFYASEKYPIEDSYSKYITEHGGSTNAFTTCEHTNFFFDVNHDCLNDALDRFAQFFIKPLLSADATLREIKAVDSENQKNLLSDPWRMNQKIFHQKHMPSETDCHLWLNLQVLLTDKSVVILGKLQNHISLESHPYHKFGTGNWDTLEVKPKEKGLDTRLELIKFYDSHYSANLMQLVVYGKESLDNLQTLVENKFCGVRNTGRERFSFPGHPCSSEHLQVLVKAVPIKQGHTLRILWPITPNIRHYKEGWAMSLEAGEGDWSYEFSFFSVVIKLTDVGHEHMEDIVGLLFRYITLLQTSGTLKWIFDELQTICETGFHYRDKGPPIHYVANISSNMQIYPPEDWLIASSVPSKFSPDAIQGILNELTPDNVRIFWESKKFEGQTNLTEPWYGTSYSVEAVPPSIIQKWVEKAPVEDLHMPKPNIFLPSDLSLKNAEEKASFPCMLRKTLFSRVWYKPDTMFFTPKAYIKMDFHCPLSRSSPESSVLTDVFTRLLMDYLNDYAYDAQVAGLYYGVRPNDTGFQITMVGYNDKMRTLLETVIGKIAEFEVKADRFSVIKETITKEYENFKFRQPYQQAFYYCSLILEEQTWAWDEELAAVSQIEASDLEKFLPHLLGKTFIESYFAGNMEPGAVKGVMQHVEDILFNAPVSLCKALPSSQHLTKRIVKLERGLRYYYPALCLNHQDENSCLLHYIQIHQDDLKKNVILQLLALVAKQPAFHQLRSVEQLGYITLLRQKNDSGVRGLQFIIQSTVKDPANLDARVEAFLTMFEGTLYQMPDTEFKSNVNALIDMKLEKYKNIREESAFFWGEISEGTLKFDRKEVEVAALRDLKKEELIEFFNNHVKVNAPQKKILSIQVYGGLHSSEYEKIVHDEPRPNSYQITDIFNFRRSRPLYGSYKGGVGQMKL

SEQ ID NO: 203347 - protein, 363 aa, Oryza sativa
  Clone ID: PAT_MRT4530_98539C.1.pep
MGLNSYIQQESCFQETITKEYENFKFRQPYQQAFYYCSLILEEQTWAWDEELAAVSQIEASDLEKFLPHLLGKTFIESYFAGNMEPGAVKGVMQHVEDILFNAPVSLCKALPSSQHLTKRIVKLERGLRYYYPALCLNHQDENSCLLHYIQIHQDDLKKNVILQLLALVAKQPAFHQLRSVEQLGYITLLRQKNDSGVRGLQFIIQSTVKDPANLDARVEAFLTMFEGTLYQMPDTEFKSNVNALIDMKLEKYKNIREESAFFWGEISEGTLKFDRKEVEVAALRDLKKEELIEFFNNHVKVNAPQKKILSIQVYGGLHSSEYEKIVHDEPRPNSYQITDIFNFRRSRPLYGSYKGGVGQMKL

SEQ ID NO: 203348 - protein, 54 aa, Oryza sativa
  Clone ID: PAT_MRT4530_9853C.1.pep
IWGQLVLLAIVLSVLTAVVSEASDYNDNRLETDKFLKARVPKPEHHSAGTTTRG

SEQ ID NO: 203349 - protein, 531 aa, Oryza sativa
  Clone ID: PAT_MRT4530_98540C.1.pep
MEMAANPGGSGTCSDALFRELWHACAGPLVTVPKRGERVYYFPQGHMEQLEASTNQQLDQYLPMFNLPSKILCSVVNVELRAEADSDEVYAQIMLQPEADQSELTSLDPELQDLEKCTAHSFCKTLTASDTSTHGGFSVLRRHAEECLPQLDMSQNPPCQELVAKDLHGTEWHFRHIFRGQPRRHLLTTGWSVFVSSKRLVAGDAFIFLRGESGELRVGVRRLMRQVNNMPSSVISSHSMHLGVLATASHAISTGTLFSVFYKPRTSRSEFVVSVNKYLEAKKQNLSVGMRFKMRFEGDEAPERRFSGTIIGIGSVPAMSKSPWADSDWKSLKVQWDEPSAIVRPDRVSPWELEPLDASNPQPPQPPLRNKRARPPASPSVVAELPPSFDVDSDQISQPSNGNKSDAPGTSSERSPLESQSRQVRSCTKVIMQGMAVGRAVDLTKLNGYGDLRSKLEEMFDIQGDLCPTLKRWQVVYTDDEDDMMLVGDDPWENASTMVHASCIADPGPVWIPCQEGWLGRQHFHHLALPA

SEQ ID NO: 203350 - protein, 110 aa, Oryza sativa
  Clone ID: PAT_MRT4530_98541C.1.pep
PRVREDKIKELKAKKAELCYEKQKLKVEKEPLEQQVKILIATPAYMPPPPLMPAPYPQAPLAPFPHAQGQTAGQKLIMPFVGNPGYPMWQFMPPSEVDPSKDSEGGPPFG

SEQ ID NO: 203351 - protein, 91 aa, Oryza sativa
  Clone ID: PAT_MRT4530_98542C.1.pep
MALADYSSGAGGFDHGGFERWGATADSKEIEGRRPDGGSRDYRSNLKSVKGLPYRRGQGYRAPAEVTTVFILPYPRGKPGNRGNRAVTGGG

SEQ ID NO: 203352 - protein, 82 aa, Oryza sativa
  Clone ID: PAT_MRT4530_98543C.1.pep
LTLARGSSRRRSLFIASSSPGLELSRTLLEQRFRPLRRIVIQRLRRADASLRAHLTGAGSCVKLDVTTRRRRGGGSRPARGS

SEQ ID NO: 203353 - protein, 411 aa, Oryza sativa
  unsure (1)..(411): unsure at all Xaa locations
  Clone ID: PAT_MRT4530_98544C.1.pep
MAKKSKLKKEGSSTTRNPAAELTDDLIVDILSRLPXKSVCRCKCVSRRWRGLISDPDHRKKLPQTLAGFFYRSENESRCPXLARHFVNVTGRGRPLICPTISFLPRFDLEGMRMVDCCGGLLLFRCFMSSDEFCYLVCNPSTEEWVAFPDSGYNPEWQFFTHLGFDPAVSSHFHVFEFVMGDCGFVEGVEIYSSETGLWNFMESEWDPETTVYDRTRTFFNGMLHLVEEGIAILSVDVEGEIWQSIGAPRPELENVEDMFALVSCFIGQSQGKLCYLSAYDTVPWNLSIWVLEDYSKDEWTLKHKLTTEQLSEKINCKCKTDFDKAWYYHVVAVHSECNLIYYIAGGDTLMSYDMGHKQSCVIENLGPVLLGIFCHEMSVRVAVKADYGSGSPDKVLRGFTEALRGAQAEL

SEQ ID NO: 203354 - protein, 173 aa, Oryza sativa
  unsure (1)..(173): unsure at all Xaa locations
  Clone ID: PAT_MRT4530_98545C.1.pep
RILPRRAPWRQAPDHHRHPTTQRARISPLDALVRGLSAATTGYGLAAPGRSHGAREFHPELEEAEDYAFLGREVDEARHRRGVRPQHGCGGRRAFLPESRDEVDVTMTSYFYPSVPSLYPLRLHLLRPRGYLPSTASPASTIVLRXGWSRQLRRCARQRPPRRACARRPSVTI

SEQ ID NO: 203355 - protein, 217 aa, Oryza sativa
  Clone ID: PAT_MRT4530_98546C.1.pep
LSCVLGTVCISHQQIDLIAQNNLIAHSIQQHEHQNNKTSTHTRLPPLQMDINEQFIWKNSALPKVQFFAWLLTKDRLPTCKNLHKKTIIQLPLCAICQSADETSSHLCFLCPFVVSFWNSIHRYPGGVHTHDLHLIALPNNLPQAHFKTFYLLCLWSIWNHRQEVVFSDQQSSLHRLLLRCKDETTLWTERLLLRDDRLVAITWKCIFNIAINSLHM

SEQ ID NO: 203356 - protein, 76 aa, Oryza sativa
  Clone ID: PAT_MRT4530_98547C.1.pep
LGYHTVAQVFAGAVVGLVFGAIWYWIVNTMLVEYFPMIEESAIARWLYMKDTSHIPDVLKFEYDNARAARRKVATD

SEQ ID NO: 203357 - protein, 114 aa, Oryza sativa
  Clone ID: PAT_MRT4530_98548C.1.pep
PWRSRVSHNPLRSRSHLASPRRHLWWPSPFEVATKCLLVSSGILGGYVELVDEADLLGRCPCRRRWPCGAASAVGHAQTLGYCRPAPLPVGVVGDADSGEERKCAAGEEVARMI

SEQ ID NO: 203358 - protein, 97 aa, Oryza sativa
  Clone ID: PAT_MRT4530_98549C.1.pep
SRRTTVVACVIVEAPVPSSAATILLIAATRTTRGTPSASSAPPRAPVPRRQRHQHHRCTEREPSAHSFGRLMALRSSPCKLCFGATRLGLVNTAWRW

SEQ ID NO: 203359 - protein, 224 aa, Oryza sativa
  Clone ID: PAT_MRT4530_9854C.1.pep
MSMAGDVWFGFSWVLNQLPKLSPIKRFPDLAALADRHSDELPGVDVFVTTVDPVDEPILYTVNTILSILAADYPVDSSRRKSLAKAISEKAANEVEVASASPQMAAHFGYRRESQMGRESVVYIGGTQETGGRPPEKLESILGCYFFSFFLTDIYGSHVCHVRQNHYLNSEGLDLLRFSKMEEVLYPVLQLRETLWEDDMGHRGERTGGIRGGRGVGQAASTRR

SEQ ID NO: 203360 - protein, 88 aa, Oryza sativa
  Clone ID: PAT_MRT4530_98550C.1.pep
MVGSGCGGGAASGIEPALHLGMRRMVPAAGVDNDGPAKVEANPVDEGEAVSATASGMRRWQGDPAGGRAGEEASVAGRSGGGRREKRH

SEQ ID NO: 203361 - protein, 358 aa, Oryza sativa
  Clone ID: PAT_MRT4530_98551C.1.pep
AASAPSEPRSSRRRRRRPQASALYLSPSWTRSGSAPTPSSASSSTASAPAATTSTPCCPGWSSRWPGRSTPSTRSPAASASRPARPTGTSSSTSPATAWRSLSPSTTASASASMSWRTRTSRGRLPGLPRSSRSSRRAARCSRCRPPCCRPTAVASLSASPSTTPPAMGSCRTSRTPSPASPHVAAWRRRVARRSSPRSASRGCASAALGPTAKKGLAVTAAPTSSSPSTTGRGWSPASPKSTSATASARALPRHTRRSSPPPPPPPMASSRLAPRSPPASTRRCAASRHTGSGGWSASPRRARTTSPTRCTLTGGEPSGCPSGSRSSTAGAAAATATGTTPSPSTRSTSSGRTSASG

SEQ ID NO: 203362 - protein, 549 aa, Oryza sativa
  Clone ID: PAT_MRT4530_98552C.1.pep
MAQPRTHVVGGLRALRTAIVSPSPAPPAGERALPLTFLDAQWLSAHPVERVFFYRLGPGGDDVDAVLSRLVESLARALHAFYPLAGRVRLTPGETNRYELFYQPGDGVAFTVAEHDGVGVGVDELADTDEPREVARIATFVPELPKGGAVLALQATVLPPDRRGLALGVTVHHSACDGVSSTHFLHTWAAACAGDRVLPEPPVIDRTIIRDRNDMYDAFASPASEAKHAFDSPDVAGKLLATFTLSRQQLQNVKDAVAGEAARRGVAPPRCTSLVATLGLTWLCFRRAGPDGEEGPRGDGRAHLVFPVDHRSRLEPRVPEKYLGNCIGPGFATAHETELATTTTTADGLFTACAAVAAGIDEAVRGEPTYWERWVERITEACADDMSLSVAGSTRFGVYDMDFGFGRPAKVDVVSVAKTDAMSVAEDRSGSGGIEVGIALSPARMERFRRVGPSPTITEGLLTACTADRCRRRHRRGFGVYDVDFGFGRAAKVDVVSVEKTDAMSVAEDRFGSGGIEMGIALPSERSAWRGSGGGSPTTLPGSSSSQHN

SEQ ID NO: 203363 - protein, 91 aa, Oryza sativa
  Clone ID: PAT_MRT4530_98553C.1.pep
MRGRKKVSKEKRKAGSVAPSAFVGEPTRDKNMATLWRVWEGGLSRHKVLKKEGIGGDTVGFDTGWAAKKQPLVLPDLARRVFIKRLTLPLG

SEQ ID NO: 203364 - protein, 307 aa, Oryza sativa
  Clone ID: PAT_MRT4530_98554C.1.pep
MAQKYSCGASSALSGRLSSRLFSLLRRRRIALDSSRRSRLRCHLNPELRPRTCVTRSLRLAREHIFGGGWPVRRRGASASLPCGILNRHRGMGKEGRGGGGGLDCAASSSSLPPDLRVDRESLTTARGYNSEGKTKGPRRGEKGGEEGGEGLPWRLLLRGEVSDGDLHRLHRHRGAHRGHPHPRAAGAARGSGWRDGGHSREGEEVVATPAAEAKAQQESASAGPKSRRSILRCSRSRAVGAGEAEVMQLLSHRLPRATLSSPALAGRCEPLLSHRIELPRKRHINATSDEDSQISHVCAISAKTAI

SEQ ID NO: 203365 - protein, 384 aa, Oryza sativa
  Clone ID: PAT_MRT4530_98555C.1.pep
MADKTLREFAAPSADNVAIGPQINMGDVDFDLKSTLITMAQASPLCGKPNENANAHLQQFLEICSMYTIKGAQGPVGHLGLRMQVPADGNPRKGRLGRRDIIEIEPLRARRSTCRFLFDLVDVGALELTTGKSASDQGGRRWGLLRRWRILLGAREAVNAGGGQWWRQIRHYCCRIWPAQAGSGRSGWQRHRAAWRVAGGGLLQFMLAREASARGWQRPAHVRQCTSPYWRSGGVVVVGARRRLWRLSEPLWGAFLQSPAVLGGDVASATKLFFDLVGNMEDSDVSVALSSTFSSSSSRLDLLAFLDAPPFCWPSRSCCIIFTNDVDTEENNILTSEIKHHRSRPGLHHPGGCNAAWNTMPANRVVIAIRHQPPAAFDLADTAG

SEQ ID NO: 203366 - protein, 907 aa, Oryza sativa
  Clone ID: PAT_MRT4530_98556C.1.pep
MAPASLAPSPCRRGGAMLRDRAFDAGYKDDVFVCSSLLHLYARWGAMGDAVKVFVRMPRRDRVTWSTMVAGFVSAGQPLDAIQMYRRMREDGVKGDEVVMIGVIQACTAARNVRMGASVHGHLLRHGMRMDVVTATSLVDMYAKNGLLDVACRVFGLMVHRNDVSWSAMISGFAQNGQSDEALRLFRNMQASGIQPDSGALVSALLACSNIGFLKLGRSVHGFIVRRFDFNCILGTAAIDMYSKCGSLASAQMLFNMISDRDLILWNAMIACCGAHGRGQDALTLFQEMNETGMRPDHATFASLLSALSHSGLVEEGKLWFGRMVNHFKITPAEKHYVCLVDLLARSGLVEEASDLLTSMKAEPTVAIWVALLSGCLNNKKLELGESIADNILELQPDDVGVLALVSNLYAATKKWDKVRQVRKLMKDSGSKKMPGCSSIEIRGTRHVFVMEDQSHPQREEIVSKVAKLDLEMRKMGYIPRTEFVYHDLEEEVKEQQLSYHSERLAIAFGLLNTGPGTRLVIIKNLRVCGDCHDAIKYISKIADREIVVRDAKRFHHFKDGVCSCRDYWLPRTSMARGCVLLYVYPTDPPRRGPSEEVQPRKAATSVRPSRGTRRRGSGAVPVAFAIPGRGRHLSRRKRPGRWRQRLLLPTRWGARVADDHPRPLHCTCPMWEQHPAWPVRNATPLRCRRHPRRLLCALICVVGLAAVARCARNRRNSGGAGAGAGSASPSHSPAHAGHFGGGGSGGRRRDDDDDDDDGGDDRRQGAEEEGAEGAAEAGVRGRGGGGGGGEGHGGGGGGGGEGGGARRVRHLPFRVRRAGGGPRDAAVRPWLPRRLRRHLAPIQLLLPLLPPPHRPRRPLAAQALPQVRGHSPRGRRRRLLLLLLLRRHRHRQRRRRRRWRWPILAV

SEQ ID NO: 203367 - protein, 62 aa, Oryza sativa
  Clone ID: PAT_MRT4530_98557C.1.pep
SRRIDEQYACLQLARAQRTAASVTRTLDARVFSHDATVRGSDSTVSISLARFLLVSLHDAWR

SEQ ID NO: 203368 - protein, 58 aa, Oryza sativa
  unsure (1)..(58): unsure at all Xaa locations
  Clone ID: PAT_MRT4530_98558C.1.pep
HQETVVLKFSNPTRTEGERVQQINREQDDSSXRLGLHRHLRAWXTPPGAGSQXXTXLG

SEQ ID NO: 203369 - protein, 69 aa, Oryza sativa
  Clone ID: PAT_MRT4530_98559C.1.pep
NSYQGCNPSSVFHELCASQKNISQRTLQFQLYSLYNVRIRKRKRMPITAQIITVVPFTITSHVGKVSNL

SEQ ID NO: 203370 - protein, 324 aa, Oryza sativa
  Clone ID: PAT_MRT4530_9855C.1.pep
MAPKRKPDDDDDVGESTDEFANPSGDTMQFTKPVYLVAVRDDDQAAAYSVLKIDAAAVAGNDEPRRVRAVAVLTTGTEPGMSFVTARSRHGSWIVGVGGGLRAGTIIFDPGTIITRLGYPKHKPVLISHGSEPELVVGTYAFHVVNKIWEKIHEKNLPFVGQAVHLGGSLFAACPISNTASTSTSASVFHMSIKISSSIPSLSIQKFKVMASVDKITFPLFCPMGMGSFCCIRLGPSRLRHRRKTNYRRWRSPKTSCLKEVHVISTAFRIENIEAIMTHCQSQESKAKDQLLALQVKEQMHSCESKEIHGLLGSGIPVVAALSM

SEQ ID NO: 203371 - protein, 38 aa, Oryza sativa
  Clone ID: PAT_MRT4530_98560C.1.pep
PSVAGGCLRGGHGACGEWGPRGILHRLNGEAALPDGKK

SEQ ID NO: 203372 - protein, 407 aa, Oryza sativa
  Clone ID: PAT_MRT4530_98561C.1.pep
MRRAWFHDSHLAQAPGLTQAEWAGPGPHHAGTRAGMGSFGLFQFAPYIMTSRTLARQSSSEQTRERRSHLRRNALQVSERCRSWSLHGELFGDGSGELFVDVLVLFFHDGVYRARSKKIVGGGTDVRPVYGLEFVHGGYDGGRSRELAGNGASAYLCEDVLGLFRKFHYFVRPSRIVGVGTCALPEAWIVGVGTCVLPDDGLELFHADFPPEMLWHHPCGEQKIKGGRPDLLGREFGILAEQKRLIQRHLDLKEEMHLRHNKEIENAFISETRLARGVEQDLLGDCKKAVLVQQDQSGKEEESHQCLRQLQDVNGEQLVGVPKLGLPGAEENVACNNTASHKEFSEFPGPDIKFGSINIRDIPLLQGRQAAVILPNPQLDRRTSGLTPAGASSLDQETDQELNEKLL

SEQ ID NO: 203373 - protein, 223 aa, Oryza sativa
  unsure (1)..(223): unsure at all Xaa locations
  Clone ID: PAT_MRT4530_98562C.1.pep
QRGAYGDFINLKDLLAQPSKMLIGVGFTYVRSCRVTEERERVGRWCSGGRGSATLVADDVLGRRASGEGGVKQRGEGDGRNGNTKSSALASYGGGLAXRWRERGKGKTDSPRGCAVAGDLGCGLAADFDNAVXIPVGSTTASSCIQREWPDPCGGRQIQSAVHRGLPVRPRRGSSSPSKQPIATHRGAWIQRLFAPPDACMLLAARARELRVRRHREREEEEE

SEQ ID NO: 203374 - protein, 46 aa, Oryza sativa
  Clone ID: PAT_MRT4530_98563C.1.pep
VLSTKRSQNHRCKCHMPCMLPFLLLTNLQTRMRILIKYTVSVAYCL

SEQ ID NO: 203375 - protein, 352 aa, Oryza sativa
  Clone ID: PAT_MRT4530_98564C.1.pep
MLCQALAPGDRVHRSPTVGGASAAEEEEGGIGQEATDKNDEEEERLEELDGEASQRRSSSAGADGDCTVVVVIAVVAAAAVFAAVVTAAVVTAAVVTVAVVAAAVVAASVLMGGSHRERDRVEGKIERETTLSKFGKVENGIKVNRPLILLNFVYTNKCRVTEERERVGRWCSGGRGSATLVADDVLERRASGEGGVKQRGEGDSRNSNTKSSAPAGYGGGGGGLAQRWRERGKGKTDSPRGCAVVGNLGCGLATDFDTAVAIPVGSATASSSVQREWPDPCGGRQIQSAVHAVHRARSKQPVIQPVAALSAAHRGAWIQRLFAPPDACMSLAAGAGELRVQRHTEREEEEE

SEQ ID NO: 203376 - protein, 71 aa, Oryza sativa
  unsure (1)..(71): unsure at all Xaa locations
  Clone ID: PAT_MRT4530_98565C.1.pep
PHVPLPAARLPPPXXSKKNDIGVFHVGHPWVPVRYKLSFQLMKAVSWSLGEDSEAEARCRMVVMIASTKSV

SEQ ID NO: 203377 - protein, 698 aa, Oryza sativa
  unsure (1)..(698): unsure at all Xaa locations
  Clone ID: PAT_MRT4530_98566C.1.pep
MAKPPATTTLVLCCHLAVAAAAAATWIGHDDQQDDDVSTYIVHVMPAHAPRLATHRIARDHYAPFLRELLLPPHVARPPPRLLYSYAHAATGFAARLTARQAAHLEAHPCVAAVVRDEAYELHTTLSSSFLRLSPSSGLQAESNSATDAVIAVINSTMRPSYQTRLCPQHRLLPFVANMFYEGYERASGKPINETEDSKSPLDTTGHGTHSAAIAAGSPVSDANLFGLANGVAKGTAPGARIAVYKVCWKMGCFGSDVVAGMDEAIADGVDVISLSLAVNRKRTFAQDPTAISGFNAVRKGIVVVASAGSGGPKESTVTNTAPWLLTVGASSMNRQFQTIVVLGDGQTFSGTSLYLGDTDGSMKSLVFGGFAGSAACEIGKLDATKVAGKIVLCEXGQVLDAEKGVAVAQAGGFGVIVSSXVVRTPYPVGKILFFGTVLSSSPRIASFSARGPSLAAPEILKPDLVAPGVSILAAWSGLVSPTELDVDTRRVKFNILSGTSAACPHVSGVAALRKMARPSWIPAMIMSALTTTAGLDPGLVYDAGVDDYLDVLCALGYSDEDIVGIFLRDGTITNCSTRASTTVADLNRASISVAVKAYGDDITVRRTVRNVGGSVDAVYTVGGVPPPGTQLRIRPSKLVFDAEHQTRTYDVVIRTVSSGSFDEYTHGSIVWSDGAHKVRSPIAVTWPPSQSAAVAAI

SEQ ID NO: 203378 - protein, 728 aa, Oryza sativa
  Clone ID: PAT_MRT4530_98567C.1.pep
MAKPPATTTLVLCCHLAVAAAAAATWIGHDDQQDDDVSTYIVHVMPAHAPRLATHRIARDHYAPFLRELLLPPHVARPPPRLLYSYAHAATGFAARLTARQAAHLEAHPCVAAVVRDEAYELHTTLSSSFLRLSPSSGLQAESNSATDAVIAVINSTMRPSYQTRLCPQHRLLPFVANMFYEGYERASGKPINETEDSKSPLDTTGHGTHSAAIAAGSPVSDANLFGLANGVAKGTAPGARIAVYKVCWKMGCFGSDVVAGMDEAIADGVDVISLSLAVNRKRTFAQDPTAISGFNAVRKGIVVVASAGSGGPKESTVTNTAPWLLTVGASSMNRQFQTIVVLGDGQTFSGTSLYLGDTDGSMKSLVFGGFAGSAACEIGKLDATKVAGKIVLCEAGQVLDAEKGVAVAQAGGFGVIVSSRSSYGEYAKATAHLNPGTTVPNAAALEILRYMARTPYPVGKILFFGTVLSSSPRIASFSARGPSLAAPEILKPDLVAPGVSILAAWSGLVSPTELDVDTRRVKFNILSGTSAACPHVSGVAALRKMARPSWIPAMIMSALTTTAGLDPGLVYDAGVDDYLDVLCALGYSDEDIVGIFLRDGTITNCSTRASTTVADLNRASISVAVKAYGDDITVRRTVRNVGGSVDAVYTVGGVPPPGTQLRIRPSKLVFDAEHQTRTYDVVIRTVSSGSFDEYTHGSIVWSDGAHKVRSPIAVTWPPSQSAAVAAI

SEQ ID NO: 203379 - protein, 53 aa, Oryza sativa
  unsure (1)..(53): unsure at all Xaa locations
  Clone ID: PAT_MRT4530_98568C.1.pep
SYITVXFFXQFXGCXHXMQRPGVDSFGMYHLXVFNXXLIKLPLSKKKKKKKKK

SEQ ID NO: 203380 - protein, 80 aa, Oryza sativa
  Clone ID: PAT_MRT4530_98569C.1.pep
HLYTLNYSTLRISINTNFLVMLSHIILNHYGYWIVVLCLIFATRSDQLLHSHIELLCGTCLMCLLCCFSIVRYYIIEHPK

SEQ ID NO: 203381 - protein, 191 aa, Oryza sativa
  unsure (1)..(191): unsure at all Xaa locations
  Clone ID: PAT_MRT4530_9856C.1.pep
MRPTTAATGGTGGGGGGRRRRHATRGWPARKKMMANGDGKPREDDVGGRTSFGVPXGRRREGLEREMDHGDRKPWPKAAVEVVLTRVRGNEGSGDEPRRRRGGRGGSRPREPDGGEGXRAGVVDVARRRRRRGRGGGCGRDGASEIGGRWGKDPTGGPHLSATPXERRRRGGLAGPRRPAPEEDGNTRNHE

SEQ ID NO: 203382 - protein, 79 aa, Oryza sativa
  Clone ID: PAT_MRT4530_98570C.1.pep
NKSAPGSTRCPIVPTTASVNKKESHSSAEASTETTFKNGSKTTSNSIVSSKGTNFYSSKSPVKRQVVNTSAQAALAKIL

SEQ ID NO: 203383 - protein, 109 aa, Oryza sativa
  Clone ID: PAT_MRT4530_98571C.1.pep
EQNCKGCLSWYSNAAASLNPLQALPWGYNYWTWSTISGALWASSESWNLQTAIGGPAINKKGNVIGMLFHSMSFTPFLPSNIILKWWDYFKTTGYSLCFKLMMIFLTDV

SEQ ID NO: 203384 - protein, 120 aa, Oryza sativa
  unsure (1)..(120): unsure at all Xaa locations
  Clone ID: PAT_MRT4530_98572C.1.pep
GRKIRDREPGYSIISYAETEKEASYSKAVMTLPQNDTNSTLIYQXTYEMWQPNVNYCGRGCMFITHTTVKXPTSFSLLTNGIHTGHTIXLLHLSIIXMLCRPKDETASNNDTATDGREKR

SEQ ID NO: 203385 - protein, 121 aa, Oryza sativa
  Clone ID: PAT_MRT4530_98573C.1.pep
MGCYTTKFRYHKFLPTVFHPTSPAAAAPAADAAMATPSYAAVKCLNTSSSSRKRFVFKSFSQRVEEIDIDVYRSLHEVKAEPSSGSSFFLDALVEWRVSPLHPSLASVLQLFLQEVEALAK

SEQ ID NO: 203386 - protein, 306 aa, Oryza sativa
  Clone ID: PAT_MRT4530_98574C.1.pep
MECLTTSFTRNPGREYNLICPSEALSEKQRIQRRVLCYFPASTNSRRCRKFTTMAYPVSPIAGRRSNWRSFAASLNLEDGPASSDSTSSPSEQTSDGGEVYGDPSENLNSRKLKSDELKSLLADSERSKLLKKLSEANQYNRFLKRQLQMKDNDVVKFKSELAVMELELQALVALAEEIANFDVPSGSRKINGKYIQSHLLTRLEAVHDKVMEQIKDVDSLKHQEISVFWVGIAENVQIMGSFDGWSQGEAMSMEYSGYQARFSATLNLRPGRYEIKFLVDGEWRLSLEYPIDGEGSMQNNILVVN

SEQ ID NO: 203387 - protein, 87 aa, Oryza sativa
  unsure (1)..(87): unsure at all Xaa locations
  Clone ID: PAT_MRT4530_98575C.1.pep
VPASAPPCAHRPSPTRAPDSAATRAPAATDRAASARAAPTAPPPALRXENRRGWPDPATAAPDLPPPSPEASPPPLPDAGERLLSRA

SEQ ID NO: 203388 - protein, 273 aa, Oryza sativa
  Clone ID: PAT_MRT4530_98576C.1.pep
MVDALHELMDSTVLDMESTWSHYMTSSPERKQKYQEILSQLHLDRPSLGSKGWYFTFYFSEAALQFIKSFPLPDAKPNCQSGPWEPSFDDLEATENYCKIARSAYRVIKVVSGPHNMTFNSYFHVIWSLRAAIQELPSIKPRVRPRVRAYMQKKFDRNWKKWYLWLSIAVVLDPRYKLGFIELCFRQAFSHVAGMYFSEVRAKLHELYIQYSYVNEQSKEILDHKNNCSDIQISAPLHNKGQNSTTAQAAVEEFKELYEYLGGGLCTQDDSFD

SEQ ID NO: 203389 - protein, 80 aa, Oryza sativa
  Clone ID: PAT_MRT4530_98577C.1.pep
IILFALKHSVMLYISQLNTNSNFIDFLSELITKNRILHMTNNWLSPLVLPHLLLPSPNLSNSSKITRRSKRIRLHHLGSL

SEQ ID NO: 203390 - protein, 348 aa, Oryza sativa
  Clone ID: PAT_MRT4530_98578C.1.pep
MDAQRALLDELMGTARDLTEEERKAHKEVRWDDPDVCAAFMARFCPHDLFVNTKSNLGPCMKIHDLKLKESFESSPRRETHMRRFEAELAQQCEKLVIDLDRKIRRGRERLAQDVAVPPPVIGKTSEQLSIIEEKVKKLLEQIEELGEAGKVDEAEALMRKVELLNAEKTALTNQADNKVAMLPQEKKMELCEICGSFLVADDVLERTQSHVTGKQHIGYGLVRDFLAELQAAKEKARDEERIAREKKAEERRKQREKEYDVGGRDGGSRREKSGDRDYDRDRYYDRNRGRERSHDHRDRGSEYRSSSYRNGRDSERDRHRYRSDDMRKDRSRVRSRSRSPSRHGPDQ

SEQ ID NO: 203391 - protein, 69 aa, Oryza sativa
  Clone ID: PAT_MRT4530_98579C.1.pep
MDIMTSWKFSSLSKIFRLRCGLPIWTDPSPGKSESASWTGMELIILYQADVNMVDPPTPFAKIDRRLDP

SEQ ID NO: 203392 - protein, 269 aa, Oryza sativa
  unsure (1)..(269): unsure at all Xaa locations
  Clone ID: PAT_MRT4530_9857C.1.pep
RCPSTPDFVHLHPCTSVYNQTGPQTKPYPLDMWKYGSALQQRPELNPYSGRGATSHNWHAPKPHRKTGFRGFERGRERERPSEPLATTANHASGTSGTTEATRSTQAKLQAYKETITIHKKKTEYTETVHGSTEADPVCQPRRVADKRTPLDTTRAAHVETTWLPSGHTNTVTTRTSERLPTPVHGRDAAGTRLDDAEPRTKTRTGLXGLLDGCGRRTRTARRRDERHDDRERREDDDDDDRGTMPRCRRRRRRRRSAHRRRHWTPAGT

SEQ ID NO: 203393 - protein, 46 aa, Oryza sativa
  Clone ID: PAT_MRT4530_98580C.1.pep
GFLSTLPLRLRLRRTSRIRYAFVGDNRACPNLPGFNGSCYYSLATV

SEQ ID NO: 203394 - protein, 56 aa, Oryza sativa
  Clone ID: PAT_MRT4530_98581C.1.pep
MLEKQKEAEVASLSSRSESELHVIAATVVGLSVSMLLPGEDGFNDMDEEESSGGVC

SEQ ID NO: 203395 - protein, 136 aa, Oryza sativa
  Clone ID: PAT_MRT4530_98582C.1.pep
MRRSKKRQHESTTGPYQRSVDARQLSPGMDDYGMDDRHMDGLEGDDGDQPSPGEANFSVDVDATTLPTPNSDNQPSARRAECWRHFELFTEMVDGTGHLNRHYLAHLKNKAPAGARQTHLSFGPDGSVTTKNDITS

SEQ ID NO: 203396 - protein, 67 aa, Oryza sativa
  unsure (1)..(67): unsure at all Xaa locations
  Clone ID: PAT_MRT4530_98583C.1.pep
LNPKPRAASARAEHLGTRRLVTTHECVXLGRHTSRKPPPAVSPSRLQARCSSLQPPSXXSFXXXQRP

SEQ ID NO: 203397 - protein, 58 aa, Oryza sativa
  unsure (1)..(58): unsure at all Xaa locations
  Clone ID: PAT_MRT4530_98584C.1.pep
RLAHSPPYLLRTCSGQAHPQVHSHRTTXCSQYWTLWTSTACSEELDKLRNRITRLNWQ

SEQ ID NO: 203398 - protein, 142 aa, Oryza sativa
  unsure (1)..(142): unsure at all Xaa locations
  Clone ID: PAT_MRT4530_98585C.1.pep
KKARKSSAVNLWKQYIGNDQASPSSENKSTWNPDSELNHYLVTNHTKHDPTLGGDDVDLLGWWKEKERTLPQAFSVTGIIXRKERRSCLTAETVESIFCLKDWMEADERMQHCLHDQELADAMEDTLAEICLTKDHGGVDPE

SEQ ID NO: 203399 - protein, 89 aa, Oryza sativa
  Clone ID: PAT_MRT4530_98586C.1.pep
EIPTATPPAPSASMALGDEVPPPSSAAPDTDLHPPPSRPTGPRFLPSAREPASAPPTGRSPPVDFARRRPPPPAGRMTSHRPPALCIYA

SEQ ID NO: 203400 - protein, 932 aa, Oryza sativa
  Clone ID: PAT_MRT4530_98587C.1.pep
MRRSKKRQHESTTGPSQRSVDARQLSLGMDDYEMDDRHMDGLEGDDDDQPSPGEANFSIDADATTMPTPNSDNQPSTRRAECWRHFEVFTEMVDGKSIPHAQCKYCDKILSTATSSATCHLNRYYLAHLKNKAPAGARQTHLSFGPDGSVSTWTYDSKIAREEIAKFIVAEDLPIRMGESKHFERMIQKAFCPQYKKVSRKTTKNDITAIYRSKLSVLKQTLSTTSFSFAVTSDIWTSQHQRTSYLSVVLHYLDNNRSLNKRVIGFKLMTSHTGDAIATIILEVLREINLQSRVVSITLDNASANTTAMSILEPDLRSYVGGFVIHQRCICHVINLIVQPGMIVLDKLLNKIRRSVRIIGGNTVVKARFQDYCKAKNKPGRMFGIDVKHRWNTMYLLLRQLKGISNIDSYGCHSLLGGVSLWTLSHLWVKTQSNFWAGVNNGFGRCSPPWRLRLKGHALPSVSLVLETAKVAMNSIGDAVGLDYSEAFQHVNDELYRVFRLYRTKLGGTPRVPEQTSQKKASKSSAVNLWMQYIGNDQASPSSENKSTWNPDSELNHYLATNHTEHDPTLDGHDVDLLGWWKEKERTLPVLAHFARDILLVPASSVSSEQAFNVTGRIIEEQWSCLTPETVKSIFCLKDWMEADELTQHCLHDQEFADAMEDALAEICLTKDDGGVDLDIGQSTWSEAKTLGTRGVGSRSSAAAALSVGSPRCGPHGVATAAMRGCAMSVLGGGGGSRRRKPSARAARRDDSGYVRPHDVGPLRRLSASAAGTGSAAGSRRRRRRVGAAARAPAKTLGTTRLLRVVDALQDPPSPPWLGNDIDTLPQVGNPEDQPDKARERPSTDREEATQSHIINTGVKSEEMGSSHIRRLQTLYKQQGARDGQLELAKHSEGLGHEPGSLSLRSTQKASAMSPRNMLTATAVHHRSQGQS

SEQ ID NO: 203401 - protein, 60 aa, Oryza sativa
  Clone ID: PAT_MRT4530_98588C.1.pep
HRLDIMGAMIIQTYAYCFPQHTIYKEGHEGEVLVSGIELLCLPSTIIVPLYITTHHSLIR

SEQ ID NO: 203402 - protein, 138 aa, Oryza sativa
  Clone ID: PAT_MRT4530_98589C.1.pep
MEAWARLFAGSGLAALSMRLTKQLSTGGDHLAAAGVQQNGGASKAGPSNLVLSPLSIYSALSVVAAGARGRTQSELLKALGAGSREELAENVAKTMARALPDGTPQRGGPRVAHACAIWHENFWWGICLISIVFRTIQ

SEQ ID NO: 203403 - protein, 270 aa, Oryza sativa
  Clone ID: PAT_MRT4530_9858C.1.pep
GEQAEGEGARTGSTGVGPTRQPLGPRWTGSTRLAAVGAVGPTRQPHPRARAADGRVPPGSREGAPEGGLAGTAEGRGTRPRPDGHRRRPPARRSGTRERGGKGEANGAVFGSPRSTATTGTAAEAEEGGGAVRDDEDDGAPAVGERNGGADEVDGNAAKPMEVTPSGEEVRSDGGGEPEHGGDGGEKVRRCGLDSDGESERRVAETEERSSGIDFIATGEREGGRRERKPAAEFSGSIEDAGDDCGIQIGRIRGRERGKRGGIGRGNHGE

SEQ ID NO: 203404 - protein, 103 aa, Oryza sativa
  Clone ID: PAT_MRT4530_98590C.1.pep
MTQPTHWALPAHVLKHRPRHDLTRLGPCRAGPKARHPSCFFKKSLISIPHFFGPYLNDYRAMPSRPTVARHRPRHGLAVGSDRPGHNPNWVVPCLGLGPYGHL

SEQ ID NO: 203405 - protein, 292 aa, Oryza sativa
  Clone ID: PAT_MRT4530_98591C.1.pep
MAGGEDEGWRRSGIEVSALQFDYDGQPPLFARFNLRIAPGSRCLLIGANGSGKTTLLKILAGKHMVGGRDVVRVLNGSAFHDTQLVCNGDLSYLGGSWSRAIGSAGDVPLQGDFSAEHMIFGVDGVDPVRREKLVDLLDIDLQWRMHKVSDGQRRRVQICMGLLHPYKVLLLDEITVDLDVVTRMDLLDFFKEECEQREATIVYATHIFDGLESWATDIAYIQEGELRKSAKYSDVEELKSAKNLLSVVESWLRSETKLPKKEHPRPETQPRRSSPFDASPFRSSRHMAYYR

SEQ ID NO: 203406 - protein, 183 aa, Oryza sativa
  Clone ID: PAT_MRT4530_98592C.1.pep
MANEEPKREILLALYCKKLYRLWSGTMKEALDVRWTCKGVVYGDRQRRENTTMVSRSKQALATPLSLFLLHLLLAALALRLVAVASASVVISVAEEAENNATAPWATEERLVVVVELGSAAARQLQLGGGGVELHHRRRELAGKIPFGPLRPDGSACRPHCPAKSGLPYTRDCKVIYLCGRGR

SEQ ID NO: 203407 - protein, 86 aa, Oryza sativa
  Clone ID: PAT_MRT4530_98593C.1.pep
MSLGRRLIVSWCHVLLFEGTRATRDYREGRRRRRPPLPSSKLEVALVQASRRHRPAHLLDDLMMTRCIGKAHWWRKGLYSRFVTPL

SEQ ID NO: 203408 - protein, 1193 aa, Oryza sativa
  unsure (1)..(1193): unsure at all Xaa locations
  Clone ID: PAT_MRT4530_98594C.1.pep
MPLKFCMERGFQSHPVRGCLVGASRFLSCIKFLVSINPESKSRATNREVLNELIKLHGKTSLGGKLPAYDGRKSLYTAGSLPFESEEFVVKLIDPEKKDKERAEREYKITIRIAGRTDFYHLQQFLLGRQRDMPQETIQFGHRGDIGEGLECWRGYYQSLRPTQMGLSLNIDISATSFFKPVTVIQFVEEFLNIRDTSRPLSDRDRVKIKKALRGVRIETNHQEDQIRRYKITGITPIPMSQLMYLSFLCFCYNYLFVYMLFPVDDNGTRKTVVQYFWDRYNYRLKYASWPCLQSGSDSRPVYLPMEVCKIVEGQRYSKKLNNKQVTNILRATCQRPQQREQRIHEMVLHNKYTDDRFAQEFGIKLKYHDSGREKTCAPSVGQWNMINKKMINGGTVDNWTCLSFSRMRPEEVQRFCGDLIQMCNATGMSFNPRPVVDVRSSNPNNIENALRDVHSRTSELLAREGKGGLQLLIVILLEVSGSYGKIKRVCENDLGIVSQCCLPRHASRPNKQYLENVALKINVKKXPTIIFGADVTHXPPGEDSASSIAAVVASMDWPEITKYRGLVSAQSHRQEIIEDLFSVGKDPVKVVNGGMIREFLIAFRKKTGRRPERIIFYRDGVSEGQFSRVLLHEMDAIRKACASLEEGYLPPVTFVVVQKRHHTRLFPEVHGRRDMTDKSGNILPGTVKDRQICHPTEFYFYLCSHAGIQGTSRPTHYHVLYDENHFTADELQTLTNNLCYIYARCTHAVSVVPPAYYSHLAASHAHCCIKGHSSGSGSTPGNEHDIVKNSAPTLQILVKVLDFQIVPLTMKLKSSAEDIVALALSKHRVSLHDVYVYHGRRVIAKSLTLESLKADRDSTFLIMPRMRGGCNDTIGGFKCIPLEQHIRSLGDSLFEIIWIPPDLRVSGFCSYLIILGKPARKIICQLLKLLEIIHAANRFASRFTIADLVFLPDLGCIAFKKGVKIRWNLRREEYKLNMGDVASIISCWFRFNRRKLEALEAGIHELRPGQGDSPMFVDILVKDLRSPTHETGLSANYRGFYKNCSALRSCSAHMNLFTSLDIRKDFMVGSADWGNFVKALGDIKLPGWYRTAMRSPEMRKVLFFEFNDPHTGELRGKRYRALSVFSWLEFARIFIKHMKKGLCTDKQATALLCVIFSNIVPVVEKKLTYSYRPPAKEKSNESFTVEEILDPS

SEQ ID NO: 203409 - protein, 61 aa, Oryza sativa
  Clone ID: PAT_MRT4530_98595C.1.pep
MRRNTVLALVSWLMLLALFITTATASLPCRCCWLVQHPKVTCGHAYCGENCCPPTPPPSSR

SEQ ID NO: 203410 - protein, 230 aa, Oryza sativa
  Clone ID: PAT_MRT4530_98596C.1.pep
FASRFTIADLVFLPDLGCIAFKKGVKIRFNRRKLEALEAGIHELRPGQGDSPMFVDILVKDLRSPTHETGLSANYRGFYKNCSALRSCSAHMNLFTSLDIRKDFMVGSADWGNFVKALGDIKLPGWYRTAMRSPEMRKVLFFEFNDPHTGELRGKRYRALSVFSWLEFARIFIKHMKKGLCTDKQATALLCVIFSNIVPVVEKKLTYSYRPPAKEKSNESFTVEEILDPS

SEQ ID NO: 203411 - protein, 45 aa, Oryza sativa
  Clone ID: PAT_MRT4530_98597C.1.pep
ISPKVYMSHMMISELIFNFEPLSVKTIKDTAGGNGLVHHILGDTY

SEQ ID NO: 203412 - protein, 1053 aa, Oryza sativa
  Clone ID: PAT_MRT4530_98598C.1.pep
MAYRGGGRGGRGGEQRPPYSGRGDVPGRGGGGGGGGAPPYRPASGFVWPPPGMTPRPGPPQPQYPRPGPPAVVYGAPMPAAHHQGAYQPGGVYRAPSPGVPVIGGYARSTPVTIRAPPPSHSSAPAPYQPAAAAPAPSSSSTAPSATALAKEFEQKLFVSETALAPPAAVASAAAAPAGEASVESDKDLAPVSKKGLAHPARPGFGAAGKKVMIRANHFLVNVADNNLFHYDVSINPESKSRATNREVLNELIKLHGKTSLGGKLPAYDGRKSLYTAGSLPFESEEFVVKLIDPEKKDKERAEREYKITIRIAGRTDLYHLQQFLLGRQRDMPQETIQVLDVVLRESPSWNYVTVSRSFFSTQFGHRGDIGEGLECWRGYYQSLRPTQMGLSLNIDISATSFFKPVTVIQFVEEFLNIRDTSRPLSDRDRVKIKKALRGVRIETNHQEDQIRRYKITGITPIPMSQLIFPVDDNGTRKTVVQYFWDRYNYRLKYASWPCLQSGSDSRPVYLPMEVCKIVEGQRYSKKLNDKQVTNILRATCQRPQQREQSIHEMVLHNKYTEDRFAQEFGIKLKYHDSGREKTCAPSVGQWNMINKKMINGGTVDNWTCLSFSRMRPEEVQRFCGDLIQMCNATGMSFNPRPVVDVRSTNPNNIENALRDVHRRTSELLAREGKGGLQLLIVILPEVSGSYGKIKRVCETDLGIVSQCCLPRHASRPNKQYLENVALKINVKVGGRNTVLERAFIRNGIPFVSEVPTIIFGADVTHPPPGEDSASSIAAVVASMDWPEITKYRGLVSAQPHRQEIIEDLFSVGKDPVKVVNGGMIRELLIAFRKKTGRRPERIIFYRDGVSEGQFSHVLLHEMDAIRKACASLEEGYLPPVTFVVVQKRHHTRLFPEVHGRRDMTDKSGNILPGTVVDRQICHPTEFDFYLCSHAGIQGTSRPTHYHVLYDENHFTADALQSLTNNLCYTYARCTRAVSVGRRRSRPNFIKIEIVSVYFPPAYYAHLAAFRARYYVEGESSDGGSTPFFFFFFFTNISSHIKQPWQASNSSIT

SEQ ID NO: 203413 - protein, 106 aa, Oryza sativa
  Clone ID: PAT_MRT4530_98599C.1.pep
MDTSGPAAFVNGEILKMFVGRRVRTVVQAQREEGGLLIGQSTDGHQLTIKGASGAPMSHYVEIIGIAEPNQAIRAEVCTDFGENFDPAPFNGLCKLANGQMKDLFL

SEQ ID NO: 203414 - protein, 78 aa, Oryza sativa
  Clone ID: PAT_MRT4530_9859C.1.pep
SHRQLIKYINCLDTFGYCFSLMGSNLGKFKWFMKPCFYVNLYGVDCIKKVRSQWREHCSCSLFFSSCNRHTDDTGICA

SEQ ID NO: 203415 - protein, 61 aa, Oryza sativa
  Clone ID: PAT_MRT4530_985C.1.pep
KQLNSFGATAVLAFSTTVPLLALYILDSLRLGDTVGVTTASPHAFLLAAQIFTEGLHAAAG

SEQ ID NO: 203416 - protein, 188 aa, Oryza sativa
  Clone ID: PAT_MRT4530_98600C.1.pep
MAAQTQTIQVPNDAELMQAQADLWRHSLYYLTSMGLRCAVELGIPTTIHGLGGAATVPDLMAALSLPENKLPFFRRLMRVLATARVFASADGGETERFRLTPLSRILVDGVVADEHHSQRCFVLGTTSRHYVDAAFALSEWFKKDLASPVPSPFEDLHGARLFDESTPLLDPELDATVNEGLAAHDNL

SEQ ID NO: 203417 - protein, 156 aa, Oryza sativa
  unsure (1)..(156): unsure at all Xaa locations
  Clone ID: PAT_MRT4530_98601C.1.pep
IRLHPNSSTKGGALPSTRRSMWQHHQPAPTTPRRPPRQPPPASAKLCALPLAPPKPAGLCLLLHFFWPPTHCLPRLYFHXPLALHSLAXLPRAAPLHLINPPLFPPLPCPNSPVNXLHLPRPYNSSTASPTTPPPPALPLLLHRPPPSLAHRPPPS

SEQ ID NO: 203418 - protein, 220 aa, Oryza sativa
  Clone ID: PAT_MRT4530_98602C.1.pep
ARLAGTRRAARSSPSAPSRSPRSYRTPTPRRWRGATRRRRTSCAGSGAPSTTRSSLSSPARAAAAACPGRSCSSPATGSPPSSPTSTPGSATASSTSRPPMASASRRRSTARPRTAAASRRSSTSSPSPLALAINLINAAQTTHRSGRSSTPARTATTMVDGTRAAGSSRTEGREANGGEARRRPGRRRRRSSRSFAPAPAPAAASHSTPRWRRIPPPAP

SEQ ID NO: 203419 - protein, 120 aa, Oryza sativa
  Clone ID: PAT_MRT4530_98603C.1.pep
MNKRSIFSNWFITARPKTLPLALASIMVGSALANWVGQFDWVTNLLAIITTMLLQILSNFANDYGDYVKGSDTQERIGPLRAIQQGNITGEQLRQAVIFLSFLSFISGLVLTIYAYQSLQ

SEQ ID NO: 203420 - protein, 87 aa, Oryza sativa
  unsure (1)..(87): unsure at all Xaa locations
  Clone ID: PAT_MRT4530_98604C.1.pep
YGGSGYGSGSGYGEGGGSGGADGGGYGXGGGGXGGXGEXXGSGXPYRSGKGYGYXXGVRGVGAYGSXGAGRRPPSYVLPKPMLPYIP

SEQ ID NO: 203421 - protein, 416 aa, Oryza sativa
  unsure (1)..(416): unsure at all Xaa locations
  Clone ID: PAT_MRT4530_98605C.1.pep
TWLCPCNSVELGRGIADQLISTAXHDTLPGNYVRPESXSGPRLADVVSDARIPVVDLANPDRATLVSDVGAACRSHGFFQVLNHGVPVELTLSVLEVAHDFFRLPAEEKAKLYSDDPAKKIRLSTSFNVRKETVHNWRDYLRLHCYPLLRSLLGGSPSIFSLWNNFQCLXLCIPLFTFQKEMATFVVVEMKFNNSKKNIHKWRQYLALHFYPIYQYLPDWPSNPPSFKEIIGTYCTEVRELGFRLYEAISESLGLEGGYMRETLGEQEQHMAVNYYPQCPEPELTYGLPAHTDPNALTILLMDDQVAGLQVLNDGKWIAVNPQPGALVINIGDQLQALSNGKYRSVWHRAVVNSDRERMSVASFLCPCNSVELGPAKKLITDDSPAVYRNYTYDEYYKKFWSRNLDQEHCLELFRT

SEQ ID NO: 203422 - protein, 100 aa, Oryza sativa
  unsure (1)..(100): unsure at all Xaa locations
  Clone ID: PAT_MRT4530_98606C.1.pep
KLSXXXPXXEXPXXXXXSRGLSXXTGSPEXDAWMXTAXCSXAGEGILLVPPATRREPAASRAPRPRTETPQRRSRWRPWXDGXXSSXRLLXEEEEIVRAR

SEQ ID NO: 203423 - protein, 174 aa, Oryza sativa
  Clone ID: PAT_MRT4530_98607C.1.pep
MARLYVGNLDPRVTSGELEDEFRVFGVLRSVWVARKPPGFAFIDFDDKRDAEDALRDLDGKNGWRVELSRNSSSRGGRDRHGGSEMKCYECGETGHFARECRLRIGPGGLGSGKRRSRSRSRSRSPQYRKSPTYGRRSYSPRDRSPRRRSVSPVRGRSYSRSPRGRGGSPYADG

SEQ ID NO: 203424 - protein, 68 aa, Oryza sativa
  Clone ID: PAT_MRT4530_98608C.1.pep
MNLPISFRPKDFGSAMWDMIRGKGTGYTIKGHIDVNTPFGHMKIPICKEGGTTRLKKGDDDDDDDDQE

SEQ ID NO: 203425 - protein, 76 aa, Oryza sativa
  unsure (1)..(76): unsure at all Xaa locations
  Clone ID: PAT_MRT4530_98609C.1.pep
MRRAAATAGALSADLFVAVASASGARIRPXPGGWPVDPXSPGKKARGSVLPGEDGNRRGRGPLLGDSSSRKSGRRE

SEQ ID NO: 203426 - protein, 999 aa, Oryza sativa
  Clone ID: PAT_MRT4530_9860C.1.pep
MDISRTNEGYTSCGPVIEMSWHRAGVLLLGAQSCLPVPEVPAVGGVGSVLLSMARMGWKLCHVSRPNAVVPAKREQGSKPVVCFNCGDPGHYADKCPKPRRVKVVPAQSNSTAPASKARVNHVAAAEAQDAPDVILGTFLVNSVPATVLFDSGATHSFLSMSFAGNHGMEVEDLRRPLMVSTPNNQALSLQRSPSVRIEIKGVPFLANLILLESKDLDVILGMDWLARHKGVIDCANRKVTLTSNDGRVVTVHALSSESLRSRLNQITLEEIPIVREYSDVFPDDLPGMPPKRDIEFRIDLVPGTTPIHKRPYRMAANELAEVKRQVDDLLQKGYIRPSSSPWGAPVIFVEKKDHTQRMCVDYRALNDVTIKNKYPLPRIDDLFDQLKGATVFSKIDLRSGYHQLRIKEEDIPNTTFTTRYGLFECTVMSFGLTNAPAFFMNLMNKVFMEYLDKFVVVFIDDILIYSRTKEEHEEHLRLALEKLREHQLYAKFSKCEFWLSEVKFLGHVISAGGVAVDPSNVESVTNWKQPKTVSEIHRFLGLAGYYRRFIENFSKIAKPMTRLLQKDSFQELKSRLISAPILILPDPKKGFQVYCDASKLGLGCVLMQDGKVVAYASRQLRPHEKNYPTHDLELAAVVHALKIWRHYLFGTRTEVYTDHKSLKYIFTQPDLNMRQRRWLELIKDYDMGIHYHPGKANVVADALSRKGYCNATEGRQLPLELCKEFERLNLGIVSRGFVAALEAKPTLIDQVREAQINDPDIQEIKKNMRRGKAIGFLEDEHGTVWLGERICVPDNKDLKDAILKEAHDTLYSIHPGSTKMYQDLKERFWWASMKREIAEYVAVCDVCQRVKAEHQKPAGLLQPLKIPEWKWEEIGMDFITGLPRTSSGHDSIWVIVDRLTKVAHFIPVKTTYSGSRLAELYMARIVCLHGVPKKIVSDRGSQFTSNFWKKLQEEMGSKLNFSTAYHPQTDGQKDRIRTGLRASVAKHYRTSTCLVGKA

SEQ ID NO: 203427 - protein, 594 aa, Oryza sativa
  Clone ID: PAT_MRT4530_98610C.1.pep
MAPPSPPSTCQRCRHCHRRNCLTFVRLSHRHLPPFVAQQQAMSSSDSPKVTERKADKDHDDNNDGEGGGFFDKVKDFIQDIGEKIEDAVSFGKPTADVTGIHIPHISLEKVELIADVLITNPNPVPIPLVDIEYLIESEERKLMSGTIPDSGTIHAHGSETVKIPLLLIYDDIKSTYGDIKPGSIIPYKIRVVLHIDIPVIGRISIPLEKNGEIPVPYRPDVNVSKIKFEQFSFEEATATLHLNLDNKNDFDLGLNSMDYEVWLSNVSIASAEMKETTNIKKQEVTTMNLPISFRPKDFGSAMWDMIRGKGTGYTIKGHIDVNTPFGHMKIPICKEGGTTRLKKGDDDDDDDDQVYGGEQPHATTSNSIARGSVVEVEALGIDDARTMLAASPLSARRVFDCGLALKPLPLSRAWPPRAPCHRCHAVAVAASRPAPSRRRRSSRAAAVCRAAPRAVTVAVASPSPSLSRCLASRTRRAAVASSPRVPRRATSVASPLPRREPSPSRLVAAAAPLPRRGHRRRVAPSRRRAPSPSPLPRRAAVVSSPVRRRHIIIRPAICPQSPIKAPPSSPNLPTSFPQFSPLLPISTAPPSPF

SEQ ID NO: 203428 - protein, 326 aa, Oryza sativa
  unsure (1)..(326): unsure at all Xaa locations
  Clone ID: PAT_MRT4530_98611C.1.pep
WQPLELKEFRPISLCNVLXKDCSKCLVNRLRPILDVLISPNQSAFVPGRLITDNALLAFEYFHFIQKNKNPGKAACAYKLDLSKAYDRVDWRFLEQEPLGFRTLFRTSMLFSTATPVEVQNSISNTLQLVNASLEDKYLGFPTPDGRMCKGKFLSLQERIWKRIMLWGENFLSSGGKEMMFKSVIQAIPVYVMGVFKLPDSVCDDLNWLSRNFWWGAEKGKRKTNWKAWDCLTKPKQRGGLGFRDFKVFNQALLARQAWRLIDNPGSLCARVLKAKNYPNGSLVDTCFSGCASPGWRSIEYGLELLKKGIIWRVGNGRSIRIWRNP

SEQ ID NO: 203429 - protein, 202 aa, Oryza sativa
  Clone ID: PAT_MRT4530_98612C.1.pep
MALLLLAFFAAAATANGGAAPAASNFIRKLCRATQYPAVCVQSQASYGGAPLPRSPPELVHAVLSVSVDKAQSVSMYVGRICGPGGSRGVAGPVRDCLENMADSVGHLCDAAQELGGNMGRAGSPGFKWHLSNVQTWCSAALTDKNTCLDGLSRGVDAATRSATRGKIVVGVHRRRPPSSSTAWRGCGGRRLLVAGRARTRA

SEQ ID NO: 203430 - protein, 143 aa, Oryza sativa
  Clone ID: PAT_MRT4530_98613C.1.pep
MGSIVVVVACSKPLCAIHPRSSVQVTDDDDDDGEEENIYGRVMCAPKLGYALQFIASASSTLAYVLLLLLPPLAAVLDRSPVDRVAIGKVRYLQIVSDSDLHCLKDEIRQKYLTSGMFSSRKENFWVSHRMFDRMSEGFFGHK

SEQ ID NO: 203431 - protein, 47 aa, Oryza sativa
  Clone ID: PAT_MRT4530_98614C.1.pep
SKAKTTKKIVLKLTCSSCKKTVQNILKRCKHFELTDKKKTGSKEPTW

SEQ ID NO: 203432 - protein, 161 aa, Oryza sativa
  Clone ID: PAT_MRT4530_98615C.1.pep
MWEREGETGARRQGRALVETLTEVATGAPDGGSGGCTPPSADGSRSGGRQNRGEARWSSSLEGRCTSNVGEGKATARETVGRQERRNDAGGAGRWQRQRDGRMVPVARSIEEMADGERGQRARFSQKRRKGKMDRPCMGPTIGKAILAGQLWPARGGAWPS

SEQ ID NO: 203433 - protein, 46 aa, Oryza sativa
  Clone ID: PAT_MRT4530_98616C.1.pep
MAIALFCGHIAEPCGLKKFVLAAMMRNLLRLKLKLEPTASMTSLAC

SEQ ID NO: 203434 - protein, 126 aa, Oryza sativa
  unsure (1)..(126): unsure at all Xaa locations
  Clone ID: PAT_MRT4530_98617C.1.pep
AYFVMNNWHMRLLVLIFGDYWXVVLEMIGFAGDEQRLLIERVRSDRVVVAGQTGMYRVREVIKFQSTXEIFXFVFARVRRSNRRDTGGQTDGIAPVKPVGIRWSDRRRRQEVEAIVGRLDRAINTG

SEQ ID NO: 203435 - protein, 82 aa, Oryza sativa
  Clone ID: PAT_MRT4530_98618C.1.pep
MEREKKKWHLVSSCGGRRSHSGREVSLPGDKIWAKARVGETGGEKGHNRAHKEGWRYELRLLDSWAALSATRLEISGASGNR

SEQ ID NO: 203436 - protein, 150 aa, Oryza sativa
  Clone ID: PAT_MRT4530_98619C.1.pep
MRGACAGEQPAQDMVVFAFLDVVDVLLCFVYGFLYSVFEDNPASCYCHGSHNARHWRTTSRSTPPARPDSAPSPPSPFLPWKPSLVESRDWTQRFFQGLGVGAPLPAPVELHGTYSALVRGVLSSSTVSASASPCISCTLRRSPSPSPPS

SEQ ID NO: 203437 - protein, 723 aa, Oryza sativa
  unsure (1)..(723): unsure at all Xaa locations
  Clone ID: PAT_MRT4530_9861C.1.pep
RRRRRGFRRIPPSPRALKRGKITPVIPSPVSPSFPXLSPSDSFXIAPAILAGAINGXAEISAPVYSLFGRALPLSALYNRSPXPFFRFRRLPLALAFGFVLATFSSLSAVAADLRLAAVVAPVFLPTRRHLHRLRRVVADPVRPFASPADRRSSVAFVVPNRAAAFLRSGRRFRRPRCPGVSRGPSLSLPSPLRSLGRRSAAPVVAGXPSGRGRASPVGRAGEAAFGRLPRLPGGARPSAARARGMFNREKGKNVSGYASSNSSFQLNPPLASRELTRAHPWSIPSMPLSSQLPLVGSQDQNQYVFDRAFATQVNELPMPEEDVPFCHDCREQGHYALNCPWVYAKEAPSFGLAGQTSLNQPPHTKTSLQPSVQSREPNEENPLNPGNCSPPSLSYHVGSRTKHAKGKKSKNQKRKAPMRTEEEVRKMTITSTEWSTAGITIPRRQXGNTFRGARQLTQHLLSHGGRVSDSEGSDQVSSDYEDESPPHLGEEEMESKACPRCGEIGHIASMCLTLCPHCEEDHPPGECPTRKVTCFLCEGTNHVPKDCQLSVLLTKTAEIQRTTLRLSRQLVSSNSNIDDIIHSTNAPPAAPDSEKRKCRVREDICCFNCQGMGHFADKCPRPRNIAASTSVHATPCNQKLAPQRIVIHASRSSPIDRVATAPTPASALPQVVNAQFQPQPSVDKTEASXSALYLWMFQHSSQRNQVQDEEPERKKAIVCYKL

SEQ ID NO: 203438 - protein, 182 aa, Oryza sativa
  Clone ID: PAT_MRT4530_98620C.1.pep
MEREKKKWHLVSSCGGRRSHSGREVSLPGDKIWAKARVASKTTRTRGHTGVGVSPAGGETGGEKGHNRARKEGWRYELRLLDSWAALSATRLEDKRRFWESLRKGTDRRELATGFTVAAVVAVVAAYRATVTRWPRPTASSGEGRGLEDLSSSRQLPQAFGDRSMGLRGGGSPRNEVGHHLD

SEQ ID NO: 203439 - protein, 88 aa, Oryza sativa
  Clone ID: PAT_MRT4530_98622C.1.pep
FVFFFFFFFFFFFFFFGFKTFHYSFFVLITISLHATQQRLDPFNHEASQLRDGVAGRKNTALLGLNRENELPLSHLLPFPGQSPAGNP

SEQ ID NO: 203440 - protein, 113 aa, Oryza sativa
  Clone ID: PAT_MRT4530_98623C.1.pep
PPPQVTAVPSLLSVPLSSLPLRACLWHGCSAKPRQWRRSWRAVVQHRHRCPPPINAAPRSRRPPSTVPVGRRLAKHHRDGPSPRAASYHREKRRKKEKKEGRREKKNFMSSST

SEQ ID NO: 203441 - protein, 47 aa, Oryza sativa
  Clone ID: PAT_MRT4530_98624C.1.pep
GEAGGAVAQPDSPRGDGNSGANPQLRVDDGVAALQSYRGEVGVPRDR

SEQ ID NO: 203442 - protein, 71 aa, Oryza sativa
  Clone ID: PAT_MRT4530_98625C.1.pep
GSRQIQNWVNGLSFLHIQESRRGKKVHYVQQAYGEKNLYLQLLTKRIETKLNIRMDDTMKRMIIGQWWLHI

SEQ ID NO: 203443 - protein, 582 aa, Oryza sativa
  Clone ID: PAT_MRT4530_98626C.1.pep
MALTRRLLIDLSSRRRLFNAGKFSTTHKKKPVLHEAVSLAGFLRCSRALVSWMVAERKMQPSPAAPPAAEHRRRALLRYVVFLAVSLLAFSCWALVSSRIDGAVLAATAGGEHDDHDGIIVRSSTQAEMPARGGNATSRGAVEVGVGTPAAMITRQPSSGETTTTAALAATCDAESALLRVYLYDLPPEFHFGMLGWDGKAAGAAWPDVAGDPRAVPRYPGGLNLQHSVEYWLTLDILSSTTSGDHRRRRPCTAVRVTNASLADVFLVPFFASLSYNRQSKSPHGGHGSGGRSDRQLQGELVRYLARREEWRRWGGADHLVVPHHPNSMMDARRRLSAAMFVLSDFGRYPPDVANLRKDVIAPYKHVVPSLGDGDSPGFEQRPVLAYFQGAIHRKNFQLQKISGVGFFLAPKGGRVRQRLYQLIKDEKDVHFTYGSVRQNGIRRATKGMASSKFCLNIAGDTPSSNRLFDAIVSHCVPVIISDDIELPFEDVLDYSAFCVFVRASDAVKRGFLLHLLRGISQEEWTAMWRRLKEVAHHFEYQYPSQPGDAVQMIWGAVARKMHLVKLQLHKRGRYQRTFSES

SEQ ID NO: 203444 - protein, 187 aa, Oryza sativa
  Clone ID: PAT_MRT4530_98627C.1.pep
SSPTGQRSVPSSSPPSAGSRPSSTPATPATSICRRSTDSSSAPPPASLSRGSASTRRAAPSAADLSAAMASTSPTTLQSFASTWSRTSACSSSAWLTGTPVTATRRPPSSSDARGSCSATSRSSSSDATVTVAAGSDGDATVAFIVFVSRIRTPRPRSFPAPACLGLEAGLAVAVRSIELDARASAS

SEQ ID NO: 203445 - protein, 501 aa, Oryza sativa
  unsure (1)..(501): unsure at all Xaa locations
  Clone ID: PAT_MRT4530_98628C.1.pep
MAREQGGTEPSPGLGRMVVVEDFVRCGFLPPPSEFLLLILNFYGLSLLHLNPNSIAFLSIFAHLCEAYIGVVPFIYLFRFFYELRWMEGTRVSGCCGFRLRDGMKARYIPFQNHSSRGQWRSKWFYIKPLSDDAVVQRVGNVVITSASKAEEIPTPICDRPEVEKVAAINXVLPLMDVIGPLVDHXASASLKEKVVEEVAAAPSVPVTAWGSGTKRKPWARSSASAGSRQKSADLRILVAXPPPLKRRLVKRAADKKASTTSAQSGDEVVTSGTPVVTSPRAKSAPAAAESAEPAVVTTTVLRKSFTSLHQLALECSVKSSIPAHPNETSLTSALGELATKMEVIPSKHAAKVSEEISNGIHTGACHVLACVKLALPNADLKGILSKGADDATPCFPSHRNVDPEDVQQGGHPDVDATNQFSLSGMPSSDIGGVIGASVDVNAASGLSDLDVASLLREISDLRNTLGERDRQVLYWRTKFKVAELERSVVVVKKDQAIETL

SEQ ID NO: 203446 - protein, 178 aa, Oryza sativa
  Clone ID: PAT_MRT4530_98629C.1.pep
MGGSCATGRRWPAARHRATGGRGPATPYLATGGQRPTARATGGREPAAPHRAMGGRRPAAPHRATGGWQEGVGRQRPTARREGGGWRRPTSRRDDSGRRRARPGGGGWEPAAPHRATGGRRPPRDWRQSREVGKVLQTLARKLPAAHYPFQLRSAHSPAAPAAASSGRPTSGGGFEGN

SEQ ID NO: 203447 - protein, 340 aa, Oryza sativa
  Clone ID: PAT_MRT4530_9862C.1.pep
MVLANTAASGEELVADSHLLPAVAVGKLAGDKIREYASRRAAGGAGAPMAILSFGGTVLGVRPSPVVAAFSSRGPNTVVPEILKPDMIGPGVNILAGWSGVAGPTGLVKDGRRTHFNIISGTSMSCPHISGVAALLKAAHPEWSPAAIKSALMTTAYTVDNTNSSLRDAAGGLLATPFAFGAGHVDPQKALSPGLLYDISTKDYVSFLCSLNYTTPHIQVITKMSNITCPRKFRPGDLNYPSFSVVFKKKSKHVMRFRREVTNVGPAMSVYNVKVSGPASVSVKVTPAKLVFNKVGQKQRYYVIFASTVDASNAKPDFGWISWMSSQHVVRSPIAYTWKI

SEQ ID NO: 203448 - protein, 34 aa, Oryza sativa
  Clone ID: PAT_MRT4530_98630C.1.pep
NAKKGLFSTPRFFGYLESKKNMKVFKFSRSMFLA

SEQ ID NO: 203449 - protein, 63 aa, Oryza sativa
  Clone ID: PAT_MRT4530_98631C.1.pep
MGGGLGATATGTFSSPSPFYNPALKLVFLPRTNRPAPLRCGGGGGSLRPSRGCREAGLPFCPR

SEQ ID NO: 203450 - protein, 365 aa, Oryza sativa
  unsure (1)..(365): unsure at all Xaa locations
  Clone ID: PAT_MRT4530_98632C.1.pep
MPIYLETRGTSRISLVVHHIRRRTHSSSSSRLRFQRGGGAEQRRGMAAAQGSGVPAALALSSGHTMPSVGLGVWRMDSPAIRDLIHSALRIGYRHFDCAADYQNEAEVGDALAEAFQTGLVKREDLFITTKLWNSDHGHVVEACKDSLKKLRLDYLDLYLIHFPVATRHTGVGTTASALGDDGVLDIDTTISLETTWHAMEDLVSMGLVRSIGISNYDIFSLTXDCLAYAKIKPAVNQIETHPYFQRDCLVKFCQKHGILVTAHTPLGGSTANTEWFGSVSCLDDPVIKSLAEKYGKTPAQLVLRWGLQRNTVVIPKTSKEERLQENFAVFDFAISDEDMEKMRSIDRKYRTNQPAKFWGIDLFA

SEQ ID NO: 203451 - protein, 417 aa, Oryza sativa
  unsure (1)..(417): unsure at all Xaa locations
  Clone ID: PAT_MRT4530_98633C.1.pep
EDLVCPRTRLQNAVWSWLYKWVEPVMSSWAMSKLRGRALDRLMXHIHYEDENTQYLCICSVNKGLXALNMVCCWAEDPNSDAFKQHLARVPDFLWLSEDGMKAQVYDGCQSWETAFIIQAFCATDLVNEYASTVQRAHEFLKNSQVVRNHPGDQSYWHRHRSKGSWTLSSADNGWAVSDTTAEALKNKDGTVSTYECKRTSTWIEILKPCESFPNMVVDYPYPECTSSVLQALVLFKELCPGYRTEEIEECVRNASMFIENTQRKDGSWLGTWGVCFTYGAFFSVQGLIAAGRTYENSSSIRKACDFIMSKQLNTGGWGESHVSNETKVYVNIKGDHAHAVNTAWAMLTLIYAGQMERDPTPLHCAAKELINMQLETGEFPQQEHVGCFNCSLFFNYPNYRNLFPIWALGEYCNHLR

SEQ ID NO: 203452 - protein, 55 aa, Oryza sativa
  unsure (1)..(55): unsure at all Xaa locations
  Clone ID: PAT_MRT4530_98634C.1.pep
NLQVHGRYRCSTSTGSIPRXGQLATPKCHSTTYPYMEDFSVLEGYHHLYTDLKPT

SEQ ID NO: 203453 - protein, 71 aa, Oryza sativa
  Clone ID: PAT_MRT4530_98635C.1.pep
MSAARGGGRASSSAVEEELRALMEKRRAKMMLSNRESARMRKQRHLDDLTAQVAHLHRENVHVATALGLTT

SEQ ID NO: 203454 - protein, 220 aa, Oryza sativa
  Clone ID: PAT_MRT4530_98636C.1.pep
MMASSWIEILKPCESFPNMVVDYPYPECTSSVLQALVLFKELCPGYRTEEIEECVRNASMFIENTQRKDGSWLGTWGVCFTYGAFFSVQGLIAAGRTYENSSSIRKACDFILSKQLNTGGWGESHVSNETKVYVNIKGDRAHVVNTAWAMLTLIYAGQMERDPTPLHCAAKELINMQLETGEFPQQEHVGCFNCSLFFNYPNYRNIFPIWALGEYCWHLR

SEQ ID NO: 203455 - protein, 95 aa, Oryza sativa
  Clone ID: PAT_MRT4530_98637C.1.pep
CLMILMYHRLDHINFIAWTCCASSCTRTRTGSTSSTWTRTSPCSCHSSVASSCRLTVNKTATVCLATFAGTATIDMTCAIWDSSTAILSLDIEEC

SEQ ID NO: 203456 - protein, 247 aa, Oryza sativa
  Clone ID: PAT_MRT4530_98638C.1.pep
MDTASLCTVEKRGAVHVITLTGAGEHRLGPPLLSALRSAVAAVRAAAAAGAGGALVIAGEGKYFSNGFDLDWARTVPAELHASMGGAFRGLVADLLALPVPTVAAVTGHAAAAGCALALAHDAVVMRASRGFLYMSEVDAGLKIVDFFAELIRQKVPDAVNRRDLVLRGDKMTAADALRRGIVDAAVDGGVDDVVAAAVREAEALAARGWDGEIVAETRKAIWPELWAKVKDHATDEPPPPPPRPLL

SEQ ID NO: 203457 - protein, 68 aa, Oryza sativa
  Clone ID: PAT_MRT4530_98639C.1.pep
MVHPKGKPWNAAAVSRCASPERRRTMDVRVTAATPASAAGERWSAAGGRSEHEYQRRTQPHEKLHNFS

SEQ ID NO: 203458 - protein, 2063 aa, Oryza sativa
  unsure (1)..(2063): unsure at all Xaa locations
  Clone ID: PAT_MRT4530_9863C.1.pep
MSPSPTWKLPDLRYKRDPLGGPKXIESQNQHNSHSLRNPCTNVPQYLLYPVYGYHSSTVARQVGGLGAQGSTTMSSSFVDNNINTNHNQGFSASTMLVWTQVSEIVFPVYTTMPISASPSMTGNENAVATTQDDSMSKDPPAEAENGTSTTSELEKDSNAAKPCRSDKNHEPTRMTSKATRSWCPIHKTRKHTLQACWVFLNVRAEIRACKERGIQRISPTHDVYCPIHKTKNHDLSSCKVFLSAMKAPSPKVQQSHIPIRDKDKEQGATPISDRFVGVIDIDPHEPSVLHLLEDYGSLTTSAPQEVLAIDDVGTSACTNTEAENQVITPAQHIRAVNAILRETPYDPVLNDDLARWTERLRESVANLGNAFEEAAAAARPKQPPTGDANGENPKXRESPHRATPPPRGTDDLRDHLNSRREAXRTRNNENXFRHRVSSRRHNNGDSRHNRHDHDEHEQXGDTGRGQRHNDNDGGDRRRDNSGRRRQDSREPGRRPRTHAPEPSDPSSSSSSSSSSSDRHPRRTFDCRQPTAPSAGCRAFGRSLRDVRWPKRFQPGAIQKYDGSTDPEEFLQVYSTVLYATGADDNALANYLPTALKGSTRSWLMHLPPYSISSWADLWQQFVANFQGTYKRHAIKDDLHALTXNPGESLRDYVRRFNECRNTIPEITDASVIRALKSGVRDCYTTXELATRRITTTWRLFEIVDRCAHADDALRRKNDKPKTGGEKKPAKDAPESSKKKNCKSGKRKAQAEVLAAEYANPPKRPDPQGSDAKKAWYPIHKTDRHSLENCLVFKKLLEKHIAFEKGKRVRVVEKDAEAAAQESDSAYPDSDLHVSHIFXAPQRRYPIVFEPTIQNIKVARVLIDGGSSINLLFASALDAMGIPRSELTPTDQPFHGITPQSSSKPFGKITLPVTFGQANNFRTEQITFDVAEFDTAYNAIIGRTALAKFKAASHYAYQVLKMPRPKGTITVQGNAKLAVQCDKRSLDMVEQTPSPPATTKPPKKVSKTNKTPKLDGAIKIVPLSSANPDKTELALITFLRDNADVFVWQPSDMPGVPREVIEHKLMVRPNAKPVKQKLRRFAPDLKQAIREELNKLLKAGFIREVLHPEWLANPVMMRKANGKWRMCVDFTDLNKACPKDHFPLPRIDQLVDSTAGCELLSFLDAYSGYQQISMAKEDEEKTAFITPFGVFCYVKMPFGLITAGNTFQRTVXGALSDQLGNNVEAYVDDIVVKTKTSDSLIDDLREMFDNLRQYRLMLNPEKCTFGVPSGKLLGFLVSVRGIEANLEKIKAIENMKSPTRLKEVQKLTGCMAALSRFVAKMGERGQPFFALLKKQDKFVWTQEAKEAFVALKRYLSNPPVLVAPQPNEEIFLYIAATPYSVSTVIVVEREKIQRPVYYVSKALHDAKTRYSQIQKLLYAVIMTSRKLRHYFQAHRVTVVSSFPLGEVVRNKDVVSRIAKWVVELSQFDVHFVPQKAIKSQVLANFVADWTMPDNKSDNQVDNETWTMAFDGALNSQGAWAGFILTSPSGDQFKHAIHLNFRATNNTAEYEGLLAGIRAAAALGVKRLIVKGDSELVANXVHKDYKCSNPELSKYLAEVRKLEKRFDGIEVRHVYRKDNIEPDDLARRASRREPLEPGTFLDILTKPSVKEVSGEVSPAAPDISSEATEAERAVADIETTYDWRIPLIKFIDSEELPEDDTEAEKITRKAKIYCMVGNDLYKKAPNXVLLKCVSSDNGRHLLLDIHEGICGSHATGRTLVGKAFRQGFFWPTALKDACDMXTHKATRASAPDYPSYLAVLVLGARYTRTIPTRTGRLQVPIXVAIDKFIKWIEAVPTGEIKADNAIKFMKGIFCRYGLPHRIITDNGPQFISADFQDYCIGLGVKICFASVSHPQSNGQVERANGIVLQGIKTLLWAVRTTPTTSKKEIPFFLVYGSEAMLPSELRHQSTRVQKYSEEDQEEQQNIDVNLLEEHREXAAIRAASYKQVLRRYHEKRIRARILSISDYVLRRVQSQAGRNKLSPKWEGPYTITQVLWPGAFKIADGDGRELANSWNIDQLRKFYE

SEQ ID NO: 203459 - protein, 83 aa, Oryza sativa
  Clone ID: PAT_MRT4530_98640C.1.pep
GNISLVADARLKDLYDISSMWKVVDTAMLCISEVATQRPTMSTVVLQLKESLALEEARDSRDITTSSVSDAMDVLSKFGPSAR

SEQ ID NO: 203460 - protein, 167 aa, Oryza sativa
  Clone ID: PAT_MRT4530_98641C.1.pep
MEASKLAICSLFVLAVVAATMFHCSDAQNSPQDYLSPQNAARSAVGVGPMSWSTKLQGFAEDYARQRKGDCRLQHSGGPYGENIFWGSAGADWTAADAVRSWVDEKKYYNYASNSCAAGKVCGHYTQVVWRDSTNVGCARVRCDANRGIFIICNYEPRGNIVGRRPY

SEQ ID NO: 203461 - protein, 201 aa, Oryza sativa
  Clone ID: PAT_MRT4530_98642C.1.pep
MEEFFITHRISCGEIDARSFVEVEDEADRDDGEAAVRGAEGRRPQIEEAVVDVRAPPGTTPPPTPARKRTAAASPLGATPAPAPERKGMAAASLPGATPTPTPATERKGTTAASPRGTQSTTPARKGLAVASPPGKPLPTPGRKRNFVAGDWRGGREKERGNNFPPTRARQRRPRLGRKNGSLQMSNDIYGYGNLDYWDVG

SEQ ID NO: 203462 - protein, 108 aa, Oryza sativa
  Clone ID: PAT_MRT4530_98643C.1.pep
NYIPAPPLFLCIKKEHSFWSERRGRGEEVREATMALVAGHPGVVDPSRRPGSWRGRPEGGDGGGEGEQHRRGRGGGEDDVEVAANTMSRFSVVEGGAAPRTNGGEGEQ

SEQ ID NO: 203463 - protein, 401 aa, Oryza sativa
  unsure (1)..(401): unsure at all Xaa locations
  Clone ID: PAT_MRT4530_98644C.1.pep
MAGPPPPPQGAAGQPPQWGAIPPPMPPHQYGAPPPQQPPAMWGQPPPQAHYGQVPPPQPYYAAPPPQAMPAPAAADEVKTLWIGDLQHWMDESYIYNCFAATGEVQSVKLIRDKQSGQLQGYGFVEFTSRAAADRILQTYNGQMMPNVEMVFRLNWASAGEKRDDXPDYTIFVGDLAADVTDYLLQETFRVHYPSVKXGYGFVKFGDPTEQARAMTEMNGMLCSSRPMRIGPAANKKTTGVQERVPNAQGAQSENDPNNTTIFVGGLDPNVTEDVLKQVFAPYGEVVHVKIPVGKRCGFVQYVNRPSAEQALAVLQGTLIGGQNVRLSWGRSLSNKQPQHDSNQWGAGAGAGGYYGGYGQGYEAYGGYAQPQDPNMYGYGAYAGYPNYQQQQVAQQQPPQQ

SEQ ID NO: 203464 - protein, 313 aa, Oryza sativa
  unsure (1)..(313): unsure at all Xaa locations
  Clone ID: PAT_MRT4530_98645C.1.pep
MMQQPPSQPQPGMRGPPPPPQPAPGQPPEWGAVPPPQPYYAAPPPQAMPAPAAADEVKTLWIGDLQPWMDESYIYNCFAATGEVQSVKLIRDKQSGQLQGYGFVEFTSRAAADRILQTYNGQMMPNVEMVFRLNWASAGEKRDDTPDYTIFVGDLAADVTDYLLQETFRVHYPSVKGAKVVTDKMTMRSKGYGFVKFGDPTEQARAMTEMNGMLCSSRPMRIGPAANKKTTGVQERVPNAQGAQSENDTNNTTIFVGGLDPNVTGVVMKPVFAPYGEVIHVXISIGHRCGDGHFVNRLSAVQGLAVLQRSLIG

SEQ ID NO: 203465 - protein, 67 aa, Oryza sativa
  unsure (1)..(67): unsure at all Xaa locations
  Clone ID: PAT_MRT4530_98646C.1.pep
GPPLLSLFRRVLLSGELISFDLQQEDQINWHAHTFEGEXWTYIGVKQISQATCFLSTAGQNENGSVC

SEQ ID NO: 203466 - protein, 733 aa, Oryza sativa
  Clone ID: PAT_MRT4530_98647C.1.pep
MMTSGLPNFGVNSIVEGSNFYFYTKDTVDDLDDKQGQGFMSADDLEEVDIGPGIDQGRHLSIFMAKEDIHKTAFRCPGAISLFEWVVMTFGLKSAGATYQKAMNYIFHDLIGLLVEVYIDDVVVKSKQVEDHIADLRKVFERTRKYGLMMNPTTCAFGVSAGQFLGFLIHERGIEVSQRSINEIKKIQPPEDKTQLQSLIGKINFVRRFISNLSGRLEPFRPLLRLKADQEFTWGAEQQKALDNIKAYLSSPPVLIPPQKGVPFRLYLSADEKSINSVLIQELEGKERAIFYLSRRLLDAETRYSPMEKLCLCLYFSCTKLRHYLLSNECTVVCKADVIKYMLSALVLKGRVGKWIYALTEFDLRYESPKAIKGQAIADFIVEHPDDSIGSVEIVPWTLFFDGSLCTPGCGIDLVIISPRGASFEFAYTIKPYATNNQAEYEADLKGLQLLKEVEADAVEIMGDSLLVINQLAREYECKNDVLMIYNEKCRELMNYFRLVTLKHVSREQNVEANDLAHGALGYKPMMKDIEVEVAAITADDWRYDVYQYLQNSSQSASRKLRYKALKYTLLDDELYYQTIDEVLLKCLSADQAKVVMGEVHEGICGTHQSAHKMKWLLRRTRYFWPTMLEDCFRYYKECQDCQKFGAIQRALASAMNPIIKPWPFRGWGIDMIGQINPPSSKGHKFILVATDYFTKWVKAIPLKKVDSGDAIQFVKEYIIYRSGIPQTITTDQ

SEQ ID NO: 203467 - protein, 517 aa, Oryza sativa
  Clone ID: PAT_MRT4530_98648C.1.pep
MALLSAPVRRRRSRVRVLLVCCCLLLALAAPSAAAAAAGHDYGDALAKSILFFEGQRSGRLPAAGQRAAWRGDSAVSDGGAAGVDLEGGYYDAGDNVKFGFPMAFTATMLAWGVVEFGDAMPPAERAHAADAVRWATDYLLKTISHPGVIFIQVGDPTKDHGCWERPEDMDTARTVYNISAARPGSDVAGETAAALAAASMVFRDDDPAYAARLLAGARSAFEFADEHKGAYSDDPELRAGGCPFYCDFDGYQVRDELLWGAAWLRRASKEGTYLDYIQNNGKTLGAEDSTNEFGWDNKHAGINVLVSKEFIDGEVLSLQSYKEFADGFICTLIPESSSPHITYTPGGMIYKPGGSNMQHVTSISFLLLTYAKYLSNSSRTVNCGNVSVGPATLQQLARKQADYILGDNPMKMSYMVGYGDRYPQRIHHRGSSLPSIKSHPQRIACNDGTPYYNSSSPNPNPLIGAVVGGPGEDDVYEDDRADFRKSEPTTYINAPLVGVLAYLVGNPDPGQGHVRH

SEQ ID NO: 203468 - protein, 868 aa, Oryza sativa
  unsure (1)..(868): unsure at all Xaa locations
  Clone ID: PAT_MRT4530_98649C.1.pep
IDPTLSRTQLRLPNFGVNSIVEGSNFYFYTKDTVDDLDDKQGQGFMSADDLEEVDIGPXDRPRPTFISKNLYAEFRAKLIELLKEYRNCFAXEYYEMPGFSRSIVEHRLPIKLGYKPHQQPLRRCKAQMYDAIKAKITRLYDAGFIQPCRYVEXVSNLNKATPKDEYPMPIADQLIDATSGHKIISFMDGNAGYNQIFMAKEDIHKTAFRCPGAISLFEWVVMTFGLKSAGATYQKAMNYIFHDLIGLLVEVYIDDVVVKSKQVEDHIADLRKVFERTRKYGLMMNPTTCAFGVSAGQFLGFLIHERGIEVSQRSINEIKKIQPPEDKTQLQSLIGKINFVRRFISNLSGRLEPFRPLLRLKADQEFTWGAEQQKALDNIKAYLSSPPVLIPPQKGVPFRLYLSADEKSINSVLIQELEGKERAIFYLSRRLLDAETRYSPMEKLCLCLYFSCTKLRHYLLSNECTVVCKADVIKYMLSALVLKGRVGKWIYALTEFDLRYESPKAIKGQAIADFIVEHPDDSIGSVEIVPWTLFFDGSLCTPGCGIDLVIISPRGASFEFAYTIKPYATNNQAEYEADLKGLQLLKEVEADAVEIMGDSLLVINQLAREYECKNDVLMIYNEKCRELMNYFRLVTLKHVSREQNVEANDLAHGALGYKPMMKDIEVEVAAITADDWRYDVYQYLQNSSQSASRKLRYKALKYTLLDDELYYQTIDEVLLKCLSADQAKVVMGEVHEGICGTHQSAHKMKWLLRRTRYFWRTMLEDCFRYYKECQDCQKFGAIQRALASAMNPIIKPWPFRGWGIDMIGQINPPSSKGHKFILVATDYFTKWVKAIPLKKVDSGDAIQFVKEYIIYRSGIPQTITTDQ

SEQ ID NO: 203469 - protein, 223 aa, Oryza sativa
  Clone ID: PAT_MRT4530_9864C.1.pep
TAGGCGGGRGSTTTTTTGRPARWRPRESRSRRRCQRRKAEGGRPLRRRRSGRPAVGRTELARAAGGGGGGGRRSPTSSSSTGDAAAAGRTATPTSSPRTSMPGPGRHSRRREARGWRRWWRWRSRRRQGAACPPRRRRAAARAATGPGRRGSTAVRARLARAPPPPQPARASSASVSAARRHPPPAAPPDPALERSPPCALLHPHSFGTVHLSRRPPPGCQLP

SEQ ID NO: 203470 - protein, 48 aa, Oryza sativa
  Clone ID: PAT_MRT4530_98650C.1.pep
RIMQPSYVILLQPGQYFLQFVGAKFVPVHLIFSYLLLLSILTSGEVQC

SEQ ID NO: 203471 - protein, 344 aa, Oryza sativa
  Clone ID: PAT_MRT4530_98651C.1.pep
MAAAAAGGGGGGGVSGRLLRGATAKAFHGDGSSHHRMMPSSSSSVAAGGGGGVAGPCRIPSLKFPSLWESKRQGGGVGSRAAERKAALIALGAAGVTALERERGGGVVLLPEEARRGADLLLPLAYEVARRLVLRQLGGATRPTQQCWSKIAEATIHQGVVRCQSFTLIGVAGSLVGSVPCFLEGCGAVVRSFFVQFRALTQTIDQAEIIKLLIEAIDMFLIGTALLTFGMGMYIMFYGSRSIQNPGMQGDNSHLGSFNLKKLKEGARIQSITQAKTRIGHAILLLLQAGVLEKFKSVPLVTGIDMACFAGAVLASSAGVFLLSKLSTTAAQAQRQPRKRTAFA

SEQ ID NO: 203472 - protein, 137 aa, Oryza sativa
  unsure (1)..(137): unsure at all Xaa locations
  Clone ID: PAT_MRT4530_98652C.1.pep
SLTTVRQGDPLSPLLFVLGAELLQVIINKAYTLGLLSKPIPNENDLDFPIVQYADNTLLYVKASGKELFTLKALLXFFAQRTVLKVNYHKSCLIPINIDEEKAQILAGVFXCQVGSLPFTYLGLPLPERHPMSSDFC

SEQ ID NO: 203473 - protein, 116 aa, Oryza sativa
  unsure (1)..(116): unsure at all Xaa locations
  Clone ID: PAT_MRT4530_98653C.1.pep
KLAEQLVXLSQXLMDDINVGYERLAELQVKKVNGVEVENLKHLCSLVESCTEENLRFDLDDERVIVLKYQNAKLATSRILKRHRIPSAISADLVDEQATDDGEEATNGEIEASCTS

SEQ ID NO: 203474 - protein, 312 aa, Oryza sativa
  Clone ID: PAT_MRT4530_98654C.1.pep
MAVLVCHLGFSKVKKALSLGSERRPCESIAIVHDFADRIVHIVVVLEPHPPQCRTPPMARRARLGALLAAISLSSMAGSGHSSHNGMPIMVSILVVVIICTLFYCVYCWRWRKRNAVRRAQIESLRPLSNSDLPLMDLSSMYDATNQFSKENKLGEGGFGPVYRGVLGGGAEIAVKRLSARSRQGAAEFRNEVELIAKLQHRNLVRLLGCCVEKEEKMLIYEYLPNRSLDAFLFDSRKRAQLDWKTRQSIILGIARGLLYLHEDSCLKVIHRDLKASNVLLDNKMNPKISDFGMAKIFEEESNEHKSYLNLY

SEQ ID NO: 203475 - protein, 103 aa, Oryza sativa
  unsure (1)..(103): unsure at all Xaa locations
  Clone ID: PAT_MRT4530_98655C.1.pep
ESENRTLAQTERHTRTREQATKALTEKNARDMHVQRQHAERHRISQTMDSEINPXXXGKESNWRASLSTXXYVLWPECGWQPVSXLTDXITAAAATTVYRKAT

SEQ ID NO: 203476 - protein, 50 aa, Oryza sativa
  Clone ID: PAT_MRT4530_98656C.1.pep
LEWSELPSNRHRGFISAVQPKPGSNSQTRGRPIQPTTSLVAYSTAPLRRL

SEQ ID NO: 203477 - protein, 170 aa, Oryza sativa
  Clone ID: PAT_MRT4530_98657C.1.pep
YELSFALARPTYLVVASHHLLLLFQRRPWRRPRRRRRRVVVGLSRSPPPPPSRCPAPSSSSPSAAPRGPRRRRRRRRRRRLPSAPASPPPPPPPQRGGGGGAGGGCGSRRTSSTMRAPPARRGGSRRRRSTRAGATRRRPRRRSGCRRTGRRCTAACSATAPPTGSPTPA

SEQ ID NO: 203478 - protein, 125 aa, Oryza sativa
  Clone ID: PAT_MRT4530_98658C.1.pep
NCIMRFVQGWETTHLNQSNLAMSQPVANNGSNSATQPVPHHIWGNGPNLAMVHPTNTLSPLHNQLVHDWPWSLQHVPRYWEKRVGGSVSQLGMEVVPSRLHCLWLQNNTVNLSTFWFALLLFVYI

SEQ ID NO: 203479 - protein, 208 aa, Oryza sativa
  Clone ID: PAT_MRT4530_98659C.1.pep
MASTLPVRGAMAGGAQGHGDDDDLGTVLSGASGQQPGARERSDIQIGHGDELLGAPGCSIGEKSTWTAACSKWRLRRRGFGRIQGRRRLRRALNFLFHTDLSTETNKTRREISAGGSGSGGDAFERRRSPAAVARGRRLRRQQRRRPTRRCTDPTAALAGGGRGRWRRRLRADSDGRWGDACRRNSGIRQRQLRASPADTVTNPPSRF

SEQ ID NO: 203480 - protein, 1645 aa, Oryza sativa
  unsure (1)..(1645): unsure at all Xaa locations
  Clone ID: PAT_MRT4530_9865C.1.pep
MSSSFVDNSVNTNLNQGVPASTMLVLTQVGEIVLPVYTMVLISTGPSMIGSENAVATTQDDSMSKDPPAEAENGTSTTSEPEKDPSAAKSCLSDKNHEPTRMTSETKNHDLSSCKVFLSAMKTSPPKVQQSRIPLRDEDKEQGATLISDRFVEVIDIDPHEPSVLHLLEDYGSSSTSTPREVLAIDGTSTSVRVNAEAENQVTTPAQHIRAVNAILRETPYDPVLNDDLARWTERLRESVTNLSNAFKEAAAVAHPEQPPTGGANGENPEQRESPHRATPSPRGTGDLRDHLNGRREAFRPRAIEKYDGSTDPEEFLQVYSTVLYAAQADNNALANYLPTALKGSARSWLMHLPPYLVSSWANLWQQFVANFQGTYKRHTIEDDLHALTQNSGESLRDYVRRFDECRNTIPEITDASVIRTFKSGFRDRYTTQELATRRKNDKPKTGGEKKPAKDAPESSKKKNRKSRKRKAQAEVLATEYADPPKRLDPQGSDTKKTWCPIHKSDRHSLEDCLVFKKSLAKHMALEKGKRKIEFSEEDRPKTAVIPERYPIVVEPTIRNIKFARVLIDGDSSINLLFASTLDAMGIPRSELTPTGQPFHGITPQSSSKPLGKITLRVTFSQANNFRTEQITFDVAEFDTTYNAIIGRTALARFMAASHYAYQVLKMPGPKGIITIQGNVKLAIQCDKRSLDMVEHTPSPPATAEPPKKPSDMPGVPREVIEHKLMVRPDAKPVKQKLQRFAPDRKQAIREELDKLLKVGFIGEVLHPEWLANPVMVWKANGKWRMCVGFTDLNKACPKDHFPLPRIDQLVDSTAGCKLLSFLDAYSGYHQISMAKEDEEKTAFITPFGVFCYVKMPFGLITAGNTFQRTVQGALSDQLGNNVEAYVDDIVVKTNTSDSLIDDLRETGIEANPEKIKAIENMKSPTRLKEVHKLTGCMAALSRFVARMGERGQPFFALLKKQDKFVWTQEAEEAFIALKRYLSNPPVLVAPQPNEELFLYIAATPYSVSTVIVVEREKVQRPVYYVSEALHDAKTRYPQIQKLLYAVIMTSRKLRHYFQAHRVTVVSSFPLGEVVKNKDVVGCIAKWVLELSQFDVHFVPRTAIKSQVLADFVADWTMTDNRSDNKIDSETWTMAFDGALNSQGAGAGFILTSPSGEQFKHAIHLNFRATNNIAEYERLLAGIRAAAALGVKRLVVKGDSELVANQVHKDYKCSSPELSKYLAEVRKLEKRFDGIEVRHVYRKDNIKPDDLARRASRREPLKPGTFLDILTRPSVKEASGEDSPVALNNSSGATEAERAVADIETTDDWCTPLIKFIEAEKITRKAPNGLLLKCVSSDDGIHLLLDIHEGICGSHAAGRTLVGKAFQQGFFWPTALKDACDMXRHTWAIPTRTGRLQVPIXVAIDKFTKWIEATPTREIKADNAIKFIKGIFCRFGLPHRIITDNGSQFISADFQDYCIRLGVKICFASVSHPQSNGQVERANDIVLQGIKTHVYDRLMSHDKKWVEELPSVLWAMRTTPTTSNKETPFFLVYGSEAMLPTELRHQSKRVQKYSDEDQEEQRNDDVNLLEEHRERVAVGAASYQQALRRYHEKRIRARTLSIGDYVLRLVQIQAGRNKLSPKWEGPYTITQVLRPGAFKIADGDG

SEQ ID NO: 203481 - protein, 89 aa, Oryza sativa
  Clone ID: PAT_MRT4530_98660C.1.pep
MGTMWSLSVMTSKAIGGEQEQWMHHAWALAPPLVLPPAPSSPLLLFHFLAEATALDGVARDDNNTSDLNGAAHKDELEGNILFSTAILL

SEQ ID NO: 203482 - protein, 175 aa, Oryza sativa
  unsure (1)..(175): unsure at all Xaa locations
  Clone ID: PAT_MRT4530_98661C.1.pep
MTEAPFVPREKLFKQQQYFQNLTKHTYLKGRYDVITSVAIPLALAGTSLFMIGRXGVYNXMSHGIGEKRVGGSVSQLGMEVVPSRLHCLWLQNNTVSLSTVFVSLLSLFAGWHQLVHDWPWSLQHVPRYWEKRVRGSVSQLGMEVVPSRLHCLWLQNNTVNLSTFWFALLLFVYI

SEQ ID NO: 203483 - protein, 100 aa, Oryza sativa
  unsure (1)..(100): unsure at all Xaa locations
  Clone ID: PAT_MRT4530_98662C.1.pep
PPARQVNHLFADPPAPPPPPPPASSDPRVSAVEDXEAPFVPREKLFKQQQYFQNLTKHTYLKGRYDVITSVAIPLALAGTSLFMIGRGVYNMSHGIGKKE

SEQ ID NO: 203484 - protein, 38 aa, Oryza sativa
  Clone ID: PAT_MRT4530_98663C.1.pep
MKKSSQIRQGWMKPPEGKVMVNVDAAFDEDRGLYAFKT

SEQ ID NO: 203485 - protein, 47 aa, Oryza sativa
  Clone ID: PAT_MRT4530_98664C.1.pep
WSTKLTRSAPNTLELTLATTEPSPMVLSFDTLAPSTVSRHSAPLHLA

SEQ ID NO: 203486 - protein, 148 aa, Oryza sativa
  unsure (1)..(148): unsure at all Xaa locations
  Clone ID: PAT_MRT4530_98665C.1.pep
IRHEATATMATAAGAAALLYYTLNXRLQCGEAXIRKAGNERDAATRGALSTTSRSRVSRRDVRAPATWLETISTLSETLRFTYSETLGKWPIGDLAFGISFLLKRQGNVPVASIYAGDDSVELNGAPVIADLKHLLNLLTLCWHFSKK

SEQ ID NO: 203487 - protein, 124 aa, Oryza sativa
  Clone ID: PAT_MRT4530_98666C.1.pep
MATKYITLSEVALHAIIIACPLLETLLLEHIYGFHCVRISSPRLRASRNSGYSVANESANPGCPLSQMIAISCPCLSHFSGVASKLEIMGWLGISMLKLGIIEIQLYSEVYAIMKIRIEDRRSV

SEQ ID NO: 203488 - protein, 54 aa, Oryza sativa
  Clone ID: PAT_MRT4530_98667C.1.pep
MSADSLRARHAPIHHNNYAAPSNERIPPSDHLRAAGRDMQKHEKELNLGLYHTS

SEQ ID NO: 203489 - protein, 163 aa, Oryza sativa
  unsure (1)..(163): unsure at all Xaa locations
  Clone ID: PAT_MRT4530_98668C.1.pep
PPPPPGGKIIFPPGGKKKGGPPRGVRAPPKRGFPPPPPFSPRAPPKPPLGRGGGAPNSPRGGGVPFLFPKIRRPPQPRREKKIGXPPPRKKMPPPPPQGAQGGRRTPSRISPDGGGPFSPPASAAAAAAGFDRGDDLRGMARGFLRVSPSLRRIEKTIEERGR

SEQ ID NO: 203490 - protein, 477 aa, Oryza sativa
  Clone ID: PAT_MRT4530_98669C.1.pep
MSSFQLLLHSLLLLLVVGGVAGGGGGGGRLRAPSLEFHHRFSSPVQRWAEARGHVLPGGWPEHGSADYVAALNGHDRRRALSAAGGDGGGGGDKPPPLTFSEGNATLKVSNLGFLHYALVTVGTPGQTFMVALDTGSDLFWLPCQCDGCTPPASAASGSQVGTEYLITRPLFNPARASFYIPSMSSTSQAVPCNSQFCELRKECSTTSQCPYKMVYVSADTSSSGFLVEDVLYLSTEDAIPQILKAQILFGCGQVQTGSFLDAAAPNGLFGLGIDMISIPSILAQKGLTSNSFAMCFSRDGIGRISFGDQGSSDQEETPLDVNPQHSSEDRIQTPSISLRTVGGSVFPVIDEGQVISIQQHEYVYCLAIVKSAKLNIIGQNFMTGLRVVFDRERKILGWKKFNCYDTDSSNPLSINSRNSSGFSPSAPENYSPEETKGGNPASVTQLRPLSNSNPVMWYDSLVFRFLLVNLAALILF

SEQ ID NO: 203491 - protein, 210 aa, Oryza sativa
  unsure (1)..(210): unsure at all Xaa locations
  Clone ID: PAT_MRT4530_9866C.1.pep
TPAPPPPPPARLASSWAAARRRRPTPHRLQSVRGEEVGVAVLPAAAASPVDEEEVGERLPPPPPPPAARASSASRCRPPAPPPSQPPAALRPPPLAATPAPSSPPTTTRRRDXHPPLDSLPNNPEQAGRSSSSRSPSPSPSSPSPSPRPPPPCSPRSPKPGARRPPRRSPPRLPRAPAARPPPPVAPLPAAPRPPPRQPPSWRPRRPSPP

SEQ ID NO: 203492 - protein, 147 aa, Oryza sativa
  unsure (1)..(147): unsure at all Xaa locations
  Clone ID: PAT_MRT4530_98670C.1.pep
AGGGSRRRRRHHSRWQDPGVDAVVVVAAVIIIVAEASLQWIRAPRRADDGRSKWHCRRHRSRRRVEERREHASRQMGGGGARRRVGGGGAGXWLGGRRSGASRRAGGGGAQRQPGGQRSGASRRAGKGGERRRSSAASRPADEGAAR

SEQ ID NO: 203493 - protein, 187 aa, Oryza sativa
  Clone ID: PAT_MRT4530_98671C.1.pep
MSDVVAMAGQAYMRQLQAHPLRTKAITSGVLAGCSDAIAQKISGVPNLQRRRLLLIMLYGFAYAGPFGHFLHKLMDRFFKGKKGKETTAKKVLVEQLTASPWNNMMFMMYYGLVVEGRPFSQVKSKLKKDYASVQLTAWKFWPIVSWINYEYMPLQLRVLFHSFVASCWAVFLNLKAARSIATSKKA

SEQ ID NO: 203494 - protein, 103 aa, Oryza sativa
  unsure (1)..(103): unsure at all Xaa locations
  Clone ID: PAT_MRT4530_98672C.1.pep
TTMSEVFHVFFLMKMIWSCGKLLWQSLLLSRVKIFMWLALKGRCLMADNLQKRXWPHQANCSLCNLTFQDXPNLFGQWAFTNRIWRLLKSXVNVGFPLPSDLN

SEQ ID NO: 203495 - protein, 246 aa, Oryza sativa
  Clone ID: PAT_MRT4530_98673C.1.pep
MAASPPGAIVINMASNTNGESTAVTTNNLAPSTPKAVDESTTSSKTDVATKTVTDKVMASTANLAQLLPTGTVLAYQALSPSFTNHGECNAANKWLTAVLVGVLAGLSLFFSFTDSVVGQDGKLYYGVATRRGLNVFNMSREEEEAKKLSHSELRLRPLDFVHSFFTAMVFLTVAFSDVGLPKGFFPDAGNDTKELLKNLPLGMAFMSTFVFLLFPTKRKGIGYTDTTPRPAPETNKPTQVSDHMP

SEQ ID NO: 203496 - protein, 336 aa, Oryza sativa
  Clone ID: PAT_MRT4530_98674C.1.pep
MSSSSSPPPNPDALSSPDLPPLAAPAAAAAAAAAAVSSGGAGGSGRRLPPPCWTHEETLALIEAYRDRWEGLRKGNLRASDWDDVAGAVTARCGRFPTATHKSGVQCRHKIEKLRKRYRAERARAAGRSKGPKWPFFPLLHDLAGGGAPDPSPNPIIKIKSKGPAAAAASPSPASPSPVSSPSSEEDEEEEAAADAGRSRSLHGLISNGGSGSGLRFTIPKASRSKPVAQREQPTAIKVEKSEEDAEAEAMAEVASALRAVGDKFLRMEERRLEISLQIEKERMESEMKRTQTLLDAQQLFVEAFLGKQQHHHHHHKKAKVISAAAAAATAAMDED

SEQ ID NO: 203497 - protein, 73 aa, Oryza sativa
  Clone ID: PAT_MRT4530_98675C.1.pep
KVYHFKKQKLIRKNKTISRAWSYTDTIRHVRVGERHVPTLLELAKVTFLLARLWLVVPPLGKLVVLLLQVDHI

SEQ ID NO: 203498 - protein, 430 aa, Oryza sativa
  Clone ID: PAT_MRT4530_98676C.1.pep
PKVGGYSAKSRPWVSKLVAGFLKKQLRNRGNKQQQQQLGGEAASGAAPPLVINITVGTPVAQTVSGLVDITSYFVWAQCAPATAFRPNGSATFSPLPCSSDMCLPVLRETCGAGARCDSYSLTYGGSAANTSGYLATDTFTFGATAVPGVVFGCSDASYGDFAGASGVIGIGRGNLSLISQLQFGKFSYQLLAPEATDDGSADSVIRFGDDAVPKTKRGRSTPLLSSTLYPDFYYVNLTGVRVDGNRLDAIPAGTFDLRANGTGGVILSSTTPVTYLEQAAYDVVRAAVASRIGLPAVNGSAALELDLCYNASSMAKVKVPKLTLVFDGGADMDLSAANYFYIDNDTGLECLTMLPSQGGSVLGTLLQTGTNMIYDVDAGRLTFETAPAAAAPSISASSRQKIDHAWRRVGPCSPRSPCDILICAPMFSR

SEQ ID NO: 203499 - protein, 53 aa, Oryza sativa
  Clone ID: PAT_MRT4530_98677C.1.pep
LSYIQQEFIIKLLHHCLTHLWGFLNLLLQSLLILSDLSHGYNKELPPHLVLQD

SEQ ID NO: 203500 - protein, 88 aa, Oryza sativa
  Clone ID: PAT_MRT4530_98678C.1.pep
KRKKRKNNKKIEKEKRKRNRRKRKEKRRKEKEEKKKKIRGKKKIEKKKKERKDRKKKKEEKKEKEKKEEKRKTKKEDKTKKKKKRKRT

SEQ ID NO: 203501 - protein, 71 aa, Oryza sativa
  unsure (1)..(71): unsure at all Xaa locations
  Clone ID: PAT_MRT4530_98679C.1.pep
KYDINLYXKGGQFVPNLQQHTIRRHRTFIHLNHPLTPNACNHTCAHLSFYQHKTPTAPEATHALNSTHPFT

SEQ ID NO: 203502 - protein, 91 aa, Oryza sativa
  Clone ID: PAT_MRT4530_9867C.1.pep
CYYTCTTVITDILFYAVSGSPSQLAYLLIVRGVITTFWLPKHVGIVSNVQFHLNCSCFLNWYLRLFHVLQSSNRLTEHGYLCISIHYFETP

SEQ ID NO: 203503 - protein, 134 aa, Oryza sativa
  unsure (1)..(134): unsure at all Xaa locations
  Clone ID: PAT_MRT4530_98680C.1.pep
MTLAAAATVAFERDGQRGGGRGSLIPPVAPLTRASKGAAVGDDDLSRIKAVDVTVPGGVALTDGSLPSGCEDRGYGGGGGGDRACYKCGKEAHMAKDCSQGXATTAREDRPSCFAGRPLRPASVVTCSGRPTAS

SEQ ID NO: 203504 - protein, 149 aa, Oryza sativa
  unsure (1)..(149): unsure at all Xaa locations
  Clone ID: PAT_MRT4530_98681C.1.pep
SFHHNSFFLVQQGLVSTHGYXNMYICGNFNLSHRSIQLLLAYSHPLSRGFYLSSGETXHLTRGCIGFRSSAKGXVLRSASPGNCIGYNGVVQGCIASTSWIALVRLIFLPTYLSYILVNLVLVYRFSHISXFSLKGLCRYRLNRFTRLD

SEQ ID NO: 203505 - protein, 797 aa, Oryza sativa
  Clone ID: PAT_MRT4530_98683C.1.pep
MAALLYLTILSSLSFHLCSCASPWRTMTTGSHIRAEDHDKIFLLSPDTTFSCGFHQLGTNAFTFSIWYTHTTEKTAVWTANPYSPANGGYSPVNLYGSRVSLGHDGNLVLTDTNGTTVWESKTSSGKHTTVTLLDTGNLVIKDSSNSTVWQSFDSPTDTLLPWQNLTKNIRLVSRYHHLYFDNDNVLRLLYDGPEITSIYWPSPDYNAEKNGRTRFNSTRIAFLDDEGNFVSSDGFKIEATDSGPRIKRRITIDYDGNFRMYSLNESTGNWTITGQAVIQMCYVHGLCGKNGICDYSGGLRCRCPPEYVMVDPTDWNKGCEPTFTIDSKRPHEDFMFVKQPHADFYGFDLGSNKSISFEACQNICLNSSSCLSFTYKGGDGLCYTKGLLYNGQVYPYFPGDNYMKVPKNSSKSTPSISKQQRLTCNLSAPEIMLGSASMYGTKKDNIKWAYFYVFAAILGGLESLVIVTGWYLFFKKHNIPKSMEDGYKMITNQFRRFTYRELKEATGKFKEELGRGGAGIVYRGVLEDKKIVAVKKLTDVRQGEEEFWAEVTLIGRINHINLVRMWGFCSEGTNRLLVYEYVENESLDKYLFGERCHESLLSWSQRYRIALGTARGLAYLHHECLEWVVHCDVKPENILLSRDFDAKIADFGLAKLAKRDSTSFNFTHMRGTMGYMAPEWALNLPINAKVDVYSYGVVLLEIVTGIRVSSGIVVDERQVEFPEFVQEAKKIQATGNVTDLVDDRLHGHFDPEQVITMVKVALSCLEERSKRPTMDEILKALMLCDDEDDYHPAYSY

SEQ ID NO: 203506 - protein, 278 aa, Oryza sativa
  unsure (1)..(278): unsure at all Xaa locations
  Clone ID: PAT_MRT4530_98684C.1.pep
MSDGEEKREIAVWFLSNAPAGEIHYVAKDVRALLGDEAVYEAAAAEAFPEHNKAHLVALEGPDRSGDIIITTYGELDKNNYLDPRTAQVATVDHIKQKCTKLRAAADEELPSAYIEDFRSALDVELSKYVGEAYPKGVCAVYCTSGKDIEGPGVDFRFAAVISAAKRSPQNFCNGNWRSIWTLGNKEGLQLVEIKGKIQVGAHYFEEGNVQLDTNIDCKDSTILQSPGGRAEYQTHTTRGHEREXLATPGGTNQRMCEAPPTGLRGGHPATRALFPPG

SEQ ID NO: 203507 - protein, 74 aa, Oryza sativa
  Clone ID: PAT_MRT4530_98685C.1.pep
MARGWGKDKEGEGGFYRLRVWPPHFGGQPVASSFFPWIFTMVVVPAIVPALNRELWLEQCIREVVERSGINGTG

SEQ ID NO: 203508 - protein, 865 aa, Oryza sativa
  Clone ID: PAT_MRT4530_98686C.1.pep
MASTAAIAALALVFFVLLCVRDGGGVDAADTLSQGQSLGANDMLVSANGTFKVGFFTPAGGDPGKVYLGVMYATSNVQTVMWVANRDAPVRTAAGAASATVTGSGELLVKEGDRVAWRTNASAAGRSKHTLTIRDDGNLVISGSDAAGTDVEWESFHHPTDTFVPGMEIALRQTNGDRTLYTSWRSDADPATGDFTLGLDASAQLYIWRSQGGKNSTYWRSGQWASGNFVGIPWRALYVYGFKLNGDPPPIAGDMSIAFTPFNSSLYRFVLRPNGVETCYMLLGSGDWELVWSQPTIPCHRYNLCGDNAECTADDNEPICTCFTGFEPKSPQEYNNGNWTQGCVRSVPLTCSSERNNTTAGGAGAGGGDGFTVIRGVKLPDFAVWGSLVGDANSCEKACLGNCSCGAYSYSTGSCLTWGQELVDIFQFQTGTEGAKYDLYVKVPSSLLDKSSGRWKTVVVVVVVVVVVVLLASGLLMWKCRRRIKEKLGIGRKKAQLPLLRPARDAKQDFSGPAQSEHEKSEEGKNCELPLFAFETLATATDNFSISNKLGEGGFGHVYKGRLPGGEEIAVKRLSRSSGQGLEEFKNEVILIAKLQHRNLVRLLGCCIQGEEKILVYEYMPNKSLDAFLFDPERRGLLDWRTRFQIIEGVARGLLYLHRCARLRVVHRDLKASNILLDRDMNPKISDFGMARIFGGDQNQVNTNRVVGTLGYMSPEYAMEGLFSVRSDVYSFGILILEIITGQKNSSFHHMEGSLNIVGYAWQLWNGDRGQELIDPAIRGTCPAKEALRCVHMALLCVQDHAHDRPDIPYVVLTLGSDSSVLPTPRPPTFTLQCTSSSSGRDMYYRDKEESYSANDLTVTMLQGR

SEQ ID NO: 203509 - protein, 71 aa, Oryza sativa
  Clone ID: PAT_MRT4530_98687C.1.pep
MAAATMALSYPALAGKAAAKVFGEGRITMRKSAAKPKPAASGSPCYRPDHVLYLCRLSSEPSSYLTGECLR

SEQ ID NO: 203510 - protein, 76 aa, Oryza sativa
  Clone ID: PAT_MRT4530_98688C.1.pep
GTSLPASDSEAHWPGFDTHFFVAIPAILQISHPVRLGLTCDVVGIVGTVGRSNGSCMLVFSVKGKRIPSCSLLTVK

SEQ ID NO: 203511 - protein, 31 aa, Oryza sativa
  unsure (1)..(31): unsure at all Xaa locations
  Clone ID: PAT_MRT4530_98689C.1.pep
NPSSYTSEVRGGGNNRQDRREQXPSWSQLLH

SEQ ID NO: 203512 - protein, 244 aa, Oryza sativa
  unsure (1)..(244): unsure at all Xaa locations
  Clone ID: PAT_MRT4530_9868C.1.pep
MDWGRGAVDGVRHDAAKLLVAAAQREVDRRGGAAWLEVAMAKVARVGGGMGVSVRNWGNEVEAATGRAAVVAGWRALACGGNGERXGRARECAASTGKMGKRTREVRDAFLXARGGDEEAXSGGFGVAMASDVGDIVGEVGARFGAKNXGKVGDLVEEVEGNRFYAVWARGREREDXRNWWRRGRQRPSMAAFAPGTEAQSPTWPGTFGDVGPEGEVSALLLISPEGGSGCVCPGPEGRSTPTP

SEQ ID NO: 203513 - protein, 446 aa, Oryza sativa
  Clone ID: PAT_MRT4530_98690C.1.pep
MKLAKTNTFGVWGSNSNSKIAPPMIRSGLPTHRSQLTSLASRGAAPIQDKQTRQIARRRRASGSETAPPPHRSIGKIGMPGGHNKQPAPPVATTGCSALASCLSFHRRAPRPPPARANVVDGATAATTRASAEQYRRRVQFLEEEIRRLGSRLAEHGRSANGGAMATRDRVSSACSGIGATAANKRVTVGGHGGVREMVRLEGGGYLHEIKRVVGMPWERLALQVSQPVVAENAATASEVLDKMTETSAENLCKLLSKMMPIKDIAGRKNPGKVIRRSARLSSGDDFLEALLFMEMDKMEGLVQQGLKIRMASTADSASSTAAGDDDGDRRHQATKDSMVSVVLIQVRDPEQGYAAIGDPMIGVMEASLEKKDGRVKLEMQGMHVAGILFGASSKGRSNGRAMMWSACLGQCKGSHNGRRGGGGGAGAGDVCRCGFVRNTNRVFRR

SEQ ID NO: 203514 - protein, 72 aa, Oryza sativa
  Clone ID: PAT_MRT4530_98691C.1.pep
MAELEGGGSGGIAIGMCGSAIPDPRSLLTAATATTTRLGELGENHRVQRRQRISEITDEILVKRGLMRSFGE

SEQ ID NO: 203515 - protein, 93 aa, Oryza sativa
  Clone ID: PAT_MRT4530_98692C.1.pep
MLTCRGGSGAGGLPDQASPSSAPLDLRKQEESDSSVADLIYLTVFLAPFRSYGAWMEAVSSSGGDRGRQRRWLGTKAASGVVVVVVDNDGRQD

SEQ ID NO: 203516 - protein, 43 aa, Oryza sativa
  Clone ID: PAT_MRT4530_98693C.1.pep
FLSHSKQIMSPHFFYILSFKGIQTLCLNTSQSFFFQEPKPFLY

SEQ ID NO: 203517 - protein, 595 aa, Oryza sativa
  Clone ID: PAT_MRT4530_98694C.1.pep
MAEICCEVVAGSSSEGKGPECDTGSRAARRRRMEIRRLRVVAERGAEEETSGKRRRLDGGGGEASTDEEDREVERARYGFTSVCGRRRDMEDSVSACPGFLPGHHFFGVFDGHGCSHVATSCGQRMHEIVVDEAGAAAGSAGLDEEARWRGVMERSFARMDAEAVASSRGSVAPAPTCRCEMQLPKCDHVGSTAVVAVLGPRHVVVANCGDSRAVLCRGGAAIPLSCDHKPDRPDELERIHAAGGRVIFWDGARVFGMLAMSRAIGDSYLKPYVICDPEVRVMERKDGEDEFLILASDGLWDVVSNEVACNVVRACLRSSGRRERNRSSPTSNLSPRQSSSSGDEAPNDGAPSAAAGSESDEESAAEEDKACAEAAVLLTKLALARQTSDNVSVVVAAASARGSKRPQWRAGREAAIRLERREHAGEVAGLKECGDRGHHSGPRRRVGDGGGSEPLEDELVLLFSFLESFVAPSFVYVADAAEPPPGDSNTTYILHTLLRSDMASTIEWAIVHKRDGHRAIGNPFLNDDPAAAATAYKRLATCDSGTYSRPATTVDAPFLGGAVVTVHSPRWLPAAVAAGNGTLSPRHHRPSARS

SEQ ID NO: 203518 - protein, 86 aa, Oryza sativa
  Clone ID: PAT_MRT4530_98695C.1.pep
VDPPKPFAGRTSWCLQHKQQFHHRIFTQGENWLSQWALLFWRDLTLIKFPCLNPFFNLWPWGFFAPGEASPMNLRPGTFCLSFHPG

SEQ ID NO: 203519 - protein, 76 aa, Oryza sativa
  Clone ID: PAT_MRT4530_98696C.1.pep
LCPKGSCPYATYPMLLRKEINKQGIYRNVDKRKISGDNGGQAMSDSDGGRARAEWTRPVARRGASALASGVPRQQE

SEQ ID NO: 203520 - protein, 45 aa, Oryza sativa
  Clone ID: PAT_MRT4530_98697C.1.pep
MEVKTIAPIGGDGGKPTPNNGGMTNHREGEDTSRRQTKTSQSVKT

SEQ ID NO: 203521 - protein, 70 aa, Oryza sativa
  Clone ID: PAT_MRT4530_98698C.1.pep
MASFCVPLHSISPPHRATSAFAVTSPRAACKAVALALWGRVSVSSSPHPNAKRAHHLINLDDERLRPPSL

SEQ ID NO: 203522 - protein, 63 aa, Oryza sativa
  Clone ID: PAT_MRT4530_98699C.1.pep
VALSAARVGPSVSGSVGRSVRRPVQDISRSVRGSRVSRRKSNVSVRLGHTEVKYVRSVVSRCQ

SEQ ID NO: 203523 - protein, 353 aa, Oryza sativa
  unsure (1)..(353): unsure at all Xaa locations
  Clone ID: PAT_MRT4530_9869C.1.pep
MSAAGHAAAPPPPQPPTPLRPPSVNAPPPRRPPLPPPRRRRXAPPQPPPRPEDLDPPPRSASAPPPAGXPLLPPPPPPPGATPNPPPXPNPPRYHQSASGPLLPPPSPPAPPVSSPPLSTPHYSIPISPLSPPPPTGRRSPPSXTPAPPPPPPARLASSWAAARRRRPTPXPPKPPSYPLRPQRLPPPPPPPAARASSASRCRPPAPPPSQPPAALRPPPLAATPAPALARSPSPSPSSPSPSPRPPPPCSPRSPKPGARRPPRRSPPRLPRAPAARPPPPVAPLPAAPRPPPRQPPSWRPRRPSPPSSPAPSSPTRPAPTPSPFHLLQDCQRASSHRRGAAPLLLLCCAFLS

SEQ ID NO: 203524 - protein, 108 aa, Oryza sativa
  Clone ID: PAT_MRT4530_986C.1.pep
NRTTFFFFLTRPVRSLAGWYPVLVRVWYPRLLGVVVREQDLCRCQVPFHMQSRSIDRSIECVLLASSSRLVVVHGYQTPPGPRRASFFYRQHCPFLPPNHRTRGRTRG

SEQ ID NO: 203525 - protein, 52 aa, Oryza sativa
  unsure (1)..(52): unsure at all Xaa locations
  Clone ID: PAT_MRT4530_98700C.1.pep
HHTHQHTHHGPSSXSHIGHHSIQVXSKVLXQHHQWCTSCASPHANAXGTSQG

SEQ ID NO: 203526 - protein, 33 aa, Oryza sativa
  Clone ID: PAT_MRT4530_98701C.1.pep
NHKLVFEIKRNWLSVTKCLRRTWSKCNYESIIP

SEQ ID NO: 203527 - protein, 80 aa, Oryza sativa
  Clone ID: PAT_MRT4530_98702C.1.pep
MSEEAGRPLPKFGEWDVNDPASADGFTVIFNKARDEKKGGNGQDTDSPCKETRTERVESYAPKTNSKKWFCCVTSSPTQS

SEQ ID NO: 203528 - protein, 647 aa, Oryza sativa
  Clone ID: PAT_MRT4530_98703C.1.pep
MDSAVRPPVDAEEARRRRSTDCIYFLASPLTCKKGSECEYRHSDAARMNPRDCWYWFNGNCANPKCSFRHPPLDGLVGAPTTPRTSQQSAPQVSVPAQAPVPNPASGTAKQGVPCYYFQKGMCVKGDRCAFLHLPQATGSPAPQHTTKVFAPASVPHPQLKNSWTKPNSSAQQNAPPAIFDKPKDSAHNGKTAQKQNLTNRAGHSSGIIHDKKGSYMPSGVTKNYRPPPSTGDDLAENGVEMGEFVREPSPGSDVLTGGADDNTEQSLREDRGAYRRTNGEQHIGMLRQTHDSYGFERSHRGSAEKLLSESRFSQREPMPLTADSSDLRQRLLKQRRLNNPRSGQVSDRHNVYPEDERHDRHRQRGEEQASNDGVSSSRLRGRIRLPAETTFDRLGLQPEKERDRGPRARLSPPSQTDLRGKLHDRLKAKPNEDVSGNVQSSLSKANEDAESLNFAGPKSLAELKAKKVAGSLMKSSRSLTGPVRMTSEIVTIKDSSDPVLFDGPKPLNAILKRKREADSGNATDFGSKREEHSGGDEEGSQNDFRNIEDDIVGMNTEGNGEEAFQPEDDVVYGDSLSPADDIAAEAADDASRELEEQQDVETAEEYDYEMDDVNAAEENDYQEYEDEDDDLEDDDDFARKVGVMIT

SEQ ID NO: 203529 - protein, 64 aa, Oryza sativa
  Clone ID: PAT_MRT4530_98704C.1.pep
MEKGGKKPMGKGFLVPKPRGCHFPPFLMGLAPIPTTSTLIITQLTGIPLPWNGGPWPPSNKFSV

SEQ ID NO: 203530 - protein, 47 aa, Oryza sativa
  Clone ID: PAT_MRT4530_98705C.1.pep
SNSVLLLADLTTLHTKMFKVLRYSGCLRNYLVHTNYSIKPDHPNFYS

SEQ ID NO: 203531 - protein, 148 aa, Oryza sativa
  unsure (1)..(148): unsure at all Xaa locations
  Clone ID: PAT_MRT4530_98706C.1.pep
PEEPTVRPAAARLGGSAKACAGRRANGDGHGGGDADGHVLVFPCPVHGHITCMLHFATGLLAAGLHVTFLHSDHNLRRAGRGDNAQXAAAASSPRLRHVSIPDGLPVEHPRDVGRIVELMESLQTKASVAYRSRPLRCCWVTPAGFLR

SEQ ID NO: 203532 - protein, 74 aa, Oryza sativa
  Clone ID: PAT_MRT4530_98707C.1.pep
GTPQYIFQGRYTILKILIMFQNKLHHIAMLQDTCRNTNMVLYRHFIYLCKQQILVLFSKSIASEFDLLGLMVLL

SEQ ID NO: 203533 - protein, 218 aa, Oryza sativa
  unsure (1)..(218): unsure at all Xaa locations
  Clone ID: PAT_MRT4530_98708C.1.pep
IDISVADDPSARSAAAYATLPSTCPPGHRLPSTEECAVEFFFQSLVLQVDSQCVFVLFDVFVFPRRSLFLLKRKFFIWFAFXQRCWTADLLQKRDIDXHSACPFCTQNLEMANHTLFNCVFARQIXTTCCRPLARLPSPRDSSLQVXWLSSRVCLSKHLRANFDSPVLLVSWXLWKEWNSRVFDSALSSVSVVLESILSEGRILVCGLLLVLLLLGAY

SEQ ID NO: 203534 - protein, 80 aa, Oryza sativa
  Clone ID: PAT_MRT4530_98709C.1.pep
DMVRLRFPFSWLVPHDSSFLWAFFWLLGQPLGEYCGWSSPVFLFPSNLADGMFVFCNPQYVFVWVGPTKKKILGKTRKFY

SEQ ID NO: 203535 - protein, 241 aa, Oryza sativa
  unsure (1)..(241): unsure at all Xaa locations
  Clone ID: PAT_MRT4530_9870C.1.pep
MTSAMTSPTAAAARRSGRLGRRTLAGERRREDANGGHQHVEDDAANTPVTKTAAEKQRTTTATRRKRRKPSGCRRRRSSDDLRRRRRGGRGRRRLGDHDNGLPERRRRLERRRSTAGAAAATAKLGHTALERFRRREAKAKVATGRGNTGGPFKGARRRRRRPTATXATRKERSGRTNPRRTRIQLFPKRFSQRFQRRKGRGDPGDCFPSIDSAGEGKERPDLEGKQRRRETRVSGGGGRR

SEQ ID NO: 203536 - protein, 135 aa, Oryza sativa
  Clone ID: PAT_MRT4530_98710C.1.pep
GDPRGQVVKPPGQLFPAGRGYPMYPLPPYRALVKRQCPGGSLDKQVRQNFCRQLPPIEDSFCRCPPLTPMLVGMYKELGAPPKGPPMDEVFPGSRKGAIKRVGATPPAFCNVDIPLGIGGVCPRLSYPMNPPAGP

SEQ ID NO: 203537 - protein, 71 aa, Oryza sativa
  Clone ID: PAT_MRT4530_98711C.1.pep
MPTSFGYHEPMAPSSPLLMSRRSVDSVSGELQPATRIEVERTVGKKKKRKGSTWTSSNSLLADGVKLEVRP

SEQ ID NO: 203538 - protein, 266 aa, Oryza sativa
  Clone ID: PAT_MRT4530_98712C.1.pep
MMSSAPETFSLDHLSQHQQQQPPPLAEQEQLCYVHCNFCDTILAVGVPCSSLFKTVTVRCGHCANLLSVNLRGLLLPAAASTANQLPFGQALLSPTSPHGLLDEVPSFQAPASLMTEQASPNVSSITSSNSSCANNAPATSMASAANKATQREPQQPKNAPSANRTSEKRQRVPSAYNRFIKDEIQRIKASNPDITHREAFSAAAKNWAHFPHIHFGLMPDQGLKKTGIQSQDGAGECMLFKDGLYAAAAAAAAATAASSMGVTPF

SEQ ID NO: 203539 - protein, 111 aa, Oryza sativa
  unsure (1)..(111): unsure at all Xaa locations
  Clone ID: PAT_MRT4530_98713C.1.pep
LALITLSGXXGXVXEPXPXFPSGTXCIXNGHXGISGFLXXSSLTXHCRLSIXXKPCXXNAXXISGLXGXXNVADKNAXPLAVERHXTGSMGXSLRAVRNGAXTAXPIYQVF

SEQ ID NO: 203540 - protein, 370 aa, Oryza sativa
  Clone ID: PAT_MRT4530_98714C.1.pep
MTWCNSFNDVRAVENNLATAAAVAAAKKQQQQQQVSQHVNLIKTCPSCGHRAQYEQSQLQAAAAATIQDLPGLPAGVKFDPTDQELLEHLEGKARPDARKLHPLIDEFIPTIEGENGICYTHPERLPGTRQPSGHWNWSTGYYDYEATLVVLLTCCCMHARVGKDGLIRHFFHRPSKAYTTGTRKRRKVHTDEQGGETRWHKTGKTRPVFTGGKLKGYKKILVLYTNYGKQRKPEKTNWVMHQYHLGSDEEEKDGELVVSKVFYQTQPRQCGGGSAATAKDLSVDLVAGNNIKASNAAAEHHHNDGVGGGGHGGNNSSMLKEAAGIVDFYNPAAALIGYSQAAPNNRAAASAHLTMPNFEVHTGGAGFGP

SEQ ID NO: 203541 - protein, 722 aa, Oryza sativa
  Clone ID: PAT_MRT4530_98715C.1.pep
MAEEYELNEIDDTLHGSVGSRLSLFARELKSRRSSSWHGGTALRLPKDLYESLVIHPNGRWYRIWANMMFLWSIYSTFFTPFEFSFFRGLPDQLLDLECVQLVFLADVAVHFFLAYRDPHTYRMVHDKRHIALRYIKGSFALDVLGCFPWDAIYKVTGRVEAVRWLVWVRLYRGRKVMAFFKRVEKDIRVSYLLTRIVKLITVELYCTHTAACGFYYLATTLPPAREGGTWIGSLSLGDARYINFREVDLLTRYVTSLYLAIVTMATVGGSGYGDIHAVNTREMAFTVVYISFSIVLSAYLIGNMTALIVKGSRTERFRDRMTDLIRYMNRNRLGSAIRSQVKDHLMLQYESSYTRDRVIVDDIPVAVRSKMSQTLYLDMVSRVGLFRGCSDDFLSQIVLKLHEEFFLPGEVILEQGTVVDQIYIVAHGCLEEVANGEDGSEEIISELRPYGIVGDVAVICNIPQPYTVRVCELCSLLRIDKQSLTSILQIYFKDNSQILSNLLKGKETESKRKQLESDITYLLAKQESELVLGVNNAAYHGDIFRLKSLISAGADPSKSDYDGRTALHIAALRGYENIVRFLIQRGANVNSIDRFGNSPLLQAVKSGHDRITSLLVEHGAILNLEDAGGYLCRVVRGGRIDLLKKLLRFGISPNCRNYDQRTPLHIAAAEGLHLVASTLIESGADIQAKDRWGNTPLDEGRRCSSKPLVRILEQARTVATN

SEQ ID NO: 203542 - protein, 158 aa, Oryza sativa
  Clone ID: PAT_MRT4530_98716C.1.pep
TRTLDKIPSWVGTLGRLVKIQLVLTGLKDAESISILGELRSLKCLRLFYNAYNGQELLFSPGKFPELTILILEDLKVRKVTFEERTSPKLKKITIHDCSAELTICGTASLQSFEKIQYLEKWKLVKEETHRRLQVGQSQSSHTVEDEVVWFDALSNFC

SEQ ID NO: 203543 - protein, 646 aa, Oryza sativa
  Clone ID: PAT_MRT4530_98717C.1.pep
MSKGEGPAIGIDLGTTYSCVGVWQHDRVEIIANDQGNRTTPSYVAFTDTERLIGDAAKNQVAMNPTNTVFDAKRLIGRRFSDPSVQSDMKLWPFKVVPGPGDKPMIVVQYKGEEKQFAAEEISSMVLIKMREIAEAYLGSSIKNAVVTVPAYFNDSQRQATKDAGVIAGLNVMRIINEPTAAAIAYGLDKKATSSGEKNVLIFDLGGGTFDVSLLTIEEGIFEVKATAGDTHLGGEDFDNRMVNHFVQEFKRKNKKDISGNPRALRRLRTACERAKRTLSSTAQTTIEIDSLYEGIDFYTTITRARFEELNMDLFRKCMEPVEKCLRDAKMDKSSVHDVVLVGGSTRIPKVQQLLQDFFNGKELCKSINPDEAVAYGAAVQAAILSGEGNEKVQDLLLLDVTPLSLGLETAGGVMTVLIPRNTTIPTKKEQVFSTYSDNQPGVLIQVYEGERARTKDNNLLGKFELSGIPPAPRGVPQINVCFDIDANGILNVSAEDKTTGQKNKITITNDKGRLSKEEIEKMVQEAEKYKAEDEEHKKKVDAKNALENYAYNMRNTIKDEKIASKLAADDKKRIEDAIDGAISWLDTNQLAEADEFEDKMKELEGICNPIIAKMYQGPGADMAGGMDEDAPAGGSGAGPKIEEVD

SEQ ID NO: 203544 - protein, 609 aa, Oryza sativa
  Clone ID: PAT_MRT4530_98718C.1.pep
MVLDLFALMGAYAAGVSRDVLAVAYVSALFGLVFAYVALHIVVATSALPPVEWLRASAKRLPDQAEELLRKGDKKAASASASMTTRRVEEDRQERRKFLLLLATFATPLTYAAGFDPPGGFWDSTGGGHTAGVPVLRDGPSRSRYRAFFYCNATSFVASLAIVMLLMSRTLSRRVARSYALQVCVMVELLGLVGAYAAGSNRKRETTAYVVSLAGAVLVYIALQVVVGMFAMAAIKRWLVGLCRILQCRRSMEPAEHLRADDVTHDHRVQYLEMKPCPATPNNTPCEVRAPNGDVTGGGGGDGDEGDADTVEESRSLLLLLATLAATVTYDAGLNPPGGFWPDGGRAGELILLDTHPRRYKAFFHCNTAAFVASLVVIVIVQSRQLSSGAVVKRRALQAAMTLDLLGLMGAYAAGSCRSAAATVYVSALAVAVFVYSLGNVVAFTTMGRSRETRLMRWVDGMVQKVLERLHLWDGQAEEADDDLERKRKFLLQLAILAATVTYKTGLNPPGGFWSGSDDGRAGDPVLVDHYRNRYMVFFYCNATGFMASVAVILMLVNRRLYKQGIRCNALNACVVVGLLGLMLAYAAGSCRRLRTSAYVIALVAAVVT

SEQ ID NO: 203545 - protein, 215 aa, Oryza sativa
  Clone ID: PAT_MRT4530_98719C.1.pep
MAIKDRFTGNPGRLTVLTTSGSGRDNWPAPAKVVGTTGVVLGVIAGSTAALLSVNALLAELSDRTAARALACRRLMKRTRRRPPRARWPATASPRAALSSTSAAHPIFVHDRLRRALLSSPATAPASSWLFRHPQPRPLVPGRRSITHRSQATGRGDEVYIALVSEQLLPCSLLSHLCGSCAASADDRAQRLGAATFPRHLLRRRPQLLVGDARH

SEQ ID NO: 203546 - protein, 94 aa, Oryza sativa
  Clone ID: PAT_MRT4530_9871C.1.pep
DIFPSPLIRHPPGGQTLHPQLRSISSCILVAASLHVQCCLHWVAQCGTVQHAHHLCLGHSAGVGFAPWFAVFPCKCSAGPVFYAGQSARRVRLA

SEQ ID NO: 203547 - protein, 97 aa, Oryza sativa
  Clone ID: PAT_MRT4530_98720C.1.pep
GISPPSSYLAVAATYKPRNLKLFVYMCILMLLEMHVCGGGCLWVAHACGVVVSRASTPAEAMSGVGVRRGGEWRRRWLKAKSEYYYCIYMFWRAICV

SEQ ID NO: 203548 - protein, 142 aa, Oryza sativa
  Clone ID: PAT_MRT4530_98721C.1.pep
MDAPASRETTTTTEDQASDGVPVGGRPPPNFLPPFITRTRIARRTRGGQLADFPAPGEERNSQKQRIKLRNTRLRLMREPGLSLRAGRGRRRRRGGGGEERRGEEAQPRRERGAMGENGRWRWTGIRRGFGLSDATTKVVWV

SEQ ID NO: 203549 - protein, 139 aa, Oryza sativa
  Clone ID: PAT_MRT4530_98722C.1.pep
KTRSISTVHSLPSLHAPCAAAPPLLSSPRRHRRGAAAGLDSPPPLSLPLPLSPISSPVERACGLPIPTPPPAQTHTQTPRPARRLSPGSRIRRRRVLRSLIRCFWLFRSSPGAGKSASCPPLVLLAIRVRVMNGGKKFG

SEQ ID NO: 203550 - protein, 181 aa, Oryza sativa
  Clone ID: PAT_MRT4530_98723C.1.pep
MELLQEKNIHVSQRDDKAKWIIDNYSNIRSFTEHDIEKITSNYCTLIGKGGFGEVFRGVLDDEDDVVAVKRYIRGDLREEFMEEIRIHAQMSHKNIVKLIGCCIGKNRLMMVTEFISNGNLEDALHNSDIFIPLSTRLGIAMGCAKALSYMHSMHLSSSSLICHGDIKPANILLDANLTAK

SEQ ID NO: 203551 - protein, 175 aa, Oryza sativa
  Clone ID: PAT_MRT4530_98724C.1.pep
MAPSVMASSATSVAPFQGLKSTAGLPVNRRSSSSSFGNVSNGGRIRCMQVWPIEGIKKFETLSYLPPLTVEDLLKQIEYLLRSKWVPCLEFSKVGFVYRENHRSPGYYDGRYWTMWKLPMFGCTDATQVLKELEEAKKAYPDAFVRIIGFDNVRQVQLISFIAYKPPGCEESGGN

SEQ ID NO: 203552 - protein, 175 aa, Oryza sativa; identical to SEQ ID NO: 203551
  Clone ID: PAT_MRT4530_98725C.1.pep

SEQ ID NO: 203553 - protein, 212 aa, Oryza sativa
  unsure (1)..(212): unsure at all Xaa locations
  Clone ID: PAT_MRT4530_98726C.1.pep
MGATELGLDAHAISGGSMARCGVVPCGVAQWRSLAWRGKEMKRSLRGTMGMAKISLTNSLCSFSRVIQTQISFDFLFLHHHRLALLASKSINVSARLCLVGLLPYLLTRFAPHVRPTQGFGGIAIAITTASPPTLPDTDCLPLFLLGRSQWEDVSFSLVAENRIFDDTSASRGAKTGHTNFAGIEVCGTGRKXGRGVVEVIASSLRGFARCH

SEQ ID NO: 203554 - protein, 47 aa, Oryza sativa
  unsure (1)..(47): unsure at all Xaa locations
  Clone ID: PAT_MRT4530_98727C.1.pep
MAANXGMVAGSRNRNEFVMIRPDGDAXPPLSXEEFNGQVXQIXGALF

SEQ ID NO: 203555 - protein, 50 aa, Oryza sativa
  unsure (1)..(50): unsure at all Xaa locations
  Clone ID: PAT_MRT4530_98728C.1.pep
CPLSSLKWAHCEGSXTVASYSTHTVHTLYTICATFSEIRHTPHXYGQLCC

SEQ ID NO: 203556 - protein, 64 aa, Oryza sativa
  Clone ID: PAT_MRT4530_98729C.1.pep
MGLVWPDETAKATTERNSDGGGGVATPGIASPRGELDRGNGGIAVAVGHRWGAAVVLSYHPCSW

SEQ ID NO: 203557 - protein, 330 aa, Oryza sativa
  unsure (1)..(330): unsure at all Xaa locations
  Clone ID: PAT_MRT4530_9872C.1.pep
MAEPGERSARTGSTGVGPTRQPLGPRWTGRGARPKAASPARPTXGGGAPAPRWSPAATTSAAERRPREGREGGSETAVHGSPRVDGDDGNGDRSGGRRRRGSGRRGRRRSGGRXAKRRGGRGRRGRGEPEEGDAEAGEGPGRRRRRTGARRRRRRGRTTARARFRRGERAASGGNGGGRXHGECLYMVGSERGRSDEGETAAEDPAAIDAPARFXGKRSRTNPMEREREKWGERGRESXGNISPLLIARGPDGNGGISAGXGARARPSRRERRKVGNDGWAPPVSEGGERARPSAARARGXEAGWAAGERREREGGGPSRPKRGRGEKDF

SEQ ID NO: 203558 - protein, 45 aa, Oryza sativa
  Clone ID: PAT_MRT4530_98730C.1.pep
GRVGLVLDRERPPFFFFFFKGVTLDCLYILSISQHCMSASTGFFS

SEQ ID NO: 203559 - protein, 51 aa, Oryza sativa
  Clone ID: PAT_MRT4530_98731C.1.pep
KFPVQSRWQTKCRAVEREEEPVGARTKVEDDLDIGGDLRVGVKEVEVRTSH

SEQ ID NO: 203560 - protein, 132 aa, Oryza sativa
  unsure (1)..(132): unsure at all Xaa locations
  Clone ID: PAT_MRT4530_98732C.1.pep
MAHRVDNEYDYLCKIVFIGDSGVGWYNILSRFTRDEFFLECXSTIVVEFASRTLQIEWKTIKVQIWDTASXERYRAITSVYYRVAFGELLVFDITTRQAFDNVHRWLREVRDHADANIVVMMXGNKSDLNHL

SEQ ID NO: 203561 - protein, 233 aa, Oryza sativa
  unsure (1)..(233): unsure at all Xaa locations
  Clone ID: PAT_MRT4530_98733C.1.pep
ELYSNIFGCKLGYFPVRYLGISMHFRKLNNKGXKTIEERIDKKLCSCLXGGRLVLINSVLSSLAMFIIYFFEISKGVLQKIDYYRPRFFWQGDEHKKKYRLTRXDIICHPKDQGGLGVHNLENQNXCLFSKLLFKLINEQGVWQDLWKRKYLNXRLLSQVEWKQGDSHFWSGFMKVKSTFLNMGSWIVHNGQQVRFWEDNWVGNLFLKDKYPSQYAIVRRRNSSIAILWLMFL

SEQ ID NO: 203562 - protein, 157 aa, Oryza sativa
  unsure (1)..(157): unsure at all Xaa locations
  Clone ID: PAT_MRT4530_98734C.1.pep
CRCTASLIYALTPWPPPGARLSSCYHPPIVTPLVPSLQAQARTARHTRHISIPPHTHRPPRIPMPCPYPTTTPVFSAAPTPFCSHXRKNELSHTSIPPPRSHSASELYLPYHLRPTHSPGGPPTPLPGPRLRGIATSPKLERREKGLPCTEHISQLG

SEQ ID NO: 203563 - protein, 392 aa, Oryza sativa
  Clone ID: PAT_MRT4530_98735C.1.pep
MANRTDPLAKSIHGTNPQNLVEKIVRSKIYQSTYWKEQCFGLTAETLVDKAMELDHTGGTYGGNRKPTPFLCLALKMLQIQPDKDIVVEFIKNEDYKYVRVLGAFYLRLTATVADVYQYLEPLYNDYRKIRHKLSDGKFTLTHVDEFIDDLLTKDYSCDTALPRIQKRWVLETSGTLEPRRSALEDDFEEEEEDKEDEQPMDIDEPNGREKHDHYRGRSPTRDRDRERKHERHHRDRDYDRDRDYGRGRERDRDRDRERDRDRDRDRDRDRDRDRHRIRDEDYSRDRDRARDRDGRERERWDRDRGRRRSRSRSRSRDRRERDREDGEYRRRRDRGSASPRGHAEDGGSRDEPKKRKEKKEKKGEGNAPDPNDPEIIEMNKLRASLGLKPLK

SEQ ID NO: 203564 - protein, 115 aa, Oryza sativa
  Clone ID: PAT_MRT4530_98736C.1.pep
MAVAMMHYFFFRRHRRDDDGGGEQDMLLRESFLRRMEEGAAAAAAGDQRRSPPTLTPTPRRCYSREAGYRSVRGFGVMGSLVLLSFGIIGLTMNAKKPLSVSKLLPLAFKACSEE

SEQ ID NO: 203565 - protein, 79 aa, Oryza sativa
  Clone ID: PAT_MRT4530_98737C.1.pep
PWAVRPLCWPPRFRSDPILFSTRMQQCLLFLASPEFFFCRRFSFFPLFLLFFSFFFFFCSSGPLISLSSLPSLYICLIS

SEQ ID NO: 203566 - protein, 51 aa, Oryza sativa
  Clone ID: PAT_MRT4530_98738C.1.pep
LDLQRERASEARLRFNRLRRRRRDIDSLPLAVDVVGIHGASALYRHWQDDQ

SEQ ID NO: 203567 - protein, 80 aa, Oryza sativa
  Clone ID: PAT_MRT4530_98739C.1.pep
MPNLLITQTCTNTLPDAQQGFTSWDWDPAASSVRLQRETTHGRWFICSKKFWCLKPVAHSSSRGFESSMHIALRPARPWS

SEQ ID NO: 203568 - protein, 127 aa, Oryza sativa
  Clone ID: PAT_MRT4530_9873C.1.pep
ALLFDKEMRTRMQSSFSRAVEGTSKIRLSVNLKLDLSGISSLAIQSLFRVHVLEVVRNLLFYPREKLNTASLSSMSLDRDTASLPVQTIVIKSLSPSSTIKVLLLDPQDLCVTSPQWNTRLTGEHNR

SEQ ID NO: 203569 - protein, 52 aa, Oryza sativa
  Clone ID: PAT_MRT4530_98740C.1.pep
QHFSRPMLIGGNAGDHLEVLVHHFFLDQAFVPRSEHMLTRENSNSLGGWFTE

SEQ ID NO: 203570 - protein, 78 aa, Oryza sativa
  Clone ID: PAT_MRT4530_98741C.1.pep
VDDQVIYTFGIILLVGCNSLFFSPNISHSKLHQLVGWLVNGKEKMLHSVQFMYTYHSHLFSSCILIRWLSKSYSLVKV

SEQ ID NO: 203571 - protein, 157 aa, Oryza sativa
  unsure (1)..(157): unsure at all Xaa locations
  Clone ID: PAT_MRT4530_98742C.1.pep
SRVSVRESDCYLVLLFFSVCXFLPRFPNATRFIVTFRSRAATVILASVTVLGGGDSTXFAVLGGGSVTALAAMVSLTDPEWRRKFLAAEVGGGDKAVEREYFIGAGFERWRMIYGVTDEVYRVRKGVLLGRAMTVANTVLMLAGDGCLAGVAGCDAG

SEQ ID NO: 203572 - protein, 67 aa, Oryza sativa
  Clone ID: PAT_MRT4530_98743C.1.pep
MGAGGGMEEAWATSRWQLSRATRSDTSWLEEAASRGWAGLAQPMVRPNPHQRRPSWGFASTSRIHPQ

SEQ ID NO: 203573 - protein, 480 aa, Oryza sativa
  Clone ID: PAT_MRT4530_98744C.1.pep
MSLQLGLRRRGKATNLSLGGKLVGWLLRLLLVEALCENIIPSTSGTMDVIATKNNKKAIDRNPQEPTTTLIKTYKRRKRRRVQHHCHPGASSLPNELVYEILLRLPVKTLSRSKSVCRAWRATISNPSFITTHLKQQQQSAVSRHEQKPSFLITPHTLDSMIDDEEPWPTTFSNIITFYRWQETEQDDAHLVRATNLHGEFRSVYGMSHYDGLVIFPTNTRLYVFNPATGKGDVLKLPDGQKSRFQTAGLGLDLGTNTYKIVRSFDRSIDFNQWAHDAAGMEVFTIGNRDSCWRTIAEDPPYPVTADPMYFKGSLYWHICKELLQEGSPPPPQGFLRFDLQDETFGLVLHDVVSPSDETRLDLVELGGELCLAQYLGTEMVRVNDWAIRGWHISSLELNRYREAKGFILVYTRGSADMIFMYAQRLGRRGMAGGVVLGLPVEKASRKMVKCDIRMDGQAELSAMRALLGLVYNFYIGSVP

SEQ ID NO: 203574 - protein, 96 aa, Oryza sativa
  Clone ID: PAT_MRT4530_98745C.1.pep
SSSKYCTIYHCWAQRHDPNQQVQQIYGLVAPTTQLPAKADTDLHEWFLSTEAATGSECPSSRGWRRGGGQQGPGSGGGSRDLLHDLVVMLGRPQPG

SEQ ID NO: 203575 - protein, 83 aa, Oryza sativa
  unsure (1)..(83): unsure at all Xaa locations
  Clone ID: PAT_MRT4530_98746C.1.pep
MDCCEVDLSTINETCLWGAPASLELKGRGQDTSAESXRTGGVFDACRTCLTPPNLAKRAEEEPWRCFRQPGFLQAHHLPRGGL

SEQ ID NO: 203576 - protein, 608 aa, Oryza sativa
  Clone ID: PAT_MRT4530_98747C.1.pep
MAHKAKLQSVSESAIRSIGLGYDIANDIRLKNCKQRGSPDPLLIELDHDKVQDIVLPGNLTVTGVSKSIKCDKGERMRFRSDVLSFQQMSEQFNRELSLSGKIPSGFFNAMFEFTGCWQKDASITKSLAFDGWCITLYTVALSKAHIILKDHVKQAVPSTWEPAALARFIKKFGTHIVVGVKMGGKDVIYLKQQHSSSLQAVDVQKRLKEMSDQRFLDANGHSDISLADSYAKDNKVDTREQRLRFVESSPLNSYSSKEELVMMPKRRGGRDKDILSHSEWLNTVQAEPDVISMSFIPITSLLNGVPGCGFLNHAINLYLRYKPQIEELHQFLEFQLPRQWAPVYSDLPLGPQRKRQSSASLPVNLIGPKLYVCTNMVDVGKRPVTGLRLFLEGQKSNKLAIHLQHLCSLPQIIQLEDDTYNPQTPEAEIRKYYEPIGSWKRFSHVCTAPVDSDDSSIVTGAHLEVVSHGFKKILFLRLHFSKVCNATSVKNPEWDGSPNLGQKSGLISTLISTHFSTAALKPAPRPAEVNINSAVYPGGPPVPVQTPKLLRFVDTTEMLRGPQDLPGYWVVSGAKLHLERGKISLRVKYSLLTVNSPDDEFSPDEEF

SEQ ID NO: 203577 - protein, 56 aa, Oryza sativa
  Clone ID: PAT_MRT4530_98748C.1.pep
RYFPLGKRYISCTFRRTHECLQVYITLHTFRRTHEWLGGTLHALVMYMCVSGDNLN

SEQ ID NO: 203578 - protein, 646 aa, Oryza sativa
  Clone ID: PAT_MRT4530_98749C.1.pep
MAYRAMLQSAAESAIQSIGLGYDIAHDIRLKYCKQRSSPDPLLIELDHDEVQDIVLPGGLTVAGVSKSIKCDKGERTRFRSDVLSFQQMSEQFNQELSLSGKIPSGLFNTMFEFTGCWQKDAANTKSLAFDGWCITLYTVALSKAQIVLRDHVKQAVPSTWEPAALARFIRKFGTHVVVGIKMGGKDIIYLKQQHSSTLQAVDVQKRLKEMSDRRFLDANGQSDFSFKDSYGKDKIDTREHRLRFVDSSPLNSYSSKEDLVMMPKRRGGRDKDILSHSEWLNTVQAEPDVISMSFIPITSLLNGVPGCGFLNHAINLYLRCYGSLSYHGIQTIILARKKMALGLKQHKQLCDMCKYRADKPQIEELHQFLEFQLPRQWAPVYSDLPLGPQRKRQSTVSLPVNLIGPKLYVCTNMVDVGKRPVTGIRLFLEGKRSNKLAIHLQHLCSLPQILQLEDDPYNDQTPEAYDRKYYEPIGSWKRFSHVCTAPVESDDSSIVTGAQLEVVSHGFKKILFLRLHFSKVCNATSVRNPEWEGSPNLAQKSGLISTLISTHFSTAAQKPAPRPADVNINSAVYPGGPPVPVQTPKLLKFVDPTEMMRGPQDLPGYWVVSGAKLQLERGKISLRVKYSLLTAMLPDDDEFAFDEEF

SEQ ID NO: 203579 - protein, 75 aa, Oryza sativa
  Clone ID: PAT_MRT4530_9874C.1.pep
FFFFFFLCLNLHDIFIQIVSPRCFNLSHTMMHDFIFLSCTTITAHNSNHQHTTRRVRQCSPGQQCCSLGQHHPHH

SEQ ID NO: 203580 - protein, 63 aa, Oryza sativa
  Clone ID: PAT_MRT4530_98750C.1.pep
PPQVGERGRALGSACQLNGLIGSCQMLTRAASCRLAVPARPRRETRRASGKAQEDGAAAATKR

SEQ ID NO: 203581 - protein, 176 aa, Oryza sativa
  Clone ID: PAT_MRT4530_98751C.1.pep
PTPSERTKQAAAGASANRNVSEKKDAADAKKEATAEAKPAAKPAAKPKKPPVKPLPEMMQEEIIPPLKAALEAEDDVSQVELSFEDNRLEGSFIKDEVPYYFWAFFPNGDLTGPKGFALSSYSTEVSTIEPFLIDEKRANAKYVVFWVYKRLAGQGILPVWKEEEGEGEGEGESSA

SEQ ID NO: 203582 - protein, 51 aa, Oryza sativa
  Clone ID: PAT_MRT4530_98752C.1.pep
MRIQCDTCEAAAVTVVCLADEAVLRARCDIKIHAADKLARKHQLLPLDATL

SEQ ID NO: 203583 - protein, 81 aa, Oryza sativa
  unsure (1)..(81): unsure at all Xaa locations
  Clone ID: PAT_MRT4530_98753C.1.pep
MGMAEARSREHGGGGGGGSGSAGKIFVSGLPRDTTEADFVEAFXGQIGEIVDSAIMMYKHTFHPRSSGFITYSDAAVVDRV

SEQ ID NO: 203584 - protein, 83 aa, Oryza sativa
  Clone ID: PAT_MRT4530_98754C.1.pep
VYAGTRRSLRAGLYTSEAPPQSCCLLIIRRQIAVFAVLLGAAAAHTHGTFAARRSPSCHLTAGSPDHLRTVLTYRFGVDSAHA

SEQ ID NO: 203585 - protein, 120 aa, Oryza sativa
  Clone ID: PAT_MRT4530_98755C.1.pep
DLSERKSSFVIIGRIIFSILGAMMAAVVIYTVITDGLPFRKDLLTPWMAATLIDFYINVFAISVWVAHKESNWISTAIWICLLICFGSITTCGYIVIQLFQVSYRDPIYHVLLNSHNKKI

SEQ ID NO: 203586 - protein, 163 aa, Oryza sativa
  Clone ID: PAT_MRT4530_98756C.1.pep
PTRPVAIKRAQQGSLQGSKEFFTEIELLSRLHHRNLVSLLGYCDEEDEQMLVYEFMPNGTLRDHLSARSKEPLNFPTRLRIALGSSRGILYLHTEADPPIFHRDIKASNILLDSKFVAKVADFGLSRLAPEPESEGIAPGHVSTVIKGTPGYLDPEYFLTHKL

SEQ ID NO: 203587 - protein, 192 aa, Oryza sativa
  Clone ID: PAT_MRT4530_98757C.1.pep
MVGWSLNIVDKDTQAKKMKIEQGAKQKSPKLSIILACQNGRNLRRKGETAYSWFMVDQEIKRNMGDKEDILLSQEELDIRWFYRNRLSSIMREEEIKWYLRAKSKDILEGDSNTKYFHLVANGKHRKTRIFELQDGDQLINGDENLKSHITTYYKGLFGPPDDSPLQFDESKFTDIPQVSLLENEALTQGIY

SEQ ID NO: 203588 - protein, 177 aa, Oryza sativa
  Clone ID: PAT_MRT4530_98758C.1.pep
GNRSLILDFQNNSLTNLSNPLSPPANVTILLSGNPICTSPNQLNITQYCQSVPVIVPDGSASNATVCPPCSTDLPFENILMSPIRCICAIPLYVDYRLKSPGFWDFVPYEGQFQQYLSSGLSLSSYQLEVSQFMWEEGPRVKMNLKLFPNNTAYFNKSEVFRLRGMFTGWLIPDSDI

SEQ ID NO: 203589 - protein, 1034 aa, Oryza sativa
  Clone ID: PAT_MRT4530_98759C.1.pep
MRAVPSSSGAGPLVLPFRPLLLSRRLMRQSRLFYLCSIIFMFYLVQRTEAQITAPWEVDALKAIKGNLIDPQGRLNNWNRGDPCMGNWSYVHCYNETASDGYLHVLELQLLKLNLSGSLAAELGRLSHMQIMDFMWNNISGSIPKEVGNITSLKLLLLNGNQLTGSLPEEIGFLPNLDRIQIDQNYISGPIPKSFANLNKTKHFHMNNNSLSGQIPPELSRLPSLVHLLLDNNNLSGYLPPELSKLPKLLIIQLDNNNFSGTSIPSSYGNITTLLKLSLRNCSLEGPVPDVSGIPQLGYLDLSHNLLNGSIPGSFSGLPNLQRLSLDNNNLDGSVPSDVWRNIDFSGNRSLILDFQNNSLTNLSNPLSPPANVTILRTENGFLKSSFMEEKCPSCYVRVRKRRLIGNLDFFCIDGIVMYSATLLFLNKLMDTLAKVDMKQNMLSGNPICTSPNQLNITQYCQSVPVIVPDGSASNATVCPPCSTDLPFENILMSPIRCICAIPLYVDYRLKSPGFWDFVPYEGQFQQYLSSGLSLSSYQLEVSQFMWEEGPRVKMNLKLFPNNTAYFNKSEVLRLRGMFTGWLIPDSDIFGPYELLNFNPGWYNNLFPDRAKSSLSTGAIVGIVVAAFAAAAFLSSLITLIILRRRSRYSSKRRSAKRIPMKIDGVKDFSFQELSHGTNDFSDSALIGQGGYGKVYRGILSDGTIVAIKRAQQGSLQGSKEFFTEIELLSRLHHRNLVSLLGYCDEEDEQVVPAAIRFYFGEQMLVYEFMPNGTLRDHLSARSKEPLNFPTRLRIALGSSRGILYLHTEADPPIFHRDIKASNILLDSKFVAKVADFGLSRLAPEPESEGIAPGHVSTVIKGTPGYLDPEYFLTHKLTDKSDVYSLGVVFLELLTGMQPISHGRNIVREVVAANQSGMILSVVDSRMGSYPAECVEKFAALALRCCRDETDARPSIVEVMRELEKIWQMTPDTGSMSSLSLEPSNTATPSSGSRMMVSSSSGVGNDDHHHYNMSSSDVSGSNLLSGVVPSINPR

SEQ ID NO: 203590 - protein, 80 aa, Oryza sativa
  Clone ID: PAT_MRT4530_9875C.1.pep
KSNRGKGTIPPDHETGQHDNTQNFGSEHATQRPCITLSPGRQERRHGVNRHDQTRCAVNHPKSPIGRGPNNHRNSQQPPP

SEQ ID NO: 203591 - protein, 54 aa, Oryza sativa
  Clone ID: PAT_MRT4530_98760C.1.pep
MTAVGGGGQSRRHADVAAWEKGEGRAGSGSADAERSCDVHAVTRDPMRATSVGM

SEQ ID NO: 203592 - protein, 104 aa, Oryza sativa
  unsure (1)..(104): unsure at all Xaa locations
  Clone ID: PAT_MRT4530_98761C.1.pep
LKNNQFFPQLRGGGPHFSFPGFYFFPAXGPPLPPPRFGLFSLSRNLAPAPPLLVFTPPPPKGFSPWFFRAPHSLPPPGGFFFLIFPNFWLGKENINPGFLFFAL

SEQ ID NO: 203593 - protein, 139 aa, Oryza sativa
  unsure (1)..(139): unsure at all Xaa locations
  Clone ID: PAT_MRT4530_98762C.1.pep
EIVTPIPTIEFNVDTVESKGFSFAVWQXRGQDKIRRMWRHYFQITQGVICVEDSNDRDRVVAARDELHRMLNEDEVRDAALXVYATTQDMPYVMEAPEIRDKLGLHSFRQRHWXIQSVCDTAGEGLHEGLAWLSSNMAS

SEQ ID NO: 203594 - protein, 536 aa, Oryza sativa
  Clone ID: PAT_MRT4530_98763C.1.pep
MWTPKRRKALSTDGCTKSTYTECHGFTTPAAEDRALRGTSPRPPSSFLLRYGCQSSTTSVNLAHREPATHTTSSASPLRLLASLSHSSLRRPPPPRRMRLPLRRALSPAAVRRAFSTAAASRPQWAMIRQAPPVRSPSPHASLLLAEPPRDSYLLVPDHLIDRRPGPDPSSDIRGILGGTVHATSGDGGLLLVVYMDSHAPAPIISKIVTGAFPARPRVSDLAGLDLSDPDFIRFVCNPITGELFRLPDIDGTKKTMFRGCDNAGLLTRSAAGAGHGSPDSYAVAVLGEDRNGGTFNMRRFLSRTGKWEKLVGLPSPLPLTRRMDMYTEAVAFAGRLWWADLTWGVVSADPFSDWPELHFVELPRNSVWPVPSTDLVQEQAMHRRLGISEGRLRYVEVSQEDPFVVSSFALDDDGSGWTLEHEVALGRICQVKGGGPRDTARIAVIDPLNASVMYLIVGKHVLGVDMDMGKVMGCSLADETEGPPYAITSVLKPCVLPPWLSSSKIPAAGTFSRDNGDAKSKTLSDILVRADSDKR

SEQ ID NO: 203595 - protein, 86 aa, Oryza sativa
  Clone ID: PAT_MRT4530_98764C.1.pep
VPPSCLALSLSGRLDRDSRRLRLPLAPPPPPPPAPPPSPWRSRLRAPPPPSPPSRGQATSGAGGEGTGARTAATRRTGGRGGKPGG

SEQ ID NO: 203596 - protein, 1408 aa, Oryza sativa
  unsure (1)..(1408): unsure at all Xaa locations
  Clone ID: PAT_MRT4530_98765C.1.pep
MATATARGMRRPPALSSWSWPLHPSPPVAARPRLPPSSLTCGIEREERVGVRPATVEVRWRDVCVEAECQVVSGKPLPTLWNAALSRFSLLAAKLGFSHHQSKVQILENVSGIIKPSRITLLLGPPGCGKTTLLKALAGRLNKSLKETGEIEYNGVKLDEFVPAKTSAYVSQYDLHVADMTVRETLDFSARFQGVGSRAEIMKAVIKREKEAGITPDPDIDAYMKIMGLDKCADVKVGNAMRRGISGGEMKRLTTEGHNTRFYSPNVSQNTNLKEIPAELAKWSLNNSKHYLVLFGLQPSTMSCRIVTTVGPNFSTQLDFLMGEMIVGPCKVLLMDEISTGLDSSTTFQIVSCLQQLAHISEYTILVSLLQPAPETYDLFDDIIIMGEGKVVYHGPKNLIMTFFESCGFKCPERKGPADFLQEVLSKKDQQQYWSRSEQWYNFITVDQFCDKFKASQVGQSLAEDLSKLYEKSKANKNALSCSIYSLSKWHLLKACFDRELLLMKRNAFLHITKAVQLGLLAIITGTVFFRTHKNFDIVSANYYMGSLFYALILLMVNGIPELVMSISRLPVFYKHRDHYLYPGWAYAIPAFILKIPASLVAALSWTSISYYLIGYTPEAPRYFRQLLVLFLVHTGALSLYRCVGSYCQTIAVGPIAATMSLLVILLFGGFLIPRPSMPNWLKWGFWLSPLSYAEIGLTGNEFLAPRWLKITISGVTIGRRILIDRGLDFSVYFYWISVAALIGFILLYNIGFAIGLTIKQSPGASQAIISNDKIRICHGRDQEKSKDIKIGTRRMALPFTPLTISFQDVNYYVDTPPEMRKKGYMGRKLQLLRNITGAFQPGILSALMGVTGAGKTTLLDVLAGRKTGGVIEGDIRIGGYPKVQQTFSRISGYCEQNDVHSPQITVGESVAYSAWLRLPAEIDTKTRKEFVDEVLEIIELDEIRDALVGTPGVNGLSREQRKRLTIAVELVSNPSIVFMDEPTSGLDARAAAIAMRAVKNVAETGRTVVCTIHQPSIEIFEAFDELMLIKRGGELIYAGPLGQHSCKVIQYFQSIPGVPKIKDNYNPSTWMLEVTSTSMEAQLGVDFAQIYTGSSIRKDKDELIKGFSMPPPGTSDLHFPTRFPQKFLEQFKACLWKQFLSHWRTPSYNLVRIVFMAFSSIIFGVLYWQQGNIRHINDQQXLFTILGCMYGITIFTGINNSQSAMPFVAVERSVMYRERFAGMYSPWAYSFAQVAMEIPYVLMLALLFMLIAYPTIGYAWTAAKFCWFFYTMFCTLLYFVYFGMLIVSITPNLQVASIYASSFYMTQHLLSGFVMPPSQIPKWWIWLYYISPMSWTLNLLFTTQFGFEDNSNILVFGETKPIAAFVRDYFGFHRELLPLSAIILAAYPVLFAILYGYSISRFNFQKR

SEQ ID NO: 203597 - protein, 40 aa, Oryza sativa
  Clone ID: PAT_MRT4530_98766C.1.pep
SRAATHLLSRPRSSASCIRASGIHGCNRQTSQSTSSSTRS

SEQ ID NO: 203598 - protein, 118 aa, Oryza sativa
  unsure (1)..(118): unsure at all Xaa locations
  Clone ID: PAT_MRT4530_98767C.1.pep
XLFGGFFFFFFFFFFFFFFFKGETQQKGGIFKKNTNPFSWGKGKGNPKKKNPHPPFKKEKKPPILLGPGGQGPLYQPREGGTQAPPSFGRVLKNPTLCQGFGKGKGDPPLNFPGGLLN

SEQ ID NO: 203599 - protein, 195 aa, Oryza sativa
  Clone ID: PAT_MRT4530_98768C.1.pep
MAGVQVMPAVGAVATAEGSCRAAGQRRGRGVSSLFAGDWRRRPRRAACTARVRGRRQQQQQQGLAVVCNLGGTYDEGFEDIHVQLINVFTYKAVKTVLTQLYEMNPPSYRWLYNFVAVNKPTDGKVFLRALGKEKQELAERVMITRLHLYSKWIKKCDHAMMYERISDENLALMRERLMETVIWPTDDTNTEKIG

SEQ ID NO: 203600 - protein, 137 aa, Oryza sativa
  Clone ID: PAT_MRT4530_98769C.1.pep
MVAPRIGLPPSFGAKKGRCKVANVNDGMSGHRWHRQLTQEKEAIAAEVVVQHIRGTVLETFVLWRSKRYYIGCDLGYDNPRFHDPARWRQYNNFFALATKIGRYKELREKAMPGLRSMLATSTFVGNWASFLSLEAL

SEQ ID NO: 203601 - protein, 172 aa, Oryza sativa
  Clone ID: PAT_MRT4530_9876C.1.pep
MASKAFALVLLAAATLAMAASTAAAQSSPQDFVDAHNDARRGEGVGLPDVVWNTTLQAFAESYVAVLAATCSLDHSNSVQLGYGENLYMGGAGSASTAADAVGLWMEEKADYVYSSNTCTRGALLDCGHYTQVVWRSTTSIGCARAACSNGGGVIISCNYFPPGNFPDQRPY

SEQ ID NO: 203602 - protein, 215 aa, Oryza sativa
  unsure (1)..(215): unsure at all Xaa locations
  Clone ID: PAT_MRT4530_98770C.1.pep
YILIPKKNQYILIPRKISANGREVRLHHNYCENHRFSQSXNGLPAKMQKNEKKNRRTPCHRRPPPAGSERGGEPLPPXSIPSSPRASSSPPPRAFVAAATPAGLPPPSSGQICEGGREGRRRRPPRAGEGGGRGAAAVAPAGLPLPPPARSXGRGQGSRCRRPDRTAAAPRHLGGRGEGSRRRRSDFGRASSPLPPSXRRRREPPPGRVEVRGGE

SEQ ID NO: 203603 - protein, 149 aa, Oryza sativa
  Clone ID: PAT_MRT4530_98771C.1.pep
RGDLSKAHRTCISVWFRTRGSNKCEICQQVAVNIPPPETQASTSYWVWRVDSAYGRGRGGHERKEGWFSPLWVAFAILIGGLLLDVLISVSLGVSALPVNIIIGVLIVLGLGTALRLALECCQEWGSRRSMPRLPMDGSMAPSGYHPGV

SEQ ID NO: 203604 - protein, 71 aa, Oryza sativa
  Clone ID: PAT_MRT4530_98772C.1.pep
RCPAFFCRCQPGSLFPPELSVVPHKHLWMLEAFFIAPPPGLFFVRHTLPPQKSILKSLNGRSYKVNNSAIP

SEQ ID NO: 203605 - protein, 292 aa, Oryza sativa
  unsure (1)..(292): unsure at all Xaa locations
  Clone ID: PAT_MRT4530_98773C.1.pep
LSSSLFLLIPLFLPSLFISLSLPFHRPRGARVEXRRRGGGWSGGDRWELKRRWRXRARANAGGGGRRRRRRRSAPDDAEPGHLLLRLAQRLQELLTPPEAALXPMMARNVRLCRRWRRWRXTRLPPPPPVASMEFLTVRPAMEVGAPGLGARRRPSSILDFGHDGVHIFLLACLLLXCYIGVFVVLLLDSAGSAPYTFAGALCGLVGLGSWTASSGTATIRHADTVRLRSITMGKLAPARCCHVGHRXRRRSDSRLPSPPLPADCAMRDKVKRNGXDKEREGREREREGEEE

SEQ ID NO: 203606 - protein, 108 aa, Oryza sativa
  unsure (1)..(108): unsure at all Xaa locations
  Clone ID: PAT_MRT4530_98774C.1.pep
MQLNPKARTRRNKTKSKGWXCAEIVLNVTLSMYGNHLEAPQSNPTSHIKLYCRDRLRLLTXPDSDSADLIVADLDSSRFLPCFRXNLRLRLCFDLIFFPNADVTKFGC

SEQ ID NO: 203607 - protein, 117 aa, Oryza sativa
  unsure (1)..(117): unsure at all Xaa locations
  Clone ID: PAT_MRT4530_98775C.1.pep
YSPPAAAVLLPSLLPPRRCSSGDRRLPIPPPPPPSTLTSSRASPLSPIPMPSPSRAPSTSSPPPPPTSPPPTASPPPPRRVLPCRSAAPSAATPPRXPPPAPPRPGAQHRPPRRPRP

SEQ ID NO: 203608 - protein, 112 aa, Oryza sativa
  Clone ID: PAT_MRT4530_98776C.1.pep
MELRKQMRRTHIVIDTVTPVDEKKEKEEKEKKEKEEKEKKEKEEKEKKKKEEEQNNPKIVCGSRCPASSASRPSFTASVHNTVSSPPPSACMTTPPCHYGTTWCPLRRHQRA

SEQ ID NO: 203609 - protein, 1701 aa, Oryza sativa
  Clone ID: PAT_MRT4530_98777C.1.pep
MAKTSTAAGGNETTQEERIAGAVVEETGKTPMSDVELAELVQAQGAVMVSKGQYEELQKELQRLQTLHNQTVGAGGSSDQCAIPGAREKQSDQAKGDAQGENKEGESTKATQAQDLPRTQAPSQVQNPSQAQIPILTQNTPQAQITIPTQNLARTLIPSQNQIPIQTHISFQPHIPIQTQIPNQVQYPQTQLHQTHPVLPNQIQIPQPHILQSNIPRTQLPQNDIPQIQVPQTQIPQIQTSLPNFTHTQSTNTQAAQNHHQVPQGFSPFHMQQPEMMLEQGYIPQMANHIQYAGQIPNQAFQFQPTQPYFQPTRAIDTKNPLSQNLQMAPWPINFKLSNITKYKGDTDPNEYLRVYETAVEAAGGDDTTKAKILPTMLEGVHYHGFIGAYEEPKEADDLYAMKQLPGETLRSFIVKFSRVRCQIRHVDDEMLIAAAKRALLPGPLRFDLARNRPKTAKDLFERMESFARGEEDELRVQEEEAVYTGKPWKRFKYDYKQDQKKQVNFIGDGSNNEREKGKHQWDNTRRGRNNWGQSGKGRGQWWNSGRGGHSTEECRQMTHLLEKHVNRYENKYEGARDQRGQNAIEAPQVMKIEAIEEVPKRVINAITGGSSLGIESKRQRKAYVRQGEYIKIQKPIPEGKTKKVQLDEHDPGKFILIGENLEKHVEEEILKVVKENMAVFAWSPDELQGVDRSLIEHNLAIKSRYTPKKHKLRRMSIDRQQAAKIELEKLLKAKVIREVMHPEWLANPVLVKKANGKWRMCIDFTDLNKACPKDDFPLPRIDQLVDATAGCELMSFLDAYSGYHQVFMVKEDEEKTSFITPFGTYCFIRMPFGLKNAGATFARLIGKVLAKQLGRNVEAYVDDIVVKSKQAFTHGKDLQETFENLRKCSVKLNPEKCVFGVRAGKLLGFLVSKRGIEANPDKIAAIHQMEPPKNTREVQRLTGRMASLSRFLSKSAEKGLPFFKTLRGANTFEWTAECQQAFEDLKKYLHEMPTLASPPKGQPLLMYVAATPATVSAVLVQEEENRQVPVYFVSEALQGPTTRYSEVEKLIYAIVMASRKLRHYFLSHDITIPSAYPIGEVLTNKEVAGRIAKWAMELLPFDLKYISRTAIKSQVLADFVAEWTPNEVEQQEEVEKPWIVFSDGACNAAGAGAAAVVKTPMKQTLKYSVQLAFPSTNNTAEYEGVLLAMRKARALGARRLIVKTDSKLVAGHFSKSFEAKEETMAKYLEEARLNEKHFLGITVKAITREENGEADELAKAAATGQPLENSFFDIITQPSYEKKEVACIQREGDWREPILKYLASAQLPEKEEEAKRIQLTSKKYKVVEGQLYKSGVTAPLLKCVTREEGMKMVVEIHEGLCGAHQAPRSVASKVIRQGIYWPTIMKDTEKYIKTCKACQKFGPMTKAPPKELQPIPPVWPFYRWGIDIVGPLPRAKGDLRFIIVAIEYFSRWIEAEAVARITSAALQKFVWKNIICRFGIPREIVCDNGKQFESGKFQDMCKGLNLQINFASIGHPQTNGAVERANGKIMEAIKKRLEGSAKGKWPEDLLSVLWALRTTVVRSTGMTPFRLVYGDEAMTPSEVGAHSPRMIFDQKDEEGRDITLEMLDEIRVEALEKMASYTEGTKSYYNQKVKTRPIEEGDLVLKKVLNEVAVGKLESKWEGPFIVKKKTETGAFKLAYLDGDELKHTWNAISLKKFYA

SEQ ID NO: 203610 - protein, 39 aa, Oryza sativa
  Clone ID: PAT_MRT4530_98778C.1.pep
FWPSFPGEDAGERRQCWCGAGSKRLFTPRRLWYCITLPL

SEQ ID NO: 203611 - protein, 1892 aa, Oryza sativa
  unsure (1)..(1892): unsure at all Xaa locations
  Clone ID: PAT_MRT4530_98779C.1.pep
MAKTSTAAGGNETTQEEGIAGAVVEETGKTPMSDVELAELVQAQGAVMVSKGQYEELQKELQRLQTLHNQTVGAGGSSDQCAIPGAREKQSDQAKGDAQGENKEGESIKATQAQDLPRTQAPSQXLPNQIQIPQPHILQSNIPRTPXQNDTPQIQVPQTQIPQIQTSLPNFTHTQSTSTQAAQNHHQVPQGFPLFHMQQPEMMFEQGYIPQMANHIQYAGQIPNQAFQFQPTQPYFQPTRAIDTKNPLSQNLQMAPWPINFKLSNITKYKGDTDPNEYLRVYETAVEAAGGDDTTKAKILPTMLEGVALSWYTTIPPMTIYSWEHMRDTFRAGFIGAYEEPKEADDLYAMKQLPGETLRSFIVKFSRVRCQIRHVDDEMLIAAAKRALLPGPLRFDLARNRPKTAKDLFERMESFARGEEDELRVQEEEAVLLGKKQSKNKQISQGEEQKGENTGKPWKKFKYDYKQDQKKQVNFIGDGSNNEREKGKHQWDNTRRGRNNWGQSGKGRGQWWNSGRGRGRWWNNERGKGRENKPDQTKFCQTHGPGGHSTEECYKECRQMTHLLEKHVNRYENKYEGARDQRGQNAIEAPQVMKIEAIEEVPKRVINAITGGSSLGVESKRQRKAYVRQVNHVGTSYQSKSPVYSKTVISFGPEDAEGILFPHQDPLVVSVEIAQCEVQRVLIDGGSSADVLFYDAFKKMQIPEDRLTNAGVPLQGFGGQQVHAIGKISLQVVFGKGTNVRKEEIVFDVVDMPYQYNAILGRSTINIFEAIIHHNYICMKLPGPRGVITVRGEQLAARKYELQGTPSVKGVHVVDQKQGEYIKIQKPIPEGKTKKVQLDEHDPGKFILIGENLEKHIEEEILKVVKENMAVFAWSPDELQGVDRSLIEHNLAIKSGYKPKKQKLRRMSTDRQQAAKIELEKLLKAKVIREVMHPEWLANPVVSKEANGKWRMCIDFTDLNKACPKDDFPLPRIDQLVDATAGCELMSFLDAYSGYHQVFMVKEDEEKTSFITPFGTYCFIRMPFGLKNAGATFARLIGKVLAKQLGRNVEAYVDDIVVKSKQAFTHGKDLQETFENLRKCSVKLNPEKCVFGVRAGKLLGFLVSKRGIEANPDKIAAIHQMEPPRNTREVQRLTGRMASLSRFLSKSAEKGLPFFKTLRGANTFEWTAECQQAFDDLKKYLHEMPTLASPPKGQPLLMYVAATPATVSAVLVQEEENRQVPVYFVSEALQGPKTRYSEVEKLIYAIVMASRKLRHYFLSHDVTIPSAYPIGEVLTNKEVAGRIAKWAMELLPFDLKYISRTAIKSQVLADFVAEWTPNEVEQQEEVEKPWIAFSDGACNAAGAGAAAVVKTPMKQTLKYSVQLAFPSTNNTAEYEGVLLAMRKARALGARRLIVKTDSKLVAGHFSKSFEAKEETMAKYLEEARLNEKHFLGITVKAITREENGEADELAKAAATGQPLENSFFDIITQPSYEKKEVACIQREGDWREPILKYLVSAQLPEKEEEAKRIQLTSKKYKVVEGQLYKSGVTAPLLKCVTREEGMKMVVEIHEGLCGAHQAPRSVASKVIRQGIYWPTIMKDTEKYIKTCKACQKFGPMTKAPPKELQPIPPVWPFYRWGIDIVGPLPRAKGDLRFVIVAIEYFSRWIEAEAVARITSAAVQKFVWKNIICRFGIPKEIVCDNGKQFESGKFQDMCKGLNLQINFASVGHPQTNGAVERANGKITEAIKKRLEGSAKGKWPEDLLSVLWALRTTVVRSTGMTPFRLVYGDEAMTPSEVGAHSPRMIFDQKDEEGREITLEMLDEIRVEALEKMASYTEGTKSYYNQKVKTRPIEEGDLVLKKVLNEVAVGKLESKWEGPFIVKKKTETGAFKLAYLDGEELKHTWNAISLKKFYA

SEQ ID NO: 203612 - protein, 115 aa, Oryza sativa
  unsure (1)..(115): unsure at all Xaa locations
  Clone ID: PAT_MRT4530_9877C.1.pep
IVSYVPLRRAKWWFPLSNFDGQRPXVLISVLPSNQPVVSLFQCHFWIQFKQISNKQSLGPSHVYEQCTKIFMCNRLTRSLTISTTAITSACTCIYTRMVEAFVLRAGTLVTPMYF

SEQ ID NO: 203613 - protein, 1797 aa, Oryza sativa
  unsure (1)..(1797): unsure at all Xaa locations
  Clone ID: PAT_MRT4530_98780C.1.pep
MAKTSTAAGGNETTQEERIAGAVVEETGKTPMSDVELAELVQAQGAVMVSKGQYEELQKELQRLQTLHNQTVGAGGSSDQCAIPGAREKQSDQAKGDAQGENKEGESIKATQAQDLPRTQAPSQVQNPSQAQIPILTQNTPQAQITIPTQNLAQTLIPSQNQIPIQTHISFQPHIPIQTQNPNQVQYPQTQLHQAHPVLPNQIQIPQPHILQSNIPRTQPPQNDTPQIQVPQTQIPQIQTSLPNFTHTQSTNTQAAQNHHQVPQGFSLFHMQQPEMMFEQGYIPQMANHIQYAGQIPNQAFQFQPTQPYFQPTRAIDTKNPLSQNLPMAPWPINFKLSNITKYKGDTDPNEYLRVYETAVEAAGGDDTTKAKILPTMLEGVALSWYTTIPPMTIYSWXHMRDTFRAESIGAYEEPKKADDLYAMKQLPGETLRSFIVSFQGNRPKTAKDLFERMESFARGEEDELRVQEEEAVLLGKKQSKNKQISQGEEQKGENTGKPWKKFKYDYKQDQKKQVNFIGDGYNNEREKGKHQWDNTRRGRNNWGQSGKGRGQWWNSGRGRGRWWNNERGKGRENKPDQTKFCQTHGPGGHSTEECYSKFCHIHGPGGHSTEECRQMTHLLEKHVNRYEDKYEGARDQRGQNAIEAPQVMKIEAIEEVPKRVINAITGGSSLGVESKRQRKAYVRQVNHVGTSYQSNPPVYSKTVISFGPEDAEGILFPHQDPLVVSVEIAQCEVQRVLIDGGSSADVLFYDAFKKMQIPEDRLTNAGVPLQGFGGQQVHAIGKISLQVVFGKGTNVRKEEIVFDVVDMPYQYNAILGRSTINIFEAIIHHNYICMKLPGPRGVITVRGEQLAARKYELQGTPSVKGVHVVDQKQGEYIKIQKPIPEGKTKKVQLDEHDPGKFILIGENLEKHIEEEILKVVKENMAVFAWSPDELQGVDRSLIEHNLAIKSGYKPKKQKLRRMSTDRQQAAKIELEKLLKAKVIREVMHPEWLANPVLVKKANGKWRMCIDFTDLNKACPKDDFPLPRIDQLVDATAGCELMSFLDAYSGLPPSFMNAGATFARLIGKVLAKQLGRNVEAYVDDIVRQIPDKIAAIHQMEPPRNTREVQRLTGRMASLSRFLSKSAEKGLPFFKTLRGANTFEWTAECQQAFDDLKKYLHEMPTLASPPKGQPLLMYVAATPATVSAVLVQEEENRQVPVYFVSEALQGPKTRYSEVEKLIYAIVMASRKLRHYFLSHDITIPSAYPIGEVLTNKEVAGRIAKWAMELLPFDLKYISRTAIKSQVLADFVAEWTPNEVEQQEEVEKPWIVFSDGACNAAGAGAAAVVKTPMKQTLKYSVQLAFPSTNNTAEYEGVLLAMRKARALRARRLIVKTDSKLVGGHFSKSFEVKEETMAKYLEEARLNEKHFLGITVKAITREENGEADELAKAAATGQPLENSFFDIITQPSYEKKEVACIQREGDWREPILKYLVSAQLPEKEEEAKRIQLTSKKYKVVEGQLYKSGVTAPLLKCVTREEGMKMVVEIHEGLCGAHQAPRSVASKVIRQGIYWPTIMKDTEKYIKTCKACQKFGPMTKAPPKELQPIPLVWPFYRWGIDIVGPLPRAKGDLRFVIVAIEYFSRWIEAEAVARITSAAVQKFVWKNVICRFGIPKEIVCDNGKQFESGKFQDMCKGLNLQINFASVGHPQTNGAVERANGKIMEAIKKRLEGSAKGKWPEDLLSVLWALRTTVVRSTGMTPFRLVYGDEAMTPSKVGAHSPRMIFDQKDEEGREITLEMLDEIRVEALEKMASYIEGTKS

SEQ ID NO: 203614 - protein, 452 aa, Oryza sativa
  Clone ID: PAT_MRT4530_98781C.1.pep
MMAAPQLPCCTRLAPPCPGKAAAEARTLARSRFRCCAGAARPRSFQKKDSFLDLHPEVTLLRGGDEAAVVATRKGSPNGSPLEGLGAPPDHCDYDGAKIKVVGVGGGGSNAVNRMIESSMNGVEFWIVNTDVQAIRMSPVLPQNRLQIGQELTRGLGAGGNPDIGMNAAKESVESIQEALYGADMVFVTAGMGGGTGTGGAPVIAGIAKSMGILTVGIVTTPFSFEGRRRAVQAQEGIAALRNSVDTLIVIPNDKLLSAVSPNTPVTEAFNLADDILRQGIRGISDIITVPGLVNVDFADVRAIMQNAGSSLMGIGTATGKSRARDAALNAIQSPLLDIGIERATGIVWNITGGADMTLFEVNSAAEIIYDLVDPNANLIFGAVIDPSLNGQVSITLIATGFKRQDEPEGRTTKGGQQTQGDNGRRPSSAEGSMIEIPEFLRRRGPSRFPRV

SEQ ID NO: 203615 - protein, 2001 aa, Oryza sativa
  Clone ID: PAT_MRT4530_98782C.1.pep
MAVEESDLARATETLDKQWAEMAKTSTAAGGNETTQEERIADAVVEETGKTPMSDVELAELVQAQGAVMVSKGQYEELQKELQRLQTLHNQTVGAGGSSDQCAIPGAREKQSDQAKGDAQGENNEGESIKATQAQDLPRTQAPSQVQNPSQAQIPILTQNTPQAQITIPTQNLAQTLIPSQNQIPIQTHISFQPHIPIQTQIPNQVQYPQTQLHQAHPVLPNQIQIPQPHILQSNIPRTQPPQNDTPQIQVPQTQIPQIQTSLPNFTHTQSTNTQAAQNHHQVPQGFSPFHMQQPEMMFEQGYIPQMANHIQYAGQIPNQAFQFQPTQPYFQPTRAIDTKNPLSQNLQMAPWPINFKLSNITKYKGDTDPNEYLRVYETAVEAAGGDDTTKAKILPTMLEGVALSWYTTIPPMTIYSWEHMRDTFRAGFIGAYEEPKEADDLYAMKQLPGETLRSFIVKFSRVRCQIRHVDDEMLIAAAKRALLPGPLRFDLARNRPKTAKDLFERMESFARGEEDELRVQEEEAVLLGKKQSKNKQISQGEEQKGENTGKPWKKFKSDYRQDQKKQVNFIGDGSNNEREKGKHQWDNTRRGRNNWGQSGKGRGQWWNSGRGRGRWWNNERGKGRENKPDQTKFCQTHGPGGHSTEECYSKFCHIHGPGGHSTEECRQMTHLLEKHVNRYENKYEGARDQRGQNAIEAPQVMKIEAIEEVPKRVINAITGGSSLGVESKRQRKAYVRQVNHVGTSYQSNPPVYSKTVISFGPEDAEGILFPHQDPLVVSVEIAQCEVQRVLIDGGSSADVLFYDAFKKMQIPEDRLTNAGVPLQGFGGQQVHAIGKISLQVVFGKGTNVRKEEIVFDVVDMPYQYNAILGRSTINIFEAIIHHNYICMKLPGPRGVITVRGEQLAARKYELQGTPSVKGVHVVDQKQGEYIKIQKPIPEGKTKKVQLDEHDPGKFILIGENLEKHIEEEILKVVKENMAVFAWSPDELQGVDRSLIEHNLAIKSGYKPKKQKLRRMSTDRQQAAKIELEKLLKAKVIREVMHPEWLANPVLVKKANGKWRMCIDFTDLNKACPKDDFPLPRIDQLVDATAGCELMSFLDAYSGYHQVFMVKEDEEKTSFITPFGTYCFIRMPFGLKNAGATFARLIGKVLAKQLGRNVEAYIDDIVVKSKQAFTHGKDLQETFENLRKCSVKLNPEKCVFGVRAGKLLGFLVSKRGIEANPDKIAAIHQMEPPKNTREVQRLTGRMASLSRFLSKSAEKGLPFFKTLRGANTFEWTAECQQAFDDLKKYLHEMPTLASPPKGQPLLMYVAATPATVSAVLVQEEENRQVPVYFVSEALQGPKTRYSEVEKLIYAIVMASRKLRHYFLSHDITIPSAYPIGEVLTNKEVAGRIAKWAMELLPFDLKYISRTAIKSQVLADFVAEWTPNEVEQQEEVEKPWIVFSDGACNAAGAGAAAVVKTPMKQTLKYSVQLAFPSTNNTAEYEGVLLAMRKARALGARRLIVKTDSKLVAGHFSKSFEAKEETMAKYLEEARLNEKHFLGITVKAITREENGEADELAKAAATGQPLENSFFDIITQPSYEKKEVACIQREGDWREPILKYLVSAQLPEKEEEAKRIQLTSKKYKVVEGQLYKSGVTAPLLKCVTREEGMKMVVEIHEGLCGAHQAPRSVASKVIRQGIYWPTIMKDTEKYIKTCKACQKFGPMTKAPPKELQPIPPVWPFYRWGIDIVGPLPRAKGDLRFVIVAIEYFSRWIEAEAVARITSAAVQKFVWKNIICRFGIPKEIVCDNGKQFESGKFQDMCKGLNLQINFASVGHPQTNGAVERANGKIMEAIKKRLEGSAKGKWPEDLLSVLWALRTTVVRSTGMTPFRLVYGDEAMTPSEVGAHSPRMIFDQKDEEGREITLEMLDEIRVEALEKMASYTEGTKSYYNQKVKTRPIEEGDLVLKKVLNEVAVGKLESKWEGPFIVKKKTETGAFKLAYLDGEELKHTWNAISLKKFYA

SEQ ID NO: 203616 - protein, 1298 aa, Oryza sativa
  Clone ID: PAT_MRT4530_98783C.1.pep
MTHLLEKHVNRYENKYEGARDQRGQNAIEAPQVMKIEAIEEVPKRVINAITGGSSLGVESKRQRKAYVRQVNRVGTSYQSNPPVYSKTVISFGPEDAEGIFFPHQDPLVVSVEIAQCEVQRVLIDGGSSADVLFYDAFKKIQIPEDRLTNAGVPLQGFGGQQVHAIGKISLQVVFGKGTNVRKEEIVFDVVDMPYQYNAILGRSTINIFEAIIHHNYICMKLPGPRGVITVRGEQLAARKYELQGTPSVKGVHVVDQKQGEYIKIQKPIPEGKTKKVQLDEHDPGKFILIGENLEKHIEEEILKVVKENMAVFAWSPDELQGVDRSLIEHNLAIKSGYKPKKQKLRRMSTDRQQAAKIELEKLLKTKVIREVMHPEWLANPVLVKKANGKWRMCIDFTDLNKACPKDDFPLPRIDQLVDATARCELMSFLDAYSGYHQVFMVKEDEEKTSFITPFGTYCFIRMPFGLKNAGATFARLIGKVLAKQLGRNVEAYVDDIVVKSKQAFTHGKDLQETFENLRKCSVKLNPEKCVFGVRAGKLLGFLVSKRGIEANPDKIAAIHQMEPPKNTREVQRLTGRMASLSRFLSKSAEKGLPFFKTLRGANTFEWTAECQQAFDDLKKYLHEMPTLASPPKGQPQLMYVAATPATVSAVLVQEEENRQVPVYFVSEALQGPKTRYSEVEKLIYAIVMASRKLRHYFLSHDITIPSAYPIGEVLTNKEVAGRIAKWAMELLPFDLKYISRTAIKSQVLADFVAEWTPNEQTLKYSVQLAFPSTNNTAEYEGVLLAMRKARALGARRLIVKTDSKLVAGHFSKSFEAKEETMAKYLEEARLNEKHFLGITVKAITKEENGEADELAKAAATGQPLENSFFDIITQPSYEKKEVACIQREGDWREPILKYLVSAQLPEKEEEAKRIQLTSKKYKVVEGQLYKSGVTAPLLKCVTREEGMKMVVEIHEGLCGAHQAPRSVASKVIRQGIYWPTIMKDTEKYIKTCKACQKFGPMTKAPPKELQPIPLVWPFYRWGIDIVGPLPRAKGDLRFVVVAIEYFSRWIEAEAVARITSAAVQKFVWKNIICRFGVPKEIVCDNGKQFESGKFQDMCKGLNLQINFASVGHPQTNGAVERANGKIMEAIKKRLEGSAKGKWPEDLLSVLWALRTTVVRSTGMTPFRLVYGDEAMTPSEVGAHSPRMIFDQKDEEGREITLEMLDEIRVEALEKMASYTEGTKSYYNQKVKTRPIEEGDLVLKKVLNEVAVGKLESKWEGPFIVKKKTETGAFKLAYLDGEELKHTWNAISLKKFYA

SEQ ID NO: 203617 - protein, 157 aa, Oryza sativa
  Clone ID: PAT_MRT4530_98784C.1.pep
SWKTTIHRRPSYPSTGNEHQDVISAAGDLVHSTPVRSYSNLQEESKSLSLSFLSFQVGDEPVRDAAGVIVAAMTISEPSPLPSRLIRPPSSTFINISISSQMDSSIHLQIIQEATPKKVLMATTGKANLDWFLSFGSSAYVHAWRTAGCAAIAGVVA

SEQ ID NO: 203618 - protein, 1980 aa, Oryza sativa
  unsure (1)..(1980): unsure at all Xaa locations
  Clone ID: PAT_MRT4530_98785C.1.pep
KAVEESDLARATETLDKQWAEMAKTSTAAGGNETTQEERIAGAVVEETGKTPMSDVELAELVQAQGAVMVSKGQYEELQKELQRLQTLHNQTVGAGGSSDQCAIPGAREKQSDQAKGDAQGENKEGESTKATQAQDLPRTQAPSQVQNPSQAQIPILTQNTPQAQITIPTQNLARTLIPSQNQIPIQTHISFQPHIPIQTQIPNQVQYPQTQLHQTHPVLPNQIQIPQPHILQSNIPRTQLPQNDIPQIQVPQTQIPQIQTSLPNFTHTQSTNTQAAQNHHQVPQGFSPFHMQQPEMMLEQGYIPQMANHIQYAGQIPNQAFQFQPTQPYFQPTRAIDTKNPLSQNLQMAPWPINFKLSNITKYKGDTDPNEYLRVYETAVEAAGGDDTTKAKILPTMLEGVXLSWYTTIPPMTIYSWEHMRDTFRAGFIGAYEEPKEADDLYAMKQLPGETLRSFIVKFSRVRCQIRHVDDEMLIAAAKRALLPGPLRFDLARNRPKTAKDLFERMESFARGEEDELRVQEEEAVYTGKPWKRFKYDYKQDQKKQVNFIGDGSNNEREKGKHQWDNTRRGRNNWGQSGKGRGQWWNSGRGRGRWWNNERGKGRENKPDQTKFCQTHGPGGHSTEECYSKFCHIHGPGGHSTEECRQMTHLLEKHVNRYENKYEGARDQRGQNAIEAPQVMKIEAIEEVPKRVINAITGGSSLGIESKRQRKAYVRQVNHVGTSYQSNPPVYSKTVISFGPEDAEGILFPHQDPLVVSVEIAQCEVQRVLIDGGSSADVLFYDAFKKMQIPEDRLTNAXVPLQGFGGQQVHAIGKISLQVVFGKGTNVRKEEIVFDVVDMPYQYNAILGRSTINIFEAIIHHNYICMKLPGPRGVITVRGEQLAGRKYELXGTPSVKGVHVVDQKQGEYIKIQKPIPEGKTKKVQLDEHDPGXFILIGENLEKHVEEEILKVVKENMAVFAWSPDELQGVDRSLIEHNLAIKSGYKPKKQKLRRMSIDRQQAAKIELEKLLKAKVIREVMHPEWLANPVLVKKANGKWRMCIDFTDLNKACPKDDFPLPRIDQLVDATAGCELMSFLDAYSGYHQVFMVKEDEEKTSFITPFGTYCFIRMPFGLKNAGATFARLIGKVLAKQLGRNVEAYVDDIVVKSKQAFTHGKDLQETFENLRKCSVKLNPEKCVFGVRAGKLLGFLVSKRGIEANPDKIAAIHQMEPPKNTREVQRLTGRMASLSRFLSKSAEKGLPFFKTLRGANTFEWTAECQQAFEDLKKYLHEMPTLASPPKGQPLLMYVAATPATVSAVLVQEEENRQVPVYFVSEALQGPTTRYSEVEKLIYAIVMASRKLRHYFLSHDITIPSAYPIGEVLTNKEVAGRIAKWAMELLPFDLKYISRTAIKSQVLADFVAEWTPNEVEQQEEVEKPWIVFSDGACNAAGAGAAAVVKTPMKQTLKYSVQLAFPSTNNTAEYEGVLLAMRKARALGARRLIVKTDSKLVAGHFSKSFEAKEETMAKYLEEARLNEKHFLGITVKAITREENGEADELAKAAATGQPLENSFFDIITQPSYEKKEVACIQREGDWREPILKYLASAQLPEKEEEAKRIQLTSKKYKVVEGQLYKSGVTAPLLKCVTREEGMKMVVEIHEGLCGAHQAPRSVASKVIRQGIYWPTIMKDTEKYIKTCKACQKFGPMTKAPPKELQPIPPVWPFYRWGIDIVGPLPRAKGDLRFIIVAIEYFSRWIEAEAVARITSAALQKFVWKNIICRFGIPREIVCDNGKQFESGKFQDMCKGLNLQINFASVGHPQTNGAVERANGKIMEAIKKRLEGSAKGKWPEDLLSVLWALRTTVVRSTGMTPFRLVYGDEAMTPSEVGAHSPRMIFDQKDEEGRDITLEMLDEIRVEALEKMASYTEGTKSYYNQKVKTRPIEEGDLVLKKVLNEVAVGKLESKWEGPFIVKKKTETGAFKLAYLDGDELKHTWNAISLKKFYA

SEQ ID NO: 203619 - protein, 266 aa, Oryza sativa
  Clone ID: PAT_MRT4530_98786C.1.pep
MSQVGSAPETMDLETENRLASLLLEEARRLQAEADREGVHAYLRKPNVRHRPNSRFLTATVRGVQQANRVVEVNEMWRAREKELELESKMKRSRGLGDARGEKRKSDLRNQSSSPRVEEEGIAYNSSYSDQEDGLGDDDIEKFLHSRVKRGRGAVGSRMDEPGPYLNVASRSQENEPNADTQVEEKWERRVQGPEKPVSLRSRSPDDYWRREALDGEPSSPELHKKKEKKKEKSSEKKDRKERRKKKDKKKSKHRHHHHHKSRQRE

SEQ ID NO: 203620 - protein, 192 aa, Oryza sativa
  Clone ID: PAT_MRT4530_98787C.1.pep
MAPTAEVAAAPVQEQEKCNGGGGGGFRGAAVRCHPALSTEKKASIRGVVGELLGAAAAAAGAGEERRRSLISLGVGDASSHACFRLGGEFAADAVADAARSGVFDCYAPSCGFPAARRAVADHLSAGARHRTRDADVFMTAGGTGAITAIATVLGGAPGANVLLPRPGFAPYEAACELAGAEPRFYDLLPRR

SEQ ID NO: 203621 - protein, 98 aa, Oryza sativa
  Clone ID: PAT_MRT4530_98788C.1.pep
LGQLRGDGQHSDFSKGRLQAPEERRRRGRRSKGVVTRSYVAGGCRASDLQVRRVPENLAFAVQLQVPRDLFKDLEDHHLQQVPDGYGSSCNINYVLGV

SEQ ID NO: 203622 - protein, 79 aa, Oryza sativa
  unsure (1)..(79): unsure at all Xaa locations
  Clone ID: PAT_MRT4530_98789C.1.pep
QANAHALRENKRDIFCPCFDCRNEKMMQDPNDXLHIVERGFMDYYKIWTFHGEVAGRNEEAELPGSMSSPELPEFLSQE

SEQ ID NO: 203623 - protein, 158 aa, Oryza sativa
  unsure (1)..(158): unsure at all Xaa locations
  Clone ID: PAT_MRT4530_9878C.1.pep
MVRTGTMLREEHRSIAVGIPCEKVTRVWILGGQLRSTVGIGTRLREELSSRRSRIPXDEVGYKIAYSGWTSCGRDLRNGLHERSNQQLIGGQTGGIAAVRPAGARRSDRRRRQVRQATSAIRPEIQHRSDRQHPLGQTGRSISVRPTSVDFEDNFYFR

SEQ ID NO: 203624 - protein, 138 aa, Oryza sativa
  Clone ID: PAT_MRT4530_98790C.1.pep
MDPLAVLRDYAGRGDLDKIIFSGDEVLFGSEYTFPANAPTAFTNKQSGRPYPLSAAVFLAQHNDLKHTDFIQAARLRRIPPVSLPDRKTFLDFLRHGRRGRHGEAQGGEVLRGRVRAHHPRAERVADADYDLQREGVL

SEQ ID NO: 203625 - protein, 36 aa, Oryza sativa
  Clone ID: PAT_MRT4530_98791C.1.pep
MSIRYSRTIYVGNLPGDIREREVEDLFYKYGRILDI

SEQ ID NO: 203626 - protein, 62 aa, Oryza sativa
  Clone ID: PAT_MRT4530_98792C.1.pep
DRSGPTATNAVAFPTPTPFAPIRSAPSPRSAGGEKVEFVGGVTERWRTGRTTTTTTFSWWCS

SEQ ID NO: 203627 - protein, 59 aa, Oryza sativa
  Clone ID: PAT_MRT4530_98793C.1.pep
MAPLLLARPRHIWLDGPKHATCRRRRPRTALPQISERTGCRRRSPERSDSSSACWVGAL

SEQ ID NO: 203628 - protein, 717 aa, Oryza sativa
  unsure (1)..(717): unsure at all Xaa locations
  Clone ID: PAT_MRT4530_98794C.1.pep
MAAVAPPQVPVVAPAPAAAAAPPAPAPAAAATAAPVADQTTDLLQKLSLDSQPKAVDAATEPAGAKKXGPAASQPLSVAIPPERSITPVLQDFMDPNMFYLPAYYYGGYDGSVSEWDDDGSVSEWDDYPRYVNPDGVEITPAVYGDIYGYGYAPYGAYSPASSPVPTVDGQMFGQHYQYPTSYYQPPTPVPSTTQGDLQPSANPDKPTAKADPAKTTTNGAPNGTVHSNSGTVPLGSSQQNSSLTPDGTYRAPLLGGVPSAGYLDSTYGYDSTGAHFAWYDGSAYTNGQQRTTTTNHMSSSTFSNGSSARTQNKGSTPQQMGMNNRRPTTTTGSAAPTYPNRMYPSTRSYSQYGNSYKTGLSYSTNGYGSNGYGSNGYDSRLYGRWGLSMDNRYKPRGRGNGYYGFGNESQDGTIELNRGPRSGRFKNQKLFGHTVTIAVKGQSLPTSDSMNATDVPDRTQFNRDDFPVQYDDAKFFVIKSYSEDDIHKSIKYNVWASTTNGNKKLDAAYQEAQAKSSKCPIFLFFSVNTSGQFVGVAEMTGAVDFEKTLEYWQQDKWNGSLSLKWHIVKDVPNNILKHIILENNENKPVTNSRDTQEVNLDQGIQMLKIFKEHVSKTSILDDFAFYENRQKLMQEKRVKQQQIQKQVWDSRAPSSVTGEKQQDAATAKPKLPNGVNGELKVPAENGTAPVVTYAAKVAQTAATEKPALANGTVKAS

SEQ ID NO: 203629 - protein, 130 aa, Oryza sativa
  unsure (1)..(130): unsure at all Xaa locations
  Clone ID: PAT_MRT4530_98795C.1.pep
LLVFLTTTDKSASTRNTAAALHFRVTPKGYRTQGTITGMGFRAVTTCCLPLTNLWDTQQTNWKFSEPGVECIDSSGTPPEFLLESYNRRGRSRXSAKLLGTPPELPFTLYLFLMYKRYNRSSYNSAQSCM

SEQ ID NO: 203630 - protein, 555 aa, Oryza sativa
  unsure (1)..(555): unsure at all Xaa locations
  Clone ID: PAT_MRT4530_98796C.1.pep
VKPADNSKESPPFLPPRFKQPLTSPPLPSPPPPLSPTTPPPPAVPGCAPWPLPTPAPTPPPLPPPPPTPRLPDLSPNSDVRPGSPAPSSHPHXSPPPYARHPXPPCSSLPPRVVSSARPPQPAASPQTTTPPSPFSPLLSSPPSPSPGARLPLAPSLPTAPLLCPPPLGAAVPPPXPVACASLLQPPPLSSAXPATPLRPAPPSLTPPTPPCRRLPPPSCQSPSSTLFPRPLPTPSARLTKPCPARQLMTPWPRRSPTPPXSTGHPPPTRRTCCPQTAPAGALHSXPPPPPRPAPAQPPSTSPPPACTTTSAPSAATAPAAXSWPSTSAAAPAPAPAPGRHPAPPQEAAARRRPPLLPPPSRPAARPPACRPAPPSPPPPAPPPLVSXPKVSSLPAKPAPPAHALTAPKNRLRERVGRGHVTNARSPNATRPPLAACLAVLTHPPPPPPPAPDASPETPAPRPAAESAGSPPVAAPSEPASGRRSGPAPPPRRRRARPWPRPPLLNKPIAAPVSIAKSCVPCTTVCVGKKIEKKEISCRSAFYANSNTRCIHVNI

SEQ ID NO: 203631 - protein, 363 aa, Oryza sativa
  Clone ID: PAT_MRT4530_98797C.1.pep
MERVSCVPLLRRLLLLAAAGLAGAEPQVPCYFVFGDSLVDNGNNNNIASMARANYPPYGVDFPGGATGRFSNGLTTADAISRLLGFDDYIPPYAGATSEQLLTGVNFASAAAGIRDDTGQQLGERISFSAQLQNYQAAVRQLVSILGGEDAAANRLSQCIFTVGMGSNDYLNNYFMPAFYPTSRQYTPEQYADVLINQYAQQLRTLYNYGARKVAVFGVGQVGCSPNELAQNSRNGVTCIERINSAVRMFNRRVVVLVNQFNRLLPGALFTYINCYGIFESIMRTPVEHGLAVTNRGCCGVGRNNGQVTCLPYQAPCANRDEYLFWDAFHPTEAANIFVGRRAYSAAMRSDVYPVDLSTLAQL

SEQ ID NO: 203632 - protein, 60 aa, Oryza sativa
  Clone ID: PAT_MRT4530_98798C.1.pep
MICGMFVKSSADGEAFRRQTRDRVASDQVHWRVKKRLEEHGWGRSKADGGGEARALFPAA

SEQ ID NO: 203633 - protein, 51 aa, Oryza sativa
  Clone ID: PAT_MRT4530_98799C.1.pep
MYLGGGKERCRRADYCCVVMVRRVGVEARVTGMRLREGVRREGGPEGLGTA

SEQ ID NO: 203634 - protein, 89 aa, Oryza sativa
  Clone ID: PAT_MRT4530_9879C.1.pep
LPQSSYRQRFRTSKNLAQVLQNGGQYSIMLPFMTYLETLENKRSLVSAWTMKNICSIFKESITSSISSYFWSDLLRTYSAIILCICSSP

SEQ ID NO: 203635 - protein, 203 aa, Oryza sativa
  Clone ID: PAT_MRT4530_987C.1.pep
MAMAERDERRSGRQWPDFNLRLTRYTSAVGQDKDGSHVANDGGHATNGGDRDEGGDGRGKRRRASRATAAVRRTQQMAATEPNDGGHAVDVADGGDRAGRLAVWRTRLRRRPRGTNAARRRKPICRTVSDAVHVLDNIVGYDALDAEATGASSKYIPPGGYGHFLRMDGLKGKRIGIPNGFFTKEKYGKKQLMVYQKHVALMR

SEQ ID NO: 203636 - protein, 68 aa, Oryza sativa
  Clone ID: PAT_MRT4530_98800C.1.pep
IALLYIEMSRHINRTVASFFKNLPIQILAQKKPARSTRCQQCPPVRADESYLSVVSVLSSIVSCLYCF

SEQ ID NO: 203637 - protein, 915 aa, Oryza sativa
  Clone ID: PAT_MRT4530_98801C.1.pep
MACHARRPHEREMIKESSSPALDADKIEVPSPKDENNSSNSEAATDNEDFEISDDDDDDRNHKHRKREARPQSFDENTEQSPGGPLKKRHKISGGADSHGEAQKDFFPKFKRRPGAGAHSRAPRVNPSFRDSSASVAARAPMTRGRGRNGAPWAQHEPRFNTLEMIDFASQMASQGPPTHPSLFMGPALPSGGSAQNGSWGPYGFMPGMPNGMLDPIHPLGMQGPIQPAISPLIDLGMPRQRCRDFEERGFCLRGDMCPMEHGLNRIVVEDMQSLSQFNLPVTVPNTQGLGIQNEPGTAPVNTSSLGGSKGVPAKDIKSAVTNDVLKLNGTTALAVSDADVYDPDQPLWNNEHPDASAGFAHTDGVWNAESLGYEAAREQGNQVLAADSSQNSKSSVWGRIASKKLGHGKTANATSTSATGNKRNESYDEMAPSTVHVNPASAKDSNGQSNSRIFGDVGRQSNRASHKASRTLYVNGIPLESNRWEALLSHFQKFGQVIDIYIPSNSEKAFVQFSKREEAEAALKAPDAVMGNRFIKLWWANRDRIPDEVEGRIPAKSSHMSAALANSVPQPSSSNRGKENLQSATPRASSGSSAEASGPGTGHKMLPANSVKSLPPDTKRQESLELLEELRKKQEILAQKRDEFRRQLEKLAKQKGLANSAKQAEAGGKEVASNDVHRVTDSKSMNTGTEGPRDAAGTLQNRTSGELASSSHKSSATSAQKPAVATKQTSPLLVPSQNRFKLDNRTTSFRILPPLPPEIADESVLKDHFMSFGELSSVVLEDTEAYNHDATLKPSLSCSACVTYTTRQSAEKAFIGGKSCKGHTLRFMWLTASPGSTNHSRFQKTSIPARASSFSSQTQNMPSESSTTVGKMSSTVKSSTTAKPHSESMPTATSAKTSVEIPKALSSRDSDVSQ

SEQ ID NO: 203638 - protein, 974 aa, Oryza sativa
  Clone ID: PAT_MRT4530_98802C.1.pep
MAEMIAVTLSAKVAAALSGPAAVRLSSLAGVRSGIEAAARDLELLRAFLRFVDSLHGSDPLADAWVDQVRDVAFDLEDAADEYAFLSGHGFFRHGANLGAWFALSRRLWRARERLRELSAAKEQLGIRPAEVSASSSGGAGGLSAAMIGRKIAEASHFVEEGEIVGFAMHERLLMKWLTGDTDPRQLLIAVCGMGGVGKTTLVTNVYKKVAATCHFDCAAWVAVSKSFTTDDLLRRIAKEFHRDNRGCVPWDVDNMDYRSLVEALRGHLAKKRYLLLLDDVWDAHAWYEIRHAFVDDGTKSRIIITTRSQDIASLASSNRIIRLEPLSEQEAWSLFCNTTFREDADRECPYYLRHWASKILDRCCGLPLAIVSVGNLLVLKDRTEFAWKSVYDSLVWYESSDHGIGQVSSILNLSFDDLPYHLKKCFLYCSIYPEDFMIKRKILIRAWIAEGLIKEKGQGTMEEVADDYLNQLVQRSLLQAAVQNEFGRAKRCCIHDLIREMIVHRSTKERFFVFSKCTVTLKSSKKARHLVFDRCRSDRLSAPKMNSLRSFHAFKADLDASLFSSFRLLTVLNLWFTPTAKLPSAVASLLNLRYLGIRSTLIGELPEELGQLHNLQTLDAKWSMVQRLPQSITKLKNLRHLVLYRRRSADFTYPGPGTAIALPDGLKNLTCLQTLKYIEADEKMVRSLGSLKHMRSLELCGVHESNLIHLPSSISKMTCLLRLGIISQDANVKLDLEPFYPPPIKLQKLALAGMLVRGKLPSWFGSLNNLMQLRLHSSNLMEDSLGLLSSLPRLLHLSLVNAYSGKSLTFANGYFPALKKLTLHDLPNLSHLEFQKGSLVDLHVLMLGRCAQLNKLPQDIRNLVNLETMDLFEMPSEIIQNIQNNEILQEHNHESEHTIVIKNIRWNNGKLLEEKVYINLSLLESRPFIDKEQHNVKSQAEITADLVTFPRDILGDIESLTCGNVTESQSVLF

SEQ ID NO: 203639 - protein, 119 aa, Oryza sativa
  unsure (1)..(119): unsure at all Xaa locations
  Clone ID: PAT_MRT4530_98803C.1.pep
RGKEVAAKAHGDRRREGKFRVRRRGIDPNRTRIHGFPNEISRRFQKRKGRGDLGKHFPSIDFTGEGKARWAPPVSGRTRARQRTARLRTSXGLGRGEREKVLGRLSAQRQKRLLKTFFN

SEQ ID NO: 203640 - protein, 66 aa, Oryza sativa
  unsure (1)..(66): unsure at all Xaa locations
  Clone ID: PAT_MRT4530_98804C.1.pep
LHFXQDEVVGASWNXGGXXVVVNDXPRRPXPQXXPDRXXQXKNPXXXXXXFXFXLAXPXXDSXXVX

SEQ ID NO: 203641 - protein, 79 aa, Oryza sativa
  Clone ID: PAT_MRT4530_98805C.1.pep
MSGKYIVSAILGSFGVAWVCDYYVSEKKLFGGTTPGTITNNEWAEETDKKLQAWPRTAGPPVVMNPISRQNFIVKSRPE

SEQ ID NO: 203642 - protein, 88 aa, Oryza sativa
  Clone ID: PAT_MRT4530_98806C.1.pep
STRSSTRPSTHGGRYDALIPIGMTSLQLLYKQFPMAGVDHLGLLFQLYVDDLPTAVCDSYLEDVFTCETFTTEDVNGCQDEYDSSRQR

SEQ ID NO: 203643 - protein, 150 aa, Oryza sativa
  Clone ID: PAT_MRT4530_98807C.1.pep
MALAETMMAQSDISVHGQRARQRPARRDNDNSGRATQVTSAQVTTVGDWRQEVNAGDGKEAALADIVGGQRGDDKKGDDDSVPQRAVFESFLVKTMSWFSLRSQGKASQRVGMRSPTTDVRTRGSAATGATESTAVAVTLRRLEMKTAEA

SEQ ID NO: 203644 - protein, 172 aa, Oryza sativa
  Clone ID: PAT_MRT4530_98808C.1.pep
MLRAAGKRLLGVGLRPAGGGAGEAAAAAAASAVAVVRRRGYHERVVDHYDNPRNVGTFDKDDPDVGTGLVGAPACGDVMKLQIRVDEESGRIVDACFKTFGCGSAIASSSVASEWVKGKQMEDAASIKNSEIAKHLSLPPVKLHCSMLAEDAIKAAVKDYEAKKAKLDKGNE

SEQ ID NO: 203645 - protein, 430 aa, Oryza sativa
  unsure (1)..(430): unsure at all Xaa locations
  Clone ID: PAT_MRT4530_98809C.1.pep
VYRLSIGAACGMTWPSDKLVIQVLDDSTDPAIREMVEGECGRWAGKGVSIRYENRRNRSGYKAGAMREGLRKAYARECELVAIFDADFQPDADFLLRTVPVLVADPGVALVQARWRFVNADECLLTRIQEMSLDYHFRVEQEVGSACHGFFGFNGTXGVWRVRALEEAGXWKERTTVEDMDLAVRASLRGWRFVYVGHVGVRNELPSTLRAYRYQQHRWSCGPANLFRKIFLEAXTARVSPWKKLHLLYDFFFLRKLVAHLLTFSFYCVVIPACVLAGSDHVRLPKYVALYVPAAITLLNAACTPRSCHLLIFWILFENVMSMHRTKATLIGLLEATRANEWVVTDKRGNANPKHQQPANTTTRPGRKTTTSSSRTSFFNNDVHVAEILLGACLLYCALYDIAYGRDSFYIYLLLQSAAAFIVGFGYVGT

SEQ ID NO: 203646 - protein, 333 aa, Oryza sativa
  Clone ID: PAT_MRT4530_9880C.1.pep
MAAAAAVRHRTVEANGISMHVAEAGPGSGTAPAVLFVHGFPELWYSWRHQMGHLAARGYRCVAPDLRGYGGTTAPPEHTSYTIFHLVGDLVALLDALELPQVFVVGHDWGAIVSWNLCLLRPDRVRALVNLSVAFMPRRPAEKPLDYFRGAYGDDYYVCRFQEPGVEKELASLDLKRFFKLALIVQTTGSSAMSIKKMRANNREVTLPPWLSEEDISYVASVYAKTGFAGGINYYRCFDLNWELMAPWTGAKVLVPTKFIVGDGDLAYHLPGVKSYIHKGRLKKDVPMLEEVVVIKGAGHFIQQERAQEISDHIYNYIKKFNTGVSSPKSSRL

SEQ ID NO: 203647 - protein, 90 aa, Oryza sativa
  Clone ID: PAT_MRT4530_98810C.1.pep
PCIPCRLFHAGNLTNTPWGDKAIGSLKKKIKGAGNQPIESHGSPGGGSQATRACLPACLPPPPTPGRGPELIDPCHVSLDETGTIATRRY

SEQ ID NO: 203648 - protein, 804 aa, Oryza sativa
  Clone ID: PAT_MRT4530_98811C.1.pep
MRDAAALELHAADAAAAARPAMVAASDHYARLLQLCQTAANPGAGRAIHARAVKAGLLASAYLCNNLLSYYGETAGGAGGLRDARRLFDEIPLARRNVFTWNSLLSMFAKSGRLADARGVFAEMPERDAVSWTVMVVGLNRAGRFGEAIKTLLDMTADGFTPTQFTLTNVLSSCAVTQAGAVGRKVHSFVVKLGLGSCVPVANSVLNMYGKCGDSETATTVFERMPVRSVSSWNAMVSLNTHLGRMDLAESLFESMPDRSIVSWNAMIAGYNQNGLDAKALKLFSRMLHESSMAPDEFTITSVLSACANLGNVRIGKQVHAYILRTEMAYNSQVTNALISTYAKSGSVENARRIMDQSMETDLNVISFTALLEGYVKIGDMESAREMFGVMNNRDVVAWTAMIVGYEQNGRNDEAIDLFRSMITCGPEPNSYTLAAVLSVCASLACLDYGKQIHCRAIRSLLEQSSSVSNAIITMYARSGSFPWARRMFDQVCWRKETITWTSMIVALAQHGQGEEAVGLFEEMLRAGVEPDRITYVGVLSACSHAGFVNEGKRYYDQIKNEHQIAPEMSHYACMVDLLARAGLFSEAQEFIRRMPVEPDAIAWGSLLSACRVHKNAELAELAAEKLLSIDPNNSGAYSAIANVYSACGRWSDAARIWKARKEKAVRKETGFSWTHIRSKIHVFGADDVVHPQRDAVYAMAARMWEEIKGAGFVPDLQSVLHDVDDELKEELLSRHSEKLAIAFGLISTPEKTTLRVMKNLRVCNDCHAAIKAISKVTDREIIVRDATRFHHFRDGLCSCKDYW

SEQ ID NO: 203649 - protein, 53 aa, Oryza sativa
  Clone ID: PAT_MRT4530_98812C.1.pep
YRWTWHNHFIISIHNCHGCPNALCMYQFSTRDSLSIPHAEQRHTDISGLISLM

SEQ ID NO: 203650 - protein, 250 aa, Oryza sativa
  Clone ID: PAT_MRT4530_98813C.1.pep
METGSSKEDHPTAEDHPSDNQPATDNVEPSNEPPTGNQSAETGVGANQEPPTGNQSGTEPNKDIPERIHLRNEAKTATLENLVPHLGTLETTRNQLHKAKELARKTEHDLRDRIAELQESNFELSGSSKVQAAKISELEKRIQTLENDKAKLAKQRDSALKDVEDRKIKSQAQFDVLVNKIKRLEGARDEVANAATPLVQAMFFNNNGPSTFDASEIFDKLRIAPDTYFKNIKEAGSMGASLALAMTKSL

SEQ ID NO: 203651 - protein, 681 aa, Oryza sativa
  unsure (1)..(681): unsure at all Xaa locations
  Clone ID: PAT_MRT4530_98814C.1.pep
MAEERESFESQWASSDVTEENLKEMVAHGVLPAKEIIGWRPTVGEAFPTPDTHEVVFIXDTWNSLPMGDEVAQAXIKLKEQGLQGEQITLHFIKSWLAPIKERSRTAFEFDGKHDPNHEDPDSLDFKVMKERMYKIFSNAIVVRYSHLLPVVPYNAFNPPPPEFALMKSDPLIAQRRSPRRQTGQGSGGPKIRSETQPNTSNLAGQSDSRKRKLVLSDDEGDDAGKLGDKGATGKLPKQANPKKKTSSRPMPKIRKSSRKPSDIDPFGKDSDPTNMETGSSKETGPTAKNHPSDNQPATDNVEPSNEPPTGNQSAEAGTRVNQEPPTGNQSDTGPSQEIPKVEAQADNPPGKDASNDPGSRSPVKAQESTRPRPEIITGPMIGDEEEILRIRAAEDSRPPILGIVINKQKEDEEVCLLKKALSQATRIVNRIHLRNEAKTATLEKLVPHLGTLEATRDQLHEAKELARKTEHDLRDRIAELQESNFEPSGSSKGNIVQAAKISQLEKQIQTLENDKAELARQRDSALKDVEDRKIKSQAQFDVLVGKIKRLEGARDEVANAATLLVQAMFFNNNGPSIFDASEIFDKLRVAPDTYFKNIKEAGSMGASLALAMTKSPYPKIDIDAIDGFADGTSEEAALDLINDAQKAADEIAVNVVERFQDTDLRPTGPDNSDDEKTDTY

SEQ ID NO: 203652 - protein, 47 aa, Oryza sativa
  Clone ID: PAT_MRT4530_98815C.1.pep
LRLPIHLFVAAPIIRSDHQLYEYIHSLYAKFFLNKHPYANVLIKKKS

SEQ ID NO: 203653 - protein, 557 aa, Oryza sativa
  Clone ID: PAT_MRT4530_98816C.1.pep
MAEERESFESQRAPSDVTEENLKEMVAHGVLPAKEIFGWRPAFGEAFPTPDTHEVVGKQITRHFIMTRQAPIKERSRTAFEFDGKHDPNRENPESLEFKIMQERMYKIFSNAIVVSYSHLLPVVPYNAFNPPPPEFALMKSDPPIAQRRSPRRQTGQASRGPKIRSDTQPNTSKSASQSDSRKRKLALSDDEVDDAGKSSNKEVTGKQPRQTNPKKKTSSRPMPKIRKSSRKPSDIDPSGKDFELTDMETGPSKETGPAQRIAREPPTGNQSGTEPNRDIPEVEALTNNPPRKDASADPGSSSPVKVQEPARPRPEIITGPMIGDEEENLRIQSAEDSRPPILIKWWDDDMQPQGIVINKQKEDEERIHLRNEAKTATLERLVPHLGTLEATRNQLHEARELARKPEHDLRDRIAELQDSNFELSGSSKVQAAKISELEKRIQALENDKAELVRQRDSALKDVEGARDEVANAATPLVQAMFFNNNGPSTFDASEIFDKLRIAPDTYFKNIKEAGSMGASLALAMTKSLYPKIDIDTIDGFADGMSEEATLDLINDA

SEQ ID NO: 203654 - protein, 569 aa, Oryza sativa
  Clone ID: PAT_MRT4530_98817C.1.pep
MRSWGSWISTEGNSEPKIFLYALRTSNKGWHANWFYVQNPEPALPEYSCLPPVYHDTWNSLPMGEEAAQAFALMDHMLKLKEQGLQGEQITQHFIKSRLAPIKERSRTAFEFDGKHDPNREDPDSLDFKVMKEKMYKIFSNAIVVSYSHLLPVVPYNAFNPPPPEFALMKSDPPIAQRRSPSRQTGQANGGPKIRSDTQPNTSKSTSQSDSRKRKLVLSDDEGDDAEKTSNKEPTGKQPRQTNPKPSDIDPSGKDSEPTDMETGPSKETGPTTEDRPSNNQPATDNVETSDKPPTRNQSTEAGIGANQEPPTGNQSGTEQNNDIPEVETQADSPPKASAGANSGTNSPVRVQGPAHPRPEIITGPMVGDEEEVLRLQSAEDSRPPILVKWWDDKMQPQGIPLCSNTDKFASEWIVKRSNTVQAAKISELKKRIQALEKDKAELARERDSALKDVEDRKIKSQAQFDVLVNKIERLEGARDEVANGATPLVQAMFFNNNGPSTFDASEIFDKLRIAPDTYFKNIKEAGSMGASLALAMTKSLYPKIDIDAIDGFADGTSEEAALDLINDA

SEQ ID NO: 203655 - protein, 535 aa, Oryza sativa
  Clone ID: PAT_MRT4530_98818C.1.pep
MVAHDVLSAKEIIGWRPAFGEAFPTPDTHEVVVFSHFFYGGFSLPTSRFFRRILKFYGISLHHLNPNSIVRIANFIHACEAFLGIRPHFALFCRIFFLKLQLNKSKPCVVGGAGFQLRGTLSQKYFSMPFKTSNKGWHANWFYVQNPEPALPEYSCLPPVYQDTWNSLSIGEEAAQALDLMDHMLKLKEQGLQGEQITRHFIKSRLAPIKERSRTAFEFYGKHDPNHEDPDSLDFKVMKERMYKIFSNTIVVSYSHLLPVVPYNAFNPPPPEFALMKSDPPIAQRRSPHQQTGQGSGGPKIRKTSDIDPSRKDSDPTNMETGSSKETEPTTKDHPSDNQPATDNVEPSNEPPTGNQSAEAGIGVNQEPPTGNQLGTEPNQEIPEVETQANYPLGKDASNDPGSSSPAKAQEPTRPRPEIITDRKIKSQAQFDVLVNKIKRLEGARDEVANAATPLVQAMFFNNNGPSTFDASEIFDKLRVAPDTYFKNIKEAGSMGASLALAMTKSLYPKIDIDAIDGFADGTSEEAALDLINDA

SEQ ID NO: 203656 - protein, 67 aa, Oryza sativa
  Clone ID: PAT_MRT4530_98819C.1.pep
MRRSHGGGGRKRSVPSSSHPEKKAIDRIKREDAGRRAGRVSLVQPLAAFPATDGGGGGGLARLLRWW

SEQ ID NO: 203657 - protein, 98 aa, Oryza sativa
  Clone ID: PAT_MRT4530_9881C.1.pep
MALATFVFSVAGDGDEGDGALSLVGSGVRSGDGRRGWKSGVEKASSALDTSRPRVEHDQSSVGSDSLRSLSLSLFSCRLREVNKCKDKPINPCGFYWR

SEQ ID NO: 203658 - protein, 579 aa, Oryza sativa
  Clone ID: PAT_MRT4530_98820C.1.pep
MVAHGVLPAKEIIGWRPACGEAFSTRDTHEVVDTWNSLPMGEEAAQVLALMDHMLKLKEQGLHGEQITRHFIKSWLAPIKERSCTAFEFDGKHDPNREDPDSLYFKVMKERMYKIFSNAIVVSYSHSLPVVPYNAFNPPPPEFALMKSDPPIAQRRSPHRQTGQASGGPKIRSDTQPNTSKSTSQSDSRKRKLVLSDDEGDDAEKTGNKEVTGKQPRQTNPKKKTSSRPMPKIRKSSRKLSDIDPSGKDAEPTNMKTGPSKGTGPTAENRPSDNQPATDNVEINNEPPTGNQSAEARVNADQEPPTGNQSGTKPNKDIPEVQAQADSPPKKDASADPGSNSPVKVQGPACPRLEIITGPMIGDEEEILRIQSAEDSRPSILVKWWDDDMQPQGIVINKQKEDEEVCLLKKAQGQATRLVNRIHLRNKAKTATFEKLVPHLGTLEATRNQLHEAKELTRKTEHDLRDRIAELQDSNFELSGSSKDRKIKSQAQFDVLVNKIKKLEGARDGVANAATPLVQAMFFNSNGPKRDKRRGALDLINDAQKAADKMAVDVVKRFQDNDLRPTGSNNSDDEKTDTD
